United States Patent Application Publication US 2023/0026259 A1 - sequence listing, part 91

SEQ ID NO: 200153 - DNA, 623 bp, Homo sapiens
  Payload ID: 19485
  Gene Name: wingless-type MMTV integration site family, member 10B
  ENST ID: ENST00000413630
  CDS Start-End: 228-623
tctttaagacctccaagcctcagggactctgggaatcaaggggtgtttcttcttgttttgtttgaggaggaatgagaagggtcagtagggtggcaccggtgggttaggagcccgaagaagggcgtcacttggttccccaagcgagccgccctattcctgaacccgcatcaagtctcccgtcccgcaggtcctgatcgatctgcccaccggagcctccgggcttcgacatgctggaggagccccggccgcggcctccgccctcgggcctcgcgggtctcctgttcctggcgttgtgcagtcgggctctaagcaatgagattctgggcctgaagttgcctggcgagccgccgctgacggccaacaccgtgtgcttgacgctgtccggcctgagcaagcggcagctaggcctgtgcctgcgcaaccccgacgtgacggcgtccgcgcttcagggtctgcacatcgcggtccacgagtgtcagcaccagctgcgcgaccagcgctggaactgctccgcgcttgagggcggcggccgcctgccgcaccacagcgccatcctcaagcgcgggcctggtgtaggggaaggcttggacacccaaatggtttccgagaaagtgctttttcct

SEQ ID NO: 200154 - DNA, 559 bp, Homo sapiens
  Payload ID: 19485
  Gene Name: wingless-type MMTV integration site family, member 10B
  ENST ID: ENST00000420388
  CDS Start-End: 254-559
caagtgtttgtgagtctgtgtgtctgagtttgcaagtgagtgtgtgtctgtgtgccgggcgttgtgtctgattgggcaaggttccaggggtgctcgcttgagtcctgagctgggacaacgccttgactcttcttctttaagacctccaagcctcagggactctgggaatcaaggggtgtttcttcttgttttgtttgaggaggaatgagaagggtcctgatcgatctgcccaccggagcctccgggcttcgacatgctggaggagccccggccgcggcctccgccctcgggcctcgcgggtctcctgttcctggcgttgtgcagtcgggctctaagcaatgagattctgggcctgaagttgcctggcgagccgccgctgacggccaacaccgtgtgcttgacgctgtccggcctgagcaagcggcagctaggcctgtgcctgcgcaaccccgacgtgacggcgtccgcgcttcagggtctgcacatcgcggtccacgagtgtcagcaccagctgcgcgaccagcgctggaactgctccgcgcttgagggcggcggccgc

SEQ ID NO: 200155 - DNA, 1930 bp, Homo sapiens
  Payload ID: 19486
  Gene Name: wingless-type MMTV integration site family, member 11
  Uniprot ID: O96014
  ENST ID: ENST00000322563
  CDS Start-End: 126-1190
cttaacccgccgcctccgctctccccggctgcaggcggcgtgcaggaccagcggcggccgtgcaggcggaggacttcggcgcggctcctcctgggtgtgaccccgggcgcgcccgccgcgcgacgatgagggcgcggccgcaggtctgcgaggcgctgctcttcgccctggcgctccagaccggcgtgtgctatggcatcaagtggctggcgctgtccaagacaccatcggccctggcactgaaccagacgcaacactgcaagcagctggagggtctggtgtctgcacaggtgcagctgtgccgcagcaacctggagctcatgcacacggtggtgcacgccgcccgcgaggtcatgaaggcctgtcgccgggcctttgccgacatgcgctggaactgctcctccattgagctcgcccccaactatttgcttgacctggagagagggacccgggagtcggccttcgtgtatgcgctgtcggccgccgccatcagccacgccatcgcccgggcctgcacctccggcgacctgcccggctgctcctgcggccccgtcccaggtgagccacccgggcccgggaaccgctggggaggatgtgcggacaacctcagctacgggctcctcatgggggccaagttttccgatgctcctatgaaggtgaaaaaaacaggatcccaagccaataaactgatgcgtctacacaacagtgaagtggggagacaggctctgcgcgcctctctggaaatgaagtgtaagtgccatggggtgtctggctcctgctccatccgcacctgctggaaggggctgcaggagctgcaggatgtggctgctgacctcaagacccgatacctgtcggccaccaaggtagtgcaccgacccatgggcacccgcaagcacctggtgcccaaggacctggatatccggcctgtgaaggactcggaactcgtctatctgcagagctcacctgacttctgcatgaagaatgagaaggtgggctcccacgggacacaagacaggcagtgcaacaagacatccaacggaagcgacagctgcgaccttatgtgctgcgggcgtggctacaacccctacacagaccgcgtggtcgagcggtgccactgtaagtaccactggtgctgctacgtcacctgccgcaggtgtgagcgtaccgtggagcgctatgtctgcaagtgaggccctgccctccgccccacgcaggagcgaggactctgctcaaggaccctcagcaactggggccaggggcctggagacactccatggagctctgcttgtgaattccagatgccaggcatgggaggcggcttgtgctttgccttcacttggaagccaccaggaacagaaggtctggccaccctggaaggagggcaggacatcaaaggaaaccgacaagattaaaaataacttggcagcctgaggctctggagtgcccacaggctggtgtaaggagcggggcttgggatcggtgagactgatacagacttgacctttcagggccacagagaccagcctccgggaaggggtctgcccgccttcttcagaatgttctgcgggaccccctggcccaccctggggtctgagcctgctgggcccaccacatggaatcactagcttgggttgtaaatgttttcttttgttttttgctttttcttcctttgggatgtggaagctacagaaatatttataaaacatagctttttctttggggtggcacttctcaattcctctttatatattttatatatataaatatatatgtatatatataatgatctctattttaaaactagctttttaagcagctgtatgaaataaatgctgagtgagccccagcccgcccctgcagttcccggcctcgtcaagtgaactcggcagaccctggggctggcagagggagctctccagtttccaggcaa

SEQ ID NO: 200156 - DNA, 453 bp, Homo sapiens
  Payload ID: 19486
  Gene Name: wingless-type MMTV integration site family, member 11
  ENST ID: ENST00000529461
  CDS Start-End: 438-453
agctcgggcgagcggcgagcacaggccacgggagctgagcgcagcagagagcagccggagtccgcgcctgactccgcgcgggtcctgagccggccgcagcttgccaggatccccggcgtccttctcgcgccgcttcacgaagagggcgccttcgccgctcgcccagccggagtgcgcacgggcccgctggaaaccgcactcgccgctccctgggcaggccggggcacccgggcacgcagggcgcgcctggcgagcgccccgggagggataagccccagctccgggtcctcgactctgctgcctcgcctggactcctgattcctcattcctctcctttccgtcccaggcggcgtgcaggaccagcggcggccgtgcaggcggaggacttcggcgcggctcctcctgggtgtgaccccgggcgcgcccgccgcgcgacgatgagggcgcggccgc

SEQ ID NO: 200157 - DNA, 789 bp, Homo sapiens
  Payload ID: 19486
  Gene Name: wingless-type MMTV integration site family, member 11
  ENST ID: ENST00000621122
  CDS Start-End: 1-789
atgagggcgcggccgcaggtctgcgaggcgctgctcttcgccctggcgctccagaccggcgtgtgctatggcatcaagtggctggcgctgtccaagacaccatcggccctggcactgaaccagacgcaacactgcaagcagctggagggtctggtgtctgcacaggtgcagctgtgccgcagcaacctggagctcatgcacacggtggtgcacgccgcccgcgaggtcatgaaggcctgtcgccgggcctttgccgacatgcgctggaactgctcctccattgagctcgcccccaactatttgcttgacctggagagagggacccgggagtcggccttcgtgtatgcgctgtcggccgccgccatcagccacgccatcgcccgggcctgcacctccggcgacctgcaggagctgcaggatgtggctgctgacctcaagacccgatacctgtcggccaccaaggtagtgcaccgacccatgggcacccgcaagcacctggtgcccaaggacctggatatccggcctgtgaaggactcggaactcgtctatctgcagagctcacctgacttctgcatgaagaatgagaaggtgggctcccacgggacacaagacaggcagtgcaacaagacatccaacggaagcgacagctgcgaccttatgtgctgcgggcgtggctacaacccctacacagaccgcgtggtcgagcggtgccactgtaagtaccactggtgctgctacgtcacctgccgcaggtgtgagcgtaccgtggagcgctatgtctgcaagtga

SEQ ID NO: 200158 - DNA, 3147 bp, Homo sapiens
  Payload ID: 19487
  Gene Name: wingless-type MMTV integration site family, member 16
  Uniprot ID: Q9UBV4
  ENST ID: ENST00000222462
  CDS Start-End: 291-1388
agaagtttctcacctaggaatgcgaggggcgctcccgcatctcctgcacatctccacccctgcgcaggaggagatccccaggctgctctctccatctctcctacagctccctgcaaacgagggggaagctgctgagagtccctatcactgctggccttttaatgttgtatgcaaggaggaagagggcgagggataacttggtgctggacaactgacctgcggcccgaagggcctctggggagggggtgcaaaagaggagcggctgggctgggggactccatgcgggggcgatggacagggcggcgctcctgggactggcccgcttgtgcgcgctgtgggcagccctgctcgtgctgttcccctacggagcccaaggaaactggatgtggttgggcattgcctccttcggggttccagagaagctgggctgcgccaatttgccgctgaacagccgccagaaggagctgtgcaagaggaaaccgtacctgctgccgagcatccgagagggcgcccggctgggcattcaggagtgcgggagccagttcagacacgagagatggaactgcatgatcaccgccgccgccactaccgccccgatgggcgccagccccctctttggctacgagctgagcagcggcaccaaagagacagcatttatttatgctgtgatggctgcaggcctggtgcattctgtgaccaggtcatgcagtgcaggcaacatgacagagtgttcctgtgacaccaccttgcagaacggcggctcagcaagtgaaggctggcactgggggggctgctccgatgatgtccagtatggcatgtggttcagcagaaagttcctagatttccccatcggaaacaccacgggcaaagaaaacaaagtactattagcaatgaacctacataacaatgaagctggaaggcaggctgtcgccaagttgatgtcagtagactgccgctgccacggagtttccggctcctgtgctgtgaaaacatgctggaaaaccatgtcttcttttgaaaagattggccatttgttgaaggataaatatgaaaacagtatccagatatcagacaaaacaaagaggaaaatgcgcaggagagaaaaagatcagaggaaaataccaatccataaggatgatctgctctatgttaataagtctcccaactactgtgtagaagataagaaactgggaatcccagggacacaaggcagagaatgcaaccgtacatcagagggtgcagatggctgcaacctcctctgctgtggccgaggttacaacacccatgtggtcaggcacgtggagaggtgtgagtgtaagttcatctggtgctgctatgtccgttgcaggaggtgtgaaagcatgactgatgtccacacttgcaagtaaccactccatccagccttgggcaagatgcctcagcaatatacaatggcattgcaaccagagaggtgcccatccctgtgcagcgctagtaaagttgactcttgcagtggaatccctagaaccttggacctgagagtttcccttacctgatcgacatattttcctttatctgatcaacccatcaatcatgtggatttcttgggattctaatgttgaaaaggtttatattcaccttttgatgatttggggaatatatattgacatacaaggaagataatctgtttcctaagcaagaaataacaggaaagatcccttatgccaggaggcctgccatactcaggataagatccttgaatatggaacttagttacaggactcaataatggtgggtgaacattagtcatttttaaaagacacctcttatagcaataaggagacattaacatgaatctcatttattctctcagtattttaactgaagaaattatactgtttgtgtgtggatagaagatgttgaaaagttaacataagcattgggtgctgacttaccctttcatgtacttccaaagaaaggtaatcaaaaagaatcttcttaagtgatataatatccctaaaaaaatgatcattacagatgtttagtgacaaagaatcaatatgtaaaaagtataatgaatgatttagattttaagtgccttttcactgggagaatctggaaaaacctccataaggtatatagcaatctttgatctttagattcatacttttatcacagatcagtttcaactgttaaaaacccacctctgagatactggggggaggatcctgaaacatgcgggaaaaggagaggtaaacagtggaggtaaaaatataatttcatacattgtaaagaaaagcaccctttaaatgtgtaaagacagtgttttgtaaagaattttgtttaaaaagtttctattttgtaaatacagtacttaagttatatgatttatattaaaacatttattgacaaagcctaagagctaaggcagtaaaattatctcataaataatattagcttattttttttcatactattaatgctatttttttggacatcgaagagaatttaacttagcagttagttatatggatgtgtatttcttgctaaaatgacagttttatatgttatagattaaaatatgttgcaaaatatcaaaaatttgtgttatttcagcagtaagattaattgaattctcttttcacattagttatgcttaactcataaggttattataataaattatattagtaaaagtcttaactggaaaaaagaatctaaatcagaatagtgatcaatttgtggatttgatatcctggatatttattatattttatgtaatgctgcatttctatttgaatgttaagtggtctttcttgtttttaatattcatgcatgtatattcatcatattttacaaggttcctggtaaaaattacagggctctatttaaggatgtattttaatgtaaatgcttatgttttttatgaattgttaaatatttcagtattatatagaaaaaaatagatttttaaaattcagaatggacaaagagaatattcattttcttattaataagataaagaaatgtttccctgccccacagtcttcattctatttctctttaattttattcactgaggcagagaaacaatttttgaaaaagagcaaacccatggaaaatgtctcagatctaatattaaaatcaagactaagcatttaactgtga

SEQ ID NO: 200159 - DNA, 1230 bp, Homo sapiens
  Payload ID: 19487
  Gene Name: wingless-type MMTV integration site family, member 16
  ENST ID: ENST00000361301
  CDS Start-End: 50-1117
agcctgcaaaaaccacagagggcaaagccagaaagatggaaaggcacccatgcagctcaccacttgcctcagggagaccctcttcacaggggcttctcaaaagacctccctatggtggttgggcattgcctccttcggggttccagagaagctgggctgcgccaatttgccgctgaacagccgccagaaggagctgtgcaagaggaaaccgtacctgctgccgagcatccgagagggcgcccggctgggcattcaggagtgcgggagccagttcagacacgagagatggaactgcatgatcaccgccgccgccactaccgccccgatgggcgccagccccctctttggctacgagctgagcagcggcaccaaagagacagcatttatttatgctgtgatggctgcaggcctggtgcattctgtgaccaggtcatgcagtgcaggcaacatgacagagtgttcctgtgacaccaccttgcagaacggcggctcagcaagtgaaggctggcactgggggggctgctccgatgatgtccagtatggcatgtggttcagcagaaagttcctagatttccccatcggaaacaccacgggcaaagaaaacaaagtactattagcaatgaacctacataacaatgaagctggaaggcaggctgtcgccaagttgatgtcagtagactgccgctgccacggagtttccggctcctgtgctgtgaaaacatgctggaaaaccatgtcttcttttgaaaagattggccatttgttgaaggataaatatgaaaacagtatccagatatcagacaaaacaaagaggaaaatgcgcaggagagaaaaagatcagaggaaaataccaatccataaggatgatctgctctatgttaataagtctcccaactactgtgtagaagataagaaactgggaatcccagggacacaaggcagagaatgcaaccgtacatcagagggtgcagatggctgcaacctcctctgctgtggccgaggttacaacacccatgtggtcaggcacgtggagaggtgtgagtgtaagttcatctggtgctgctatgtccgttgcaggaggtgtgaaagcatgactgatgtccacacttgcaagtaaccactccatccagccttgggcaagatgcctcagcaatatacaatggcattgcaaccagagaggtgcccatccctgtgcagcgctagtaaagttgactcttgcagtggaatccc

SEQ ID NO: 200160 - DNA, 2819 bp, Homo sapiens
  Payload ID: 19488
  Gene Name: wingless-type MMTV integration site family, member 2B
  ENST ID: ENST00000256640
  CDS Start-End: 1146-2045
aacagagaacagaaaccacctcacagcattgttgtgagccttaaatgagcaaatttaagacttaaaactggtcattgacataagccttcaaaaagtgatagctattagtattatgtagctcctagaacagtggctgacatatagtagatgctcataactgttaaaaaggggccaggaggattctatctatttatgcattcatccatttaattatgcttcagaaatgtcttgctctttttatactgtcgatgctgtaaaatacaaaacccataataagccaagtaagcaagcaagagccagcactctgggaggaaaacaaagagattttcttcattgaaatatccatgccacagttcctactaggtgccaggcactgtgataggcactaggatagagaaataagttacaggcctttagggattttaggtgctggtgggagagacaaacatgaaacgcagtgttatgtggattataataaatagagcaacaagctgtggctgcacagttaacccccagtggagtcaggaaaggtctcacagaggaagggacacttgtcttggtcttgaaggagaggtagatgctcccaggtgaagaagagaatgaagggcattccaaggaatgaggatagcatatacagtgcaccaagttgccagcaggcaccgtgtttctggtgagaagcctgggatggaagtctagatcaggagaagtaagcaggaactcgacaggaaagggcatggtctgcccaggcaaagaatttgtgcccttatttggtgggccactggaagcctgaattgaggagcatcatgagcacaggcacatttaccaagaagctaatgaggtttaagcttcgaggcccatcactggcatggccccttccaaaccctgaagagcccaagcaatgtggttgtaaaatttgcaaaataagattaaatcttaactgcaatctgttaacactgctgtctcctttcactctttctcctatatcacactttcccacatgttggatggccttggagtggtagccataagcatttttggaattcaactaaaagtacattggggcactgggggcacgagtgatctgtgacaatatccctggtttggtgagccggcagcggcagctgtgccagcgttacccagacatcatgcgttcagtgggcgagggtgcccgagaatggatccgagagtgtcagcaccaattccgccaccaccgctggaactgtaccaccctggaccgggaccacaccgtctttggccgtgtcatgctcagaagtagccgagaggcagcttttgtatatgccatctcatcagcaggggtagtccacgctattactcgcgcctgtagccagggtgaactgagtgtgtgcagctgtgacccctacacccgtggccgacaccatgaccagcgtggggactttgactggggtggctgcagtgacaacatccactacggtgtccgttttgccaaggccttcgtggatgccaaggagaagaggcttaaggatgcccgggccctcatgaacttacataataaccgctgtggtcgcacggctgtgcggcggtttctgaagctggagtgtaagtgccatggcgtgagtggttcctgtactctgcgcacctgctggcgtgcactctcagatttccgccgcacaggtgattacctgcggcgacgctatgatggggctgtgcaggtgatggccacccaagatggtgccaacttcaccgcagcccgccaaggctatcgccgtgccacccggactgatcttgtctactttgacaactctccagattactgtgtcttggacaaggctgcaggttccctaggcactgcaggccgtgtctgcagcaagacatcaaaaggaacagacggttgtgaaatcatgtgctgtggccgagggtacgacacaactcgagtcacccgtgttacccagtgtgagtgcaaattccactggtgctgtgctgtacggtgcaaggaatgcagaaatactgtggacgtccatacttgcaaagcccccaagaaggcagagtggctggaccaaacctgaacacacagatacctcactcatccctccaattcaagcctctcaactcaaaagcacaagatccttgcatgcacaccttcctccaccctccaccctgggctgctaccgcttctatttaaggatgtagagagtaatccatagggaccatggtgtcctggctggttccttagccctgggaaggagttgtcaggggatataagaaactgagcaagctccctgatttcccgctctggagatttgaagggagagtagaagagatagggggtctttagagtgaaatgagttgcactaaagtacgtagttgaggctccttttttctttcctttgcaccagcttcccgatacttcttggtgtgcaagaggaagggtacctgtagagagcttctttttgtttctacctggccaaagttagatgggacaaagatgaatggcatgtcccttctctgaagtccgtttgagcagaactacctggtaccccgaaagaaaatcttaggctaccacattctattattgagagcctgagatgttagccatagtggacaaggttccattcacatgctcatatgtttataaactgtgttttgtagaagaaaaagaatcataacaatacaaacacacattcattctctctttttctctctaccattctcaacctgtattggacagcactgcctcttttgcttacttgctgcctgttcaaactgaggtggaatgcagtggttcccatgcttaacaaatcattaaaacaccctagaacactcctaggatagattaatgt

SEQ ID NO: 200161 - DNA, 3818 bp, Homo sapiens
  Payload ID: 19488
  Gene Name: wingless-type MMTV integration site family, member 2B
  Uniprot ID: Q93097
  ENST ID: ENST00000369684
  CDS Start-End: 486-1661
gagcaggtgggggtgcagcgcggtggcgcgcgggagccccgaggggcggaggcggctgctacacctagggcgtcgcggagcgccccgggcttggcgcgggcggagccgccctaagggccgcgcgtgtccccggcctcggccccgccccgtcccgtccaatgagagcccgcggccgaaggggctgtccgcacactaggcccgcagctcccttcagcgccgcagaccccctgacaccgcacccggtcctcaggcagcgcgccccagaccccgggttcggcacgccgtcgtcggcttccggacatcgcaacttgcgcccctctcggggatcctcctcccgggctctggaccccaggtgatcctaggtccccagccgccggcgaacaccatggccccccaggggggtgaggtaggagcagcctgagtacccccagaaggtgccccgtccacgcccctccgggctgcgcggcgggagtcttcggggagctatgctgagaccgggtggtgcggaggaagctgcgcagctcccgcttcggcgcgccagcgccccggtccctgtgccgtcgcccgcggcccccgacggctcccgggcttcggcccgcctaggtcttgcctgccttctgctcctgctgctgctgacgctgccggcccgcgtagacacgtcctggtggtacattggggcactgggggcacgagtgatctgtgacaatatccctggtttggtgagccggcagcggcagctgtgccagcgttacccagacatcatgcgttcagtgggcgagggtgcccgagaatggatccgagagtgtcagcaccaattccgccaccaccgctggaactgtaccaccctggaccgggaccacaccgtctttggccgtgtcatgctcagaagtagccgagaggcagcttttgtatatgccatctcatcagcaggggtagtccacgctattactcgcgcctgtagccagggtgaactgagtgtgtgcagctgtgacccctacacccgtggccgacaccatgaccagcgtggggactttgactggggtggctgcagtgacaacatccactacggtgtccgttttgccaaggccttcgtggatgccaaggagaagaggcttaaggatgcccgggccctcatgaacttacataataaccgctgtggtcgcacggctgtgcggcggtttctgaagctggagtgtaagtgccatggcgtgagtggttcctgtactctgcgcacctgctggcgtgcactctcagatttccgccgcacaggtgattacctgcggcgacgctatgatggggctgtgcaggtgatggccacccaagatggtgccaacttcaccgcagcccgccaaggctatcgccgtgccacccggactgatcttgtctactttgacaactctccagattactgtgtcttggacaaggctgcaggttccctaggcactgcaggccgtgtctgcagcaagacatcaaaaggaacagacggttgtgaaatcatgtgctgtggccgagggtacgacacaactcgagtcacccgtgttacccagtgtgagtgcaaattccactggtgctgtgctgtacggtgcaaggaatgcagaaatactgtggacgtccatacttgcaaagcccccaagaaggcagagtggctggaccaaacctgaacacacagatacctcactcatccctccaattcaagcctctcaactcaaaagcacaagatccttgcatgcacaccttcctccaccctccaccctgggctgctaccgcttctatttaaggatgtagagagtaatccatagggaccatggtgtcctggctggttccttagccctgggaaggagttgtcaggggatataagaaactgagcaagctccctgatttcccgctctggagatttgaagggagagtagaagagatagggggtctttagagtgaaatgagttgcactaaagtacgtagttgaggctccttttttctttcctttgcaccagcttcccgatacttcttggtgtgcaagaggaagggtacctgtagagagcttctttttgtttctacctggccaaagttagatgggacaaagatgaatggcatgtcccttctctgaagtccgtttgagcagaactacctggtaccccgaaagaaaatcttaggctaccacattctattattgagagcctgagatgttagccatagtggacaaggttccattcacatgctcatatgtttataaactgtgttttgtagaagaaaaagaatcataacaatacaaacacacattcattctctctttttctctctaccattctcaacctgtattggacagcactgcctcttttgcttacttgctgcctgttcaaactgaggtggaatgcagtggttcccatgcttaacaaatcattaaaacaccctagaacactcctaggatagattaatgtagtaagtctggctaggccttgtgttgccttttttttttttttttttttcttttcttttcttctcttcccatgcactattctggaggtttgccaggtttggggagacatggagtaaaagaaagataggcaactcatggatggtgggagagcaggtaagcaggtctgatctcaagggcccacatgaggcatcagtatatattaggcaggtagggatctctggctttggtaattctttatgagaggatcctagcctttgaagctgggagcaggagtcagtggctacagtgggaaggagtactgcaggttggggccaaagtgatacacagcttagaaggcagccttcctccacttactcaacaaatctttatttagtgactctccaagtcctagtgattattattattgttcactccacatttggcttaatgggtaatgctattacccattgcctaactaggtttgcagtagtggaatctccagagatagcaggcttagtaagctggaggtaggacatgaagtcccccaaaacttgatgtcctatttttatgtgagttggacagtggttatcttttgcctgttgatatcttaaagcagcagagtggtatagaaatttgcggttatgacagacccgggttaaaaatcacagctgtgccatttgctttgatattttgagcaaggtagctaaattttctgagcttctattttctcatctgtaaaatgaggatacgtacctgttcttttttttctttctttttatttcttttagagatagggtctcgctttgttgcccaggctggagtgcactggcatgatcatggctcactgcagcctcaaattcccaggctcaagcaatcctcccacctcagcctccccattagctgggactacagggccatgccatcatgcccagctaatttaaacatagttttcagagatggagctcactatgttgcccaggctggtcttgaattcttggtctcaagcaatcctcccactgcagccttccaaagtgctgggcgtacaagcgcaagccactgtgcccagctgtcagacgctgagttttaattatgcaccaaactccagcccgcagatcctcttcaccaaagcccctggctggtctagcccatcatgacttctctaggaacagtccttctttaggactataaagtattaacaaaagtctgtagattaaggagcctgcataaagaattctggatacaggcccctgtctttccaaagttcctctccaatatcccttggggtcctcatgtttttgaagcagcttcactctgcacaggcagcaggaggttgggggagccatagctctgggccacgggggcagatttatttggatgataggactaatatttgtgtaacctgctg

SEQ ID NO: 200162 - DNA, 10879 bp, Homo sapiens
  Payload ID: 19488
  Gene Name: wingless-type MMTV integration site family, member 2B
  Uniprot ID: Q93097
  ENST ID: ENST00000369686
  CDS Start-End: 105-1223
aagcaatgtggttgtaaaatttgcaaaataagattaaatcttaactgcaatctgttaacactgctgtctcctttcactctttctcctatatcacactttcccacatgttggatggccttggagtggtagccataagcatttttggaattcaactaaaaactgaaggatccttgaggacggcagtacctggcatacctacacagtcagcgttcaacaagtgtttgcaaaggtacattggggcactgggggcacgagtgatctgtgacaatatccctggtttggtgagccggcagcggcagctgtgccagcgttacccagacatcatgcgttcagtgggcgagggtgcccgagaatggatccgagagtgtcagcaccaattccgccaccaccgctggaactgtaccaccctggaccgggaccacaccgtctttggccgtgtcatgctcagaagtagccgagaggcagcttttgtatatgccatctcatcagcaggggtagtccacgctattactcgcgcctgtagccagggtgaactgagtgtgtgcagctgtgacccctacacccgtggccgacaccatgaccagcgtggggactttgactggggtggctgcagtgacaacatccactacggtgtccgttttgccaaggccttcgtggatgccaaggagaagaggcttaaggatgcccgggccctcatgaacttacataataaccgctgtggtcgcacggctgtgcggcggtttctgaagctggagtgtaagtgccatggcgtgagtggttcctgtactctgcgcacctgctggcgtgcactctcagatttccgccgcacaggtgattacctgcggcgacgctatgatggggctgtgcaggtgatggccacccaagatggtgccaacttcaccgcagcccgccaaggctatcgccgtgccacccggactgatcttgtctactttgacaactctccagattactgtgtcttggacaaggctgcaggttccctaggcactgcaggccgtgtctgcagcaagacatcaaaaggaacagacggttgtgaaatcatgtgctgtggccgagggtacgacacaactcgagtcacccgtgttacccagtgtgagtgcaaattccactggtgctgtgctgtacggtgcaaggaatgcagaaatactgtggacgtccatacttgcaaagcccccaagaaggcagagtggctggaccaaacctgaacacacagatacctcactcatccctccaattcaagcctctcaactcaaaagcacaagatccttgcatgcacaccttcctccaccctccaccctgggctgctaccgcttctatttaaggatgtagagagtaatccatagggaccatggtgtcctggctggttccttagccctgggaaggagttgtcaggggatataagaaactgagcaagctccctgatttcccgctctggagatttgaagggagagtagaagagatagggggtctttagagtgaaatgagttgcactaaagtacgtagttgaggctccttttttctttcctttgcaccagcttcccgatacttcttggtgtgcaagaggaagggtacctgtagagagcttctttttgtttctacctggccaaagttagatgggacaaagatgaatggcatgtcccttctctgaagtccgtttgagcagaactacctggtaccccgaaagaaaatcttaggctaccacattctattattgagagcctgagatgttagccatagtggacaaggttccattcacatgctcatatgtttataaactgtgttttgtagaagaaaaagaatcataacaatacaaacacacattcattctctctttttctctctaccattctcaacctgtattggacagcactgcctcttttgcttacttgctgcctgttcaaactgaggtggaatgcagtggttcccatgcttaacaaatcattaaaacaccctagaacactcctaggatagattaatgtagtaagtctggctaggccttgtgttgccttttttttttttttttttttcttttcttttcttctcttcccatgcactattctggaggtttgccaggtttggggagacatggagtaaaagaaagataggcaactcatggatggtgggagagcaggtaagcaggtctgatctcaagggcccacatgaggcatcagtatatattaggcaggtagggatctctggctttggtaattctttatgagaggatcctagcctttgaagctgggagcaggagtcagtggctacagtgggaaggagtactgcaggttggggccaaagtgatacacagcttagaaggcagccttcctccacttactcaacaaatctttatttagtgactctccaagtcctagtgattattattattgttcactccacatttggcttaatgggtaatgctattacccattgcctaactaggtttgcagtagtggaatctccagagatagcaggcttagtaagctggaggtaggacatgaagtcccccaaaacttgatgtcctatttttatgtgagttggacagtggttatcttttgcctgttgatatcttaaagcagcagagtggtatagaaatttgcggttatgacagacccgggttaaaaatcacagctgtgccatttgctttgatattttgagcaaggtagctaaattttctgagcttctattttctcatctgtaaaatgaggatacgtacctgttcttttttttctttctttttatttcttttagagatagggtctcgctttgttgcccaggctggagtgcactggcatgatcatggctcactgcagcctcaaattcccaggctcaagcaatcctcccacctcagcctccccattagctgggactacagggccatgccatcatgcccagctaatttaaacatagttttcagagatggagctcactatgttgcccaggctggtcttgaattcttggtctcaagcaatcctcccactgcagccttccaaagtgctgggcgtacaagcgcaagccactgtgcccagctgtcagacgctgagttttaattatgcaccaaactccagcccgcagatcctcttcaccaaagcccctggctggtctagcccatcatgacttctctaggaacagtccttctttaggactataaagtattaacaaaagtctgtagattaaggagcctgcataaagaattctggatacaggcccctgtctttccaaagttcctctccaatatcccttggggtcctcatgtttttgaagcagcttcactctgcacaggcagcaggaggttgggggagccatagctctgggccacgggggcagatttatttggatgataggactaatatttgtgtaacctgctgagacctgtgtgggagagtttagggtggtttttcttttggtgaggggatttgctctggtttcacatccattaacacaaaacatgagctagtcagggcccttgtggtctgcggtaaggggatgcctgtggagaaatgggcctgagtgagtcaggccaagagaatgtcttccttcagaatggagtcaactggataactgatgagccaatggtgggattaaggagggggaaatgggaggggaagagaacagctgacatcttgaggaaagctttggggtagtggagaggtaagggggtcatggtcagtctgaactcaacaatagggctgaatgaatttaccaaaggaagctgccttatattatatgccaggctgctggggaaagcctcaggtcctggccagcccctgttctcacaagaacatgcaggttaccacataaataatggcatatgccttccataggacgtcaacctgacttaaatctacctataccctactctctattctttggtttttggttctcatccctgtggaaggaaatgggcctcttctggcatctcatgctactctgtgcttttccttgggctccaaattctagctcataaagatgcaagttttgcaatttcctataaatggttaagaaaagagcaagctgtccagagagtgagaagtttgaaaagagaggtgcataagagagaaatgatgtccatttgagccccaccacggaggttatgtggtcccaaaaggaatgatggccaagcaattaatttttcctcctagttcttagcttgcttctgcattgattggctttacacaactggcatttagtctgcattacacaaatagacactaatttatttggaacaagcagcaaaatgagaactttatttggtgcagtcagggctccatttagttccctcactctgcttctaatcaccccttctcccagccctcttctatttgatagaggtctgtccctcagatcagcaatgtcttagcccctctcctctcttccattccttcctgttggtactcatttcttctaacttttaataaacatttaggtataatacattacagtaagtgctatttagatacaaacttaaaacatactatatattttaaggatctaagaatcctttagagaaggcacatgactgaagtacctcagctgcgcagcctgtagccagtttttttaatgtaaaagtaagaatgccagccttaacctagccctgcagataaaagctaacttttattaataccagccctgaataatggcactaatccacactcttccttagagtgatgctggaaaaataaaatcaggggcttcagattaaaaaaaaaaacaaaaaacaaaaaacaaaaacaaacattgcctggccctgagggtctgtttgcaaaacttcttgtagatctaatttctgaacactcactgcttcatttctattcctcctgttgcagggagtaatttcttctcctttgtctcacttcccttatcaagaacaccaaccagtaagtctttgccaaattctcagacccactcaggacacgagtctctacatggcttaacagaagagagataattaggatttttttttcctcagtctttctgaggtttttatttaaatgcactcagtggtcatagggcagaagctcaagctagctggggcgaagggaggacgccagggagagtatgtttctcatccctgggaggcattcagcctagctcctgcagccaaattacagcaccagagaacaatgtgatgcattcctgggcaggtcggtgggaccctgggcgcctgggccttgtggagagaggtgccagacacagagttctccgtaagcaatcctgcagagccgccccctgggtgcagaaatgaaatacgggagagcttcacattacacagagacctgtagctcacacctggttattgatggccttggtggaggcctctgccccgaccctccacttgggaactgcctgctactacgggggttgggcatctttgaagcaatgttggataacaagaaagagatgcttccttttcactctttgccctccctgtcagcctgagcacaaccatgaggttacacacacacacacagaggtgtacatatacagacacatagagaacttctctcaggctgcataggagttctgctcatcctcctctccccaacaattaaaaaaaaaagcaattagatttcgatccagtacttcaaaaaggataccaatagggtctggctttaatcaaggaatatctacaaagtcacattaccaacctgcaggcaactctttggtttggggaccagaactcctctggtgggtggttgggggaaggatgcaggaagggcatggtgaggagagatcagtggtgaagaattaccatcaaagcagagtggctgagactgtataagttcgcaaggctggttcatgccagagatagtgagatgtgcaccctatgtgctgagaatgatggagcagtctcctatgactgcatggggtataactgccaagcctactgctcatgacctgtggttgtttttaactcttaactgggttagaaaactggagagctttggattccagggatgatctccataagagagaagcactggaaaagaccaagtggtggctttattagggtaaatatatcacagttgctacagtgaattgagctttctcagaagctattattttctttgggtgattggcaggtatagggcaatagccagtggggtgtcagtaatatgccctgtccctgacctcaaaggtaaagggatagaaaagagagggcgttgacaaactcattttcccacttcccactcatggcttatattatctctgagcatctcggtggctattcctcatttacttaagatgttttagtcattctggatgtgcaaatgcaaggcaagcattctcccactggccccctaacggttaactatcctggcttaaaattttcctttgctcacttccattctatgagtatatcgatggagcagctggacattagagttctttctctttgaccaaaggagccaaaatgcggtgacttgacttcaaccccaacagcccctgtaagtagccctggccaaacagaaaggctaagctgaatgaagaaaaaaggaagacaatttcatctacagttgtcctttttgacagcttccaaggggggtttgcctaggaataacaatattcataagaagctttttcatatgcaaaatgctttagcatatatgtaatcctcacaacaaccctgtgaggtaggggttactgtcactttacagatgctgttcagaaaaatttggtgatttgtccaaggtcacatgaacagtgcgtggctcagccagaactcaaacctaggtcttctgacttcaaatcctgtgtattctcctcaaagcctgaggatgcccagggttgggggcaccagagtcccagcaccttcaaaacagaaattgatacaaaatgttcaagccctgtaggagtcccaggacagccaagagagtatatctgagcacagtttacaaaggaacagcctaggccctcctgaaccttatcaaccaatggctcttttgccatttctgccactattaccaccagtaccatgtgaccactatacaacatattccacatttaaacaactctggctcctaattctactccttttttccccttcagattaacattaaaaattttatctagtccttttgaaattatgctaaatgtatagacacagtagaagtagtcatgacagaaaattattaaggctttgaaaatatgtatcagaggccgggtgcagtggctcatgcctgtaatcccagcactttgggaggccgaggtggggcagatcacgaggtcaggagattgagaccatcctggctaacacggtgaaaccctgtctctactaaaaatacaaaaaaattagccgggcctggtggcgggcgcctgtagtcccagctactggggaggctgaggcaggagaatggcgtgaacccaggaggcagagcttgcagtgagccaagatgcaccactgcactccagcctgggagacagagcgagactccgtcacaaaaaaaaaaaaaaagaaggtatgtattagaattttctttgagatttcactccttttaaaaatgacgtcaactcctgggttaggaaagcaagatgagggaataagtgtcctaagaaactcccatcccaagccagacagatgcctacccgtggcctggcaaaggtcctgggatctcaagctgatgcaagcaatttgtgtacaccaaggcaaggggtctcaatcctgcagagaaacccatgagatgaggcagacagcagattttcacttgatcaaacacttgctgctctcaacccctctttgttttcccatccaaaatctggacctctgtttaggcgcaagacagtgagtaagagcagctccaaaagatgacgtatgcaaggggaactcttctgttcaatcctgtaatgttttctgttagagacagcataggctacctatcctaatcctgcaccccaactgttaagacagaagggaaaagtacaatgttcatcaatcatagctctgggatgctgcagctccctgacctgggcccctacttgagctaggagaagaacacctcatgaaaacagtctacctatagtcaggacttccccaaggcagactttattttttggtccatcgatcttggctctcactgttctccctgcttcccacccccaactgcctctgcatgtgggctcagaagtcatcatctaaagaattccattgctcacctcctgcatagcagcacagccccatgaggccacacaccagatggaggggataaaagtacgaggtcatggcttcttgcaagaggctttttcttaaactaaccctgactcctggaaaagaggcagagcaggagagtgttgaatgagctgctgatgacagcagcttcataggtcttgtgtataaaggaaggaaaaagctaacttggctttccgtggaaatttacctactcccattttcaggtctactcctggtctcacatctacttcttgaaggtgtctaagtagaatgcagagattgtcaagctagagggttaactccttcccaattgtagggatctattcagcaggctgccacacacatgctgaggtggaggccaaccctgaacacatgcgctgcttctttaggaatgtaactatgaagtaaaaggaaacagtaaggaaggtgaactggaactctggggaaactgaaaaggtcatcaataggccttcaaaatatttgtgtgtaataagtagacacaagaggctggaggaagatgatcattcctagaataattatgcttactgggtgacaatatacagaagcaacaattacaataaaatgaaacagtttaatggactaggaagcagaagtctgagaataaaggaattaggttaatgagattaagcagagatggcattccacaggaggtgacttttgagttgaatttttaaaagatagctttatgtgttttatgaactgactgagggcagtcagaagaaggcattctaaatagagggaactggtatgtgctgaaacttagaagcaggaatgtacaagcaatatataaggaatttcaagcaagtacacattatatacactggggaatacagagaaattagaatgctgagatcagggcttaaataatgtgaggtgactgtgtgcacctagactgtcaaatggttcagcatcccctatagagccacatagtatcttgatttatgtcagtaaacatcagggcacctatggaaaagcacaaggatgagtccatttgttacagacccagggactaacagagatctacactgtaaagttcaacaaaatgctacatatcattaactacagctccttatcatttgagattctgggctaagtaagagatatcaaatatcctatccagtactgtgatacattaatgtaggcttacaggcccagaacctggcataaatcaagccaaacccttaagaaattagaatgtgaaaagaaaataatttaaaatagaaaatacatgctgcttttcctcactcccaaacttaaaacttgactggtcctacatattctacttggtatattgaatttttgcagctagcagatttatcgtatctgaggccatagtgaatagaagagctgcaaaagagctttagagactgcaaaaccagctcactaataaatgaggaactttattctaatttactaccaggggctgaagtagcagccaaagaaggagacaaattctaacttcatgatctctagttaggtgtctattttcctgcatttgctaaaggtaaaaatcgctacttatggggcttttgtcatacttcttaaccaaacttccctaacttctgaggataaaaaccataagggcaatcttattcttccaaagcagttccctggtgccactttcagaaacagagtattgaactatgggtctgacccagtgtggcactgagtgtgtgtgtgtttgtgtgtttgtgtgtgtgtgtacactgaataagccaaaacgtgtgccatattctaggtttctgctttacttaactggcaaaatttggtgctgtaagggaggcagccacaaaaccagtgatagcatttgttagtatcatcttagttctcttccctcccctaggtagtttataaagggtgatttctgaaacccttcacaaaagaaaagctcaagggtttacattcaactgtgacagcactatgaattcattaagaagcatgtttcaggttgcactgtaatttccctatgtaatacaaacccatggaatctgacataagctgattgctcatgctggttgttttatttacatttctgaatggaaaggatttcaatactcataaaatatctaactggcttatttttcatctgttctcccagagaagctattataagataggcatagagacagaagtctcaacttgtataactggttaagcaaccagggaaatgttattgctcaaaatgcaattttaaaaaattcaatatggaacttgaggccaaaaaaacagaaggttactctcaatgccatccaaaagataaaagttaaaaaaaaaaaaaaaaaaaaaggtaactatgctcattattttcaaccaagttctatggaggtggtaccttcacaggagctcagtggaactggggtttacttacatcttttttctgggaacctaatgttagcagacacagttgctagtttgaacaggaatgcagatgaatggatgaaagtgggctccctaccacccagaaatatgaatgtgcctccttaccaatatgctacaaatcagacctctgaattagaagatgccatcatgcaactaacttactatctggagatgtgtattttgttaacctaggcaaagaataacaatttctgcttattccagtaggtgtgacaagctcagagaagtgagcgacaagctagagaagtaataattaccaataaagtaaattccaaagccgaa

SEQ ID NO: 200163 - DNA, 3355 bp, Homo sapiens
  Payload ID: 19489
  Gene Name: wingless-type MMTV integration site family, member 3
  Uniprot ID: P56703
  ENST ID: ENST00000225512
  CDS Start-End: 164-1231
tgctccgcgctgggctcgggaggggggcggctgcgggtggaggtgcgcttctgacaagcccgaaagtcatttccaatctcaagtggactttgttccaactattgggggcgtcgctccccctcttcatggtcgcgggcaaacttcctcctcggcgcctcttctaatggagccccacctgctcgggctgctcctcggcctcctgctcggtggcaccagggtcctcgctggctacccaatttggtggtccctggccctgggccagcagtacacatctctgggctcacagcccctgctctgcggctccatcccaggcctggtccccaagcaactgcgcttctgccgcaattacatcgagatcatgcccagcgtggccgagggcgtgaagctgggcatccaggagtgccagcaccagttccggggccgccgctggaactgcaccaccatagatgacagcctggccatctttgggcccgtcctcgacaaagccacccgcgagtcggccttcgttcacgccatcgcctcggccggcgtggccttcgccgtcacccgctcctgcgccgagggcacctccaccatttgcggctgtgactcgcatcataaggggccgcctggcgaaggctggaagtggggcggctgcagcgaggacgctgacttcggcgtgttagtgtccagggagttcgcggatgcgcgcgagaacaggccggacgcgcgctcggccatgaacaagcacaacaacgaggcgggccgcacgactatcctggaccacatgcacctcaaatgcaagtgccacgggctgtcgggcagctgtgaggtgaagacctgctggtgggcgcagcctgacttccgtgccatcggtgacttcctcaaggacaagtatgacagcgcctcggagatggtagtagagaagcaccgtgagtcccgaggctgggtggagaccctccgggccaagtactcgctcttcaagccacccacggagagggacctggtctactacgagaactcccccaacttttgtgagcccaacccagagacgggttcctttggcacaagggaccggacttgcaatgtcacctcccacggcatcgatggctgcgatctgctctgctgtggccggggccacaacacgaggacggagaagcggaaggaaaaatgccactgcatcttccactggtgctgctacgtcagctgccaggagtgtattcgcatctacgacgtgcacacctgcaagtagggcaccagggcgctgggaaggggtgaagtgtgtggctgggcggattcagcgaagtctcatgggaagcaggacctagagccgggcacagccctcagcgtcagacagcaaggaactgtcaccagccgcacgcgtggtaaatgacccagacccaactcgcctgtggacggggaggctctccctctctctcatcttacatttctcaccctactctggatggtgtgtggtttttaaagaagggggctttctttttagttctctagggtctgataggaacagacctgaggcttatctttgcacatgttaaagaaaataaaaatgaaaaaaaatttgactccaacagaacaggctgggctaatgtgagctctcagcctggcagtcaagacatcagcatgggcaaggttctgtttccaaactgctgcttctggtgacattccaagacgcctggagggtgggagtcaggaagtaggacacacccctgcagtctccttttcttggtccactcccattcaaatttgagctaatttctcattctgataaaagccataggtttagctaggatgaagtggtaggaaggtccgtggcagttgttagagtaggatttggagtttggaagaactggcagctcagggtggcctggtcagccgtttgaagagcagccatgtgttcttctcagtctcattttctctataaccctgttctgcacgaggggcagtcagatctcaaaatctttttctaccattctgcagtttccaccgtcaatgcagttttttttttgtttttttgtttttttttttttttggtggtagtggaccttgtaaataggctatgtaagggggcaagtcttctctagctcaaatggcttcctaaataaataagcggtatcttcagaaggggccattcagtccttcccagccctgctcacctgcagattctctgtacaaataactccaggtagagcagttggactccaggtcaccttagtataagttagacaaagggtccgtgagggagtagccatcaattcctgaaattccaactttgtgactagcagatggggaggatgaaaaccatccctttgcttcctctccaatacggacccatcttactgtgtcctttcctctctggggccaatgtgagtaaacacagacacagagttctttcccccagctcttcctccctcacctgcatgctgagatagcttccatccatgcagttcccaaggatctggattagaagttcaaaggggaaccagcagtcacctactcccttaggtgaagcatctcacggctgagttctccctgaggcatactggtccagctgagcgtcctagagaaagctagcaaaagggaggcacatggatttcacagtatgaattggttcaacaactgtcttagggagaatcagaaagaagagatgcagcaggggaatgagcagaacaaagatttttctttctcccccttctctctggggtctacctaaccctgacctaaaataccagggcagcgatctcccagctggtgcaggtgggcttgccaagatggtcgtccaggagcccgccttcacttctaaatctgctggccacaagccctgctaaagatacacatctcaccccctccgccaagtctgaaatgcccctccccatctcaccttagactgaaaagttttaaatcatgtcaactggataatacttgctttatgtgagaatacttcagcagaatggatacgaattttcaaaacaatcttttcatatctatgtattctatattaaaagtgataaagtcatgtttctggggcgtattcaagtagctgacaagtaattatttaataatagtacatgagtgcattgtaatgattctcgccgtagtcaggtaatagtatccaaccgaaatttcctaccaacctgctgtatccaaagttttgtaaaaagttgtagaagttgttgatctttttgattttatattcaaaaagtctctttttataaatattatttattatacaatgtatatacctttgagttaactaagattatatattatataaatatatatatatttggagaaaatatatttcatcatgcagtttttttctgttaagtcattaaagagaaggtaaacaaacctaaaa

SEQ ID NO: 200164 - DNA, 3352 bp, Homo sapiens
  Payload ID: 19489
  Gene Name: wingless-type MMTV integration site family, member 3
  ENST ID: ENST00000611547
  CDS Start-End: 164-1231
tgctccgcgctgggctcgggaggggggcggctgcgggtggaggtgcgcttctgacaagcccgaaagtcatttccaatctcaagtggactttgttccaactattgggggcgtcgctccccctcttcatggtcgcgggcaaacttcctcctcggcgcctcttctaatggagccccacctgctcgggctgctcctcggcctcctgctcggtggcaccagggtcctcgctggctacccaatttggtggtccctggccctgggccagcagtacacatctctgggctcacagcccctgctctgcggctccatcccaggcctggtccccaagcaactgcgcttctgccgcaattacatcgagatcatgcccagcgtggccgagggcgtgaagctgggcatccaggagtgccagcaccagttccggggccgccgctggaactgcaccaccatagatgacagcctggccatctttgggcccgtcctcgacaaagccacccgcgagtcggccttcgttcacgccatcgcctcggccggcgtggccttcgccgtcacccgctcctgcgccgagggcacctccaccatttgcggctgtgactcgcatcataaggggccgcctggcgaaggctggaagtggggcggctgcagcgaggacgctgacttcggcgtgttagtgtccagggagttcgcggatgcgcgcgagaacaggccggacgcgcgctcggccatgaacaagcacaacaacgaggcgggccgcacgactatcctggaccacatgcacctcaaatgcaagtgccacgggctgtcgggcagctgtgaggtgaagacctgctggtgggcgcagcctgacttccgtgccatcggtgacttcctcaaggacaagtatgacagcgcctcggagatggtagtagagaagcaccgtgagtcccgaggctgggtggagaccctccgggccaagtactcgctcttcaagccacccacggagagggacctggtctactacgagaactcccccaacttttgtgagcccaacccagagacgggttcctttggcacaagggaccggacttgcaatgtcacctcccacggcatcgatggctgcgatctgctctgctgtggccggggccacaacacgaggacggagaagcggaaggaaaaatgccactgcatcttccactggtgctgctacgtcagctgccaggagtgtattcgcatctacgacgtgcacacctgcaagtagggcaccagggcgctgggaaggggtgaagtgtgtggctgggcggattcagcgaagtctcatgggaagcaggacctagagccgggcacagccctcagcgtcagacagcaaggaactgtcaccagccgcacgcgtggtaaatgacccagacccaactcgcctgtggacggggaggctctccctctctctcatcttacatttctcaccctactctggatggtgtgtggtttttaaagaagggggctttctttttagttctctagggtctgataggaacagacctgaggcttatctttgcacatgttaaagaaaataaaaatgaaaaaaaatttgactccaacagaacaggctgggctaatgtgagctctcagcctggcagtcaagacatcagcatgggcaaggttctgtttccaaactgctgcttctggtgacattccaagacgcctggagggtgggagtcaggaagtaggacacacccctgcagtctccttttcttggtccactcccattcaaatttgagctaatttctcattctgataaaagccataggtttagctaggatgaagtggtaggaaggtccgtggcagttgttagagtaggatttggagtttggaagaactggcagctcagggtggcctggtcagccgtttgaagagcagccatgtgttcttctcagtctcattttctctataaccctgttctgcacgaggggcagtcagatctcaaaatctttttctaccattctgcagtttccaccgtcaatgcagttttttttttgtttttttgttttttttttttttttggtggtagtggaccttgtaaataggctatgtaagggggcaagtcttctctagctcaaatggcttcctaaataaataagcggtatcttcagaaggggccattcagtccttcccagccctgctcacctgcagattctctgtacaaataactccaggtagagcagttggactccaggtcaccttagtataagttagacaaagggtccgtgagggagtagccatcaattcctgaaattccaactttgtgactagcagatggggaggatgaaaaccatccctttgcttcctctccaatacggacccatcttactgtgtcctttcctctctggggccaatgtgagtaaacacagacacagagttctttcccccagctcttcctccctcacctgcatgctgagatagcttccatccatgcagttcccaaggatctggattagaagttcaaaggggaaccagcagtcacctactcccttaggtgaagcatctcacggctgagttctccctgaggcatactggtccagctgagcgtcctagagaaagctagcaaaagggaggcacatggatttcacagtatgaattggttcaacaactgtcttagggagaatcagaaagaagagatgcagcaggggaatgagcagaacaaagatttttctttctcccccttctctctggggtctacctaaccctgacctaaaataccagggcagcgatctcccagctggtgcaggtgggcttgccaagatggtcgtccaggagcccgccttcacttctaaatctgctggccacaagccctgctaaagatacacatctcaccccctccgccaagtctgaaatgcccctccccatctcaccttagactgaaaagttttaaatcatgtcaactggataatacttgctttatgtgagaatacttcagcagaatggatacgaattttcaaaacaatcttttcatatctatgtattctatattaaaagtgataaagtcatgtttctggggcgtattcaagtagctgacaagtaattatttaataatagtacatgagtgcattgtaatgattctcgccgtagtcaggtaatagtatccaaccgaaatttcctaccaacctgctgtatccaaagttttgtaaaaagttgtagaagttgttgatctttttgattttatattcaaaaagtctctttttataaatattatttattatacaatgtatatacctttgagttaactaagattatatattatataaatatatatatatttggagaaaatatatttcatcatgcagtttttttctgttaagtcattaaagagaaggtaaacaaacct

SEQ ID NO: 200165 - DNA, 3356 bp, Homo sapiens
  Payload ID: 19489
  Gene Name: wingless-type MMTV integration site family, member 3
  Uniprot ID: P56703
  ENST ID: ENST00000616347
  CDS Start-End: 164-1231
tgctccgcgctgggctcgggaggggggcggctgcgggtggaggtgcgcttctgacaagcccgaaagtcatttccaatctcaagtggactttgttccaactattgggggcgtcgctccccctcttcatggtcgcgggcaaacttcctcctcggcgcctcttctaatggagccccacctgctcgggctgctcctcggcctcctgctcggtggcaccagggtcctcgctggctacccaatttggtggtccctggccctgggccagcagtacacatctctgggctcacagcccctgctctgcggctccatcccaggcctggtccccaagcaactgcgcttctgccgcaattacatcgagatcatgcccagcgtggccgagggcgtgaagctgggcatccaggagtgccagcaccagttccggggccgccgctggaactgcaccaccatagatgacagcctggccatctttgggcccgtcctcgacaaagccacccgcgagtcggccttcgttcacgccatcgcctcggccggcgtggccttcgccgtcacccgctcctgcgccgagggcacctccaccatttgcggctgtgactcgcatcataaggggccgcctggcgaaggctggaagtggggcggctgcagcgaggacgctgacttcggcgtgttagtgtccagggagttcgcggatgcgcgcgagaacaggccggacgcgcgctcggccatgaacaagcacaacaacgaggcgggccgcacgactatcctggaccacatgcacctcaaatgcaagtgccacgggctgtcgggcagctgtgaggtgaagacctgctggtgggcgcagcctgacttccgtgccatcggtgacttcctcaaggacaagtatgacagcgcctcggagatggtagtagagaagcaccgtgagtcccgaggctgggtggagaccctccgggccaagtactcgctcttcaagccacccacggagagggacctggtctactacgagaactcccccaacttttgtgagcccaacccagagacgggttcctttggcacaagggaccggacttgcaatgtcacctcccacggcatcgatggctgcgatctgctctgctgtggccggggccacaacacgaggacggagaagcggaaggaaaaatgccactgcatcttccactggtgctgctacgtcagctgccaggagtgtattcgcatctacgacgtgcacacctgcaagtagggcaccagggcgctgggaaggggtgaagtgtgtggctgggcggattcagcgaagtctcatgggaagcaggacctagagccgggcacagccctcagcgtcagacagcaaggaactgtcaccagccgcacgcgtggtaaatgacccagacccaactcgcctgtggacggggaggctctccctctctctcatcttacatttctcaccctactctggatggtgtgtggtttttaaagaagggggctttctttttagttctctagggtctgataggaacagacctgaggcttatctttgcacatgttaaagaaaataaaaatgaaaaaaaatttgactccaacagaacaggctgggctaatgtgagctctcagcctggcagtcaagacatcagcatgggcaaggttctgtttccaaactgctgcttctggtgacattccaagacgcctggagggtgggagtcaggaagtaggacacacccctgcagtctccttttcttggtccactcccattcaaatttgagctaatttctcattctgataaaagccataggtttagctaggatgaagtggtaggaaggtccgtggcagttgttagagtaggatttggagtttggaagaactggcagctcagggtggcctggtcagccgtttgaagagcagccatgtgttcttctcagtctcattttctctataaccctgttctgcacgaggggcagtcagatctcaaaatctttttctaccattctgcagtttccaccgtcaatgcagttttttttttgtttttttgttttttttttttttttggtggtagtggaccttgtaaataggctatgtaagggggcaagtcttctctagctcaaatggcttcctaaataaataagcggtatcttcagaaggggccattcagtccttcccagccctgctcacctgcagattctctgtacaaataactccaggtagagcagttggactccaggtcaccttagtataagttagacaaagggtccgtgagggagtagccatcaattcctgaaattccaactttgtgactagcagatggggaggatgaaaaccatccctttgcttcctctccaatacggacccatcttactgtgtcctttcctctctggggccaatgtgagtaaacacagacacagagttctttcccccagctcttcctccctcacctgcatgctgagatagcttccatccatgcagttcccaaggatctggattagaagttcaaaggggaaccagcagtcacctactcccttaggtgaagcatctcacggctgagttctccctgaggcatactggtccagctgagcgtcctagagaaagctagcaaaagggaggcacatggatttcacagtatgaattggttcaacaactgtcttagggagaatcagaaagaagagatgcagcaggggaatgagcagaacaaagatttttctttctcccccttctctctggggtctacctaaccctgacctaaaataccagggcagcgatctcccagctggtgcaggtgggcttgccaagatggtcgtccaggagcccgccttcacttctaaatctgctggccacaagccctgctaaagatacacatctcaccccctccgccaagtctgaaatgcccctccccatctcaccttagactgaaaagttttaaatcatgtcaactggataatacttgctttatgtgagaatacttcagcagaatggatacgaattttcaaaacaatcttttcatatctatgtattctatattaaaagtgataaagtcatgtttctggggcgtattcaagtagctgacaagtaattatttaataatagtacatgagtgcattgtaatgattctcgccgtagtcaggtaatagtatccaaccgaaatttcctaccaacctgctgtatccaaagttttgtaaaaagttgtagaagttgttgatctttttgattttatattcaaaaagtctctttttataaatattatttattatacaatgtatatacctttgagttaactaagattatatattatataaatatatatatatttggagaaaatatatttcatcatgcagtttttttctgttaagtcattaaagagaaggtaaacaaacctaaaa

SEQ ID NO: 200166 - DNA, 2932 bp, Homo sapiens
  Payload ID: 19490
  Gene Name: wingless-type MMTV integration site family, member 3A
  Uniprot ID: P56704
  ENST ID: ENST00000284523
  CDS Start-End: 79-1137
agctcccagggcccggccccccccggcgctcacgctctcggggcggactcccggccctccgcgccctctcgcgcggcgatggccccactcggatacttcttactcctctgcagcctgaagcaggctctgggcagctacccgatctggtggtcgctggctgttgggccacagtattcctccctgggctcgcagcccatcctgtgtgccagcatcccgggcctggtccccaagcagctccgcttctgcaggaactacgtggagatcatgcccagcgtggccgagggcatcaagattggcatccaggagtgccagcaccagttccgcggccgccggtggaactgcaccaccgtccacgacagcctggccatcttcgggcccgtgctggacaaagctaccagggagtcggcctttgtccacgccattgcctcagccggtgtggcctttgcagtgacacgctcatgtgcagaaggcacggccgccatctgtggctgcagcagccgccaccagggctcaccaggcaagggctggaagtggggtggctgtagcgaggacatcgagtttggtgggatggtgtctcgggagttcgccgacgcccgggagaaccggccagatgcccgctcagccatgaaccgccacaacaacgaggctgggcgccaggccatcgccagccacatgcacctcaagtgcaagtgccacgggctgtcgggcagctgcgaggtgaagacatgctggtggtcgcaacccgacttccgcgccatcggtgacttcctcaaggacaagtacgacagcgcctcggagatggtggtggagaagcaccgggagtcccgcggctgggtggagaccctgcggccgcgctacacctacttcaaggtgcccacggagcgcgacctggtctactacgaggcctcgcccaacttctgcgagcccaaccctgagacgggctccttcggcacgcgcgaccgcacctgcaacgtcagctcgcacggcatcgacggctgcgacctgctgtgctgcggccgcggccacaacgcgcgagcggagcggcgccgggagaagtgccgctgcgtgttccactggtgctgctacgtcagctgccaggagtgcacgcgcgtctacgacgtgcacacctgcaagtaggcaccggccgcggctccccctggacggggcgggccctgcctgagggtgggcttttccctgggtggagcaggactcccacctaaacggggcagtactcctccctgggggcgggactcctccctgggggtggggctcctacctgggggcagaactcctacctgaaggcagggctcctccctggagctagtgtctcctctctggtggctgggctgctcctgaatgaggcggagctccaggatggggaggggctctgcgttggcttctccctggggacggggctcccctggacagaggcggggctacagattgggcggggcttctcttgggtgggacagggcttctcctgcgggggcgaggcccctcccagtaagggcgtggctctgggtgggcggggcactaggtaggcttctacctgcaggcggggctcctcctgaaggaggcggggctctaggatggggcacggctctggggtaggctgctccctgagggcggagcgcctccttaggagtggggttttatggtggatgaggcttcttcctggatggggcagagcttctcctgaccagggcaaggccccttccacgggggctgtggctctgggtgggcgtggcctgcataggctccttcctgtgggtggggcttctctgggaccaggctccaatggggcggggcttctctccgcgggtgggactcttccctgggaaccgccctcctgattaaggcgtggcttctgcaggaatcccggctccagagcaggaaattcagcccaccagccacctcatccccaaccccctgtaaggttccatccacccctgcgtcgagctgggaaggttccatgaagcgagtcgggtccccaacccgtgcccctgggatccgagggcccctctccaagcgcctggctttggaatgctccaggcgcgccgacgcctgtgccaccccttcctcagcctggggtttgaccacccacctgaccaggggccctacctggggaaagcctgaagggcctcccagcccccaaccccaagaccaagcttagtcctgggagaggacagggacttcgcagaggcaagcgaccgaggccctcccaaagaggcccgccctgcccgggctcccacaccgtcaggtactcctgccagggaactggcctgctgcgccccaggccccgcccgtctctgctctgctcagctgcgcccccttctttgcagctgcccagcccctcctccctgccctcgggtctccccacctgcactccatccagctacaggagagatagaagcctctcgtcccgtccctccctttcctccgcctgtccacagccccttaagggaaaggtaggaagagaggtccagccccccaggctgcccagagctgctggtctcatttgggggcgttcgggaggtttggggggcatcaaccccccgactgtgctgctcgcgaaggtcccacagccctgagatgggccggcccccttcctggcccctcatggcgggactggagaaatggtccgctttcctggagccaatggcccggcccctcctgactcatccgcctggcccgggaatgaatggggaggccgctgaacccacccggcccatatccctggttgcctcatggccagcgcccctcagcctctgccactgtgaaccggctcccaccctcaaggtgcggggagaagaagcggccaggcggggcgccccaagagcccaaaagagggcacaccgccatcctctgcctcaaattctgcgtttttggttttaatgttatatctgatgctgctatatccactgtccaacgg

SEQ ID NO: 200167 - DNA, 3845 bp, Homo sapiens
  Payload ID: 19491
  Gene Name: wingless-type MMTV integration site family, member 4
  Uniprot ID: P56705
  ENST ID: ENST00000290167
  CDS Start-End: 45-1100
gcggccgcagccgctgccccgggccgggcgcccgcggcggcaccatgagtccccgctcgtgcctgcgttcgctgcgcctcctcgtcttcgccgtcttctcagccgccgcgagcaactggctgtacctggccaagctgtcgtcggtggggagcatctcagaggaggagacgtgcgagaaactcaagggcctgatccagaggcaggtgcagatgtgcaagcggaacctggaagtcatggactcggtgcgccgcggtgcccagctggccattgaggagtgccagtaccagttccggaaccggcgctggaactgctccacactcgactccttgcccgtcttcggcaaggtggtgacgcaagggactcgggaggcggccttcgtgtacgccatctcttcggcaggtgtggcctttgcagtgacgcgggcgtgcagcagtggggagctggagaagtgcggctgtgacaggacagtgcatggggtcagcccacagggcttccagtggtcaggatgctctgacaacatcgcctacggtgtggccttctcacagtcgtttgtggatgtgcgggagagaagcaagggggcctcgtccagcagagccctcatgaacctccacaacaatgaggccggcaggaaggccatcctgacacacatgcgggtggaatgcaagtgccacggggtgtcaggctcctgtgaggtaaagacgtgctggcgagccgtgccgcccttccgccaggtgggtcacgcactgaaggagaagtttgatggtgccactgaggtggagccacgccgcgtgggctcctccagggcactggtgccacgcaacgcacagttcaagccgcacacagatgaggacctggtgtacttggagcctagccccgacttctgtgagcaggacatgcgcagcggcgtgctgggcacgaggggccgcacatgcaacaagacgtccaaggccatcgacggctgtgagctgctgtgctgtggccgcggcttccacacggcgcaggtggagctggctgaacgctgcagctgcaaattccactggtgctgcttcgtcaagtgccggcagtgccagcggctcgtggagttgcacacgtgccgatgaccgcctgcctagccctgcgccggcaaccacctagtggcccagggaaggccgataatttaaacagtctcccaccacctaccccaagagatactggttgtattttttgttctggtttggtttttgggtcctcatgttatttattgccgaaaccaggcaggcaaccccaagggcaccaaccagggcctccccaaagcctgggcctttgtggctgccactgaccaaagggaccttgctcgtgccgctggctgcccgcatgtggctgccactgaccactcagttgttatctgtgtccgtttttctacttgcagacctaaggtggagtaacaaggagtattaccaccacatggctactgaccgtgtcatcggggaagagggggccttatggcagggaaaataggtaccgacttgatggaagtcacaccctctggaaaaaagaactcttaactctccagcacacatacacatggactcctggcagcttgagcctagaagccatgtctctcaaatgccctgagaaagggaacaagcagataccaggtcaagggcaccaggttcatttcagcccttacatggacagctagaggttcgatatctgtgggtccttccaggcaagaagagggagatgagagcaagagacgactgaagtcccaccctagaacccagcctgccccagcctgcccctgggaagaggaaacttaaccactccccagacccacctaggcaggcatataggctgccatcctggaccagggatcccggctgtgcctttgcagtcatgcccgagtcacctttcacagcgctgttcctccatgaaactgaaacacacacacacacacacacacacacacacacacacacacacggacacacacacacacctgcgagagagagggaggaaagggctgtgcctttgcagtcatgcccctgagtcacctttcacagcactgttcctccatgaaactgaaaaaggaaaacacacacacacacacctgcgagagggagggaggaaagggctgtgcaataaagtcctctcccattatcttactcaacacaatttattgagcaaatactacgtgttctaggccctgtacaggccatctcacttgatggccacaacagtcctgggaagcagacaaaccaagaatgctaatgcccatctgacatcagagacggcagtgctccccagacctctcacagcaagctggatggacaggcagggccagaagagtcctccagccaagcctcctccttggttcttgtacccaaaggtagagaaactgcaggtcttcttgggtctgagcctggggcaggggttctggctggacgaaaaggggcagggaagcagcaggagccagagaccacaggctgagctggagcccacatggttcctaagggcagaacaggctctgaggaaagatgtgaacagctggaaggctgacagtgaggtctcagcagtgtggtgcacccctccccagcacatccgagtccctggggtcccaggtaccataggtactgcaagatttcccaagagacagcaccagcaacctgggcctgaccctgtacaaccgccaaaccatcacgagccccgcccaggcttgtgagaaggacatgcatggatcaagaccttgcccttgacccatctgcttctcagatgggctcccaatcaccagaggaagttgctgtaagcccactttccagactgcccccacactggggctctaagtttcaggtcggagattttatgctctgtgatcccccacttggggttcccagactccaagctcctggctcctgtgttcagtggctgaattcaacgtccgagattcggaatatgggctccagcctgcagaaactcttctccaggcattgtggtttgtgcctcctagtgttggctccctcatgaaaagagggtcaacacccttggcccccagccaagatctctgctcaatgtccatacaaggaggaagccaaaaccaagtgaggtgctggagccacattcaaatgtggttgataatcttggggcaggccagctctgatgtggatgaaagctgatccaactgtcgccacagctgcccagctgggtccgctgctcccctggctggctgttcagctgtctactaagcccaaaaaaaatactatgcctcactagcagaggctagacccagaaagagggaacaatgaggacccctcccctcccagaggaaagagctgagccactctccccatccagggaacagtaggtccaggctggatgctggtatgatgggaactgcccttttcacctgccagggagttcctaaagctgatcttcctggggttctgaaggttgcgacctaggttaatgagaccaaattctaggaaccactgcccaggccaaccaccgccagtgctgcagagatcaaagaaatccacagccacaggaaaaggagcttctttggacatgcccagctccaaactgtcccagggggaactggcacagcccttacatagcccaccccctcttggcctcaccgtggcctggaaattggccagagggtccacatcctgcccaaaccactctcctctcgtcccaaggcaaaggtgatgccctgaggcctagggctggataaagcccagctctggatgctgctaacccactctgctgccccaccccatcctccaatttttatactaggctctttgccattgtgacgtcccatgacatagtctgatgcacgataaaacaattatttctttatcttgcaa

SEQ ID NO: 200168 - DNA, 482 bp, Homo sapiens
  Payload ID: 19491
  Gene Name: wingless-type MMTV integration site family, member 4
  ENST ID: ENST00000441048
  CDS Start-End: 327-482
tggtgagtgagccaagagagcttccctaaactcctcctgtcctcccaatcacagcgtcttaagcccacttcccggatgagaaaacggaggctcagagtcaagaccctgctgcctggggcgcgcccagaccttgtggctagccagaagcgaggtttcggattcccacagtctcgggccactgtcccaagctgcccaaagctggggaggccccgtccagctcccggaaggctgtagggaggtacctggccaagctgtcgtcggtggggagcatctcagaggaggagacgtgcgagaaactcaagggcctgatccagaggcaggtgcagatgtgcaagcggaacctggaagtcatggactcggtgcgccgcggtgcccagctggccattgaggagtgccagtaccagttccggaaccggcgctggaactgctccacactcgactccttgcccgtcttcggcaaggtggtgacgcaaggtggcaaa

SEQ ID NO: 200169 - DNA, 680 bp, Homo sapiens
  Payload ID: 19491
  Gene Name: wingless-type MMTV integration site family, member 4
  ENST ID: ENST00000415567
  CDS Start-End: 1-451
gtacctggccaagctgtcgtcggtggggagcatctcagaggaggagacgtgcgagaaactcaagggcctgatccagaggcaggtgcagatgtgcaagcggaacctggaagtcatggactcggtgcgccgcggtgcccagctggccattgaggagtgccagtaccagttccggaaccggcgctggaactgctccacactcgactccttgcccgtcttcggcaaggtggtgacgcaaggtggcaaagcctggcatggaggagacagtggatgtcatctactgacagaaagcaggtcaggggagaggactcaaaggcgcaaggaaggaggtagcctggggcaatgctggcctgaagccatcgtgggtactcaggaccccatgagaagccctccttacctttgggggaggaaccaagggggcacccacaccggctcagcatctgagggacactgagattcctactaggcctgggtggtacctgctctggactaaagtctgactggtggagtcgaacgtccaatcccctttggagagggacatgtcaaggtgccgagactaagccagtcacactcggcaggtgccagtcacacctggagaaggaggctgagctctgcccactcatcaaactcctcccttttacgtttttggttttcttccctagtaaaattcctcttggaaactt

SEQ ID NO: 200170 - DNA, 6176 bp, Homo sapiens
  Payload ID: 19492
  Gene Name: wingless-type MMTV integration site family, member 5A
  Uniprot ID: P41221
  ENST ID: ENST00000264634
  CDS Start-End: 658-1800
actaactcgcggctgcaggatcagcgtctggaagcagacgtttcggctacagacccagagaggaggagctggagatcaggaggcgtgagccgccaagagtttgcagaatctgtggtgtgaatgaactgggggcacctgggcgcacagatcgccccccttcccccgccccgggccacagttgagtagtggtacatttttttcaccctcttgtgaagaatttctttttattattatttgtcgtaaggtcttttgcacaatcacgcccacatttggggttggaaagccctaattaccgccgtcgctgatggacgttggaaacggagcgcctctccgtggaacagttgcctgcgcgccctcgccggaccggcggctccctagttgcgccccgaccaggccctgcccttgctgccggctcgcgcgcgtccgcgccccctccattcctgggcgcatcccagctctgccccaactcgggagtccaggcccgggcgccagtgcccgcttcagctccggttcactgcgcccgccggacgcgcgccggaggactccgcagccctgctcctgaccgtccccccaggcttaacccggtcgctccgctcggattcctcggctgcgctcgctcgggtggcgacttcctccccgcgccccctccccctcgccatgaagaagtccattggaatattaagcccaggagttgctttggggatggctggaagtgcaatgtcttccaagttcttcctagtggctttggccatatttttctccttcgcccaggttgtaattgaagccaattcttggtggtcgctaggtatgaataaccctgttcagatgtcagaagtatatattataggagcacagcctctctgcagccaactggcaggactttctcaaggacagaagaaactgtgccacttgtatcaggaccacatgcagtacatcggagaaggcgcgaagacaggcatcaaagaatgccagtatcaattccgacatcgaaggtggaactgcagcactgtggataacacctctgtttttggcagggtgatgcagataggcagccgcgagacggccttcacatacgcggtgagcgcagcaggggtggtgaacgccatgagccgggcgtgccgcgagggcgagctgtccacctgcggctgcagccgcgccgcgcgccccaaggacctgccgcgggactggctctggggcggctgcggcgacaacatcgactatggctaccgctttgccaaggagttcgtggacgcccgcgagcgggagcgcatccacgccaagggctcctacgagagtgctcgcatcctcatgaacctgcacaacaacgaggccggccgcaggacggtgtacaacctggctgatgtggcctgcaagtgccatggggtgtccggctcatgtagcctgaagacatgctggctgcagctggcagacttccgcaaggtgggtgatgccctgaaggagaagtacgacagcgcggcggccatgcggctcaacagccggggcaagttggtacaggtcaacagccgcttcaactcgcccaccacacaagacctggtctacatcgaccccagccctgactactgcgtgcgcaatgagagcaccggctcgctgggcacgcagggccgcctgtgcaacaagacgtcggagggcatggatggctgcgagctcatgtgctgcggccgtggctacgaccagttcaagaccgtgcagacggagcgctgccactgcaagttccactggtgctgctacgtcaagtgcaagaagtgcacggagatcgtggaccagtttgtgtgcaagtagtgggtgccacccagcactcagccccgctcccaggacccgcttatttatagaaagtacagtgattctggtttttggtttttagaaatattttttatttttccccaagaattgcaaccggaaccattttttttcctgttaccatctaagaactctgtggtttattattaatattataattattatttggcaataatgggggtgggaaccaagaaaaatatttattttgtggatctttgaaaaggtaatacaagacttcttttgatagtatagaatgaaggggaaataacacataccctaacttagctgtgtggacatggtacacatccagaaggtaaagaaatacattttctttttctcaaatatgccatcatatgggatgggtaggttccagttgaaagagggtggtagaaatctattcacaattcagcttctatgaccaaaatgagttgtaaattctctggtgcaagataaaaggtcttgggaaaacaaaacaaaacaaaacaaacctcccttccccagcagggctgctagcttgctttctgcattttcaaaatgataatttacaatggaaggacaagaatgtcatattctcaaggaaaaaaggtatatcacatgtctcattctcctcaaatattccatttgcagacagaccgtcatattctaatagctcatgaaatttgggcagcagggaggaaagtccccagaaattaaaaaatttaaaactcttatgtcaagatgttgatttgaagctgttataagaattaggattccagattgtaaaaagatccccaaatgattctggacactagatttttttgtttggggaggttggcttgaacataaatgaaaatatcctgttattttcttagggatacttggttagtaaattataatagtaaaaataatacatgaatcccattcacaggttctcagcccaagcaacaaggtaattgcgtgccattcagcactgcaccagagcagacaacctatttgaggaaaaacagtgaaatccaccttcctcttcacactgagccctctctgattcctccgtgttgtgatgtgatgctggccacgtttccaaacggcagctccactgggtcccctttggttgtaggacaggaaatgaaacattaggagctctgcttggaaaacagttcactacttagggatttttgtttcctaaaacttttattttgaggagcagtagttttctatgttttaatgacagaacttggctaatggaattcacagaggtgttgcagcgtatcactgttatgatcctgtgtttagattatccactcatgcttctcctattgtactgcaggtgtaccttaaaactgttcccagtgtacttgaacagttgcatttataaggggggaaatgtggtttaatggtgcctgatatctcaaagtcttttgtacataacatatatatatatatacatatatataaatataaatataaatatatctcattgcagccagtgatttagatttacagtttactctggggttatttctctgtctagagcattgttgtccttcactgcagtccagttgggattattccaaaagttttttgagtcttgagcttgggctgtggccctgctgtgatcataccttgagcacgacgaagcaaccttgtttctgaggaagcttgagttctgactcactgaaatgcgtgttgggttgaagatatcttttttcttttctgcctcacccctttgtctccaacctccatttctgttcactttgtggagagggcattacttgttcgttatagacatggacgttaagagatattcaaaactcagaagcatcagcaatgtttctcttttcttagttcattctgcagaatggaaacccatgcctattagaaatgacagtacttattaattgagtccctaaggaatattcagcccactacatagatagcttttttttttttttttttaataaggacacctctttccaaacagtgccatcaaatatgttcttatctcagacttacgttgttttaaaagtttggaaagatacacatctttcataccccccttaggcaggttggctttcatatcacctcagccaactgtggctcttaatttattgcataatgatattcacatcccctcagttgcagtgaattgtgagcaaaagatcttgaaagcaaaaagcactaattagtttaaaatgtcacttttttggtttttattatacaaaaaccatgaagtactttttttatttgctaaatcagattgttcctttttagtgactcatgtttatgaagagagttgagtttaacaatcctagcttttaaaagaaactatttaatgtaaaatattctacatgtcattcagatattatgtatatcttctagcctttattctgtacttttaatgtacatatttctgtcttgcgtgatttgtatatttcactggtttaaaaaacaaacatcgaaaggcttatgccaaatggaagatagaatataaaataaaacgttacttgtatattggtaagtggtttcaattgtccttcagataattcatgtggagatttttggagaaaccatgacggatagtttaggatgactacatgtcaaagtaataaaagagtggtgaattttaccaaaaccaagctatttggaagcttcaaaaggtttctatatgtaatggaacaaaaggggaattctcttttcctatatatgttccttacaaaaaaaaaaaaaaaagaaatcaagcagatggcttaaagctggttataggattgctcacattcttttagcattatgcatgtaacttaattgttttagagcgtgttgctgttgtaacatcccagagaagaatgaaaaggcacatgcttttatccgtgaccagatttttagtccaaaaaaatgtatttttttgtgtgtttaccactgcaactattgcacctctctatttgaatttactgtggaccatgtgtggtgtctctatgccctttgaaagcagtttttataaaaagaaagcccgggtctgcagagaatgaaaactggttggaaactaaaggttcattgtgttaagtgcaattaatacaagttattgtgcttttcaaaaatgtacacggaaatctggacagtgctccacagattgatacattagcctttgctttttctctttccggataaccttgtaacatattgaaaccttttaaggatgccaagaatgcattattccacaaaaaaacagcagaccaacatatagagtgtttaaaatagcatttctgggcaaattcaaactcttgtggttctaggactcacatctgtttcagtttttcctcagttgtatattgaccagtgttctttattgcaaaaacatatacccgatttagcagtgtcagcgtattttttcttctcatcctggagcgtattcaagatcttcccaatacaagaaaattaataaaaaatttatatataggcagcagcaaaagagccatgttcaaaatagtcattatgggctcaaatagaaagaagacttttaagttttaatccagtttatctgttgagttctgtgagctactgacctcctgagactggcactgtgtaagttttagttgcctaccctagctcttttctcgtacaattttgccaataccaagtttcaatttgtttttacaaaacattattcaagccactagaattatcaaatatgacgctatagcagagtaaatactctgaataagagaccggtactagctaactccaagagatcgttagcagcatcagtccacaaacacttagtggcccacaatatatagagagatagaaaaggtagttataacttgaagcatgtatttaatgcaaataggcacgaaggcacaggtctaaaatactacattgtcactgtaagctatacttttaaaatatttattttttttaaagtattttctagtcttttctctctctgtggaatggtgaaagagagatgccgtgttttgaaagtaagatgatgaaatgaatttttaattcaagaaacattcagaaacataggaattaaaacttagagaaatgatctaatttccctgttcacacaaactttacactttaatctgatgattggatattttattttagtgaaacatcatcttgttagctaactttaaaaaatggatgtagaatgattaaaggttggtatgatttttttttaatgtatcagtttgaacctagaatattgaattaaaatgctgtctcagtattttaaaagcaaaaaaggaatggaggaaaattgcatcttagaccatttttatatgcagtgtacaatttgctgggctagaaatgagataaagattatttatttttgttcatatcttgtacttttctattaaaatcattttatgaaatcc

SEQ ID NO: 200171 - DNA, 6042 bp, Homo sapiens
  Payload ID: 19492
  Gene Name: wingless-type MMTV integration site family, member 5A
  Uniprot ID: P41221
  ENST ID: ENST00000474267
  CDS Start-End: 523-1665
agtctgcggccactgggcagaacggcaagggagagggggaagggcggagggacgcagcctgggggcgatttgccgggcggagacgctctttttcagacaccctcctcaggtcttttgcacaatcacgcccacatttggggttggaaagccctaattaccgccgtcgctgatggacgttggaaacggagcgcctctccgtggaacagttgcctgcgcgccctcgccggaccggcggctccctagttgcgccccgaccaggccctgcccttgctgccggctcgcgcgcgtccgcgccccctccattcctgggcgcatcccagctctgccccaactcgggagtccaggcccgggcgccagtgcccgcttcagctccggttcactgcgcccgccggacgcgcgccggaggactccgcagccctgctcctgaccgtccccccaggcttaacccggtcgctccgctcggattcctcggctgcgctcgctcgggtggcgacttcctccccgcgccccctccccctcgccatgaagaagtccattggaatattaagcccaggagttgctttggggatggctggaagtgcaatgtcttccaagttcttcctagtggctttggccatatttttctccttcgcccaggttgtaattgaagccaattcttggtggtcgctaggtatgaataaccctgttcagatgtcagaagtatatattataggagcacagcctctctgcagccaactggcaggactttctcaaggacagaagaaactgtgccacttgtatcaggaccacatgcagtacatcggagaaggcgcgaagacaggcatcaaagaatgccagtatcaattccgacatcgaaggtggaactgcagcactgtggataacacctctgtttttggcagggtgatgcagataggcagccgcgagacggccttcacatacgcggtgagcgcagcaggggtggtgaacgccatgagccgggcgtgccgcgagggcgagctgtccacctgcggctgcagccgcgccgcgcgccccaaggacctgccgcgggactggctctggggcggctgcggcgacaacatcgactatggctaccgctttgccaaggagttcgtggacgcccgcgagcgggagcgcatccacgccaagggctcctacgagagtgctcgcatcctcatgaacctgcacaacaacgaggccggccgcaggacggtgtacaacctggctgatgtggcctgcaagtgccatggggtgtccggctcatgtagcctgaagacatgctggctgcagctggcagacttccgcaaggtgggtgatgccctgaaggagaagtacgacagcgcggcggccatgcggctcaacagccggggcaagttggtacaggtcaacagccgcttcaactcgcccaccacacaagacctggtctacatcgaccccagccctgactactgcgtgcgcaatgagagcaccggctcgctgggcacgcagggccgcctgtgcaacaagacgtcggagggcatggatggctgcgagctcatgtgctgcggccgtggctacgaccagttcaagaccgtgcagacggagcgctgccactgcaagttccactggtgctgctacgtcaagtgcaagaagtgcacggagatcgtggaccagtttgtgtgcaagtagtgggtgccacccagcactcagccccgctcccaggacccgcttatttatagaaagtacagtgattctggtttttggtttttagaaatattttttatttttccccaagaattgcaaccggaaccattttttttcctgttaccatctaagaactctgtggtttattattaatattataattattatttggcaataatgggggtgggaaccaagaaaaatatttattttgtggatctttgaaaaggtaatacaagacttcttttgatagtatagaatgaaggggaaataacacataccctaacttagctgtgtggacatggtacacatccagaaggtaaagaaatacattttctttttctcaaatatgccatcatatgggatgggtaggttccagttgaaagagggtggtagaaatctattcacaattcagcttctatgaccaaaatgagttgtaaattctctggtgcaagataaaaggtcttgggaaaacaaaacaaaacaaaacaaacctcccttccccagcagggctgctagcttgctttctgcattttcaaaatgataatttacaatggaaggacaagaatgtcatattctcaaggaaaaaaggtatatcacatgtctcattctcctcaaatattccatttgcagacagaccgtcatattctaatagctcatgaaatttgggcagcagggaggaaagtccccagaaattaaaaaatttaaaactcttatgtcaagatgttgatttgaagctgttataagaattaggattccagattgtaaaaagatccccaaatgattctggacactagatttttttgtttggggaggttggcttgaacataaatgaaaatatcctgttattttcttagggatacttggttagtaaattataatagtaaaaataatacatgaatcccattcacaggttctcagcccaagcaacaaggtaattgcgtgccattcagcactgcaccagagcagacaacctatttgaggaaaaacagtgaaatccaccttcctcttcacactgagccctctctgattcctccgtgttgtgatgtgatgctggccacgtttccaaacggcagctccactgggtcccctttggttgtaggacaggaaatgaaacattaggagctctgcttggaaaacagttcactacttagggatttttgtttcctaaaacttttattttgaggagcagtagttttctatgttttaatgacagaacttggctaatggaattcacagaggtgttgcagcgtatcactgttatgatcctgtgtttagattatccactcatgcttctcctattgtactgcaggtgtaccttaaaactgttcccagtgtacttgaacagttgcatttataaggggggaaatgtggtttaatggtgcctgatatctcaaagtcttttgtacataacatatatatatatatacatatatataaatataaatataaatatatctcattgcagccagtgatttagatttacagtttactctggggttatttctctgtctagagcattgttgtccttcactgcagtccagttgggattattccaaaagttttttgagtcttgagcttgggctgtggccctgctgtgatcataccttgagcacgacgaagcaaccttgtttctgaggaagcttgagttctgactcactgaaatgcgtgttgggttgaagatatcttttttcttttctgcctcacccctttgtctccaacctccatttctgttcactttgtggagagggcattacttgttcgttatagacatggacgttaagagatattcaaaactcagaagcatcagcaatgtttctcttttcttagttcattctgcagaatggaaacccatgcctattagaaatgacagtacttattaattgagtccctaaggaatattcagcccactacatagatagcttttttttttttttttttaataaggacacctctttccaaacagtgccatcaaatatgttcttatctcagacttacgttgttttaaaagtttggaaagatacacatctttcataccccccttaggcaggttggctttcatatcacctcagccaactgtggctcttaatttattgcataatgatattcacatcccctcagttgcagtgaattgtgagcaaaagatcttgaaagcaaaaagcactaattagtttaaaatgtcacttttttggtttttattatacaaaaaccatgaagtactttttttatttgctaaatcagattgttcctttttagtgactcatgtttatgaagagagttgagtttaacaatcctagcttttaaaagaaactatttaatgtaaaatattctacatgtcattcagatattatgtatatcttctagcctttattctgtacttttaatgtacatatttctgtcttgcgtgatttgtatatttcactggtttaaaaaacaaacatcgaaaggcttatgccaaatggaagatagaatataaaataaaacgttacttgtatattggtaagtggtttcaattgtccttcagataattcatgtggagatttttggagaaaccatgacggatagtttaggatgactacatgtcaaagtaataaaagagtggtgaattttaccaaaaccaagctatttggaagcttcaaaaggtttctatatgtaatggaacaaaaggggaattctcttttcctatatatgttccttacaaaaaaaaaaaaaaaagaaatcaagcagatggcttaaagctggttataggattgctcacattcttttagcattatgcatgtaacttaattgttttagagcgtgttgctgttgtaacatcccagagaagaatgaaaaggcacatgcttttatccgtgaccagatttttagtccaaaaaaatgtatttttttgtgtgtttaccactgcaactattgcacctctctatttgaatttactgtggaccatgtgtggtgtctctatgccctttgaaagcagtttttataaaaagaaagcccgggtctgcagagaatgaaaactggttggaaactaaaggttcattgtgttaagtgcaattaatacaagttattgtgcttttcaaaaatgtacacggaaatctggacagtgctccacagattgatacattagcctttgctttttctctttccggataaccttgtaacatattgaaaccttttaaggatgccaagaatgcattattccacaaaaaaacagcagaccaacatatagagtgtttaaaatagcatttctgggcaaattcaaactcttgtggttctaggactcacatctgtttcagtttttcctcagttgtatattgaccagtgttctttattgcaaaaacatatacccgatttagcagtgtcagcgtattttttcttctcatcctggagcgtattcaagatcttcccaatacaagaaaattaataaaaaatttatatataggcagcagcaaaagagccatgttcaaaatagtcattatgggctcaaatagaaagaagacttttaagttttaatccagtttatctgttgagttctgtgagctactgacctcctgagactggcactgtgtaagttttagttgcctaccctagctcttttctcgtacaattttgccaataccaagtttcaatttgtttttacaaaacattattcaagccactagaattatcaaatatgacgctatagcagagtaaatactctgaataagagaccggtactagctaactccaagagatcgttagcagcatcagtccacaaacacttagtggcccacaatatatagagagatagaaaaggtagttataacttgaagcatgtatttaatgcaaataggcacgaaggcacaggtctaaaatactacattgtcactgtaagctatacttttaaaatatttattttttttaaagtattttctagtcttttctctctctgtggaatggtgaaagagagatgccgtgttttgaaagtaagatgatgaaatgaatttttaattcaagaaacattcagaaacataggaattaaaacttagagaaatgatctaatttccctgttcacacaaactttacactttaatctgatgattggatattttattttagtgaaacatcatcttgttagctaactttaaaaaatggatgtagaatgattaaaggttggtatgatttttttttaatgtatcagtttgaacctagaatattgaattaaaatgctgtctcagtattttaaaagcaaaaaaggaatggaggaaaattgcatcttagaccatttttatatgcagtgtacaatttgctgggctagaaatgagataaagattatttatttttgttcatatcttgtacttttctattaaaatcattttatgaaatcca

SEQ ID NO: 200172 - DNA, 959 bp, Homo sapiens
  Payload ID: 19492
  Gene Name: wingless-type MMTV integration site family, member 5A
  ENST ID: ENST00000482079
  CDS Start-End: 318-959
ccagggctttgactcaacagaattgagacacgtttgtaatcgctggcgtgccccgcgcacaggatcccagcgaaatcagatttcctggtgaggttgcgtgggtggattaatttggaaaaagaaactgcctatatcttgccatcaaaaaactcacggaggagaagcgcagtcaatcaacagtaaacttaagagaccccggatgcttccgttgtttaaacttgtatgcttgaaaattatctgagaggcaataaacatctgctcctttcttccctctccagaagtccattggaatattaagcccaggagttgctttggggatggctggaagtgcaatgtcttccaagttcttcctagtggctttggccatatttttctccttcgcccaggttgtaattgaagccaattcttggtggtcgctaggtatgaataaccctgttcagatgtcagaagtatatattataggagcacagcctctctgcagccaactggcaggactttctcaaggacagaagaaactgtgccacttgtatcaggaccacatgcagtacatcggagaaggcgcgaagacaggcatcaaagaatgccagtatcaattccgacatcgaaggtggaactgcagcactgtggataacacctctgtttttggcagggtgatgcagataggcagccgcgagacggccttcacatacgcggtgagcgcagcaggggtggtgaacgccatgagccgggcgtgccgcgagggcgagctgtccacctgcggctgcagccgcgccgcgcgccccaaggacctgccgcgggactggctctggggcggctgcggcgacaacatcgactatggctaccgctttgccaaggagttcgtggacgcccgcgagcgggagcgcatccacgccaagggctcctacgagagtgctcgcatcctcatgaacctgcacaacaacgaggccggccgcagggtg

SEQ ID NO: 200173 - DNA, 1299 bp, Homo sapiens
  Payload ID: 19492
  Gene Name: wingless-type MMTV integration site family, member 5A
  Uniprot ID: P41221
  ENST ID: ENST00000497027
  CDS Start-End: 103-1200
actcgcctccgtgctcctctcgcccatggaattaattctggctccacttgttgctcggcccagaagtccattggaatattaagcccaggagttgctttggggatggctggaagtgcaatgtcttccaagttcttcctagtggctttggccatatttttctccttcgcccaggttgtaattgaagccaattcttggtggtcgctaggtatgaataaccctgttcagatgtcagaagtatatattataggagcacagcctctctgcagccaactggcaggactttctcaaggacagaagaaactgtgccacttgtatcaggaccacatgcagtacatcggagaaggcgcgaagacaggcatcaaagaatgccagtatcaattccgacatcgaaggtggaactgcagcactgtggataacacctctgtttttggcagggtgatgcagataggcagccgcgagacggccttcacatacgcggtgagcgcagcaggggtggtgaacgccatgagccgggcgtgccgcgagggcgagctgtccacctgcggctgcagccgcgccgcgcgccccaaggacctgccgcgggactggctctggggcggctgcggcgacaacatcgactatggctaccgctttgccaaggagttcgtggacgcccgcgagcgggagcgcatccacgccaagggctcctacgagagtgctcgcatcctcatgaacctgcacaacaacgaggccggccgcaggacggtgtacaacctggctgatgtggcctgcaagtgccatggggtgtccggctcatgtagcctgaagacatgctggctgcagctggcagacttccgcaaggtgggtgatgccctgaaggagaagtacgacagcgcggcggccatgcggctcaacagccggggcaagttggtacaggtcaacagccgcttcaactcgcccaccacacaagacctggtctacatcgaccccagccctgactactgcgtgcgcaatgagagcaccggctcgctgggcacgcagggccgcctgtgcaacaagacgtcggagggcatggatggctgcgagctcatgtgctgcggccgtggctacgaccagttcaagaccgtgcagacggagcgctgccactgcaagttccactggtgctgctacgtcaagtgcaagaagtgcacggagatcgtggaccagtttgtgtgcaagtagtgggtgccacccagcactcagccccgctcccaggacccgcttatttatagaaagtacagtgattctggtttttggtttttagaaatattttttattttt

SEQ ID NO: 200174 - DNA, 829 bp, Homo sapiens
  Payload ID: 19492
  Gene Name: wingless-type MMTV integration site family, member 5A
  ENST ID: ENST00000614415
  CDS Start-End: 440-829
attaattctggctccacttgttgctcggcccaggttggggagaggacggagggtggccgcagcgggttcctgagtgaattacccaggagggactgagcacagcaccaactagaggggggccagggggtgcgggactcgagcgagcaggaaggaggcagcgcctggcaccagggctttgactcaacagaattgagacacgtttgtaatcgctggcgtgccccgcgcacaggatcccagcgaaatcagatttcctggtgaggttgcgtgggtggattaatttggaaaaagaaactgcctatatcttgccatcaaaaaactcacggaggagaagcgcagtcaatcaacagtaaacttaagagaccccggatgcttccgttgtttaaacttgtatgcttgaaaattatctgagaggcaataaacatctgctcctttcttccctctccagaagtccattggaatattaagcccaggagttgctttggggatggctggaagtgcaatgtcttccaagttcttcctagtggctttggccatatttttctccttcgcccaggttgtaattgaagccaattcttggtggtcgctaggtatgaataaccctgttcagatgtcagaagacgtcggagggcatggatggctgcgagctcatgtgctgcggccgtggctacgaccagttcaagaccgtgcagacggagcgctgccactgcaagttccactggtgctgctacgtcaagtgcaagaagtgcacggagatcgtggaccagtttgtgtgcaagtagtgggtgccacccagcactcagccccgctcccaggacccgcttatttatag

SEQ ID NO: 200175 - DNA, 2184 bp, Homo sapiens
  Payload ID: 19493
  Gene Name: wingless-type MMTV integration site family, member 5B
  Uniprot ID: Q9H1J7
  ENST ID: ENST00000310594
  CDS Start-End: 146-1225
tattcttccaaatggaaactgctaatttttgaagcagaaggttgacagcttcagtaagatctcaagagagcgagaagactggaatcagggaaccctactctggaaactgtcagtcccagggcactggggagggctgaggccgaccatgcccagcctgctgctgctgttcacggctgctctgctgtccagctgggctcagcttctgacagacgccaactcctggtggtcattagctttgaacccggtgcagagacccgagatgtttatcatcggtgcccagcccgtgtgcagtcagcttcccgggctctcccctggccagaggaagctgtgccaattgtaccaggagcacatggcctacataggggagggagccaagactggcatcaaggaatgccagcaccagttccggcagcggcggtggaattgcagcacagcggacaacgcatctgtctttgggagagtcatgcagataggcagccgagagaccgccttcacccacgcggtgagcgccgcgggcgtggtcaacgccatcagccgggcctgccgcgagggcgagctctccacctgcggctgcagccggacggcgcggcccaaggacctgccccgggactggctgtggggcggctgtggggacaacgtggagtacggctaccgcttcgccaaggagtttgtggatgcccgggagcgagagaagaactttgccaaaggatcagaggagcagggccgggtgctcatgaacctgcaaaacaacgaggccggtcgcagggctgtgtataagatggcagacgtagcctgcaaatgccacggcgtctcggggtcctgcagcctcaagacctgctggctgcagctggccgagttccgcaaggtcggggaccggctgaaggagaagtacgacagcgcggccgccatgcgcgtcacccgcaagggccggctggagctggtcaacagccgcttcacccagcccaccccggaggacctggtctatgtggaccccagccccgactactgcctgcgcaacgagagcacgggctccctgggcacgcagggccgcctctgcaacaagacctcggagggcatggatggctgtgagctcatgtgctgcgggcgtggctacaaccagttcaagagcgtgcaggtggagcgctgccactgcaagttccactggtgctgcttcgtcaggtgtaagaagtgcacggagatcgtggaccagtacatctgtaaatagcccggagggcctgctcccggcccccctgcactctgcctcacaaaggtctatattatataaatctatataaatctattttatatttgtataagtaaatgggtgggtgctatacaatggaaagatgaaaatggaaaggaagagcttatttaagagacgctggagatctctgaggagtggactttgctggttctctcctcttggtgggtgggagacagggctttttctctccctctggcgaggactctcaggatgtagggacttggaaatatttactgtctgtccaccacggcctggaggagggaggttgtggttggatggaggagatgatcttgtctggaagtctagagtctttgttggttagaggactgcctgtgatcctggccactaggccaagaggccctatgaaggtggcgggaactcagcttcaacctcgatgtcttcagggtcttgtccagaatgtagatgggttccgtaagaggcctggtgctctcttactctttcatccacgtgcacttgtgcggcatctgcagtttacaggaacggctccttccctaaaatgagaagtccaaggtcatctctggcccagtgaccacagagagatctgcacctcccggacttcaggcctgcctttccagcgagaattcttcatcctccacggttcactagctcctacctgaagaggaaagggggccatttgacctgacatgtcaggaaagccctaaactgaatgtttgcgcctgggctgcagaagccagggtgcatgaccaggctgcgtggacgttatactgtcttcccccacccccggggaggggaagcttgagctgctgctgtcactcctccaccgagggaggcctcacaaaccacaggacgctgcaacgggtcaggctggcgggcccggcgtgctcatcatctctgccccaggtgtacggtttctctctgacattaaatgcccttcatgg

SEQ ID NO: 200176 - DNA, 2303 bp, Homo sapiens
  Payload ID: 19493
  Gene Name: wingless-type MMTV integration site family, member 5B
  Uniprot ID: Q9H1J7
  ENST ID: ENST00000397196
  CDS Start-End: 233-1312
ggctctagttaccgtgtcagcctgtcctgggggcagtcacagccacagtgaccattagcaggcacccaggcctgtctttggctcggaaacggtggcccccaatgtagcctagtttgaacctaggaactgcaggaccagagagattccactggagcctgatggacgggtgacagagggaaccctactctggaaactgtcagtcccagggcactggggagggctgaggccgaccatgcccagcctgctgctgctgttcacggctgctctgctgtccagctgggctcagcttctgacagacgccaactcctggtggtcattagctttgaacccggtgcagagacccgagatgtttatcatcggtgcccagcccgtgtgcagtcagcttcccgggctctcccctggccagaggaagctgtgccaattgtaccaggagcacatggcctacataggggagggagccaagactggcatcaaggaatgccagcaccagttccggcagcggcggtggaattgcagcacagcggacaacgcatctgtctttgggagagtcatgcagataggcagccgagagaccgccttcacccacgcggtgagcgccgcgggcgtggtcaacgccatcagccgggcctgccgcgagggcgagctctccacctgcggctgcagccggacggcgcggcccaaggacctgccccgggactggctgtggggcggctgtggggacaacgtggagtacggctaccgcttcgccaaggagtttgtggatgcccgggagcgagagaagaactttgccaaaggatcagaggagcagggccgggtgctcatgaacctgcaaaacaacgaggccggtcgcagggctgtgtataagatggcagacgtagcctgcaaatgccacggcgtctcggggtcctgcagcctcaagacctgctggctgcagctggccgagttccgcaaggtcggggaccggctgaaggagaagtacgacagcgcggccgccatgcgcgtcacccgcaagggccggctggagctggtcaacagccgcttcacccagcccaccccggaggacctggtctatgtggaccccagccccgactactgcctgcgcaacgagagcacgggctccctgggcacgcagggccgcctctgcaacaagacctcggagggcatggatggctgtgagctcatgtgctgcgggcgtggctacaaccagttcaagagcgtgcaggtggagcgctgccactgcaagttccactggtgctgcttcgtcaggtgtaagaagtgcacggagatcgtggaccagtacatctgtaaatagcccggagggcctgctcccggcccccctgcactctgcctcacaaaggtctatattatataaatctatataaatctattttatatttgtataagtaaatgggtgggtgctatacaatggaaagatgaaaatggaaaggaagagcttatttaagagacgctggagatctctgaggagtggactttgctggttctctcctcttggtgggtgggagacagggctttttctctccctctggcgaggactctcaggatgtagggacttggaaatatttactgtctgtccaccacggcctggaggagggaggttgtggttggatggaggagatgatcttgtctggaagtctagagtctttgttggttagaggactgcctgtgatcctggccactaggccaagaggccctatgaaggtggcgggaactcagcttcaacctcgatgtcttcagggtcttgtccagaatgtagatgggttccgtaagaggcctggtgctctcttactctttcatccacgtgcacttgtgcggcatctgcagtttacaggaacggctccttccctaaaatgagaagtccaaggtcatctctggcccagtgaccacagagagatctgcacctcccggacttcaggcctgcctttccagcgagaattcttcatcctccacggttcactagctcctacctgaagaggaaagggggccatttgacctgacatgtcaggaaagccctaaactgaatgtttgcgcctgggctgcagaagccagggtgcatgaccaggctgcgtggacgttatactgtcttcccccacccccggggaggggaagcttgagctgctgctgtcactcctccaccgagggaggcctcacaaaccacaggacgctgcaacgggtcaggctggcgggcccggcgtgctcatcatctctgccccaggtgtacggtttctctctgacattaaatgcccttcatggaggttttgctccctttccttatttggacccac

SEQ ID NO: 200177 - DNA, 530 bp, Homo sapiens
  Payload ID: 19493
  Gene Name: wingless-type MMTV integration site family, member 5B
  ENST ID: ENST00000539198
  CDS Start-End: 177-530
ataactctcttcccctctcagagcctcgggccccgcagacgccgaggtgggcgctcgtgccaggatcgcggggcgcgggtacgggctccttgggcgccccgagggggctgctggccgggggaaccctactctggaaactgtcagtcccagggcactggggagggctgaggccgaccatgcccagcctgctgctgctgttcacggctgctctgctgtccagctgggctcagcttctgacagacgccaactcctggtggtcattagctttgaacccggtgcagagacccgagatgtttatcatcggtgcccagcccgtgtgcagtcagcttcccgggctctcccctggccagaggaagctgtgccaattgtaccaggagcacatggcctacataggggagggagccaagactggcatcaaggaatgccagcaccagttccggcagcggcggtggaattgcagcacagcggacaacgcatctgtctttgggagagtcatgcagataggcagccgagagaccgccttcacccac

SEQ ID NO: 200178 - DNA, 1437 bp, Homo sapiens
  Payload ID: 19493
  Gene Name: wingless-type MMTV integration site family, member 5B
  Uniprot ID: Q9H1J7
  ENST ID: ENST00000537031
  CDS Start-End: 243-1322
aaatgctccagatcctcagtgttcaagaacctcaggaagcttcgcagtcctgcctcgtgcctgcttgaacagctggatgtgggcaggaggctgtgggagcgggccatgccagcagaatcccgccttactctggggacttactcttgtcacagcccctggtgtcctgagggtcatttcagtgtcatggaaccctactctggaaactgtcagtcccagggcactggggagggctgaggccgaccatgcccagcctgctgctgctgttcacggctgctctgctgtccagctgggctcagcttctgacagacgccaactcctggtggtcattagctttgaacccggtgcagagacccgagatgtttatcatcggtgcccagcccgtgtgcagtcagcttcccgggctctcccctggccagaggaagctgtgccaattgtaccaggagcacatggcctacataggggagggagccaagactggcatcaaggaatgccagcaccagttccggcagcggcggtggaattgcagcacagcggacaacgcatctgtctttgggagagtcatgcagataggcagccgagagaccgccttcacccacgcggtgagcgccgcgggcgtggtcaacgccatcagccgggcctgccgcgagggcgagctctccacctgcggctgcagccggacggcgcggcccaaggacctgccccgggactggctgtggggcggctgtggggacaacgtggagtacggctaccgcttcgccaaggagtttgtggatgcccgggagcgagagaagaactttgccaaaggatcagaggagcagggccgggtgctcatgaacctgcaaaacaacgaggccggtcgcagggctgtgtataagatggcagacgtagcctgcaaatgccacggcgtctcggggtcctgcagcctcaagacctgctggctgcagctggccgagttccgcaaggtcggggaccggctgaaggagaagtacgacagcgcggccgccatgcgcgtcacccgcaagggccggctggagctggtcaacagccgcttcacccagcccaccccggaggacctggtctatgtggaccccagccccgactactgcctgcgcaacgagagcacgggctccctgggcacgcagggccgcctctgcaacaagacctcggagggcatggatggctgtgagctcatgtgctgcgggcgtggctacaaccagttcaagagcgtgcaggtggagcgctgccactgcaagttccactggtgctgcttcgtcaggtgtaagaagtgcacggagatcgtggaccagtacatctgtaaatagcccggagggcctgctcccggcccccctgcactctgcctcacaaaggtctatattatataaatctatataaatctattttatatttgtataagtaaatgggtgggtgctatacaat

SEQ ID NO: 200179 - DNA, 508 bp, Homo sapiens
  Payload ID: 19493
  Gene Name: wingless-type MMTV integration site family, member 5B
  ENST ID: ENST00000542408
  CDS Start-End: 41-379
actgtcagtcccagggcactggggagggctgaggccgaccatgcccagcctgctgctgctgttcacggctgctctgctgtccagctgggctcagcttctgacagacgccaactcctggtggtcattagctttgaacccggtgcagagacccgagatgtttatcatcggtgcccagcccgtgtgcagtcagcttcccgggctctcccctggccagaggaagctgtgccaattgtaccaggagcacatggcctacataggggagggagccaagactggcatcaaggaatgccagcaccagttccggcagcggcggtggaattgcagcacagcggacaacgcatctgtctttgggagagtcatgcagataggctgtgtataagatggcagacgtagcctgcaaatgccacggcgtctcggggtcctgcagcctcaagacctgctggctgcagctggccgagttccgcaaggtcggggaccggctgaaggagaagtacgacagcgcggccgc

SEQ ID NO: 200180 - DNA, 1304 bp, Homo sapiens
  Payload ID: 19493
  Gene Name: wingless-type MMTV integration site family, member 5B
  ENST ID: ENST00000543071
  CDS Start-End: 544-1304
caattcaccaaaatgttttaatcctacaaaggagagcctgagggtcagagaaataagtctctgggctggaatgagaggtaggcacgtgggggagtggataggatgggccccatttctttggatgttctgcagcaaggacaggtatgctttacaacagccgaagtggcctcccggctgccgaacggaggaacgccgcaagctccgctcttgaaattacttgttttcatttctctttgtggtttctcagctcattatttctttggaaattaggtcctgtgcagggttcccacagtttggggtaagagacagaagtcctagggtgggaagatgagcagtgggaggcggaggctggaaagaggccgagcttctttgtggggaacacgcagcacgtaagcatcagtgcaactttctccgcctcaccccggctcctggtctgcccttatccgctgagtttccacactgactctccatttctgttttctccagggaaccctactctggaaactgtcagtcccagggcactggggagggctgaggccgaccatgcccagcctgctgctgctgttcacggctgctctgctgtccagctgggctcagcttctgacagacgccaactcctggtggtcattagctttgaacccggtgcagagacccgagatgtttatcatcggtgcccagcccgtgtgcagtcagcttcccgggctctcccctggccagaggaagctgtgccaattgtaccaggagcacatggcctacataggggagggagccaagactggcatcaaggaatgccagcaccagttccggcagcggcggtggaattgcagcacagcggacaacgcatctgtctttgggagagtcatgcagataggcagccgagagaccgccttcacccacgcggtgagcgccgcgggcgtggtcaacgccatcagccgggcctgccgcgagggcgagctctccacctgcggctgcagccggacggcgcggcccaaggacctgccccgggactggctgtggggcggctgtggggacaacgtggagtacggctaccgcttcgccaaggagtttgtggatgcccgggagcgagagaagaactttgccaaaggatcagaggagcagggccgggtgctcatgaacctgcaaaacaacgaggccggtcgcagggctgtgtataagatggcagacgtagcctgcaaatgccacggcgtctcggggtcctgcagcctcaagacctgctggctgcagctggccgagttccgcaaggtcggggaccggctgaaggagaagtacgacagcgcggccgc

SEQ ID NO: 200181 - DNA, 661 bp, Homo sapiens
  Payload ID: 19493
  Gene Name: wingless-type MMTV integration site family, member 5B
  ENST ID: ENST00000545811
  CDS Start-End: 190-661
ccgccggccgccccctgcgcccccgcgggccgcgcctcgcccgccgacccagcgcagccgggcgcaggaagagccgggccgggccgagcggcgcccggagcccgcgggcctgacacgcggcgggacatgcagggaaccctactctggaaactgtcagtcccagggcactggggagggctgaggccgaccatgcccagcctgctgctgctgttcacggctgctctgctgtccagctgggctcagcttctgacagacgccaactcctggtggtcattagctttgaacccggtgcagagacccgagatgtttatcatcggtgcccagcccgtgtgcagtcagcttcccgggctctcccctggccagaggaagctgtgccaattgtaccaggagcacatggcctacataggggagggagccaagactggcatcaaggaatgccagcaccagttccggcagcggcggtggaattgcagcacagcggacaacgcatctgtctttgggagagtcatgcagataggcagccgagagaccgccttcacccacgcggtgagcgccgcgggcgtggtcaacgccatcagccgggcctgccgcgagggcgagctctccacctgcggctgcagccggacggcgcggcccaaggacctgccccgggactggctgt

SEQ ID NO: 200182 - DNA, 1703 bp, Homo sapiens
  Payload ID: 19494
  Gene Name: wingless-type MMTV integration site family, member 6
  Uniprot ID: Q9Y6F9
  ENST ID: ENST00000233948
  CDS Start-End: 218-1315
tccgcaggagacacaggcgctggctgccccgtccgctctccgcctccgccgcgccctcctcgcccgggatgggcccccccgccgccgccggatccctcgcctcccggccgccgccgttgcgctcgccgcgctcgcactgaagcccgggccctcgcgcgccgcggttcgccccgcagcctcgccccctgcccacccgggcggccgtagggcggtcacgatgctgccgcccttaccctcccgcctcgggctgctgctgctgctgctcctgtgcccggcgcacgtcggcggactgtggtgggctgtgggcagccccttggttatggaccctaccagcatctgcaggaaggcacggcggctggccgggcggcaggccgagttgtgccaggctgagccggaagtggtggcagagctagctcggggcgcccggctcggggtgcgagagtgccagttccagttccgcttccgccgctggaattgctccagccacagcaaggcctttggacgcatcctgcaacaggacattcgggagacggccttcgtgttcgccatcactgcggccggcgccagccacgccgtcacgcaggcctgttctatgggcgagctgctgcagtgcggctgccaggcgccccgcgggcgggcccctccccggccctccggcctgcccggcacccccggaccccctggccccgcgggctccccggaaggcagcgccgcctgggagtggggaggctgcggcgacgacgtggacttcggggacgagaagtcgaggctctttatggacgcgcggcacaagcggggacgcggagacatccgcgcgttggtgcaactgcacaacaacgaggcgggcaggctggccgtgcggagccacacgcgcaccgagtgcaaatgccacgggctgtcgggatcatgcgcgctgcgcacctgctggcagaagctgcctccatttcgcgaggtgggcgcgcggctgctggagcgcttccacggcgcctcacgcgtcatgggcaccaacgacggcaaggccctgctgcccgccgtccgcacgctcaagccgccgggccgagcggacctcctctacgccgccgattcgcccgacttctgcgcccccaaccgacgcaccggctcccccggcacgcgcggtcgcgcctgcaatagcagcgccccggacctcagcggctgcgacctgctgtgctgcggccgcgggcaccgccaggagagcgtgcagctcgaagagaactgcctgtgccgcttccactggtgctgcgtagtacagtgccaccgctgccgtgtgcgcaaggagctcagcctctgcctgtgacccgccgcccggccgctagactgacttcgcgcagcggtggctcgcacctgtgggacctcagggcaccggcaccgggcgcctctcgccgctcgagcccagcctctccctgccaaagcccaactcccagggctctggaaatggtgaggcgaggggcttgagaggaacgcccacccacgaaggcccagggcgccagacggccccgaaaaggcgctcggggagcgtttaaaggacactgtacaggccctccctccccttggcctctaggaggaaacagttttttagactggaaaaaagccagtctaaaggcctctggatactgggctccccagaactgctggccacaggatggtgggtgaggttagtatcaataaagatatttaaaccacca

SEQ ID NO: 200183 - DNA, 4041 bp, Homo sapiens
  Payload ID: 19495
  Gene Name: wingless-type MMTV integration site family, member 7A
  Uniprot ID: O00755
  ENST ID: ENST00000285018
  CDS Start-End: 306-1355
gaggggcgggggctggaggcagcagcgcccccgcactccccgcgtctcgcacacttgcaccggtcgctcgcgcgcagcccggcgtcgccccacgccgcgctcgctcctccctccctcctcccgctccgtggctcccgtgctcctggcgaggctcaggcgcggagcgcgcggacgggcgcaccgacagacggccccggggacgcctcggctcgcgcctcccgggcgggctatgttgattgccccgccggggccggcccgcgggatcagcacagcccggcccgcggccccggcggccaatcgggactatgaaccggaaagcgcggcgctgcctgggccacctctttctcagcctgggcatggtctacctccggatcggtggcttctcctcagtggtagctctgggcgcaagcatcatctgtaacaagatcccaggcctggctcccagacagcgggcgatctgccagagccggcccgacgccatcatcgtcataggagaaggctcacaaatgggcctggacgagtgtcagtttcagttccgcaatggccgctggaactgctctgcactgggagagcgcaccgtcttcgggaaggagctcaaagtggggagccgggaggctgcgttcacctacgccatcattgccgccggcgtggcccacgccatcacagctgcctgtacccagggcaacctgagcgactgtggctgcgacaaagagaagcaaggccagtaccaccgggacgagggctggaagtggggtggctgctctgccgacatccgctacggcatcggcttcgccaaggtctttgtggatgcccgggagatcaagcagaatgcccggactctcatgaacttgcacaacaacgaggcaggccgaaagatcctggaggagaacatgaagctggaatgtaagtgccacggcgtgtcaggctcgtgcaccaccaagacgtgctggaccacactgccacagtttcgggagctgggctacgtgctcaaggacaagtacaacgaggccgttcacgtggagcctgtgcgtgccagccgcaacaagcggcccaccttcctgaagatcaagaagccactgtcgtaccgcaagcccatggacacggacctggtgtacatcgagaagtcgcccaactactgcgaggaggacccggtgaccggcagtgtgggcacccagggccgcgcctgcaacaagacggctccccaggccagcggctgtgacctcatgtgctgtgggcgtggctacaacacccaccagtacgcccgcgtgtggcagtgcaactgtaagttccactggtgctgctatgtcaagtgcaacacgtgcagcgagcgcacggagatgtacacgtgcaagtgagccccgtgtgcacaccaccctcccgctgcaagtcagattgctgggaggactggaccgtttccaagctgcgggctccctggcaggatgctgagcttgtcttttctgctgaggagggtacttttcctgggtttcctgcaggcatccgtgggggaaaaaaaatctctcagagccctcaactattctgttccacacccaatgctgctccaccctcccccagacacagcccaggtccctccgcggctggagcgaagccttctgcagcaggaactctggacccctgggcctcatcacagcaatatttaacaatttattctgataaaaataatattaatttatttaattaaaaagaattcttccacctcgtcgggatccgttttctgcaatcaaagtggactgcttgctttcctagcaggatgattttgttgctaggacaaggagccgtgtagaagtgtacataactattctttatgcagatatttctactagctgattttgcaggtacccaccttgcagcactagatgtttaagtacaagaggagacatcttttatgcatatatagatatacacacacacatttttttttttttttttgctgtttgctgctacttatccagaaatttaagctggtccagatttggagacgttttttccagagtatgttttccatccttttgccctccccagttcaaacttcaccattagaaaaatccagtttggaataaatagagaggaaaaataataaattcccagcagtttccatctttcggaaagtgagccaccggataagagagaatattttgtaagagactatttttatatgaatattttatttatatcgagtctactgtatcattccacggcctgtgcttcttcttaattctggtactcacttaggggtaaggaggggcgatgcctggttgtggcgtcaggccccatggggccccttgcacagctggattcttgagttctgtttgccaagtgggcacaagctgcccctggatgcctggggttgaggcatcatctcatccatgttagccgggaaagaaatcaaatccccagcctcagcctgttaagctcaggcctttcaagcagggccactgagtggtagcttcgaaatgagtcactgtggtgggtggtcatcgtgcccctcacagggacttgaccgtcatcctgcagcagaggccagttcagggagccccacacctcaccaagacactagccattgcctgcgtgtcctggaaggtgagatgtagtcctcaggtgaggtgacccaaagcagatggggtgaggggccgatgagcagccgggcccagcggggcttcctggatatcctgctcccaaggccaagcagcagagagaggttcaagtgaggccactttgctttgggtccagctacacccagagcctcagcctagaaagctgtcctccagcaggctgggggtgttctaatatgtgtccgtttgcatttccggtgtgtgtgtgtgtgtgtgtgtgtgtgtgtgtgtgtgtgtgtgtgtgtactgtatcttcttagggacttgagtgtagtcacgtgactttgcgccttgcagcgcctccgccgtactcgtgtgtgtatgtgtctgtgtgtttccgtgctacccaagcgtctgtttctctccgtgtgcctgggagatcaggtctcaggcatggagctgcatgcctttgcatctgctgctccccagagtctctgcttgcatgtgagggctggtggtatgaggcagacagcagagattgtgtgtgattgtgttgaaccgccaagagaaggcacctctgaactctgtccccacacccatgggtgaaaaccagacacctctgagaccacagcacagccccatggccccacctgctgggagcccttcagtatctaggctgtgtctgactcctcagtgtccacactgagcctggatcacagcatgggcaaataaaagtgactggatggttgcatggtttcttcccttggacatttttttccatttttcttttacttgggtgtctggaggagtgggcatgtgaaggggccatggagtgaatggatggagggatggatgaatgtgtgagtaggtaggtaggtgaatgggtagatgtgtggatggataagtaggtgggtgggtgaatggataaatggatggatgggtagatggatggatgaagggataaacagatgggtggatggattgataagtgagcggatgaatggatgaatagctaggaaagtgggtgggtggatgagggtgggttgatgaggtaggtacacctacagataggtaagtgagcagtttcttgggagtccacaggtcacattttatctttgctttggaaaacctagcagatctgccatgatcaggatggcttcccgaccttgcaacccttctgcttctgacctccttggcacctgggaatgggggagattctgaccagcctccccagatgagtgttcaatgatagttacataaacacagtctcagaagagtcatccctgtgtcctccctcactgtgggttcccagctctggggcctgccctctctcgggtgccctgttcagctgtgctctgagccccagtttctccacctgtgaaatcagaataacacctacctcacagggctgttgtgaggatcctcccagtaatgactgtatggcactttgagttgcaaagcaatggatgaa

SEQ ID NO: 200184 - DNA, 3919 bp, Homo sapiens
  Payload ID: 19496
  Gene Name: wingless-type MMTV integration site family, member 7B
  Uniprot ID: P56706
  ENST ID: ENST00000339464
  CDS Start-End: 376-1425
attggccgccgcggcgctcggcgaggcgctcacggcctcaggcggctgcgcctagtgcaggctgcacccgcccgccagccgcgcccgggcccccggcccgcgcttgcaggggtccacggtcgctcaaccgggcttcgaggtcgcggcccccagcctgggtcaattccccgggctcacgcggcggtggcggcggcggcatcccgggctcaccatggtggcagcgcgcgccgagtgcccgcgcgtcgccggccgcccgagccgcagcgcgggctgagcgcagtctgcccgcagccccctggcccctgcccggccctgccgggcccgcgcgtcccctccggccgccgctgtctatggcgcagcccccctccctggatcatgcacagaaactttcgcaagtggattttctacgtgtttctctgctttggcgtcctgtacgtgaagctcggagcactgtcatccgtggtggccctgggagccaacatcatctgcaacaagattcctggcctagccccgcggcagcgtgccatctgccagagtcggcccgatgccatcattgtgattggggagggggcgcagatgggcatcaacgagtgccagtaccagttccgcttcggacgctggaactgctctgccctcggcgagaagaccgtcttcgggcaagagctccgagtagggagccgtgaggctgccttcacgtacgccatcaccgcggctggcgtggcgcacgccgtcaccgctgcctgcagccaagggaacctgagcaactgcggctgcgaccgcgagaagcagggctactacaaccaagccgagggctggaagtggggcggctgctcggccgacgtgcgttacggcatcgacttctcccggcgcttcgtggacgctcgggagatcaagaagaacgcgcggcgcctcatgaacctgcataacaatgaggccggcaggaaggttctagaggaccggatgcagctggagtgcaagtgccacggcgtgtctggctcctgcaccaccaaaacctgctggaccacgctgcccaagttccgagaggtgggccacctgctgaaggagaagtacaacgcggccgtgcaggtggaggtggtgcgggccagccgtctgcggcagcccaccttcctgcgcatcaaacagctgcgcagctatcagaagcccatggagacagacctggtgtacattgagaagtcgcccaactactgcgaggaggacgcggccacgggcagcgtgggcacgcagggccgtctctgcaaccgcacgtcgcccggcgcggacggctgtgacaccatgtgctgcggccgaggctacaacacccaccagtacaccaaggtgtggcagtgcaactgcaaattccactggtgctgcttcgtcaagtgcaacacctgcagcgagcgcaccgaggtcttcacctgcaagtgaggccaggcccggaggcggccgcgggcaccctggaacccggcggcattttgcacatccactcctcaccttccctgccttggtgctgccagcagcagacatagacgggtgcagaagcggggagctccaggtgcaggagggcaccggccggggcccacgccctctgcccgcctccctggggctccttcctgccacctcctcccatcacctcctgcggcagaacagcacccgtgacccacccagagagcaaggccaggggtcttggtgctccccgacggggcccggcaagttctctttcttctctctgggaaaatgaacgtccaggacacacctgtatcccagagagcaaagtgatgaggagactgagcgtccccagccccacctggcggcatggacacagaaaagctacgccggctggcctctccagaccagttcccaggctgggtctgccgctgggccctggggcggtggggacagatgttgacacaaattatttatgttttcttagtatcagaagaggattctcggcactaacacatagccagtcctaactccgtactctgtgtcagcccatcccctagacaccctctgtttcctttcccggccccacctggccggccctctgcccctgcagagctgaggcagcctggggttgatggggaccacgcggtgcctgcaggtcctagaagtgagctgggcaggggctcttcagaccacacagccctgaccgggccttggaggagagccatggacaggctcctccatgccgtctttccttcttttgaaaatcctatcaatggctgggcgcggtggctcacacctgtaatcccagcactttgggagaccgaggcaggtggatcacctgaggtcaggagttcgagaccagcctggccaacgtggtgaaaccctgtctctactaaaaatacaaaaattagctgggcgtggtggcgtgcacctgtaatcccagctactcaggaggctgagacaggacacttgcttgaacccgggaggtggaggttgcaatgagccaagattgtgccactgtattccaacttgggtgacagagcacgactctgtctcaaaaaaagaaaagaaaataatatcaagcaaatcaaaatatcacccacgtcaggttccaggagtccttcgttccctccctcatcctgtcaccctcccggcctggcacctccagtttacagagacccccttccccctggagccagcctgacccctgggacagtgctgccgcgggggtcaggcaggtggtgagtggtcagggatgtttgtcccacttgacagatgggaactctgaggcccagagtggcacaaggacctaccagagaccctgcagctgtgactggaggcttccacctttctcctgcccagcctggggctctggacctgggagaacacatcaggatgcccggggtggcagtaggtagctcccatgccttgaggcacttggctgctccctccaccccctgacagcctcattggggcctgcactcccctcggtgcctttgaggcttcgcctagccctgtcctggtccttttaccctgaccccagtgctgagaaaatctggatccagagctggacatgtcctttctggatgctcccacccctgtctctgaggagcatgagtgacagagggaggaacttgtccgaggccagagaggatggtctgcagctggctcctggtgcacccccactgcccacggcctggcccccatttagggtgtgttctcttggaagcccgtaggaatgtgttcttgagcagccgacaagccaagggcctgggctcagcctggggcaagtgggtccctcctgggctctggccctgtggtccagcccatgtgcctctaaccatgcctggacgctctgagtctccgggccaccgtgaatgccccaccctcagcctggccccatccccttaccttccccaagtcccagaacacacctgagtccataggcccggcagcctctgcaaggaacctggttaacttatgttgttatatagcgtcgaaatgtctatagtgtctttaaattattgtgacctacactgggtaccggagagggggatggctgcggcccccatccctcatcccccatcccatcccatccctcatctcatccctcatcccatcccccatcccatccctgaccccatcccccatcccatccctcatccctattccccatacccaccccccatcccatcccccatctcccgaaccaggctcctcctgcttcaacagacccttggggcccctgatgccaccgagacactcgcactgtcccttggctgccgggcaccccactgagcccctgcccaccccaaagtctgccagcaacaggccctttgcctgggtgagacgggggtcagggtggcccagatgggggtgatggcgaccaaggtgctgcgtccccacccttctgacggcagcctcccctggaggggagtgctcggcccaataaaagctggaatcggaaaagtga

SEQ ID NO: 200185 - DNA, 2285 bp, Homo sapiens
  Payload ID: 19496
  Gene Name: wingless-type MMTV integration site family, member 7B
  ENST ID: ENST00000409496
  CDS Start-End: 479-1540
gggtgtcccagccaaggcaacttgggcaagccctggaggcggctcccaccgcacgctccggtcagcctcccctttaaaaaaacccgccgggggaggaggcggatgtaggggcggcccgtccaatggcagctgcgcgcctcgggagacttggagaagtgagccagagcgagcgacagagccggttcgcaccgacagacggacggaggtccagaccgcagccaaggcgcgcccgctgcccccggccgggtccccgccccgcactccagccccagctcccgccgctgccccagacccagcgccatgcgcggccctagcggcggggcacgggcgacaactgcgcccgggcccacgagacccggcccctagcgcccagcgccgccgccctgcatcggggagctccgcggggaccccggcctcagctggcccaggcgcccggcccgcggagcctgttcagccccgccaggcacgccggcccaccatgcttctactgtcgccgcgcagcgcgctcgtctccgtctattgcccgcagatctttctcctcctgtccagcggcagctacttagcactgtcatccgtggtggccctgggagccaacatcatctgcaacaagattcctggcctagccccgcggcagcgtgccatctgccagagtcggcccgatgccatcattgtgattggggagggggcgcagatgggcatcaacgagtgccagtaccagttccgcttcggacgctggaactgctctgccctcggcgagaagaccgtcttcgggcaagagctccgagtagggagccgtgaggctgccttcacgtacgccatcaccgcggctggcgtggcgcacgccgtcaccgctgcctgcagccaagggaacctgagcaactgcggctgcgaccgcgagaagcagggctactacaaccaagccgagggctggaagtggggcggctgctcggccgacgtgcgttacggcatcgacttctcccggcgcttcgtggacgctcgggagatcaagaagaacgcgcggcgcctcatgaacctgcataacaatgaggccggcaggaaggttctagaggaccggatgcagctggagtgcaagtgccacggcgtgtctggctcctgcaccaccaaaacctgctggaccacgctgcccaagttccgagaggtgggccacctgctgaaggagaagtacaacgcggccgtgcaggtggaggtggtgcgggccagccgtctgcggcagcccaccttcctgcgcatcaaacagctgcgcagctatcagaagcccatggagacagacctggtgtacattgagaagtcgcccaactactgcgaggaggacgcggccacgggcagcgtgggcacgcagggccgtctctgcaaccgcacgtcgcccggcgcggacggctgtgacaccatgtgctgcggccgaggctacaacacccaccagtacaccaaggtgtggcagtgcaactgcaaattccactggtgctgcttcgtcaagtgcaacacctgcagcgagcgcaccgaggtcttcacctgcaagtgaggccaggcccggaggcggccgcgggcaccctggaacccggcggcattttgcacatccactcctcaccttccctgccttggtgctgccagcagcagacatagacgggtgcagaagcggggagctccaggtgcaggagggcaccggccggggcccacgccctctgcccgcctccctggggctccttcctgccacctcctcccatcacctcctgcggcagaacagcacccgtgacccacccagagagcaaggccaggggtcttggtgctccccgacggggcccggcaagttctctttcttctctctgggaaaatgaacgtccaggacacacctgtatcccagagagcaaagtgatgaggagactgagcgtccccagccccacctggcggcatggacacagaaaagctacgccggctggcctctccagaccagttcccaggctgggtctgccgctgggccctggggcggtggggacagatgttgacacaaattatttatgttttcttagtatcagaagaggattctcggcactaacacatagccagtcctaactccgtactctgtgtcagcccatcccctagacaccctctgtttcctttcccggccccacctggccggccctctgcccctgcagagctgaggcagcctggggttgatggggaccacgcggtgcctgcaggtcctagaagtgagctgggcaggggctcttcagaccacacagccctgaccgggccttggaggagagcca

SEQ ID NO: 200186 - DNA, 2202 bp, Homo sapiens
  Payload ID: 19496
  Gene Name: wingless-type MMTV integration site family, member 7B
  ENST ID: ENST00000410089
  CDS Start-End: 456-1457
ctggcgcggcccggcgggcgggcgcccggcgagccgcgctagctgctctctgcggtagctgctccgagtcgtatttccacattcctgaacccagccgagtccttacctgttgagccgcgatctcctttagacagaatctgtctcggcttcgctcgaagtgggggtggagaaacggcgtgacggagagggggtgcggtgcacctcgcctggggcgcccaccgcccgctgctggccccgcgctcctcgcacctgcggggacccgggccccgccgcgccctgcgcgcctactgtgcgccgccggctgccccgaggcgagccccgtccaggccacaggcaaggcggtgaacagacccgcgggaggggcaggtgcaggtaccactggtgggagacgcggcttcccaggcggagaggtggaagcaggcgctgggaatcgtctctccatcaccctccatcccatgtctgccccgccattttacagagcactgtcatccgtggtggccctgggagccaacatcatctgcaacaagattcctggcctagccccgcggcagcgtgccatctgccagagtcggcccgatgccatcattgtgattggggagggggcgcagatgggcatcaacgagtgccagtaccagttccgcttcggacgctggaactgctctgccctcggcgagaagaccgtcttcgggcaagagctccgagtagggagccgtgaggctgccttcacgtacgccatcaccgcggctggcgtggcgcacgccgtcaccgctgcctgcagccaagggaacctgagcaactgcggctgcgaccgcgagaagcagggctactacaaccaagccgagggctggaagtggggcggctgctcggccgacgtgcgttacggcatcgacttctcccggcgcttcgtggacgctcgggagatcaagaagaacgcgcggcgcctcatgaacctgcataacaatgaggccggcaggaaggttctagaggaccggatgcagctggagtgcaagtgccacggcgtgtctggctcctgcaccaccaaaacctgctggaccacgctgcccaagttccgagaggtgggccacctgctgaaggagaagtacaacgcggccgtgcaggtggaggtggtgcgggccagccgtctgcggcagcccaccttcctgcgcatcaaacagctgcgcagctatcagaagcccatggagacagacctggtgtacattgagaagtcgcccaactactgcgaggaggacgcggccacgggcagcgtgggcacgcagggccgtctctgcaaccgcacgtcgcccggcgcggacggctgtgacaccatgtgctgcggccgaggctacaacacccaccagtacaccaaggtgtggcagtgcaactgcaaattccactggtgctgcttcgtcaagtgcaacacctgcagcgagcgcaccgaggtcttcacctgcaagtgaggccaggcccggaggcggccgcgggcaccctggaacccggcggcattttgcacatccactcctcaccttccctgccttggtgctgccagcagcagacatagacgggtgcagaagcggggagctccaggtgcaggagggcaccggccggggcccacgccctctgcccgcctccctggggctccttcctgccacctcctcccatcacctcctgcggcagaacagcacccgtgacccacccagagagcaaggccaggggtcttggtgctccccgacggggcccggcaagttctctttcttctctctgggaaaatgaacgtccaggacacacctgtatcccagagagcaaagtgatgaggagactgagcgtccccagccccacctggcggcatggacacagaaaagctacgccggctggcctctccagaccagttcccaggctgggtctgccgctgggccctggggcggtggggacagatgttgacacaaattatttatgttttcttagtatcagaagaggattctcggcactaacacatagccagtcctaactccgtactctgtgtcagcccatcccctagacaccctctgtttcctttcccggccccacctggccggccctctgcccctgcagagctgaggcagcctggggttgatggggaccacgcggtgcctgcaggtcctagaagtgagctgggcaggggctcttcagaccacacagccctgaccgggccttggaggagagcca

SEQ ID NO: 200187 - DNA, 714 bp, Homo sapiens
  Payload ID: 19496
  Gene Name: wingless-type MMTV integration site family, member 7B
  ENST ID: ENST00000410058
  CDS Start-End: 52-669
cgcgtcccctccggccgccgctgtctatggcgcagcccccctccctggatcatgcacagaaactttcgcaagtggattttctacgtgtttctctgctttggcgtcctgtacgtgaagctcggagcactgtcatccgtggtggccctgggagccaacatcatctgcaacaagattcctggcctagccccgcggcagcgtgccatctgccagagtcggcccgatgccatcattgtgattggggagggggcgcagatgggcatcaacgagtgccagtaccagttccgcttcggacgctggaactgctctgccctcggcgagaagaccgtcttcgggcaagagctccgagtagggagccgtgaggctgccttcacgtacgccatcaccgcggctggcgtggcgcacgccgtcaccgctgcctgcagccaagggaacctgagcaactgcggctgcgaccgcgagaagcagggctactacaaccaagccgagggctggaagtggggcggctgctcggccgacgtgcgttacggcatcgacttctcccggcgcttcgtggacgctcgggagatcaagaagaacgcgcggcgcctcatgaacctgcataacaatgaggccggcaggaagggcctacttggacaacccagggtgacctcctctccgttgtttccttgaccacatctgtaaaggccctacttccaaataaagtcacttgccgag

SEQ ID NO: 200188 - DNA, 521 bp, Homo sapiens
  Payload ID: 19496
  Gene Name: wingless-type MMTV integration site family, member 7B
  ENST ID: ENST00000428540
  CDS Start-End: 351-521
gccgcgatctcctttagacagaatctgtctcggcttcgctcgaagtgggggtggagaaacggcgtgacggagagggggtgcggtgcacctcgcctggggcgcccaccgcccgctgctggccccgcgctcctcgcacctgcggggacccgggccccgccgcgccctgcgcgcctactgtgcgccgccggctgccccgaggcgagccccgtccaggccacagagcactgtcatccgtggtggccctgggagccaacatcatctgcaacaagattcctggcctagccccgcggcagcgtgccatctgccagagtcggcccgatgccatcattgtgattggggagggggcgcagatgggcatcaacgagtgccagtaccagttccgcttcggacgctggaactgctctgccctcggcgagaagaccgtcttcgggcaagagctccgagtagggagccgtgaggctgccttcacgtacgccatcaccgcggctggcgtggcgcacgccgtcaccgctgcctgcagc

SEQ ID NO: 200189 - DNA, 1597 bp, Homo sapiens
  Payload ID: 19497
  Gene Name: wingless-type MMTV integration site family, member 8A
  Uniprot ID: Q9H1J5
  ENST ID: ENST00000361560
  CDS Start-End: 101-1168
cagaattttctcacataaatactgaggaagaccctgccctctcctcacttctctggacttggccctgagctggacctggtccactggggtaggcagggcgatggggaacctgtttatgctctgggcagctctgggcatatgctgtgctgcattcagtgcctctgcctggtcagtgaacaatttcctgataacaggtcccaaggcctatctgacctacacgactagtgtggccttgggtgcccagagtggcatcgaggagtgcaagttccagtttgcttgggaacgctggaactgccctgaaaatgctcttcagctctccacccacaacaggctgagaagtgctaccagagagacttccttcatacatgctatcagctctgctggagtcatgtacatcatcaccaagaactgtagcatgggtgacttcgaaaactgtggctgtgatgggtcaaacaatggaaaaacaggaggccatggctggatctggggaggctgcagcgacaatgtggaatttggggaaaggatctccaaactctttgtggacagtttggagaaggggaaggatgccagagccctgatgaatcttcacaacaacagggccggcagactggcagtgagagccaccatgaaaaggacatgcaaatgtcatggcatctctgggagctgcagcatacagacatgctggctgcagctggctgaattccgggagatgggagactacctaaaggccaagtatgaccaggcgctgaaaattgaaatggataagcggcagctgagagctgggaacagcgccgagggccactgggtgcccgctgaggccttccttcctagcgcagaggcggaactgatctttttagaggaatcaccagattactgtacctgcaattccagcctgggcatctatggcacagagggtcgtgagtgcctacagaacagccacaacacatccaggtgggagcgacgtagctgtgggcgcctgtgcactgagtgtgggctgcaggtggaagagaggaaaactgaggtcataagcagctgtaactgcaaattccagtggtgctgtacggtcaagtgtgaccagtgtaggcatgtggtgagcaagtattactgcgcacgctccccaggcagtgcccagtccctggggagagtttggtttggggtctatatctagagggaccttcaaagtatttgttcctttaaatttcagaccatgtccaacccagctgtgctgctgggaatcaggagaatagaagcaaaaaacgaaagagttctgttcagacttctgaagagcagcctgtggctacaaatctatgctgataaatgagattgagaactcaactgtattttgccataaatgcttctaagatatatccagctgggacttctattactccctttggaaaccttaagatcaaaaagggaataagaaacccttcttctgtatcccaataatccaccaggataaaggagaaactagaaatatgcaactcccttgatttcagtgtttggcaggtaacaaaaaattgagacccagacactggtcaacaggaaaacaatacagactcccagaattagaaagtgttattttaatgcaacctag

SEQ ID NO: 200190 - DNA, 1498 bp, Homo sapiens
  Payload ID: 19497
  Gene Name: wingless-type MMTV integration site family, member 8A
  Uniprot ID: Q9H1J5
  ENST ID: ENST00000398754
  CDS Start-End: 6-1061
gggcgatggggaacctgtttatgctctgggcagctctgggcatatgctgtgctgcattcagtgcctctgcctggtcagtgaacaatttcctgataacaggtcccaaggcctatctgacctacacgactagtgtggccttgggtgcccagagtggcatcgaggagtgcaagttccagtttgcttgggaacgctggaactgccctgaaaatgctcttcagctctccacccacaacaggctgagaagtgctaccagagagacttccttcatacatgctatcagctctgctggagtcatgtacatcatcaccaagaactgtagcatgggtgacttcgaaaactgtggctgtgatgggtcaaacaatggaaaaacaggaggccatggctggatctggggaggctgcagcgacaatgtggaatttggggaaaggatctccaaactctttgtggacagtttggagaaggggaaggatgccagagccctgatgaatcttcacaacaacagggccggcagactggcagtgagagccaccatgaaaaggacatgcaaatgtcatggcatctctgggagctgcagcatacagacatgctggctgcagctggctgaattccgggagatgggagactacctaaaggccaagtatgaccaggcgctgaaaattgaaatggataagcggcagctgagagctgggaacagcgccgagggccactgggtgcccgctgaggccttccttcctagcgcagaggcggaactgatctttttagaggaatcaccagattactgtacctgcaattccagcctgggcatctatggcacagagggtcgtgagtgcctacagaacagccacaacacatccaggtgggagcgacgtagctgtgggcgcctgtgcactgagtgtgggctgcaggtggaagagaggaaaactgaggtcataagcagctgtaactgcaaattccagtggtgctgtacggtcaagtgtgaccagtgtaggcatgtggtgagcaagtattactgcgcacgctccccaggcagtgcccagtccctgggtaagggcagtgcctgataataccccacacaagttcacttgattaattgcatcagtggaaggggacatagcttctctcttagagagaacagattggaaagcaatcggaaaattgcagttttggtctgtagtcctcatgatatctgctatcagtggggaaaatggaggcccaagattctacagcatattcctggcggggctgaaattggaacctgggcctcctgactttggcagacccccatttcatctttcctgcaaactactttcccatctttgtgcctgtacttatgcagctttctacagggagagtttggtttggggtctatatctagagggaccttcaaagtatttgttcctttaaatttcagaccatgtccaacccagctgtgctgctgggaatcaggagaatagaagcaaaaaacgaaagagttctgttcagacttctgaagagcagc

SEQ ID NO: 200191 - DNA, 1193 bp, Homo sapiens
  Payload ID: 19497
  Gene Name: wingless-type MMTV integration site family, member 8A
  ENST ID: ENST00000504809
  CDS Start-End: 114-1193
ggaagaccctgccctctcctcacttctctggacttggccctgagctggacctggtccactggggtaggcagggcgatggggaacctgtttatgctctgggcagctctgggcatatgctgtgctgcattcagtgcctctgcctggtaagtcctttcccaaccctcactccttgccaaggaggcccccattgtctcatccccattcacctctgcctcactttttctctttttggtaggtcagtgaacaatttcctgataacaggtcccaaggcctatctgacctacacgactagtgtggccttgggtgcccagagtggcatcgaggagtgcaagttccagtttgcttgggaacgctggaactgccctgaaaatgctcttcagctctccacccacaacaggctgagaagtgctaccagagagacttccttcatacatgctatcagctctgctggagtcatgtacatcatcaccaagaactgtagcatgggtgacttcgaaaactgtggctgtgatgggtcaaacaatggaaaaacaggaggccatggctggatctggggaggctgcagcgacaatgtggaatttggggaaaggatctccaaactctttgtggacagtttggagaaggggaaggatgccagagccctgatgaatcttcacaacaacagggccggcagactggcagtgagagccaccatgaaaaggacatgcaaatgtcatggcatctctgggagctgcagcatacagacatgctggctgcagctggctgaattccgggagatgggagactacctaaaggccaagtatgaccaggcgctgaaaattgaaatggataagcggcagctgagagctgggaacagcgccgagggccactgggtgcccgctgaggccttccttcctagcgcagaggcggaactgatctttttagaggaatcaccagattactgtacctgcaattccagcctgggcatctatggcacagagggtcgtgagtgcctacagaacagccacaacacatccaggtgggagcgacgtagctgtgggcgcctgtgcactgagtgtgggctgcaggtggaagagaggaaaactgaggtcataagcagctgtaactgcaaattccagtggtgctgtacggtcaagtgtgaccagtgtaggcatgtgaccatgtccaacccagctgtgctgctgggaatcagg

SEQ ID NO: 200192 - DNA, 1543 bp, Homo sapiens
  Payload ID: 19497
  Gene Name: wingless-type MMTV integration site family, member 8A
  ENST ID: ENST00000506684
  CDS Start-End: 237-1346
agtccctcctcccagatcccccactgggccggtggctcctgcagccctgccagttaggaacaaatgagaagagctgctgatttcctcccttggacattcagaattttctcacataaatactgaggaagaccctgccctctcctcacttctctggacttggccctgagctggacctggtccactggggtaggcagggcgatggggaacctgtttatgctctgggcagctctgggcatatgctgtgctgcattcagtgcctctgcctggtaagtcctttcccaaccctcactccttgccaaggaggcccccattgtctcatccccattcacctctgcctcactttttctctttttggtaggtcagtgaacaatttcctgataacaggtcccaaggcctatctgacctacacgactagtgtggccttgggtgcccagagtggcatcgaggagtgcaagttccagtttgcttgggaacgctggaactgccctgaaaatgctcttcagctctccacccacaacaggctgagaagtgctaccagagagacttccttcatacatgctatcagctctgctggagtcatgtacatcatcaccaagaactgtagcatgggtgacttcgaaaactgtggctgtgatgggtcaaacaatggaaaaacaggaggccatggctggatctggggaggctgcagcgacaatgtggaatttggggaaaggatctccaaactctttgtggacagtttggagaaggggaaggatgccagagccctgatgaatcttcacaacaacagggccggcagactggcagtgagagccaccatgaaaaggacatgcaaatgtcatggcatctctgggagctgcagcatacagacatgctggctgcagctggctgaattccgggagatgggagactacctaaaggccaagtatgaccaggcgctgaaaattgaaatggataagcggcagctgagagctgggaacagcgccgagggccactgggtgcccgctgaggccttccttcctagcgcagaggcggaactgatctttttagaggaatcaccagattactgtacctgcaattccagcctgggcatctatggcacagagggtcgtgagtgcctacagaacagccacaacacatccaggtgggagcgacgtagctgtgggcgcctgtgcactgagtgtgggctgcaggtggaagagaggaaaactgaggtcataagcagctgtaactgcaaattccagtggtgctgtacggtcaagtgtgaccagtgtaggcatgtggtgagcaagtattactgcgcacgctccccaggcagtgcccagtccctgggtaagggcagtgcctgataataccccacacaagttcacttgattaattgcatcagtggaaggggacatagcttctctcttagagagaacagattggaaagcaatcggaaaattgcagttttggtctgtagtcctcatgatatctgctatcagtggggaaaatggaggcccaagattctacagcatattcctggcggggctgaaattggaacctg

SEQ ID NO: 200193 - DNA, 2112 bp, Homo sapiens
  Payload ID: 19498
  Gene Name: wingless-type MMTV integration site family, member 8B
  Uniprot ID: Q93098
  ENST ID: ENST00000343737
  CDS Start-End: 129-1184
cgcttacacaccaaggaagttgggctttgagaattccatcccactggcactgaggagaatatttctccgtcttgcttacccatctcccagttttttggaattttctctagctgttactccagaggattatgtttctttcaaagccttctgtgtacatctgtcttttcacctgtgtcctccaactcagccacagctggtcggtgaacaatttcctgatgactggtccaaaggcttacctgatttactccagcagtgtggcagctggtgcccagagtggtattgaagaatgcaagtatcagtttgcctgggaccgctggaactgccctgagagagccctgcagctgtccagccatggtgggcttcgcagtgccaatcgggagacagcatttgtgcatgccatcagttctgctggagtcatgtacaccctgactagaaactgcagccttggagattttgataactgtggctgtgatgactcccgcaacgggcaactggggggacaaggctggctgtggggaggctgcagtgacaatgtgggcttcggagaggcgatttccaagcagtttgtcgatgccctggaaacaggacaggatgcacgggcagccatgaacctgcacaacaacgaggctggccgcaaggcggtgaagggcaccatgaaacgcacgtgcaagtgccacggcgtgtctggcagctgcaccacgcagacctgttggctgcagctgcccgagttccgcgaggtgggcgcgcacctgaaggagaagtaccacgcagcactcaaggtggacctgctgcagggtgctggcaacagcgcggccggccgcggcgccatcgccgacacctttcgctccatctctacccgggagctggtgcacctggaggactccccggactactgcctggagaacaaaacgctagggctgctgggcaccgaaggccgagagtgcctaaggcgcgggcgggccctgggtcgctgggaacgccgcagctgccgccggctctgcggggactgcgggctggcggtggaggagcgccgggccgagaccgtgtccagctgcaactgcaagttccactggtgctgcgcagtccgctgcgagcagtgccgccggagggtcaccaagtacttctgtagccgcgcagagcggccgcgggggggcgctgcgcacaaacccgggagaaaaccctaagggtttcctctgccccctccttttcccactggttcttggcttcctttagagaccccggtaattgtggaacctagggaatggggaacccgctctcccagacctagggatcctgagagggagagactgcaatttctccaaagcttgccactttccagcctgtttccccaattcctctgtgctctcctagagctctgtctgaatcctcgcagccacacctaggtctgagaactcaggctttgagttactgatcttccttggattaggagaacaggtgttcctcctcccctctcctagcagccctaatgtctgacctagcctatcaagccttaggcgctggaagaacccttctcagacacgcaggacccaggtaaagtcaaagctttgcccttttgcccactgtctgctaccagggctcacccactgctgcacctctcttctgcacagctcctcccctgctacctgctgagccagattccccaggaatcttgaatgctttctctcctcttctccctttcctttcccagaaaaactgaggaaactggccccggaaaagcatgtctttggggttggttcctagaggcagaggttgaagatggaagagggagctctggagtgctaacttgaacaccaagggtgctactcatccctatggtatcatatcatgaatggactttactagtggggcaatgactttcctagacaataacccgagggactccagatacataccccgaaggtctaggaaatacgttaagggcagattacagtcatttcctaccctttaaaggtaacttctcccttctcctgacctacttcctcctagcaaccaactttacctcttcttctccaaaggatctttgttcctctgagccaagactgaggtaaataaagccactttcctcttcagatcctggtctgcacctctaga

SEQ ID NO: 200194 - DNA, 3971 bp, Homo sapiens
  Payload ID: 19499
  Gene Name: wingless-type MMTV integration site family, member 9A
  Uniprot ID: O14904
  ENST ID: ENST00000272164
  CDS Start-End: 12-1109
ggcgcggcaagatgctggatgggtccccgctggcgcgctggctggccgcggccttcgggctgacgctgctgctcgccgcgctgcgcccttcggccgcctacttcgggctgacgggcagcgagcccctgaccatcctcccgctgaccctggagccagaggcggctgcccaggcgcactacaaggcctgcgaccggctgaagctggagcggaagcagcggcgcatgtgccgccgggacccgggcgtggcagagacgctggtggaggccgtgagcatgagtgcgctcgagtgccagttccagttccgctttgagcgctggaactgcacgctggagggccgctaccgggccagcctgctcaagcgaggcttcaaggagactgccttcctctatgccatctcctcggctggcctgacgcacgcactggccaaggcgtgcagcgcgggccgcatggagcgctgtacctgcgatgaggcacccgacctggagaaccgtgaggcctggcagtgggggggctgcggagacaaccttaagtacagcagcaagttcgtcaaggaattcctgggcagacggtcaagcaaggatctgcgagcccgtgtggacttccacaacaacctcgtgggtgtgaaggtgatcaaggctggggtggagaccacctgcaagtgccacggcgtgtcaggctcatgcacggtgcggacctgctggcggcagttggcgcctttccatgaggtgggcaagcatctgaagcacaagtatgagacggcactcaaggtgggcagcaccaccaatgaagctgccggcgaggcaggtgccatctccccaccacggggccgtgcctcgggggcaggtggcagcgacccgctgccccgcactccagagctggtgcacctggatgactcgcctagcttctgcctggctggccgcttctccccgggcaccgctggccgtaggtgccaccgtgagaagaactgcgagagcatctgctgtggccgcggccataacacacagagccgggtggtgacaaggccctgccagtgccaggtgcgttggtgctgctatgtggagtgcaggcagtgcacgcagcgtgaggaggtctacacctgcaagggctgagttcccaggccctgccagccctgctgcacagggtgcaggcattgcacacggtgtgaagggtctacacctgcacaggctgagttcctgggctcgaccagcccagctgcgtggggtacaggcattgcacacagtgtgaatgggtctacacctgcatgggctgagtccctgggctcagacctagcagcgtggggtgagtccctgggctcagtcctagctgcatggggtgcaggcattgcacagagcatgaatgggcctacacctgccaaggctgaatccctgggcccagtcagccctgctgcacatggcacaggcattgcacacggtgtgaggagtgtacacctgcaagggctgaggccctgggcccagtcagccctgctgctcagagtgcaggcattgcacatggtgtgagaaggtctacacctgcaagggacgagtccccgggcctggccaaccctgctgtgcagggtgagggccatgcatgcagtatgaggggtctacacctgcaaggactgagaggcttttctagcacgtcggggcgtacagctggagcagggtgccgggggtcctctgggttggctgtccaagccctgtatctccccctctccaggacccagaggcgggggttggctctggtctggcgtatgcaacctctctgcttgtgccctgggcctcagcttcctccctctgacccgagagcattgcaccaatgctttctgagctttctcccatccctaacacaccagtccctgggaagcggctccccatgccagtccattggctttccctccccacctcctctgaggcatgggtggcaggtgcaccttggtgaccatgcggcctccgtgtgggccacccgttggggactggcctggcccaggctgccccaacaccagcactgtcttcagagactcaaaccactagaagaggacgcagcctgttctgcactcccagggcccggccgtgcgggtgcccaggctcggggggacactgccgacctctgacgttgagcacttctctttggagtaaatatcagtgacttttaaattattatgattatttaactaatataataattattattttctccatccctgccacctccccggctgcagctccccgctctcggccaagccccagtctgggagggccccgccttccgtccctgacatattccctcctaaccctgcctctgatctgcttagttgtttgaaaccactaaatcgagatagatgtgtgtagttaaggaaatacagtgagctgcgtctggccacagcccttggggcttctggaagccagctcccccagccccatgccagccagccactgccacgtggtgggccagccggcggcccctgccctgcaccctgtgggcagacgcccggcctccaggcagctcagtgcagattctcgagctgggggtggtggagaggggcgggcatggtgagggggcagggcagccctttgattggttcatgtcatgtcatgaggaagctgcttgctttgtgtcactgggggacagattgggacagatgccggtggaggcagtcttgggctcgcatctggccatggaacgccatgctttatggccctgctgttgtgtgtgctggggacagggtgacctgcactgacctggcttggtttgagggtgtagtgtgtgtgtgtgttgtgagagtgtgtgtgctggcgtggtcagtgtgcatacgtgtgcgtatgttgtgagtgttgtgagtgcgtgtgtgctggcgtggtcaatgtgtgtaagcgtgtgttgtataaatgcatgctggcatggtctgtgtgtgtgtgtgtgtgtgtgtgtgtgtgtgtgtgtatactggcatggtcagcttggctgtgctgtgctgtcagtggcatggcggtgccttaggttcccagagcctctcgccctgggctccgtcttgtgggtgtcctgatggctgtgggctgggttctgggcgggttgctggtatggatacaggaactactgagtgaataggtgtctcagagccctaagggtctccagaaagccggggtgtctgtgtttttaaaagaaaacctatttatgttgctgtgggtctctgccgtccctgtgttatagtacataagaacctttattctcctgtggttcagagagcaccccgacatgtgcctgcagctgcatccccgtaccacagtgtgggtgcaagacgctgggtttgtcctttgtctggtgaagcctggctagaaggggtgggggtggtagcccctgccctctgcagtgtccgcatccactggtccctgagcagcatagctggccacaccctcatgacatgacaagactgtcactcagtcactattgggtctatgaagggcgtcaagtcagaggaaggtttttatttttaatcaaataccacatttagctctatgtcataaatattcagaaaactatttttttaaacaaggcagaccaaaaatgtctgctagctagttggtttctatacaaatacatattcgaatgtcttgctggatgaagaggccgctcagccggagcctcctgtttcatgcgcttctcttctgaggggcagtagaggagaaagggctgttgggaggggttcagcccgctccttggccaggggatcccagccaccttctctgcaccaggccctgccttgagggacctggacccccaggtggcttctggccaggtgtgggtgggtgggaggggccctgtctgtgctccgagtctccgtgcgtgcaatgatttctctacctcatctgtgtggcccgtcccagagggactgtggagaatgtatttatttaacagctttgtgtcacagaaccagaaacaaatggaaacattaaataaatgtattttaaattata

SEQ ID NO: 200195 - DNA, 1376 bp, Homo sapiens
  Payload ID: 19500
  Gene Name: wingless-type MMTV integration site family, member 9B
  Uniprot ID: O14905
  ENST ID: ENST00000290015
  CDS Start-End: 54-1127
tgcgagcttgagcggcgcgaggagatgctagagggcgcagcgccgccagcaccatgcgccccccgcccgcgctggccctggccgggctctgcctgctggcgctgcccgccgccgccgcctcctacttcggcctgaccgggcgggaagtcctgacgcccttcccaggattgggcactgcggcagccccggcacagggcggggcccacctgaagcagtgtgacctgctgaagctgtcccggcggcagaagcagctctgccggagggagcccggcctggctgagaccctgagggatgctgcgcacctcggcctgcttgagtgccagtttcagttccggcatgagcgctggaactgtagcctggagggcaggatgggcctgctcaagagaggcttcaaagagacagctttcctgtacgcggtgtcctctgccgccctcacccacaccctggcccgggcctgcagcgctgggcgcatggagcgctgcacctgtgatgactctccggggctggagagccggcaggcctggcagtggggcgtgtgcggtgacaacctcaagtacagcaccaagtttctgagcaacttcctggggtccaagagaggaaacaaggacctgcgggcacgggcagacgcccacaatacccacgtgggcatcaaggctgtgaagagtggcctcaggaccacgtgtaagtgccatggcgtatcaggctcctgtgccgtgcgcacctgctggaagcagctctccccgttccgtgagacgggccaggtgctgaaactgcgctatgactcggctgtcaaggtgtccagtgccaccaatgaggccttgggccgcctagagctgtgggcccctgccaggcagggcagcctcaccaaaggcctggccccaaggtctggggacctggtgtacatggaggactcacccagcttctgccggcccagcaagtactcacctggcacagcaggtagggtgtgctcccgggaggccagctgcagcagcctgtgctgcgggcggggctatgacacccagagccgcctggtggccttctcctgccactgccaggtgcagtggtgctgctacgtggagtgccagcaatgtgtgcaggaggagcttgtgtacacctgcaagcactaggcctactgcccagcaagccagtctggcactgccaggacctcctgtggcacccttcaagctgcccagccggccctctgggcagactgtcatcacatgcatgcataaaccggcatgtgtgccaatgcacacgagtgtgccactcaccaccattccttggccagccttttgcctccctcgatactcaacaaagagaagcaaagcctcctcccttaacccaagcatccccaaccttgttgaggacttggagag

SEQ ID NO: 200196 - DNA, 2654 bp, Homo sapiens
  Payload ID: 19500
  Gene Name: wingless-type MMTV integration site family, member 9B
  ENST ID: ENST00000393461
  CDS Start-End: 54-1043
tgcgagcttgagcggcgcgaggagatgctagagggcgcagcgccgccagcaccatgcgccccccgcccgcgctggccctggccgggctctgcctgctggcgctgcccgccgccgccgcctcctacttcggcctgaccgggcgggaagtcctgacgcccttcccaggattgggcactgcggcagccccggcacagggcggggcccacctgaagcagtgtgacctgctgaagctgtcccggcggcagaagcagctctgccggagggagcccggcctggctgagaccctgagggatgctgcgcacctcggcctgcttgagtgccagtttcagttccggcatgagcgctggaactgtagcctggagggcaggatgggcctgctcaagagaggcttcaaagagacagctttcctgtacgcggtgtcctctgccgccctcacccacaccctggcccgggcctgcagcgctgggcgcatggagcgctgcacctgtgatgactctccggggctggagagccggcaggcctggcagtggggcgtgtgcggtgacaacctcaagtacagcaccaagtttctgagcaacttcctggggtccaagagaggaaacaaggacctgcgggcacgggcagacgcccacaatacccacgtgggcatcaaggctgtgaagagtggcctcaggaccacgtgtaagtgccatggcgtatcaggctcctgtgccgtgcgcacctgctggaagcagctctccccgttccgtgagacgggccaggtgctgaaactgcgctatgactcggctgtcaaggtgtccagtgccaccaatgaggccttgggccgcctagagctgtgggcccctgccaggcagggcagcctcaccaaaggcctggccccaaggtctggggacctggtgtacatggaggactcacccagcttctgccggcccagcaagtactcacctggcacagcaggttggagtgcagtggcaagatctcagctcatcacaacctccacctcccggattcaagcgattctcccgtctcagctgcctgagtaactgggattacaggcatgcaccaccacgcctgactaattttgtatttttggctaattttgtatttttagtagagatgaggtttctccatgttggtcaggctggtctcgaactcccgacctcaggtgatccacccgcctcggcctcccaaagtgctgggattaccggtgtgagccactgcgcctggccagcatttttttttttgagacagagtctcgctctgtcacccaggctggagtgcactggcatgatctctgctcactgcaacctccacctcccaggttcaagtgactctcttggctcagcctcccaagtagctgggactacaggcgtgcaccaccacgctcagctaatttttgtattttcagtagagatggacttttatcatgttggccaggctggtctcgaactcctggtctcaagtgatctgccagcctcagtctcccagggtgctgggattacaggtatgagccactgtgcccggccgccttagcattttgtgtatgttttgagtgacagccatctgtcaatattggcatcttttgttttattggatgaatgaatgaacaaatgaatttataaatcttgttctccatactgtttacccatcctcatttccctcacttggcagtgtcttgccatagcaggcttcctggtgtagctggcaccacatccctccctgacacacggcctccttattgcccctgctacttgcctttttctctcctccctttccttcccttcattccccctggcttccccttcccaactctcagaatccctggctgcctcaaccacaagaacaaagctgtgcagaagcctgaacctggagcttctgcaagatgaggtggggaatgagctaacccagctggaaagcagcctgctgatccctgggagagacggcgcttgggccaacccaccctccccaaggtggtcccctgcctcagctccacccgcttccccagatgaacttctttctctccctccagcgcttcagaggatgcacagctgtgtgtacttgaccctgagcctgggctagtgctggggacatagccagtctggctgatacccatatcagtacagaaagctgtcctcacccacttcatgcactagttgcattggtatgaagcattagctttataactatcccatttactgcaggcataaacctatatcaattggtggggatggaggttaaatgagagaagacatcaaagatgcatagaactattgggcccctttcaattaataaataaaatttgtaggaggccattagtttgtactgtgctcctgtaatggacccaacagaccaaacaaatatggagtcactcatgctaaatgcaattaacttgggagtatactcctaagttgcaaaaagtggtaacaaatagctgagttttggggcagttacagcagctgagcatctgtcaatgtaggtggccaggtgattcaattaaggatgctgtaaccaattaagctgtatctacacctcacttctgttttctatctacaaatactgcgtgatcatgttgctggttggagttctttgaataagctgtggttcggagggatgcccaattctagaatcatgaataaaagcctattaagatcttt

SEQ ID NO: 200197 - DNA, 543 bp, Homo sapiens
  Payload ID: 19500
  Gene Name: wingless-type MMTV integration site family, member 9B
  ENST ID: ENST00000575372
  CDS Start-End: 146-543
agcaaaccgggaagcagcatgtgcgtggaagctgggcctgagccctgacgcttcagctgagctccctgggtgatggctccttccacaagttctaacgtcccactgaaagcaagctgcaatttctgttgcttcttgtatcaattgcatgaaaggacgggcagtttcttttgatcctctggcatgccaaggcctgaatgccagtcctgggagccttaccagccctctaagaagaatcagaagcctgaccgggcgggaagtcctgacgcccttcccaggattgggcactgcggcagccccggcacagggcggggcccacctgaagcagtgtgacctgctgaagctgtcccggcggcagaagcagctctgccggagggagcccggcctggctgagaccctgagggatgctgcgcacctcggcctgcttgagtgccagtttcagttccggcatgagcgctggaactgtagcctggagggcaggatgggcctgctcaagagaggcttcaaagagacagctttcctgtacgcggtgtcctctgccgccct

SEQ ID NO: 200198 - DNA, 1376 bp, Homo sapiens; identical to SEQ ID NO: 200195
  Payload ID: 19500
  Gene Name: wingless-type MMTV integration site family, member 9B
  Uniprot ID: O14905
  ENST ID: ENST00000613753
  CDS Start-End: 54-1127

SEQ ID NO: 200199 - DNA, 543 bp, Homo sapiens; identical to SEQ ID NO: 200197
  Payload ID: 19500
  Gene Name: wingless-type MMTV integration site family, member 9B
  ENST ID: ENST00000633753
  CDS Start-End: 146-543

SEQ ID NO: 200200 - DNA, 2654 bp, Homo sapiens; identical to SEQ ID NO: 200196
  Payload ID: 19500
  Gene Name: wingless-type MMTV integration site family, member 9B
  ENST ID: ENST00000633488
  CDS Start-End: 54-1043

SEQ ID NO: 200201 - DNA, 1849 bp, Homo sapiens
  Payload ID: 19501
  Gene Name: Wiskott-Aldrich syndrome
  Uniprot ID: P42768
  ENST ID: ENST00000376701
  CDS Start-End: 76-1584
gctgctcattgcggaagttcctcttcttaccctgcacccagagcctcgccagagaagacaagggcagaaagcaccatgagtgggggcccaatgggaggaaggcccgggggccgaggagcaccagcggttcagcagaacataccctccaccctcctccaggaccacgagaaccagcgactctttgagatgcttggacgaaaatgcttgacgctggccactgcagttgttcagctgtacctggcgctgccccctggagctgagcactggaccaaggagcattgtggggctgtgtgcttcgtgaaggataacccccagaagtcctacttcatccgcctttacggccttcaggctggtcggctgctctgggaacaggagctgtactcacagcttgtctactccacccccacccccttcttccacaccttcgctggagatgactgccaagcggggctgaactttgcagacgaggacgaggcccaggccttccgggccctcgtgcaggagaagatacaaaaaaggaatcagaggcaaagtggagacagacgccagctacccccaccaccaacaccagccaatgaagagagaagaggagggctcccacccctgcccctgcatccaggtggagaccaaggaggccctccagtgggtccgctctccctggggctggcgacagtggacatccagaaccctgacatcacgagttcacgataccgtgggctcccagcacctggacctagcccagctgataagaaacgctcagggaagaagaagatcagcaaagctgatattggtgcacccagtggattcaagcatgtcagccacgtggggtgggacccccagaatggatttgacgtgaacaacctcgacccagatctgcggagtctgttctccagggcaggaatcagcgaggcccagctcaccgacgccgagacctctaaacttatctacgacttcattgaggaccagggtgggctggaggctgtgcggcaggagatgaggcgccaggagccacttccgccgcccccaccgccatctcgaggagggaaccagctcccccggccccctattgtggggggtaacaagggtcgttctggtccactgccccctgtacctttggggattgccccacccccaccaacaccccggggacccccacccccaggccgagggggccctccaccaccaccccctccagctactggacgttctggaccactgccccctccaccccctggagctggtgggccacccatgccaccaccaccgccaccaccgccaccgccgcccagctccgggaatggaccagcccctcccccactccctcctgctctggtgcctgccgggggcctggcccctggtgggggtcggggagcgcttttggatcaaatccggcagggaattcagctgaacaagacccctggggccccagagagctcagcgctgcagccaccacctcagagctcagagggactggtgggggccctgatgcacgtgatgcagaagagaagcagagccatccactcctccgacgaaggggaggaccaggctggcgatgaagatgaagatgatgaatgggatgactgagtggctgagttacttgctgccctgtgctcctccccgcaggacatggctccccctccacctgctctgtgcccaccctccactctcctcttccaggcccccaaccccccatttcttccccaccaacccctccaatgctgttatccctgcctggtcctcacactcacccaacaatcccaaggccctttttatacaaaaattctcagttctcttcactcaaggatttttaaagaaaaataaaagaattgtctttctgtctctctataaa

SEQ ID NO: 200202 - DNA, 933 bp, Homo sapiens
  Payload ID: 19501
  Gene Name: Wiskott-Aldrich syndrome
  ENST ID: ENST00000450772
  CDS Start-End: 284-933
tcaagactaagtcaaaggaggagagggcaacgcggtgggcaggagagaggccaacggccgcccggggcgaggggagccggtaggacgggaccaggactggccgacccggccccgcgcggggaagggggcgccttcctcccacaacacaaaacgtggaaatggggttttgccatgttgcccaggctcgtcttgaactcctgacctcaagtgatccactcgtctcggcctcccaaagtgctgggattacagagcctcgccagagaagacaagggcagaaagcaccatgagtgggggcccaatgggaggaaggcccgggggccgaggagcaccagcggttcagcagaacataccctccaccctcctccaggaccacgagaaccagcgactctttgagatgcttggacgaaaatgcttgacgctggccactgcagttgttcagctgtacctggcgctgccccctggagctgagcactggaccaaggagcattgtggggctgtgtgcttcgtgaaggataacccccagaagtcctacttcatccgcctttacggccttcaggctggtcggctgctctgggaacaggagctgtactcacagcttgtctactccacccccacccccttcttccacaccttcgctggagatgactgccaagcggggctgaactttgcagacgaggacgaggcccaggccttccgggccctcgtgcaggagaagatacaaaaaaggaatcagaggcaaagtggagacagacgccagctacccccaccaccaacaccagccaatgaagagagaagaggagggctcccacccctgcccctgcatccaggtggagaccaaggaggccctccagtgggtccgctctccctggggctggcgacagtggacatccagaaccctgacatcacgagttcacgataccgtgggctcccagc

SEQ ID NO: 200203 - DNA, 4435 bp, Homo sapiens
  Payload ID: 19502
  Gene Name: Wiskott-Aldrich syndrome-like
  Uniprot ID: O00401
  ENST ID: ENST00000223023
  CDS Start-End: 334-1851
atgttggattgtgcggccgccgccgccgctgcgggagggttgggggaggagttgggagtttagcgcagtcgccggagtgcgaggacaacgaccatccggccctagcctggccgggcgggtgccgggagcttccctttctcagcgcggcgcgaaggtggctcgccgtcagcgcctgcttccctcgacctcgtcctcctccccgctccggaggagctgcgagatgtggcgcctctgactccacttctccccgcccctgtcaccgagagggggaacgagctctcgcccactcgccggaggagacggccctggactcccaaccccgccggcgaaaccatgagctccgtccagcagcagccgccgccgccgcggagggtcaccaacgtggggtccctgttgctcaccccgcaggagaacgagtccctcttcactttcctcggcaagaaatgtgtgactatgtcttcagcagtggtgcagttatatgcagcagatcggaactgtatgtggtcaaagaagtgcagtggtgttgcttgtcttgttaaggacaatccacagagatcttattttttaagaatatttgacattaaggatgggaaactattgtgggaacaagagctatacaataactttgtatataatagtcctagaggatattttcatacctttgctggagatacttgtcaagttgctcttaattttgccaatgaagaagaagcaaaaaaatttcgaaaagcagttacagaccttttgggccgtcgacaaaggaaatctgagaaaagacgagatcccccaaatggtcctaatctacccatggctacagttgatataaaaaatccagaaatcacaacaaatagattttatggtccacaagtcaacaacatctcccataccaaagaaaagaagaagggaaaagctaaaaagaagagattaaccaaggcagatataggaacaccaagcaatttccagcacattggacatgttggttgggatccaaatacaggctttgatctgaataatttggatccagaattgaagaatcttttcgatatgtgtggaatctcagaggcacaacttaaagacagagaaacatcaaaagttatatatgactttattgaaaaaacaggaggtgttgaagctgttaaaaatgaactgcggaggcaagcaccaccacctccaccaccatcaaggggagggccacctcctcctcctccccctccacacaactcaggtcctcctcctcctcctgctaggggaagaggcgctcctcccccaccaccttcaagagctcccacagctgcacctccaccaccgcctccttccaggccaagtgtagcagtccctccaccaccgccaaataggatgtaccctcctccacctccagcccttccctcctcagcaccttcagggcctccaccaccacctccatctgtgttgggggtagggccagtggcaccacccccaccgcctccacctccacctcctcctgggccaccgcccccgcctggcctgccttctgatggggaccatcaggttccaactactgcaggaaacaaagcagctcttttagatcaaattagagagggtgctcagctaaaaaaagtggagcagaacagtcggccagtgtcctgctctggacgagatgcactgttagaccagatacgacagggtatccaactaaaatctgtggctgatggccaagagtctacaccaccaacacctgcacccacttcaggaattgtgggtgcattaatggaagtgatgcagaaaaggagcaaagccattcattcttcagatgaagatgaagatgaagatgatgaagaagattttgaggatgatgatgagtgggaagactgatctatatattatatatatatatatatttttaaggtgaaatactaaacactactttctgtctgtggattctgtaaaattatcatgtaaatgttctaccaatttgctgtatatttttgttgccttttttgcttttttttaatctgtgcaatacctcatttaatctgtaaaggtttgtcgtaatcctctacaaagctactccctgttattgtgtgcaagtttacaccaggatgctcacttgatttgtgaatatttttcattccatcaacaagggagtttaaatactatatgtgagactgacaaaaaccttaatgtaatttacttataatgccagaaggaaaacactattttcataccctactttttctgtacctaaattttcttaaaaaaaaatctagtatagcactacattcttttttaagtgatgcagaccttagtttctttagcccctttattttgaatacaatgctacatatgaatgttgaagctgatacattgcacagttctgtagacatcactacaccgatgtagtttctcaaattttagcaatatgctctacataaaatcactacagagatactagtggggaagacgattaacacacctcttacagtaatactgcctgttattggtatagcagtggtatttgcagactgggatcataaggagcccttaaatacttgttattgactggggttatttttatgctgtagcaaatgtgacaggctctttttagcaaaatttttgaaaatttttttggtattactctgaaacaaaatttaagttggagtttcagggatttagggagtagttttcattctacatgaactgaggtaatattatggtaactccaatatttggttaaaaaaactatacaaatcagaatagtactaaaatactgtagaattttagcatttttattttgcactttgtgtggattgaggtgttcagaaataccaaccataaaaatgtaatctagttggcaaaggtgtgcgctaaaacacggaaccgaacatgcattgatttggataacttttgagggtttttgtcaaatagcatgtgaagagttacatttttcttaaaagattggtggtcccaatgtcagagttcttggaacagataactgaatgatagattttttttttttaaagataaaactttacaacctgcacatttgttatgcatactaaatggtgtgttaaaattagggtttctttgcctctctacactacactaatctgcctaaaggtggttgtttcatatttataatgctaattatcatacctacctactttaaattttaggtagaaaattatctgatttaaatacaaacatatttttctcacattgagtaatatgcataatgtagttccaaatgtatttcattactatagtcacaatatccaactaaaaattacgctatctagaattgtaccaaccaaaatctcgtattggcagatcttgacaggctggacctgcaagatgtggcttgaattttaaccatttattacataatctctagtgatcatgcatctagttatcataagaaataatttaaaaggttttgttgctgaaagcagtaagtggtgcagtaaaatacttaagttattcaaagaatgttatctttcttgcaagagtaatttaagcacatgggaaagattctagactttttgtttcttgcaacaacagtgccctctgctgctagaaacctttttctacttactatcatttttattgtggcttgagctcagtcaatctggtgcagatgaggctggacaactactaaccaataaaatcaggagtttgtacaaaagttaaatggaacattataattattttaagtaatgttaattgaaaaaattttttctttttgacaatataaaaaacattttaaatttcctagaaatgtcttcagggtaatgccaatttaagatctctcttaacttgtggccaagaaattctagattttccagctgactttggtataatatatatttatcaggaacttctctcagcagagagtacccattcttcgagttcaaagcacaattttaaacatgtaaaatggatatataatttgccaaaggtaattaatttattctttttttcttaaagaagaaaaagacattggttgttgttacaaaaagtctaaattactgttggttgaaacacagcagctgtggagttcagtccaggcatgaagactaaatctgctttaccaagtaaggtgtaaggttgcatgtttcagtcctctaccatcctgcactgtgagcagcactatacctgtgcgttgtctgaaagccttccgtatattctccagctaaatggtcgtctggtagcctttgcatttaacaaactagcatgaggctttttatatctaaatgctacgtgatagacaatttcagctagccacatattgtatgtatgagattcataaagactttcaatcatttcattttcagacaactgaaattttgtttagtatgtgaattctttttttgaaatgtatagtgaataggatgttgcactggtggcaattcatcatggagcataataaaattaatttgacccaaatagaataaaataa

SEQ ID NO: 200204 - DNA, 10452 bp, Homo sapiens
  Payload ID: 19503
  Gene Name: WNK lysine deficient protein kinase 1
  Uniprot ID: Q9H4A3
  ENST ID: ENST00000315939
  CDS Start-End: 644-7792
ccggcccttcgcctctgggcgatgggcgacctgtgaggccggtccccatcgctgggggcgcgtgtgggaggaggcggccgcccgagtgaccgggagccgggccgcggccttccctcgcccgcctcggcccctcccactcctctgccccggggccgccaccgcccgggcgtcggacctggtcccgtgctcgcggtgccgccgccctctgggcctagcccgcccagctcggcgagcggcggcagtgggagccgcgtccgccgcatccgcctcgactcggtgccggcccctggccctcccctcatgactgcggcgcctctgctgccaccgcccgcccggccgccgctcgccgcaggatggatgcggaccgtgcggcgctaacccccgtggctcagctcccgaatcgcccgccttcgagccctcctcgtgagccgcagcagcctcggtgccagcccccgccgcagctgggcccagcggtccgcctgtccctcgttgcggcttgtcggtgctgagtgaggcgtcgtccgggtcggcgcgaacccgcccggccgcggttccctgcagacctctgcgcgggcggctcggcccttcacgcccttttcgttcacgaatccgagcccgctcgcctctctccagcgaaccgaccatgtctggcggcgccgcagagaagcagagcagcactcccggttccctgttcctctcgccgccggctcctgcccccaagaatggctccagctccgattcctccgtgggggagaaactgggagccgcggccgccgacgctgtgaccggcaggaccgaggagtacaggcgccgccgccacactatggacaaggacagccgtggggcggccgcgaccactaccaccactgagcaccgcttcttccgccggagcgtcatctgtgactccaatgccactgcactggagcttcccggccttcctctttccctgccccagcccagcatccccgcggctgtcccgcagagtgctccaccggagccccaccgggaagagaccgtgaccgccaccgccacttcccaggtagcccagcagcctccagccgctgccgcccctggggaacaggccgtcgcgggccctgccccctcgactgtccccagcagtaccagcaaagaccgcccagtgtcccagcctagccttgtggggagcaaagaggagccgccgccggcgagaagtggcagcggcggcggcagcgccaaggagccacaggaggaacggagccagcagcaggatgatatcgaagagctggagaccaaggccgtgggaatgtctaacgatggccgctttctcaagtttgacatcgaaatcggcagaggctcctttaagacggtctacaaaggtctggacactgaaaccaccgtggaagtcgcctggtgtgaactgcaggatcgaaaattaacaaagtctgagaggcagagatttaaagaagaagctgaaatgttaaaaggtcttcagcatcccaatattgttagattttatgattcctgggaatccacagtaaaaggaaagaagtgcattgttttggtgactgaacttatgacgtctggaacacttaaaacgtatctgaaaaggtttaaagtgatgaagatcaaagttctaagaagctggtgccgtcagatccttaaaggtcttcagtttcttcatactcgaactccacctatcattcaccgcgatcttaaatgtgacaacatctttatcaccggccctactggctcagtcaagattggagacctcggtctggcaaccctgaagcgggcttcttttgccaagagtgtgataggtaccccagagttcatggcccctgagatgtatgaggagaaatatgatgaatccgttgacgtttatgcttttgggatgtgcatgcttgagatggctacatctgaatatccttactcggagtgccaaaatgctgcacagatctaccgtcgcgtgaccagtggggtgaagccagccagttttgacaaagtagcaattcctgaagtgaaggaaattattgaaggatgcatacgacaaaacaaagatgaaagatattccatcaaagaccttttgaaccatgccttcttccaagaggaaacaggagtacgggtagaattagcagaagaagatgatggagaaaaaatagccataaaattatggctacgtattgaagatattaagaaattaaagggaaaatacaaagataatgaagctattgagttttcttttgatttagagagagatgtcccagaagatgttgcacaagaaatggtagagtctgggtatgtctgtgaaggtgatcacaagaccatggctaaagctatcaaagacagagtatcattaattaagaggaaacgagagcagcggcagttggtacgggaggagcaagaaaaaaaaaagcaggaagagagcagtctcaaacagcaggtagaacaatccagtgcttcccagacaggaatcaagcagctcccttctgctagcaccggcatacctactgcttctaccacttcagcttcagtttctacacaagtagaacctgaagaacctgaggcagatcaacatcaacaactacagtaccagcaacccagtatatctgtgttatctgatgggacggttgacagtggtcagggatcctctgtcttcacagaatctcgagtgagcagccaacagacagtttcatatggttcccaacatgaacaggcacattctacaggcacagtcccagggcatataccttctactgtccaagcacagtctcagccccatggggtatatccaccctcaagtgtggcacaggggcagagccagggtcagccatcctcaagtagcttaacaggggtttcatcttcccaacccatacaacatcctcagcagcagcagggaatacagcagacagcccctcctcaacagacagtgcagtattcactttcacagacatcaacctccagtgaggccactactgcacagccagtgagtcagcctcaagctccacaagtcttgcctcaagtatcagctggaaaacagcttccagtttcccagccagtaccaactatccaaggcgaacctcagatcccagttgcgacacaaccctcggttgttccagtccactctggtgctcatttccttccagtgggacagccgctccctactcccttgctccctcagtaccctgtctctcagattcccatatcaactcctcatgtgtctacggctcagacaggtttctcatcccttcccatcacaatggcagctggcattactcagcctctgctcacgttggcttcatctgctacaacagctgcgatcccgggggtatcaactgtggttcctagtcagcttccaacccttctgcagcctgtgactcagctgccaagtcaggttcacccacagctcctacaaccagcagttcagtccatgggaataccagctaaccttggacaagctgctgaggttccactttcctctggagatgttctgtaccagggcttcccacctcgactgccaccacagtacccaggagattcaaatattgctccctcttccaacgtggcttctgtttgcatccattctacagtcctatcccctcccatgccgacagaagtactggctacacctgggtactttcccacagtggtgcagccttatgtggaatcaaatcttttagttcctatgggtggtgtaggaggacaggttcaagtgtcccagccaggagggagtttagcacaagcccccactacatcctcccagcaagcagttttggagagtactcagggagtctctcaggttgctcctgcagagccagttgcagtagcacagacccaagctacccagccgaccactttggcttcctctgtagacagtgcacattcagatgttgcttcaggtatgagtgatggcaatgagaacgtcccatcttccagtggaaggcatgaaggaagaactacaaaacggcattaccgaaaatctgtaaggagtcgctctcgacatgaaaaaacttcacgcccaaaattaagaattttgaatgtttcaaataaaggagaccgagtagtagaatgtcaattagagactcataataggaaaatggttacattcaaatttgacctagatggtgacaaccccgaggagatagcaacaattatggtgaacaatgactttattctagcaatagagagagagtcgtttgtggatcaagtgcgagaaattattgaaaaagctgatgaaatgctcagtgaggatgtcagtgtggaaccagagggtgatcagggattggagagtctacaaggaaaggatgactatggcttttcaggttctcagaaattggaaggagagttcaaacaaccaattcctgcgtcttccatgccacagcaaataggcattcctaccagttctttaactcaagttgttcattctgcgggaaggcggtttatagtgagtcctgtgccagaaagccgattacgagaatcaaaagttttccccagtgaaataacagatacagttgctgcctctacagctcagagccctggaatgaacttgtctcactctgcatcatcccttagtctacaacaggccttttctgaacttagacgtgcccaaatgacagaaggacccaacacagcacctccaaactttagtcatacaggaccaacatttccagtagtacctcctttcttaagtagcattgctggagtcccaaccacagcagcagccacagcaccagtccctgcaacaagcagccctcctaatgacatttccacatcagtaattcagtctgaggttacagtgcccactgaagaggggattgctggagttgccaccagcacaggtgtggtaacttcaggtggtctccccataccacctgtgtctgaatcaccagtactttccagcgtagtttcaagtatcacaatacctgcagttgtctcaatatctactacatccccgtcacttcaagtccccacatccacatctgagatcgttgtttctagtacagcactgtatccttcagtaacagtttcagcaacttcagcctctgcagggggcagtactgctaccccaggtcctaagcctccagctgtagtatctcagcaggcagcaggcagcactactgtgggagccacattaacatcagtttctaccaccacttcattcccaagcacagcttcacagctgtgcattcagcttagcagcagtacttctactcctactttagctgaaaccgtggtagttagcgcacactcactagataagacatctcatagcagtacaactggattggctttctccctctctgcaccatcttcctcttcctctcctggagcaggagtgtctagttatatttctcagcctggtgggctgcatcctttggtcattccatcagtgatagcttctactcctattcttccccaagcagcaggacctacttctacacctttattaccccaagtacctagtatcccacccttggtacagcctgttgccaatgtgcctgctgtacagcagacactaattcatagtcagcctcaaccagctttgcttcccaaccagccccatactcattgtcctgaagtagattctgatacacaacccaaagctcctggaattgatgacataaagactctagaagaaaagctgcggtctctgttcagtgaacacagctcatctggagctcagcatgcctctgtctcactggagacctcactagtcatagagagcactgtcacaccaggcatcccaactactgctgttgcaccaagcaaactcctgacttctaccacaagtacttgcttaccaccaaccaatttaccactaggaacagttgctttgccagttacaccagtggtcacacctgggcaagtttctaccccagtcagcactactacatcaggagtgaaacctggaactgctccctccaagccacctctaactaaggctccggtgctgccagtgggtactgaacttccagcaggtactctacccagcgagcagctgccaccttttccaggaccttctctaacccagtcccagcaacctctagaggatcttgatgctcaattgagaagaacacttagtccagagatgatcacagtgacttctgcggttggtcctgtgtccatggcggctccaacagcaatcacagaagcaggaacacagcctcagaagggtgtttctcaagtcaaagaaggccctgtcctagcaactagttcaggagctggtgtttttaagatgggacgatttcaggtttctgttgcagcagacggtgcccagaaagagggtaaaaataagtcagaagatgcaaagtctgttcattttgaatccagcacctcagagtcctcagtgctatcaagtagtagtccagagagtaccttggtgaaaccagagccgaatggcataaccatccctggtatctcttcagatgtgccagagagtgcccacaaaactactgcctcagaggcaaagtcagacactgggcagcctaccaaggttggacgttttcaggtgacaactacagcaaacaaagtgggtcgtttctctgtatcaaaaactgaggacaagatcactgacacaaagaaagaaggaccagtggcatctcctccttttatggatttggaacaagctgttcttcctgctgtgataccaaagaaagagaagcctgaactgtcagagccttcacatctaaatgggccgtcttctgacccggaggccgcttttttaagtagggatgtggatgatggttccggtagtccacactcgccccatcagctgagctcaaagagccttcctagccagaatctaagtcaaagccttagtaattcatttaactcctcttacatgagtagcgacaatgagtcagatatcgaagatgaagacttaaagttagagctgcgacgactacgagataaacatctcaaagagattcaggacctgcagagtcgccagaagcatgaaattgaatctttgtataccaaactgggcaaggtgccccctgctgttattattcccccagctgctcccctttcagggagaagacgacgacccactaaaagcaaaggcagcaaatctagtcgaagcagttccttggggaataaaagcccccagctttcaggtaacctgtctggtcagagtgcagcttcagtcttgcacccccagcagaccctccaccctcctggcaacatcccagagtccgggcagaatcagctgttacagccccttaagccatctccctccagtgacaacctctattcagccttcaccagtgatggtgccatttcagtaccaagcctttctgctccaggtcaaggaaccagcagcacaaacactgttggggcaacagtgaacagccaagccgcccaagctcagcctcctgccatgacgtccagcaggaagggcacattcacagatgacttgcacaagttggtagacaattgggcccgagatgccatgaatctctcaggcaggagaggaagcaaagggcacatgaattacgagggccctggaatggcaaggaagttctctgcacctgggcaactgtgcatctccatgacctcgaacctgggtggctctgcccccatctctgcagcatcagctacctctctaggtcacttcaccaagtctatgtgccccccacagcagtatggctttccagctaccccatttggcgctcaatggagtgggacgggtggcccagcaccacagccacttggccagttccaacctgtgggaactgcctccttgcagaatttcaacatcagcaatttgcagaaatccatcagcaaccccccaggctccaacctgcggaccacttagacctagagacattaactgaatagatctgggggcaggagatggaatgctgagggggtgggtgggggtgggaagtagcctatatactaactactagtgctgcatttaactggttatttcttgccagaggggaatgtttttaatactgcattgagccctcagaatggagagtctcccccgctccagttattggaatgggagaggaaggaaagaacagcttttttgtcaaggggcagcttcagaccatgctttcctgtttatctatactcagtaatgaggatgagggctaggaaagtcttgttcataaggaagctggagaactcaatgtaaaatcaaacccatctgtaatttcgagtgggtggagctcttgcttttggtacatgccctgaatccctcactccctcaagaatccgaaccacaggacaaaaaccacctactgggctctctcctaccctgccctcctcccttttttttacccctctcttttttattttttctttgctctttagaacccagtgaaaaataccagggtactggggtgcaactctttcttatgataggtcattagtgctttaagcaaaagatattagcagctttgactgcagcattagcaattaggaaaaaaaaaaaattaagttccctgcggacatgtaactttgccatcagttttgatgtggaaacactgtgatatataaaatgttgttggacaacagtagttttaagagtaaaatatgaaacgtttaaaaagttccaaaaaaagctagctctgtcctttacttattgagacactttaactttttcctttgtatttccattgtattagataaataaatgtgaatgtaaaattgtataaattactgtacttgaatacttctgtttcccagtgttgcttgctggacattttagtgccttggacttctattgcttctgccattagcatcaacttaccagaccccagatcaataaagggcatgtggaaggaaatcgtaggtccatgtgaccccagcagtccagcagtggttatgccaaagggaaattgaaaaagtatttttttaagtcattcaacaactttgtctagagcaggtgtaagatgagtagggtgggaagttaggttggcatcagtggttaaaaacagaaagttctgtttcgggaatagtgaggagggggtgttgtaacaaaattggacaacttaaaagaatggtgtgtgctgggtgaaagacaaagactaaagaatgaggaaacaaacgtgatgcctggccagtgactgtcatataaacctttcttatttgagctaggcttgaacagacgtgacctagaagaaactgaacataaagagaagggggtggggggctagttttcaagttggggaacctgatagtgaaaagtcacagatggagaaaattgctctcagaaaaactgtttggattgctttcctcttgttgcacatgtaccatgcatttctcagcttggggtactacattttgtggaaagttaatctatctatctttccacatctgaattaatcattctaggaaagaatacttattcctactcatttcctttatgatgtccaaatggttgcaggatcataatctattgtgccacctttatttctagaagtacaactaatatgttcacattttcaaataaataatactccccgtaagtaataactgcaaccaatcagtgttattcagtgctatgcctccttgtaatgggtagttattaattattttcagagctttccggaaatactgtcctaactggctatgtttaggatctttgttatctctgaagacaaagaaagaagctaggactcttaattttggggtgcttcttgactcttagttgggaaactgaaaatatttccaaccttttacccacgtcaatggcatattctgggaatcaccaccaccaccaccactaccacagaaagaggctggaggctcctgtaccctgttcattccttaagggccctgcttcccttagtaagtaagtaagttggtctacggccctaaatatgcaaatgagagctgaaggtttttaaaaggtagaaaggaaaagggcaagggcttccacccctgctttaaaatgatttatttattctctgcttgtatttcttgtggagagagtaaggatagaaccaacaaggggctgagtagctgagaaaggggccacccaagagtgaaacatactttataccagaggagcagtggagcctcatgcagcacattatcatttgttatttgggtttaataataattttgacatcttttcactcatacacaaaaaaagtcagaactggtgttatttactgttgatttcatcctcctgtgtatgaaataacaagcctagaggaatgaactagtgctactgaactgtttaaattatttttgtgttaatagtacactttgagtatctttttccacattaaaaactttctgaattataaatgttttccttacattatttaacaatgtacactgttaaaaataaaaataaaaattcaaactttgggggtttctcagcagccgttaattgtacattttgcactaactctgggtgttgcgcttcttgtaagattgcgctttgtgcttcagtttgttacctttgtagacttatttaatgaaaccattcaaataaaccaaacttgcttttgttga

SEQ ID NO: 200205 - DNA, 11208 bp, Homo sapiens
  Payload ID: 19503
  Gene Name: WNK lysine deficient protein kinase 1
  Uniprot ID: Q9H4A3
  ENST ID: ENST00000340908
  CDS Start-End: 644-8548
ccggcccttcgcctctgggcgatgggcgacctgtgaggccggtccccatcgctgggggcgcgtgtgggaggaggcggccgcccgagtgaccgggagccgggccgcggccttccctcgcccgcctcggcccctcccactcctctgccccggggccgccaccgcccgggcgtcggacctggtcccgtgctcgcggtgccgccgccctctgggcctagcccgcccagctcggcgagcggcggcagtgggagccgcgtccgccgcatccgcctcgactcggtgccggcccctggccctcccctcatgactgcggcgcctctgctgccaccgcccgcccggccgccgctcgccgcaggatggatgcggaccgtgcggcgctaacccccgtggctcagctcccgaatcgcccgccttcgagccctcctcgtgagccgcagcagcctcggtgccagcccccgccgcagctgggcccagcggtccgcctgtccctcgttgcggcttgtcggtgctgagtgaggcgtcgtccgggtcggcgcgaacccgcccggccgcggttccctgcagacctctgcgcgggcggctcggcccttcacgcccttttcgttcacgaatccgagcccgctcgcctctctccagcgaaccgaccatgtctggcggcgccgcagagaagcagagcagcactcccggttccctgttcctctcgccgccggctcctgcccccaagaatggctccagctccgattcctccgtgggggagaaactgggagccgcggccgccgacgctgtgaccggcaggaccgaggagtacaggcgccgccgccacactatggacaaggacagccgtggggcggccgcgaccactaccaccactgagcaccgcttcttccgccggagcgtcatctgtgactccaatgccactgcactggagcttcccggccttcctctttccctgccccagcccagcatccccgcggctgtcccgcagagtgctccaccggagccccaccgggaagagaccgtgaccgccaccgccacttcccaggtagcccagcagcctccagccgctgccgcccctggggaacaggccgtcgcgggccctgccccctcgactgtccccagcagtaccagcaaagaccgcccagtgtcccagcctagccttgtggggagcaaagaggagccgccgccggcgagaagtggcagcggcggcggcagcgccaaggagccacaggaggaacggagccagcagcaggatgatatcgaagagctggagaccaaggccgtgggaatgtctaacgatggccgctttctcaagtttgacatcgaaatcggcagaggctcctttaagacggtctacaaaggtctggacactgaaaccaccgtggaagtcgcctggtgtgaactgcaggatcgaaaattaacaaagtctgagaggcagagatttaaagaagaagctgaaatgttaaaaggtcttcagcatcccaatattgttagattttatgattcctgggaatccacagtaaaaggaaagaagtgcattgttttggtgactgaacttatgacgtctggaacacttaaaacgtatctgaaaaggtttaaagtgatgaagatcaaagttctaagaagctggtgccgtcagatccttaaaggtcttcagtttcttcatactcgaactccacctatcattcaccgcgatcttaaatgtgacaacatctttatcaccggccctactggctcagtcaagattggagacctcggtctggcaaccctgaagcgggcttcttttgccaagagtgtgataggtaccccagagttcatggcccctgagatgtatgaggagaaatatgatgaatccgttgacgtttatgcttttgggatgtgcatgcttgagatggctacatctgaatatccttactcggagtgccaaaatgctgcacagatctaccgtcgcgtgaccagtggggtgaagccagccagttttgacaaagtagcaattcctgaagtgaaggaaattattgaaggatgcatacgacaaaacaaagatgaaagatattccatcaaagaccttttgaaccatgccttcttccaagaggaaacaggagtacgggtagaattagcagaagaagatgatggagaaaaaatagccataaaattatggctacgtattgaagatattaagaaattaaagggaaaatacaaagataatgaagctattgagttttcttttgatttagagagagatgtcccagaagatgttgcacaagaaatggtagagtctgggtatgtctgtgaaggtgatcacaagaccatggctaaagctatcaaagacagagtatcattaattaagaggaaacgagagcagcggcagttggtacgggaggagcaagaaaaaaaaaagcaggaagagagcagtctcaaacagcaggtagaacaatccagtgcttcccagacaggaatcaagcagctcccttctgctagcaccggcatacctactgcttctaccacttcagcttcagtttctacacaagtagaacctgaagaacctgaggcagatcaacatcaacaactacagtaccagcaacccagtatatctgtgttatctgatgggacggttgacagtggtcagggatcctctgtcttcacagaatctcgagtgagcagccaacagacagtttcatatggttcccaacatgaacaggcacattctacaggcacagtcccagggcatataccttctactgtccaagcacagtctcagccccatggggtatatccaccctcaagtgtgcctcgtcgtggccgtagcatgtcggtttgtgttcccatctttctgctgttgcctctgtgtcccgcatctctcccagtgctcttccaccccaccgccagtactgtctgcacctctttctccttccctcctccggactgccccgaggaaacttttgccgaaaagctttctaaagcattggagagtgtcctgcctatgcactctgcctctcagcgcaagcaccgacgctccagcctgccttccctctttgtcagtactcctcagtccatggcgcatccgtgtggggggaccccaacatacccagaatcacagatatttttcccaactattcatgaacgtccagtttctttttcaccacctcccacctgcccaccgaaagtagccatttcccagcggcgtaagagcacctccttcctggaagcccaaactcaccacttccaacccctgctgaggactgttggccaaagtcttcttccacctggtggcagcccaactaactggacaccagaggccgtagttatgttgggtactacagccagtagagtaactggagagtcatgtgagatacaggtccatcctatgtttgaaccatctcaagtttacagtgactatagacctggactagtacttccagaagaagctcactattttattcctcaggaagcagtgtatgtagctggggtacattaccaggcccgggtggcagaacagtatgagggcattccatacaactcatcagtactgtcaagtcctatgaaacagatacctgaacagaagccagtacaagggggccctacttcaagttctgtctttgaatttccatctggacaggctttcctggtaggacaccttcagaatctaagattagattctggattgggtccgggatctcccctctctagtatttctgcacctatcagtacagatgctacacgtttgaaatttcaccctgtctttgttcctcattctgcgcctgctgtgttaactcataacaatgagagcagaagcaactgtgtatttgaatttcatgttcacacaccaagctcctcttcaggagaaggaggtggaattttacctcagcgtgtttaccgaaatcggcaggttgcagtggacttgaatcaagaagaactgcctcctcaatcagttggattacatggctacttgcagcctgtgactgaagaaaagcataattaccatgccccagaattgaccgtttctgtggtagagcctatcggacagaactggccaataggaagcccagaatattccagtgattcctcacaaatcacttcttcagaccccagtgattttcagtcacctccccctacagggggagcagctgcaccttttggctctgacgtctcaatgccctttatccatctgcctcagacagtgttacaagaatccccacttttcttctgtttcccccaaggaaccacatctcagcaggtcttaactgcctcattttcttcaggaggatctgcacttcatccacaggcacaggggcagagccagggtcagccatcctcaagtagcttaacaggggtttcatcttcccaacccatacaacatcctcagcagcagcagggaatacagcagacagcccctcctcaacagacagtgcagtattcactttcacagacatcaacctccagtgaggccactactgcacagccagtgagtcagcctcaagctccacaagtcttgcctcaagtatcagctggaaaacagagtactcagggagtctctcaggttgctcctgcagagccagttgcagtagcacagacccaagctacccagccgaccactttggcttcctctgtagacagtgcacattcagatgttgcttcaggtatgagtgatggcaatgagaacgtcccatcttccagtggaaggcatgaaggaagaactacaaaacggcattaccgaaaatctgtaaggagtcgctctcgacatgaaaaaacttcacgcccaaaattaagaattttgaatgtttcaaataaaggagaccgagtagtagaatgtcaattagagactcataataggaaaatggttacattcaaatttgacctagatggtgacaaccccgaggagatagcaacaattatggtgaacaatgactttattctagcaatagagagagagtcgtttgtggatcaagtgcgagaaattattgaaaaagctgatgaaatgctcagtgaggatgtcagtgtggaaccagagggtgatcagggattggagagtctacaaggaaaggatgactatggcttttcaggttctcagaaattggaaggagagttcaaacaaccaattcctgcgtcttccatgccacagcaaataggcattcctaccagttctttaactcaagttgttcattctgcgggaaggcggtttatagtgagtcctgtgccagaaagccgattacgagaatcaaaagttttccccagtgaaataacagatacagttgctgcctctacagctcagagccctggaatgaacttgtctcactctgcatcatcccttagtctacaacaggccttttctgaacttagacgtgcccaaatgacagaaggacccaacacagcacctccaaactttagtcatacaggaccaacatttccagtagtacctcctttcttaagtagcattgctggagtcccaaccacagcagcagccacagcaccagtccctgcaacaagcagccctcctaatgacatttccacatcagtaattcagtctgaggttacagtgcccactgaagaggggattgctggagttgccaccagcacaggtgtggtaacttcaggtggtctccccataccacctgtgtctgaatcaccagtactttccagcgtagtttcaagtatcacaatacctgcagttgtctcaatatctactacatccccgtcacttcaagtccccacatccacatctgagatcgttgtttctagtacagcactgtatccttcagtaacagtttcagcaacttcagcctctgcagggggcagtactgctaccccaggtcctaagcctccagctgtagtatctcagcaggcagcaggcagcactactgtgggagccacattaacatcagtttctaccaccacttcattcccaagcacagcttcacagctgtgcattcagcttagcagcagtacttctactcctactttagctgaaaccgtggtagttagcgcacactcactagataagacatctcatagcagtacaactggattggctttctccctctctgcaccatcttcctcttcctctcctggagcaggagtgtctagttatatttctcagcctggtgggctgcatcctttggtcattccatcagtgatagcttctactcctattcttccccaagcagcaggacctacttctacacctttattaccccaagtacctagtatcccacccttggtacagcctgttgccaatgtgcctgctgtacagcagacactaattcatagtcagcctcaaccagctttgcttcccaaccagccccatactcattgtcctgaagtagattctgatacacaacccaaagctcctggaattgatgacataaagactctagaagaaaagctgcggtctctgttcagtgaacacagctcatctggagctcagcatgcctctgtctcactggagacctcactagtcatagagagcactgtcacaccaggcatcccaactactgctgttgcaccaagcaaactcctgacttctaccacaagtacttgcttaccaccaaccaatttaccactaggaacagttgctttgccagttacaccagtggtcacacctgggcaagtttctaccccagtcagcactactacatcaggagtgaaacctggaactgctccctccaagccacctctaactaaggctccggtgctgccagtgggtactgaacttccagcaggtactctacccagcgagcagctgccaccttttccaggaccttctctaacccagtcccagcaacctctagaggatcttgatgctcaattgagaagaacacttagtccagagatgatcacagtgacttctgcggttggtcctgtgtccatggcggctccaacagcaatcacagaagcaggaacacagcctcagaagggtgtttctcaagtcaaagaaggccctgtcctagcaactagttcaggagctggtgtttttaagatgggacgatttcaggtttctgttgcagcagacggtgcccagaaagagggtaaaaataagtcagaagatgcaaagtctgttcattttgaatccagcacctcagagtcctcagtgctatcaagtagtagtccagagagtaccttggtgaaaccagagccgaatggcataaccatccctggtatctcttcagatgtgccagagagtgcccacaaaactactgcctcagaggcaaagtcagacactgggcagcctaccaaggttggacgttttcaggtgacaactacagcaaacaaagtgggtcgtttctctgtatcaaaaactgaggacaagatcactgacacaaagaaagaaggaccagtggcatctcctccttttatggatttggaacaagctgttcttcctgctgtgataccaaagaaagagaagcctgaactgtcagagccttcacatctaaatgggccgtcttctgacccggaggccgcttttttaagtagggatgtggatgatggttccggtagtccacactcgccccatcagctgagctcaaagagccttcctagccagaatctaagtcaaagccttagtaattcatttaactcctcttacatgagtagcgacaatgagtcagatatcgaagatgaagacttaaagttagagctgcgacgactacgagataaacatctcaaagagattcaggacctgcagagtcgccagaagcatgaaattgaatctttgtataccaaactgggcaaggtgccccctgctgttattattcccccagctgctcccctttcagggagaagacgacgacccactaaaagcaaaggcagcaaatctagtcgaagcagttccttggggaataaaagcccccagctttcaggtaacctgtctggtcagagtgcagcttcagtcttgcacccccagcagaccctccaccctcctggcaacatcccagagtccgggcagaatcagctgttacagccccttaagccatctccctccagtgacaacctctattcagccttcaccagtgatggtgccatttcagtaccaagcctttctgctccaggtcaaggaaccagcagcacaaacactgttggggcaacagtgaacagccaagccgcccaagctcagcctcctgccatgacgtccagcaggaagggcacattcacagatgacttgcacaagttggtagacaattgggcccgagatgccatgaatctctcaggcaggagaggaagcaaagggcacatgaattacgagggccctggaatggcaaggaagttctctgcacctgggcaactgtgcatctccatgacctcgaacctgggtggctctgcccccatctctgcagcatcagctacctctctaggtcacttcaccaagtctatgtgccccccacagcagtatggctttccagctaccccatttggcgctcaatggagtgggacgggtggcccagcaccacagccacttggccagttccaacctgtgggaactgcctccttgcagaatttcaacatcagcaatttgcagaaatccatcagcaaccccccaggctccaacctgcggaccacttagacctagagacattaactgaatagatctgggggcaggagatggaatgctgagggggtgggtgggggtgggaagtagcctatatactaactactagtgctgcatttaactggttatttcttgccagaggggaatgtttttaatactgcattgagccctcagaatggagagtctcccccgctccagttattggaatgggagaggaaggaaagaacagcttttttgtcaaggggcagcttcagaccatgctttcctgtttatctatactcagtaatgaggatgagggctaggaaagtcttgttcataaggaagctggagaactcaatgtaaaatcaaacccatctgtaatttcgagtgggtggagctcttgcttttggtacatgccctgaatccctcactccctcaagaatccgaaccacaggacaaaaaccacctactgggctctctcctaccctgccctcctcccttttttttacccctctcttttttattttttctttgctctttagaacccagtgaaaaataccagggtactggggtgcaactctttcttatgataggtcattagtgctttaagcaaaagatattagcagctttgactgcagcattagcaattaggaaaaaaaaaaaattaagttccctgcggacatgtaactttgccatcagttttgatgtggaaacactgtgatatataaaatgttgttggacaacagtagttttaagagtaaaatatgaaacgtttaaaaagttccaaaaaaagctagctctgtcctttacttattgagacactttaactttttcctttgtatttccattgtattagataaataaatgtgaatgtaaaattgtataaattactgtacttgaatacttctgtttcccagtgttgcttgctggacattttagtgccttggacttctattgcttctgccattagcatcaacttaccagaccccagatcaataaagggcatgtggaaggaaatcgtaggtccatgtgaccccagcagtccagcagtggttatgccaaagggaaattgaaaaagtatttttttaagtcattcaacaactttgtctagagcaggtgtaagatgagtagggtgggaagttaggttggcatcagtggttaaaaacagaaagttctgtttcgggaatagtgaggagggggtgttgtaacaaaattggacaacttaaaagaatggtgtgtgctgggtgaaagacaaagactaaagaatgaggaaacaaacgtgatgcctggccagtgactgtcatataaacctttcttatttgagctaggcttgaacagacgtgacctagaagaaactgaacataaagagaagggggtggggggctagttttcaagttggggaacctgatagtgaaaagtcacagatggagaaaattgctctcagaaaaactgtttggattgctttcctcttgttgcacatgtaccatgcatttctcagcttggggtactacattttgtggaaagttaatctatctatctttccacatctgaattaatcattctaggaaagaatacttattcctactcatttcctttatgatgtccaaatggttgcaggatcataatctattgtgccacctttatttctagaagtacaactaatatgttcacattttcaaataaataatactccccgtaagtaataactgcaaccaatcagtgttattcagtgctatgcctccttgtaatgggtagttattaattattttcagagctttccggaaatactgtcctaactggctatgtttaggatctttgttatctctgaagacaaagaaagaagctaggactcttaattttggggtgcttcttgactcttagttgggaaactgaaaatatttccaaccttttacccacgtcaatggcatattctgggaatcaccaccaccaccaccactaccacagaaagaggctggaggctcctgtaccctgttcattccttaagggccctgcttcccttagtaagtaagtaagttggtctacggccctaaatatgcaaatgagagctgaaggtttttaaaaggtagaaaggaaaagggcaagggcttccacccctgctttaaaatgatttatttattctctgcttgtatttcttgtggagagagtaaggatagaaccaacaaggggctgagtagctgagaaaggggccacccaagagtgaaacatactttataccagaggagcagtggagcctcatgcagcacattatcatttgttatttgggtttaataataattttgacatcttttcactcatacacaaaaaaagtcagaactggtgttatttactgttgatttcatcctcctgtgtatgaaataacaagcctagaggaatgaactagtgctactgaactgtttaaattatttttgtgttaatagtacactttgagtatctttttccacattaaaaactttctgaattataaatgttttccttacattatttaacaatgtacactgttaaaaataaaaataaaaattcaaactttgggggtttctcagcagccgttaattgtacattttgcactaactctgggtgttgcgcttcttgtaagattgcgctttgtgcttcagtttgttacctttgtagacttatttaatgaaaccattcaaataaaccaaacttgcttttgttga

SEQ ID NO: 200206 - DNA, 1902 bp, Homo sapiens
  Payload ID: 19503
  Gene Name: WNK lysine deficient protein kinase 1
  ENST ID: ENST00000447667
  CDS Start-End: 511-1692
ccactcctctgccccggggccgccaccgcccgggcgtcggacctggtcccgtgctcgcggtgccgccgccctctgggcctagcccgcccagctcggcgagcggcggcagtgggagccgcgtccgccgcatccgcctcgactcggtgccggcccctggccctcccctcatgactgcggcgcctctgctgccaccgcccgcccggccgccgctcgccgcaggatggatgcggaccgtgcggcgctaacccccgtggctcagctcccgaatcgcccgccttcgagccctcctcgtgagccgcagcagcctcggtgccagcccccgccgcagctgggcccagcggtccgcctgtccctcgttgcggcttgtcggtgctgagtgaggcgtcgtccgggtcggcgcgaacccgcccggccgcggttccctgcagacctctgcgcgggcggctcggcccttcacgcccttttcgttcacgaatccgagcccgctcgcctctctccagcgaaccgaccatgtctggcggcgccgcagagaagcagagcagcactcccggttccctgttcctctcgccgccggctcctgcccccaagaatggctccagctccgattcctccgtgggggagaaactgggagccgcggccgccgacgctgtgaccggcaggaccgaggagtacaggcgccgccgccacactatggacaaggacagccgtggggcggccgcgaccactaccaccactgagcaccgcttcttccgccggagcgtcatctgtgactccaatgccactgcactggagcttcccggccttcctctttccctgccccagcccagcatccccgcggctgtcccgcagagtgctccaccggagccccaccgggaagagaccgtgaccgccaccgccacttcccaggtagcccagcagcctccagccgctgccgcccctggggaacaggccgtcgcgggccctgccccctcgactgtccccagcagtaccagcaaagaccgcccagtgtcccagcctagccttgtggggagcaaagaggagccgccgccggcgagaagtggcagcggcggcggcagcgccaaggagccacaggaggaacggagccagcagcaggatgatatcgaagagctggagaccaaggccgtgggaatgtctaacgatggccgctttctcaagtttgacatcgaaatcggcagaggctcctttaagacggtctacaaaggtctggacactgaaaccaccgtggaagtcgcctggtgtgaactgcaggatcgaaaattaacaaagtctgagaggcagagatttaaagaagaagctgaaatgttaaaaggtcttcagcatcccaatattgttagattttatgattcctgggaatccacagtaaaaggaaagaagtgcattgttttggtgactgaacttatgacgtctggaacacttaaaacgtatctgaaaaggtttaaagtgatgaagatcaaagttctaagaagctggtgccgtcagatccttaaaggtcttcagtttcttcatactcgaactccacctatcattcaccgcgatcttaaatgtgacaacatctttatcaccggccctactggctcagtcaagattggagacctcggtctggcaaccctgaagcgggcttcttttgccaagagtgtgataggtatgtttcaggtgtaccttggagcctgactggctttctcacattccttttatttagaatcctggctctgtcagagttttaagtgatataaaccttaagaaattcatagcttgaactcaggaggtgatccattgtacttatgagatataggattctctatatttgtgcttcttggaatcatcttagagactattggtaacattacgttacaagaaataaagtgaactttgttgataaaa

SEQ ID NO: 200207 - DNA, 11804 bp, Homo sapiens
  Payload ID: 19503
  Gene Name: WNK lysine deficient protein kinase 1
  Uniprot ID: Q9H4A3
  ENST ID: ENST00000530271
  CDS Start-End: 644-9145
ccggcccttcgcctctgggcgatgggcgacctgtgaggccggtccccatcgctgggggcgcgtgtgggaggaggcggccgcccgagtgaccgggagccgggccgcggccttccctcgcccgcctcggcccctcccactcctctgccccggggccgccaccgcccgggcgtcggacctggtcccgtgctcgcggtgccgccgccctctgggcctagcccgcccagctcggcgagcggcggcagtgggagccgcgtccgccgcatccgcctcgactcggtgccggcccctggccctcccctcatgactgcggcgcctctgctgccaccgcccgcccggccgccgctcgccgcaggatggatgcggaccgtgcggcgctaacccccgtggctcagctcccgaatcgcccgccttcgagccctcctcgtgagccgcagcagcctcggtgccagcccccgccgcagctgggcccagcggtccgcctgtccctcgttgcggcttgtcggtgctgagtgaggcgtcgtccgggtcggcgcgaacccgcccggccgcggttccctgcagacctctgcgcgggcggctcggcccttcacgcccttttcgttcacgaatccgagcccgctcgcctctctccagcgaaccgaccatgtctggcggcgccgcagagaagcagagcagcactcccggttccctgttcctctcgccgccggctcctgcccccaagaatggctccagctccgattcctccgtgggggagaaactgggagccgcggccgccgacgctgtgaccggcaggaccgaggagtacaggcgccgccgccacactatggacaaggacagccgtggggcggccgcgaccactaccaccactgagcaccgcttcttccgccggagcgtcatctgtgactccaatgccactgcactggagcttcccggccttcctctttccctgccccagcccagcatccccgcggctgtcccgcagagtgctccaccggagccccaccgggaagagaccgtgaccgccaccgccacttcccaggtagcccagcagcctccagccgctgccgcccctggggaacaggccgtcgcgggccctgccccctcgactgtccccagcagtaccagcaaagaccgcccagtgtcccagcctagccttgtggggagcaaagaggagccgccgccggcgagaagtggcagcggcggcggcagcgccaaggagccacaggaggaacggagccagcagcaggatgatatcgaagagctggagaccaaggccgtgggaatgtctaacgatggccgctttctcaagtttgacatcgaaatcggcagaggctcctttaagacggtctacaaaggtctggacactgaaaccaccgtggaagtcgcctggtgtgaactgcaggatcgaaaattaacaaagtctgagaggcagagatttaaagaagaagctgaaatgttaaaaggtcttcagcatcccaatattgttagattttatgattcctgggaatccacagtaaaaggaaagaagtgcattgttttggtgactgaacttatgacgtctggaacacttaaaacgtatctgaaaaggtttaaagtgatgaagatcaaagttctaagaagctggtgccgtcagatccttaaaggtcttcagtttcttcatactcgaactccacctatcattcaccgcgatcttaaatgtgacaacatctttatcaccggccctactggctcagtcaagattggagacctcggtctggcaaccctgaagcgggcttcttttgccaagagtgtgataggtaccccagagttcatggcccctgagatgtatgaggagaaatatgatgaatccgttgacgtttatgcttttgggatgtgcatgcttgagatggctacatctgaatatccttactcggagtgccaaaatgctgcacagatctaccgtcgcgtgaccagtggggtgaagccagccagttttgacaaagtagcaattcctgaagtgaaggaaattattgaaggatgcatacgacaaaacaaagatgaaagatattccatcaaagaccttttgaaccatgccttcttccaagaggaaacaggagtacgggtagaattagcagaagaagatgatggagaaaaaatagccataaaattatggctacgtattgaagatattaagaaattaaagggaaaatacaaagataatgaagctattgagttttcttttgatttagagagagatgtcccagaagatgttgcacaagaaatggtagagtctgggtatgtctgtgaaggtgatcacaagaccatggctaaagctatcaaagacagagtatcattaattaagaggaaacgagagcagcggcagttggtacgggaggagcaagaaaaaaaaaagcaggaagagagcagtctcaaacagcaggtagaacaatccagtgcttcccagacaggaatcaagcagctcccttctgctagcaccggcatacctactgcttctaccacttcagcttcagtttctacacaagtagaacctgaagaacctgaggcagatcaacatcaacaactacagtaccagcaacccagtatatctgtgttatctgatgggacggttgacagtggtcagggatcctctgtcttcacagaatctcgagtgagcagccaacagacagtttcatatggttcccaacatgaacaggcacattctacaggcacagtcccagggcatataccttctactgtccaagcacagtctcagccccatggggtatatccaccctcaagtgtgcctcagtccatggcgcatccgtgtggggggaccccaacatacccagaatcacagatatttttcccaactattcatgaacgtccagtttctttttcaccacctcccacctgcccaccgaaagtagccatttcccagcggcgtaagagcacctccttcctggaagcccaaactcaccacttccaacccctgctgaggactgttggccaaagtcttcttccacctggtggcagcccaactaactggacaccagaggccgtagttatgttgggtactacagccagtagagtaactggagagtcatgtgagatacaggtccatcctatgtttgaaccatctcaagtttacagtgactatagacctggactagtacttccagaagaagctcactattttattcctcaggaagcagtgtatgtagctggggtacattaccaggcccgggtggcagaacagtatgagggcattccatacaactcatcagtactgtcaagtcctatgaaacagatacctgaacagaagccagtacaagggggccctacttcaagttctgtctttgaatttccatctggacaggctttcctggtaggacaccttcagaatctaagattagattctggattgggtccgggatctcccctctctagtatttctgcacctatcagtacagatgctacacgtttgaaatttcaccctgtctttgttcctcattctgcgcctgctgtgttaactcataacaatgagagcagaagcaactgtgtatttgaatttcatgttcacacaccaagctcctcttcaggagaaggaggtggaattttacctcagcgtgtttaccgaaatcggcaggttgcagtggacttgaatcaagaagaactgcctcctcaatcagttggattacatggctacttgcagcctgtgactgaagaaaagcataattaccatgccccagaattgaccgtttctgtggtagagcctatcggacagaactggccaataggaagcccagaatattccagtgattcctcacaaatcacttcttcagaccccagtgattttcagtcacctccccctacagggggagcagctgcaccttttggctctgacgtctcaatgccctttatccatctgcctcagacagtgttacaagaatccccacttttcttctgtttcccccaaggaaccacatctcagcaggtcttaactgcctcattttcttcaggaggatctgcacttcatccacaggcacaggggcagagccagggtcagccatcctcaagtagcttaacaggggtttcatcttcccaacccatacaacatcctcagcagcagcagggaatacagcagacagcccctcctcaacagacagtgcagtattcactttcacagacatcaacctccagtgaggccactactgcacagccagtgagtcagcctcaagctccacaagtcttgcctcaagtatcagctggaaaacagcttccagtttcccagccagtaccaactatccaaggcgaacctcagatcccagttgcgacacaaccctcggttgttccagtccactctggtgctcatttccttccagtgggacagccgctccctactcccttgctccctcagtaccctgtctctcagattcccatatcaactcctcatgtgtctacggctcagacaggtttctcatcccttcccatcacaatggcagctggcattactcagcctctgctcacgttggcttcatctgctacaacagctgcgatcccgggggtatcaactgtggttcctagtcagcttccaacccttctgcagcctgtgactcagctgccaagtcaggttcacccacagctcctacaaccagcagttcagtccatgggaataccagctaaccttggacaagctgctgaggttccactttcctctggagatgttctgtaccagggcttcccacctcgactgccaccacagtacccaggagattcaaatattgctccctcttccaacgtggcttctgtttgcatccattctacagtcctatcccctcccatgccgacagaagtactggctacacctgggtactttcccacagtggtgcagccttatgtggaatcaaatcttttagttcctatgggtggtgtaggaggacaggttcaagtgtcccagccaggagggagtttagcacaagcccccactacatcctcccagcaagcagttttggagagtactcagggagtctctcaggttgctcctgcagagccagttgcagtagcacagacccaagctacccagccgaccactttggcttcctctgtagacagtgcacattcagatgttgcttcaggtatgagtgatggcaatgagaacgtcccatcttccagtggaaggcatgaaggaagaactacaaaacggcattaccgaaaatctgtaaggagtcgctctcgacatgaaaaaacttcacgcccaaaattaagaattttgaatgtttcaaataaaggagaccgagtagtagaatgtcaattagagactcataataggaaaatggttacattcaaatttgacctagatggtgacaaccccgaggagatagcaacaattatggtgaacaatgactttattctagcaatagagagagagtcgtttgtggatcaagtgcgagaaattattgaaaaagctgatgaaatgctcagtgaggatgtcagtgtggaaccagagggtgatcagggattggagagtctacaaggaaaggatgactatggcttttcaggttctcagaaattggaaggagagttcaaacaaccaattcctgcgtcttccatgccacagcaaataggcattcctaccagttctttaactcaagttgttcattctgcgggaaggcggtttatagtgagtcctgtgccagaaagccgattacgagaatcaaaagttttccccagtgaaataacagatacagttgctgcctctacagctcagagccctggaatgaacttgtctcactctgcatcatcccttagtctacaacaggccttttctgaacttagacgtgcccaaatgacagaaggacccaacacagcacctccaaactttagtcatacaggaccaacatttccagtagtacctcctttcttaagtagcattgctggagtcccaaccacagcagcagccacagcaccagtccctgcaacaagcagccctcctaatgacatttccacatcagtaattcagtctgaggttacagtgcccactgaagaggggattgctggagttgccaccagcacaggtgtggtaacttcaggtggtctccccataccacctgtgtctgaatcaccagtactttccagcgtagtttcaagtatcacaatacctgcagttgtctcaatatctactacatccccgtcacttcaagtccccacatccacatctgagatcgttgtttctagtacagcactgtatccttcagtaacagtttcagcaacttcagcctctgcagggggcagtactgctaccccaggtcctaagcctccagctgtagtatctcagcaggcagcaggcagcactactgtgggagccacattaacatcagtttctaccaccacttcattcccaagcacagcttcacagctgtgcattcagcttagcagcagtacttctactcctactttagctgaaaccgtggtagttagcgcacactcactagataagacatctcatagcagtacaactggattggctttctccctctctgcaccatcttcctcttcctctcctggagcaggagtgtctagttatatttctcagcctggtgggctgcatcctttggtcattccatcagtgatagcttctactcctattcttccccaagcagcaggacctacttctacacctttattaccccaagtacctagtatcccacccttggtacagcctgttgccaatgtgcctgctgtacagcagacactaattcatagtcagcctcaaccagctttgcttcccaaccagccccatactcattgtcctgaagtagattctgatacacaacccaaagctcctggaattgatgacataaagactctagaagaaaagctgcggtctctgttcagtgaacacagctcatctggagctcagcatgcctctgtctcactggagacctcactagtcatagagagcactgtcacaccaggcatcccaactactgctgttgcaccaagcaaactcctgacttctaccacaagtacttgcttaccaccaaccaatttaccactaggaacagttgctttgccagttacaccagtggtcacacctgggcaagtttctaccccagtcagcactactacatcaggagtgaaacctggaactgctccctccaagccacctctaactaaggctccggtgctgccagtgggtactgaacttccagcaggtactctacccagcgagcagctgccaccttttccaggaccttctctaacccagtcccagcaacctctagaggatcttgatgctcaattgagaagaacacttagtccagagatgatcacagtgacttctgcggttggtcctgtgtccatggcggctccaacagcaatcacagaagcaggaacacagcctcagaagggtgtttctcaagtcaaagaaggccctgtcctagcaactagttcaggagctggtgtttttaagatgggacgatttcaggtttctgttgcagcagacggtgcccagaaagagggtaaaaataagtcagaagatgcaaagtctgttcattttgaatccagcacctcagagtcctcagtgctatcaagtagtagtccagagagtaccttggtgaaaccagagccgaatggcataaccatccctggtatctcttcagatgtgccagagagtgcccacaaaactactgcctcagaggcaaagtcagacactgggcagcctaccaaggttggacgttttcaggtgacaactacagcaaacaaagtgggtcgtttctctgtatcaaaaactgaggacaagatcactgacacaaagaaagaaggaccagtggcatctcctccttttatggatttggaacaagctgttcttcctgctgtgataccaaagaaagagaagcctgaactgtcagagccttcacatctaaatgggccgtcttctgacccggaggccgcttttttaagtagggatgtggatgatggttccggtagtccacactcgccccatcagctgagctcaaagagccttcctagccagaatctaagtcaaagccttagtaattcatttaactcctcttacatgagtagcgacaatgagtcagatatcgaagatgaagacttaaagttagagctgcgacgactacgagataaacatctcaaagagattcaggacctgcagagtcgccagaagcatgaaattgaatctttgtataccaaactgggcaaggtgccccctgctgttattattcccccagctgctcccctttcagggagaagacgacgacccactaaaagcaaaggcagcaaatctagtcgaagcagttccttggggaataaaagcccccagctttcaggtaacctgtctggtcagagtgcagcttcagtcttgcacccccagcagaccctccaccctcctggcaacatcccagagtccgggcagaatcagctgttacagccccttaagccatctccctccagtgacaacctctattcagccttcaccagtgatggtgccatttcagtaccaagcctttctgctccaggtcaaggctgtgcgaagtttaactgtgcatctgaacaggtgacattcaaacctggtggcaggaggacccgatttctgaggaagatggtgaaaaaagtctgtccttgcaaccagctctgtagaaccagcagcacaaacactgttggggcaacagtgaacagccaagccgcccaagctcagcctcctgccatgacgtccagcaggaagggcacattcacagatgacttgcacaagttggtagacaattgggcccgagatgccatgaatctctcaggcaggagaggaagcaaagggcacatgaattacgagggccctggaatggcaaggaagttctctgcacctgggcaactgtgcatctccatgacctcgaacctgggtggctctgcccccatctctgcagcatcagctacctctctaggtcacttcaccaagtctatgtgccccccacagcagtatggctttccagctaccccatttggcgctcaatggagtgggacgggtggcccagcaccacagccacttggccagttccaacctgtgggaactgcctccttgcagaatttcaacatcagcaatttgcagaaatccatcagcaaccccccaggctccaacctgcggaccacttagacctagagacattaactgaatagatctgggggcaggagatggaatgctgagggggtgggtgggggtgggaagtagcctatatactaactactagtgctgcatttaactggttatttcttgccagaggggaatgtttttaatactgcattgagccctcagaatggagagtctcccccgctccagttattggaatgggagaggaaggaaagaacagcttttttgtcaaggggcagcttcagaccatgctttcctgtttatctatactcagtaatgaggatgagggctaggaaagtcttgttcataaggaagctggagaactcaatgtaaaatcaaacccatctgtaatttcgagtgggtggagctcttgcttttggtacatgccctgaatccctcactccctcaagaatccgaaccacaggacaaaaaccacctactgggctctctcctaccctgccctcctcccttttttttacccctctcttttttattttttctttgctctttagaacccagtgaaaaataccagggtactggggtgcaactctttcttatgataggtcattagtgctttaagcaaaagatattagcagctttgactgcagcattagcaattaggaaaaaaaaaaaattaagttccctgcggacatgtaactttgccatcagttttgatgtggaaacactgtgatatataaaatgttgttggacaacagtagttttaagagtaaaatatgaaacgtttaaaaagttccaaaaaaagctagctctgtcctttacttattgagacactttaactttttcctttgtatttccattgtattagataaataaatgtgaatgtaaaattgtataaattactgtacttgaatacttctgtttcccagtgttgcttgctggacattttagtgccttggacttctattgcttctgccattagcatcaacttaccagaccccagatcaataaagggcatgtggaaggaaatcgtaggtccatgtgaccccagcagtccagcagtggttatgccaaagggaaattgaaaaagtatttttttaagtcattcaacaactttgtctagagcaggtgtaagatgagtagggtgggaagttaggttggcatcagtggttaaaaacagaaagttctgtttcgggaatagtgaggagggggtgttgtaacaaaattggacaacttaaaagaatggtgtgtgctgggtgaaagacaaagactaaagaatgaggaaacaaacgtgatgcctggccagtgactgtcatataaacctttcttatttgagctaggcttgaacagacgtgacctagaagaaactgaacataaagagaagggggtggggggctagttttcaagttggggaacctgatagtgaaaagtcacagatggagaaaattgctctcagaaaaactgtttggattgctttcctcttgttgcacatgtaccatgcatttctcagcttggggtactacattttgtggaaagttaatctatctatctttccacatctgaattaatcattctaggaaagaatacttattcctactcatttcctttatgatgtccaaatggttgcaggatcataatctattgtgccacctttatttctagaagtacaactaatatgttcacattttcaaataaataatactccccgtaagtaataactgcaaccaatcagtgttattcagtgctatgcctccttgtaatgggtagttattaattattttcagagctttccggaaatactgtcctaactggctatgtttaggatctttgttatctctgaagacaaagaaagaagctaggactcttaattttggggtgcttcttgactcttagttgggaaactgaaaatatttccaaccttttacccacgtcaatggcatattctgggaatcaccaccaccaccaccactaccacagaaagaggctggaggctcctgtaccctgttcattccttaagggccctgcttcccttagtaagtaagtaagttggtctacggccctaaatatgcaaatgagagctgaaggtttttaaaaggtagaaaggaaaagggcaagggcttccacccctgctttaaaatgatttatttattctctgcttgtatttcttgtggagagagtaaggatagaaccaacaaggggctgagtagctgagaaaggggccacccaagagtgaaacatactttataccagaggagcagtggagcctcatgcagcacattatcatttgttatttgggtttaataataattttgacatcttttcactcatacacaaaaaaagtcagaactggtgttatttactgttgatttcatcctcctgtgtatgaaataacaagcctagaggaatgaactagtgctactgaactgtttaaattatttttgtgttaatagtacactttgagtatctttttccacattaaaaactttctgaattataaatgttttccttacattatttaacaatgtacactgttaaaaataaaaataaaaattcaaactttgggggtttctcagcagccgttaattgtacattttgcactaactctgggtgttgcgcttcttgtaagattgcgctttgtgcttcagtttgttacctttgtagacttatttaatgaaaccattcaaataaaccaaacttgcttttgttg

SEQ ID NO: 200208 - DNA, 226 bp, Homo sapiens
  Payload ID: 19503
  Gene Name: WNK lysine deficient protein kinase 1
  ENST ID: ENST00000544559
  CDS Start-End: 1-226
cagtgacaacctctattcagccttcaccagtgatggtgccatttcagtaccaagcctttctgctccaggtcaagggaagatggtgaaaaaagtctgtccttgcaaccagctctgtagaaccagcagcacaaacactgttggggcaacagtgaacagccaagccgcccaagctcagcctcctgccatgacgtccagcaggaagggcacattcacagatgacttgcac

SEQ ID NO: 200209 - DNA, 653 bp, Homo sapiens
  Payload ID: 19503
  Gene Name: WNK lysine deficient protein kinase 1
  ENST ID: ENST00000544965
  CDS Start-End: 1-653
agctgatgggacggttgacagtggtcagggatcctctgtcttcacagaatctcgagtgagcagccaacagacagtttcatatggttcccaacatgaacaggcacattctacaggcacagtcccagggcatataccttctactgtccaagcacagtctcagccccatggggtatatccaccctcaagtgtgcagcagggaatacagcagacagcccctcctcaacagacagtgcagtattcactttcacagacatcaacctccagtgaggccactactgcacagccagtgagtcagcctcaagctccacaagtcttgcctcaagtatcagctggaaaacagagtactcagggagtctctcaggttgctcctgcagagccagttgcagtagcacagacccaagctacccagccgaccactttggcttcctctgtagacagtgcacattcagatgttgcttcaggtatgagtgatggcaatgagaacgtcccatcttccagtggaaggcatgaaggaagaactacaaaacggcattaccgaaaatctgtaaggagtcgctctcgacatgaaaaaacttcacgcccaaaattaagaattttgaatgtttcaaataaaggagaccgagtagtagaatgtcaattagagactcataata

SEQ ID NO: 200210 - DNA, 201 bp, Homo sapiens
  Payload ID: 19503
  Gene Name: WNK lysine deficient protein kinase 1
  ENST ID: ENST00000543065
  CDS Start-End: 1-201
agtgacaacctctattcagccttcaccagtgatggtgccatttcagtaccaagcctttctgctccaggtcaaggctgtgcgaagtttaactgtgcatctgaacaggtgacattcaaacctggtggcaggaggacccgatttctgagtacgccctgcttggctctttggaagatggtgaaaaaagtctgtccttgcaaccag

SEQ ID NO: 200211 - DNA, 736 bp, Homo sapiens
  Payload ID: 19503
  Gene Name: WNK lysine deficient protein kinase 1
  ENST ID: ENST00000535698
  CDS Start-End: 1-736
tctcagccccatggggtatatccaccctcaagtgtgcagggaatacagcagacagcccctcctcaacagacagtgcagtattcactttcacagacatcaacctccagtgaggccactactgcacagccagtgagtcagcctcaagctccacaagtcttgcctcaagtatcagctggaaaacagcttccagtttcccagccagtaccaactatccaaggcgaacctcagatcccagttgcgacacaaccctcggttgttccagtccactctggtgctcatttccttccagtgggacagccgctccctactcccttgctccctcagtaccctgtctctcagattcccatatcaactcctcatgtgtctacggctcagacaggtttctcatcccttcccatcacaatggcagctggcattactcagcctctgctcacgttggcttcatctgctacaacagctgcgatcccgggggtatcaactgtggttcctagtcagcttccaacccttctgcagcctgtgactcagctgccaagtcaggttcacccacagctcctacaaccagcagttcagtccatgggaataccagctaaccttggacaagctgctgaggttccactttcctctggagatgttctgtaccagggcttcccacctcgactgccaccacagtacccaggagattcaaatattgctccctcttccaacgtggcttctgtttgcatccattctacagtcc

SEQ ID NO: 200212 - DNA, 9886 bp, Homo sapiens
  Payload ID: 19503
  Gene Name: WNK lysine deficient protein kinase 1
  ENST ID: ENST00000535572
  CDS Start-End: 974-7378
atttagcgcggagagtttcccgggtggacgcggctcctctctcggccactccgcacccccatcttcggtgacagaaggcgcctggtgggggtggctgctcttttctctccctgttccccctcacccagtcctctaggtctcctctcctcttgcctcagagaagcagcggagctcgggccccgcggtgagcggccctcccctccccgccgttccctcctccgtcagcccccggcaccggcccgggaggagacgggtttgccaggcctggggcgggcggggaggcctcggggaagggggggcccgctcctcaggcgccgaggctccgaggctccggcccttcgcctctgggcgatgggcgacctgtgaggccggtccccatcgctgggggcgcgtgtgggaggaggcggccgcccgagtgaccgggagccgggccgcggccttccctcgcccgcctcggcccctcccactcctctgccccggggccgccaccgcccgggcgtcggacctggtcccgtgctcgcggtgccgccgccctctgggcctagcccgcccagctcggcgagcggcggcagtgggagccgcgtccgccgcatccgcctcgactcggtgccggcccctggccctcccctcatgactgcggcgcctctgctgccaccgcccgcccggccgccgctcgccgcaggatggatgcggaccgtgcggcgctaacccccgtggctcagctcccgaatcgcccgccttcgagccctcctcgtgagccgcagcagcctcggtgccagcccccgccgcagctgggcccagcggtccgcctgtccctcgttgcggcttgtcggtgctgagtgaggcgtcgtccgggtcggcgcgaacccgcccggccgcggttccctgcagacctctgcgcgggcggctcggcccttcacgcccttttcgttcacgaatccgagcccgctcgcctctctccagcgaaccgaccatgtctggcggcgccgcagagaagcagagcagcactcccggttccctgttcctctcgccgccggctcctgcccccaagaatggctccagctccgattcctccgtgggggagaaactgggagccgcggccgccgacgctgtgaccggcaggaccgaggagtacaggcgccgccgccacactatggacaaggacagccgtggggcggccgcgaccactaccaccactgagcaccgcttcttccgccggagcgtcatctgtgactccaatgccactgcactggagcttcccggccttcctctttccctgccccagcccagcatccccgcggctgtcccgcagagtgctccaccggagccccaccgggaagagaccgtgaccgccaccgccacttcccaggtagcccagcagcctccagccgctgccgcccctggggaacaggccgtcgcgggccctgccccctcgactgtccccagcagtaccagcaaagaccgcccagtgtcccagcctagccttgtggggagcaaagaggagccgccgccggcgagaagtggcagcggcggcggcagcgccaaggagccacaggaggaacggagccagcagcaggatgatatcgaagagctggagaccaaggccgtgggaatgtctaacgatggccgctttctcaagtttgacatcgaaatcggcagaggctcctttaagacggtctacaaaggtctggacactgaaaccaccgtggaagtcgcctggtgtgaactgcaggatcgaaaattaacaaagtctgagaggcagagatttaaagaagaagctgaaatgttaaaaggtcttcagcatcccaatattgttagattttatgattcctgggaatccacagtaaaaggaaagaagtgcattgttttggtgactgaacttatgacgtctggaacacttaaaacgtatctgaaaaggtttaaagtgatgaagatcaaagttctaagaagctggtgccgtcagatccttaaaggtcttcagtttcttcatactcgaactccacctatcattcaccgcgatcttaaatgtgacaacatctttatcaccggccctactggctcagtcaagattggagacctcggtctggcaaccctgaagcgggcttcttttgccaagagtgtgataggtaccccagagttcatggcccctgagatgtatgaggagaaatatgatgaatccgttgacgtttatgcttttgggatgtgcatgcttgagatggctacatctgaatatccttactcggagtgccaaaatgctgcacagatctaccgtcgcgtgaccagtggggtgaagccagccagttttgacaaagtagcaattcctgaagtgaaggaaattattgaaggatgcatacgacaaaacaaagatgaaagatattccatcaaagaccttttgaaccatgccttcttccaagaggaaacaggagtacgggtagaattagcagaagaagatgatggagaaaaaatagccataaaattatggctacgtattgaagatattaagaaattaaagggaaaatacaaagataatgaagctattgagttttcttttgatttagagagagatgtcccagaagatgttgcacaagaaatggtagagtctgggtatgtctgtgaaggtgatcacaagaccatggctaaagctatcaaagacagagtatcattaattaagaggaaacgagagcagcggcagttggtacgggaggagcaagaaaaaaaaaagcaggaagagagcagtctcaaacagcaggtagaacaatccagtgcttcccagacaggaatcaagcagctcccttctgctagcaccggcatacctactgcttctaccacttcagcttcagtttctacacaagtagaacctgaagaacctgaggcagatcaacatcaacaactacagtaccagcaacccagtatatctgtgttatctgatgggacggttgacagtggtcagggatcctctgtcttcacagaatctcgagtgagcagccaacagacagtttcatatggttcccaacatgaacaggcacattctacaggcacagtcccagggcatataccttctactgtccaagcacagtctcagccccatggggtatatccaccctcaagtgtggcacaggggcagagccagggtcagccatcctcaagtagcttaacaggggtttcatcttcccaacccatacaacatcctcagcagcagggaatacagcagacagcccctcctcaacagacagtgcagtattcactttcacagacatcaacctccagtgaggccactactgcacagccagtgagtcagcctcaagctccacaagtcttgcctcaagtatcagctggaaaacagagtactcagggagtctctcaggttgctcctgcagagccagttgcagtagcacagacccaagctacccagccgaccactttggcttcctctgtagacagtgcacattcagatgttgcttcaggtatgagtgatggcaatgagaacgtcccatcttccagtggaaggcatgaaggaagaactacaaaacggcattaccgaaaatctgtaaggagtcgctctcgacatgaaaaaacttcacgcccaaaattaagaattttgaatgtttcaaataaaggagaccgagtagtagaatgtcaattagagactcataataggaaaatggttacattcaaatttgacctagatggtgacaaccccgaggagatagcaacaattatggtgaacaatgactttattctagcaatagagagagagtcgtttgtggatcaagtgcgagaaattattgaaaaagctgatgaaatgctcagtgaggatgtcagtgtggaaccagagggtgatcagggattggagagtctacaaggaaaggatgactatggcttttcaggttctcagaaattggaaggagagttcaaacaaccaattcctgcgtcttccatgccacagcaaataggcattcctaccagttctttaactcaagttgttcattctgcgggaaggcggtttatagtgagtcctgtgccagaaagccgattacgagaatcaaaagttttccccagtgaaataacagatacagttgctgcctctacagctcagagccctggaatgaacttgtctcactctgcatcatcccttagtctacaacaggccttttctgaacttagacgtgcccaaatgacagaaggacccaacacagcacctccaaactttagtcatacaggaccaacatttccagtagtacctcctttcttaagtagcattgctggagtcccaaccacagcagcagccacagcaccagtccctgcaacaagcagccctcctaatgacatttccacatcagtaattcagtctgaggttacagtgcccactgaagaggggattgctggagttgccaccagcacaggtgtggtaacttcaggtggtctccccataccacctgtgtctgaatcaccagtactttccagcgtagtttcaagtatcacaatacctgcagttgtctcaatatctactacatccccgtcacttcaagtccccacatccacatctgagatcgttgtttctagtacagcactgtatccttcagtaacagtttcagcaacttcagcctctgcagggggcagtactgctaccccaggtcctaagcctccagctgtagtatctcagcaggcagcaggcagcactactgtgggagccacattaacatcagtttctaccaccacttcattcccaagcacagcttcacagctgtgcattcagcttagcagcagtacttctactcctactttagctgaaaccgtggtagttagcgcacactcactagataagacatctcatagcagtacaactggattggctttctccctctctgcaccatcttcctcttcctctcctggagcaggagtgtctagttatatttctcagcctggtgggctgcatcctttggtcattccatcagtgatagcttctactcctattcttccccaagcagcaggacctacttctacacctttattaccccaagtacctagtatcccacccttggtacagcctgttgccaatgtgcctgctgtacagcagacactaattcatagtcagcctcaaccagctttgcttcccaaccagccccatactcattgtcctgaagtagattctgatacacaacccaaagctcctggaattgatgacataaagactctagaagaaaagctgcggtctctgttcagtgaacacagctcatctggagctcagcatgcctctgtctcactggagacctcactagtcatagagagcactgtcacaccaggcatcccaactactgctgttgcaccaagcaaactcctgacttctaccacaagtacttgcttaccaccaaccaatttaccactaggaacagttgctttgccagttacaccagtggtcacacctgggcaagtttctaccccagtcagcactactacatcaggagtgaaacctggaactgctccctccaagccacctctaactaaggctccggtgctgccagtgggtactgaacttccagcaggtactctacccagcgagcagctgccaccttttccaggaccttctctaacccagtcccagcaacctctagaggatcttgatgctcaattgagaagaacacttagtccagagatgatcacagtgacttctgcggttggtcctgtgtccatggcggctccaacagcaatcacagaagcaggaacacagcctcagaaggtttctcaagtcaaagaaggccctgtcctagcaactagttcaggagctggtgtttttaagatgggacgatttcaggtttctgttgcagcagacggtgcccagaaagagggtaaaaataagtcagaagatgcaaagtctgttcattttgaatccagcacctcagagtcctcagtgctatcaagtagtagtccagagagtaccttggtgaaaccagagccgaatggcataaccatccctggtatctcttcagatgtgccagagagtgcccacaaaactactgcctcagaggcaaagtcagacactgggcagcctaccaaggttggacgttttcaggtgacaactacagcaaacaaagtgggtcgtttctctgtatcaaaaactgaggacaagatcactgacacaaagaaagaaggaccagtggcatctcctccttttatggatttggaacaagctgttcttcctgctgtgataccaaagaaagagaagcctgaactgtcagagccttcacatctaaatgggccgtcttctgacccggaggccgcttttttaagtagggatgtggatgatggttccggtagtccacactcgccccatcagctgagctcaaagagccttcctagccagaatctaagtcaaagccttagtaattcatttaactcctcttacatgagtagcgacaatgagtcagatatcgaagatgaagacttaaagttagagctgcgacgactacgagataaacatctcaaagagattcaggacctgcagagtcgccagaagcatgaaattgaatctttgtataccaaactgggcaaggtgccccctgctgttattattcccccagctgctcccctttcagggagaagacgacgacccactaaaagcaaaggcagcaaatctagtcgaagcagttccttggggaataaaagcccccagctttcaggtaacctgtctggtcagagtgcagcttcagtcttgcacccccagcagaccctccaccctcctggcaacatcccagagtccgggcagaatcagctgttacagccccttaagccatctccctccagtgacaacctctattcagccttcaccagtgatggtgccatttcagtaccaagcctttctgctccaggtcaaggaaccagcagcacaaacactgttggggcaacagtgaacagccaagccgcccaagctcagcctcctgccatgacgtccagcaggaagggcacattcacagatgacttgcacaagttggtagacaattgggcccgagatgccatgaatctctcaggcaggagaggaagcaaagggcacatgaattacgagggccctggaatggcaaggaagttctctgcacctgggcaactgtgcatctccatgacctcgaacctgggtggctctgcccccatctctgcagcatcagctacctctctaggtcacttcaccaagtctatgtgccccccacagcagtatggctttccagctaccccatttggcgctcaatggagtgggacgggtggcccagcaccacagccacttggccagttccaacctgtgggaactgcctccttgcagaatttcaacatcagcaatttgcagaaatccatcagcaaccccccaggctccaacctgcggaccacttagacctagagacattaactgaatagatctgggggcaggagatggaatgctgagggggtgggtgggggtgggaagtagcctatatactaactactagtgctgcatttaactggttatttcttgccagaggggaatgtttttaatactgcattgagccctcagaatggagagtctcccccgctccagttattggaatgggagaggaaggaaagaacagcttttttgtcaaggggcagcttcagaccatgctttcctgtttatctatactcagtaatgaggatgagggctaggaaagtcttgttcataaggaagctggagaactcaatgtaaaatcaaacccatctgtaatttcgagtgggtggagctcttgcttttggtacatgccctgaatccctcactccctcaagaatccgaaccacaggacaaaaaccacctactgggctctctcctaccctgccctcctcccttttttttacccctctcttttttattttttctttgctctttagaacccagtgaaaaataccagggtactggggtgcaactctttcttatgataggtcattagtgctttaagcaaaagatattagcagctttgactgcagcattagcaattaggaaaaaaaaaaaattaagttccctgcggacatgtaactttgccatcagttttgatgtggaaacactgtgatatataaaatgttgttggacaacagtagttttaagagtaaaatatgaaacgtttaaaaagttccaaaaaaagctagctctgtcctttacttattgagacactttaactttttcctttgtatttccattgtattagataaataaatgtgaatgtaaaattgtataaattactgtacttgaatacttctgtttcccagtgttgcttgctggacattttagtgccttggacttctattgcttctgccattagcatcaacttaccagaccccagatcaataaagggcatgtggaaggaaatcgtaggtccatgtgaccccagcagtccagcagtggttatgccaaagggaaattgaaaaagtatttttttaagtcattcaacaactttgtctagagcaggtgtaagatgagtagggtgggaagttaggttggcatcagtggttaaaaacagaaagttctgtttcgggaatagtgaggagggggtgttgtaacaaaattggacaacttaaaagaatggtgtgtgctgggtgaaagacaaagactaaagaatgaggaaacaaacgtgatgcctggccagtgactgtcatataaacctttcttatttgagctaggcttgaacagacgtgacctagaagaaactgaacataaagagaagggggtggggggctagttttcaagttggggaacctgatagtgaaaagtcacagatggagaaaattgctctcagaaaaactgtttggattgctttcctcttgttgcacatgtaccatgcatttctcagcttggggtactacattttgtggaaagttaatctatctatctttccacatctgaattaatcattctaggaaagaatacttattcctactcatttcctttatgatgtccaaatggttgcaggatcataatctattgtgccacctttatttctagaagtacaactaatatgttcacattttcaaataaataatactccccgtaagtaataactgcaaccaatcagtgttattcagtgctatgcctccttgtaatgggtagttattaattattttcagagctttccggaaatactgtcctaactggctatgtttaggatctttgttatctctgaagacaaagaaagaagctaggactcttaattttggggtgcttcttgactcttagttgggaaactgaaaatatttccaaccttttacccacgtcaatggcatattctgggaatcaccaccaccaccaccactaccacagaaagaggctggaggctcctgtaccctgttcattccttaagggccctgcttcccttagtaagtaagtaagttggtctacggccctaaatatgcaaatgagagctgaaggtttttaaaaggtagaaaggaaaagggcaagggcttccacccctgctttaaaatgatttatttattctctgcttgtatttcttgtggagagagtaaggatagaaccaacaaggggctgagtagctgagaaaggggccacccaagagtgaaacatactttataccagaggagcagtggagcctcatgcagcacattatcatttgttatttgggtttaataataattttgacatcttttcactcatacacaaaaaaagtcagaactggtgttatttactgttgatttcatcctcctgtgtatgaaataacaagcctagaggaatgaactagtgctactgaactgtttaaattatttttgtgttaatagtacactttgagtatctttttccacattaaaaactttctgaattataaatgttttccttacattatttaacaatgtacactgttaaaaataaaaataaaaattcaaa

SEQ ID NO: 200213 - DNA, 11232 bp, Homo sapiens
  Payload ID: 19503
  Gene Name: WNK lysine deficient protein kinase 1
  Uniprot ID: Q9H4A3
  ENST ID: ENST00000537687
  CDS Start-End: 644-8572
ccggcccttcgcctctgggcgatgggcgacctgtgaggccggtccccatcgctgggggcgcgtgtgggaggaggcggccgcccgagtgaccgggagccgggccgcggccttccctcgcccgcctcggcccctcccactcctctgccccggggccgccaccgcccgggcgtcggacctggtcccgtgctcgcggtgccgccgccctctgggcctagcccgcccagctcggcgagcggcggcagtgggagccgcgtccgccgcatccgcctcgactcggtgccggcccctggccctcccctcatgactgcggcgcctctgctgccaccgcccgcccggccgccgctcgccgcaggatggatgcggaccgtgcggcgctaacccccgtggctcagctcccgaatcgcccgccttcgagccctcctcgtgagccgcagcagcctcggtgccagcccccgccgcagctgggcccagcggtccgcctgtccctcgttgcggcttgtcggtgctgagtgaggcgtcgtccgggtcggcgcgaacccgcccggccgcggttccctgcagacctctgcgcgggcggctcggcccttcacgcccttttcgttcacgaatccgagcccgctcgcctctctccagcgaaccgaccatgtctggcggcgccgcagagaagcagagcagcactcccggttccctgttcctctcgccgccggctcctgcccccaagaatggctccagctccgattcctccgtgggggagaaactgggagccgcggccgccgacgctgtgaccggcaggaccgaggagtacaggcgccgccgccacactatggacaaggacagccgtggggcggccgcgaccactaccaccactgagcaccgcttcttccgccggagcgtcatctgtgactccaatgccactgcactggagcttcccggccttcctctttccctgccccagcccagcatccccgcggctgtcccgcagagtgctccaccggagccccaccgggaagagaccgtgaccgccaccgccacttcccaggtagcccagcagcctccagccgctgccgcccctggggaacaggccgtcgcgggccctgccccctcgactgtccccagcagtaccagcaaagaccgcccagtgtcccagcctagccttgtggggagcaaagaggagccgccgccggcgagaagtggcagcggcggcggcagcgccaaggagccacaggaggaacggagccagcagcaggatgatatcgaagagctggagaccaaggccgtgggaatgtctaacgatggccgctttctcaagtttgacatcgaaatcggcagaggctcctttaagacggtctacaaaggtctggacactgaaaccaccgtggaagtcgcctggtgtgaactgcaggatcgaaaattaacaaagtctgagaggcagagatttaaagaagaagctgaaatgttaaaaggtcttcagcatcccaatattgttagattttatgattcctgggaatccacagtaaaaggaaagaagtgcattgttttggtgactgaacttatgacgtctggaacacttaaaacgtatctgaaaaggtttaaagtgatgaagatcaaagttctaagaagctggtgccgtcagatccttaaaggtcttcagtttcttcatactcgaactccacctatcattcaccgcgatcttaaatgtgacaacatctttatcaccggccctactggctcagtcaagattggagacctcggtctggcaaccctgaagcgggcttcttttgccaagagtgtgataggtaccccagagttcatggcccctgagatgtatgaggagaaatatgatgaatccgttgacgtttatgcttttgggatgtgcatgcttgagatggctacatctgaatatccttactcggagtgccaaaatgctgcacagatctaccgtcgcgtgaccagtggggtgaagccagccagttttgacaaagtagcaattcctgaagtgaaggaaattattgaaggatgcatacgacaaaacaaagatgaaagatattccatcaaagaccttttgaaccatgccttcttccaagaggaaacaggagtacgggtagaattagcagaagaagatgatggagaaaaaatagccataaaattatggctacgtattgaagatattaagaaattaaagggaaaatacaaagataatgaagctattgagttttcttttgatttagagagagatgtcccagaagatgttgcacaagaaatggtagagtctgggtatgtctgtgaaggtgatcacaagaccatggctaaagctatcaaagacagagtatcattaattaagaggaaacgagagcagcggcagttggtacgggaggagcaagaaaaaaaaaagcaggaagagagcagtctcaaacagcaggtagaacaatccagtgcttcccagacaggaatcaagcagctcccttctgctagcaccggcatacctactgcttctaccacttcagcttcagtttctacacaagtagaacctgaagaacctgaggcagatcaacatcaacaactacagtaccagcaacccagtatatctgtgttatctgatgggacggttgacagtggtcagggatcctctgtcttcacagaatctcgagtgagcagccaacagacagtttcatatggttcccaacatgaacaggcacattctacaggcacagtcccagggcatataccttctactgtccaagcacagtctcagccccatggggtatatccaccctcaagtgtgcctcagtccatggcgcatccgtgtggggggaccccaacatacccagaatcacagatatttttcccaactattcatgaacgtccagtttctttttcaccacctcccacctgcccaccgaaagtagccatttcccagcggcgtaagagcacctccttcctggaagcccaaactcaccacttccaacccctgctgaggactgttggccaaagtcttcttccacctggtggcagcccaactaactggacaccagaggccgtagttatgttgggtactacagccagtagagtaactggagagtcatgtgagatacaggtccatcctatgtttgaaccatctcaagtttacagtgactatagacctggactagtacttccagaagaagctcactattttattcctcaggaagcagtgtatgtagctggggtacattaccaggcccgggtggcagaacagtatgagggcattccatacaactcatcagtactgtcaagtcctatgaaacagatacctgaacagaagccagtacaagggggccctacttcaagttctgtctttgaatttccatctggacaggctttcctggtaggacaccttcagaatctaagattagattctggattgggtccgggatctcccctctctagtatttctgcacctatcagtacagatgctacacgtttgaaatttcaccctgtctttgttcctcattctgcgcctgctgtgttaactcataacaatgagagcagaagcaactgtgtatttgaatttcatgttcacacaccaagctcctcttcaggagaaggaggtggaattttacctcagcgtgtttaccgaaatcggcaggttgcagtggacttgaatcaagaagaactgcctcctcaatcagttggattacatggctacttgcagcctgtgactgaagaaaagcataattaccatgccccagaattgaccgtttctgtggtagagcctatcggacagaactggccaataggaagcccagaatattccagtgattcctcacaaatcacttcttcagaccccagtgattttcagtcacctccccctacagggggagcagctgcaccttttggctctgacgtctcaatgccctttatccatctgcctcagacagtgttacaagaatccccacttttcttctgtttcccccaaggaaccacatctcagcaggtcttaactgcctcattttcttcaggaggatctgcacttcatccacaggcacaggggcagagccagggtcagccatcctcaagtagcttaacaggggtttcatcttcccaacccatacaacatcctcagcagcagcagggaatacagcagacagcccctcctcaacagacagtgcagtattcactttcacagacatcaacctccagtgaggccactactgcacagccagtgagtcagcctcaagctccacaagtcttgcctcaagtatcagctggaaaacagggcttcccacctcgactgccaccacagtacccaggagattcaaatattgctccctcttccaacgtggcttctgtttgcatccattctacagtcctatcccctcccatgccgacagaagtactggctacacctgggtactttcccacagtggtgcagccttatgtggaatcaaatcttttagttcctatgggtggtgtaggaggacaggttcaagtgtcccagccaggagggagtttagcacaagcccccactacatcctcccagcaagcagttttggagagtactcagggagtctctcaggttgctcctgcagagccagttgcagtagcacagacccaagctacccagccgaccactttggcttcctctgtagacagtgcacattcagatgttgcttcaggtatgagtgatggcaatgagaacgtcccatcttccagtggaaggcatgaaggaagaactacaaaacggcattaccgaaaatctgtaaggagtcgctctcgacatgaaaaaacttcacgcccaaaattaagaattttgaatgtttcaaataaaggagaccgagtagtagaatgtcaattagagactcataataggaaaatggttacattcaaatttgacctagatggtgacaaccccgaggagatagcaacaattatggtgaacaatgactttattctagcaatagagagagagtcgtttgtggatcaagtgcgagaaattattgaaaaagctgatgaaatgctcagtgaggatgtcagtgtggaaccagagggtgatcagggattggagagtctacaaggaaaggatgactatggcttttcaggttctcagaaattggaaggagagttcaaacaaccaattcctgcgtcttccatgccacagcaaataggcattcctaccagttctttaactcaagttgttcattctgcgggaaggcggtttatagtgagtcctgtgccagaaagccgattacgagaatcaaaagttttccccagtgaaataacagatacagttgctgcctctacagctcagagccctggaatgaacttgtctcactctgcatcatcccttagtctacaacaggccttttctgaacttagacgtgcccaaatgacagaaggacccaacacagcacctccaaactttagtcatacaggaccaacatttccagtagtacctcctttcttaagtagcattgctggagtcccaaccacagcagcagccacagcaccagtccctgcaacaagcagccctcctaatgacatttccacatcagtaattcagtctgaggttacagtgcccactgaagaggggattgctggagttgccaccagcacaggtgtggtaacttcaggtggtctccccataccacctgtgtctgaatcaccagtactttccagcgtagtttcaagtatcacaatacctgcagttgtctcaatatctactacatccccgtcacttcaagtccccacatccacatctgagatcgttgtttctagtacagcactgtatccttcagtaacagtttcagcaacttcagcctctgcagggggcagtactgctaccccaggtcctaagcctccagctgtagtatctcagcaggcagcaggcagcactactgtgggagccacattaacatcagtttctaccaccacttcattcccaagcacagcttcacagctgtgcattcagcttagcagcagtacttctactcctactttagctgaaaccgtggtagttagcgcacactcactagataagacatctcatagcagtacaactggattggctttctccctctctgcaccatcttcctcttcctctcctggagcaggagtgtctagttatatttctcagcctggtgggctgcatcctttggtcattccatcagtgatagcttctactcctattcttccccaagcagcaggacctacttctacacctttattaccccaagtacctagtatcccacccttggtacagcctgttgccaatgtgcctgctgtacagcagacactaattcatagtcagcctcaaccagctttgcttcccaaccagccccatactcattgtcctgaagtagattctgatacacaacccaaagctcctggaattgatgacataaagactctagaagaaaagctgcggtctctgttcagtgaacacagctcatctggagctcagcatgcctctgtctcactggagacctcactagtcatagagagcactgtcacaccaggcatcccaactactgctgttgcaccaagcaaactcctgacttctaccacaagtacttgcttaccaccaaccaatttaccactaggaacagttgctttgccagttacaccagtggtcacacctgggcaagtttctaccccagtcagcactactacatcaggagtgaaacctggaactgctccctccaagccacctctaactaaggctccggtgctgccagtgggtactgaacttccagcaggtactctacccagcgagcagctgccaccttttccaggaccttctctaacccagtcccagcaacctctagaggatcttgatgctcaattgagaagaacacttagtccagagatgatcacagtgacttctgcggttggtcctgtgtccatggcggctccaacagcaatcacagaagcaggaacacagcctcagaagggtgtttctcaagtcaaagaaggccctgtcctagcaactagttcaggagctggtgtttttaagatgggacgatttcaggtttctgttgcagcagacggtgcccagaaagagggtaaaaataagtcagaagatgcaaagtctgttcattttgaatccagcacctcagagtcctcagtgctatcaagtagtagtccagagagtaccttggtgaaaccagagccgaatggcataaccatccctggtatctcttcagatgtgccagagagtgcccacaaaactactgcctcagaggcaaagtcagacactgggcagcctaccaaggttggacgttttcaggtgacaactacagcaaacaaagtgggtcgtttctctgtatcaaaaactgaggacaagatcactgacacaaagaaagaaggaccagtggcatctcctccttttatggatttggaacaagctgttcttcctgctgtgataccaaagaaagagaagcctgaactgtcagagccttcacatctaaatgggccgtcttctgacccggaggccgcttttttaagtagggatgtggatgatggttccggtagtccacactcgccccatcagctgagctcaaagagccttcctagccagaatctaagtcaaagccttagtaattcatttaactcctcttacatgagtagcgacaatgagtcagatatcgaagatgaagacttaaagttagagctgcgacgactacgagataaacatctcaaagagattcaggacctgcagagtcgccagaagcatgaaattgaatctttgtataccaaactgggcaaggtgccccctgctgttattattcccccagctgctcccctttcagggagaagacgacgacccactaaaagcaaaggcagcaaatctagtcgaagcagttccttggggaataaaagcccccagctttcaggtaacctgtctggtcagagtgcagcttcagtcttgcacccccagcagaccctccaccctcctggcaacatcccagagtccgggcagaatcagctgttacagccccttaagccatctccctccagtgacaacctctattcagccttcaccagtgatggtgccatttcagtaccaagcctttctgctccaggtcaaggaaccagcagcacaaacactgttggggcaacagtgaacagccaagccgcccaagctcagcctcctgccatgacgtccagcaggaagggcacattcacagatgacttgcacaagttggtagacaattgggcccgagatgccatgaatctctcaggcaggagaggaagcaaagggcacatgaattacgagggccctggaatggcaaggaagttctctgcacctgggcaactgtgcatctccatgacctcgaacctgggtggctctgcccccatctctgcagcatcagctacctctctaggtcacttcaccaagtctatgtgccccccacagcagtatggctttccagctaccccatttggcgctcaatggagtgggacgggtggcccagcaccacagccacttggccagttccaacctgtgggaactgcctccttgcagaatttcaacatcagcaatttgcagaaatccatcagcaaccccccaggctccaacctgcggaccacttagacctagagacattaactgaatagatctgggggcaggagatggaatgctgagggggtgggtgggggtgggaagtagcctatatactaactactagtgctgcatttaactggttatttcttgccagaggggaatgtttttaatactgcattgagccctcagaatggagagtctcccccgctccagttattggaatgggagaggaaggaaagaacagcttttttgtcaaggggcagcttcagaccatgctttcctgtttatctatactcagtaatgaggatgagggctaggaaagtcttgttcataaggaagctggagaactcaatgtaaaatcaaacccatctgtaatttcgagtgggtggagctcttgcttttggtacatgccctgaatccctcactccctcaagaatccgaaccacaggacaaaaaccacctactgggctctctcctaccctgccctcctcccttttttttacccctctcttttttattttttctttgctctttagaacccagtgaaaaataccagggtactggggtgcaactctttcttatgataggtcattagtgctttaagcaaaagatattagcagctttgactgcagcattagcaattaggaaaaaaaaaaaattaagttccctgcggacatgtaactttgccatcagttttgatgtggaaacactgtgatatataaaatgttgttggacaacagtagttttaagagtaaaatatgaaacgtttaaaaagttccaaaaaaagctagctctgtcctttacttattgagacactttaactttttcctttgtatttccattgtattagataaataaatgtgaatgtaaaattgtataaattactgtacttgaatacttctgtttcccagtgttgcttgctggacattttagtgccttggacttctattgcttctgccattagcatcaacttaccagaccccagatcaataaagggcatgtggaaggaaatcgtaggtccatgtgaccccagcagtccagcagtggttatgccaaagggaaattgaaaaagtatttttttaagtcattcaacaactttgtctagagcaggtgtaagatgagtagggtgggaagttaggttggcatcagtggttaaaaacagaaagttctgtttcgggaatagtgaggagggggtgttgtaacaaaattggacaacttaaaagaatggtgtgtgctgggtgaaagacaaagactaaagaatgaggaaacaaacgtgatgcctggccagtgactgtcatataaacctttcttatttgagctaggcttgaacagacgtgacctagaagaaactgaacataaagagaagggggtggggggctagttttcaagttggggaacctgatagtgaaaagtcacagatggagaaaattgctctcagaaaaactgtttggattgctttcctcttgttgcacatgtaccatgcatttctcagcttggggtactacattttgtggaaagttaatctatctatctttccacatctgaattaatcattctaggaaagaatacttattcctactcatttcctttatgatgtccaaatggttgcaggatcataatctattgtgccacctttatttctagaagtacaactaatatgttcacattttcaaataaataatactccccgtaagtaataactgcaaccaatcagtgttattcagtgctatgcctccttgtaatgggtagttattaattattttcagagctttccggaaatactgtcctaactggctatgtttaggatctttgttatctctgaagacaaagaaagaagctaggactcttaattttggggtgcttcttgactcttagttgggaaactgaaaatatttccaaccttttacccacgtcaatggcatattctgggaatcaccaccaccaccaccactaccacagaaagaggctggaggctcctgtaccctgttcattccttaagggccctgcttcccttagtaagtaagtaagttggtctacggccctaaatatgcaaatgagagctgaaggtttttaaaaggtagaaaggaaaagggcaagggcttccacccctgctttaaaatgatttatttattctctgcttgtatttcttgtggagagagtaaggatagaaccaacaaggggctgagtagctgagaaaggggccacccaagagtgaaacatactttataccagaggagcagtggagcctcatgcagcacattatcatttgttatttgggtttaataataattttgacatcttttcactcatacacaaaaaaagtcagaactggtgttatttactgttgatttcatcctcctgtgtatgaaataacaagcctagaggaatgaactagtgctactgaactgtttaaattatttttgtgttaatagtacactttgagtatctttttccacattaaaaactttctgaattataaatgttttccttacattatttaacaatgtacactgttaaaaataaaaataaaaattcaaactttgggggtttctcagcagccgttaattgtacattttgcactaactctgggtgttgcgcttcttgtaagattgcgctttgtgcttcagtttgttacctttgtagacttatttaatgaaaccattcaaataaaccaaacttgcttttgttga

SEQ ID NO: 200214 - DNA, 584 bp, Homo sapiens
  Payload ID: 19503
  Gene Name: WNK lysine deficient protein kinase 1
  ENST ID: ENST00000534872
  CDS Start-End: 1-584
accactttggcttcctctgtagacagtgcacattcagatgttgcttcaggtatgagtgatggcaatgagaacgtcccatcttccagtggaaggcatgaaggaagaactacaaaacggcattaccgaaaatctgtaaggagtcgctctcgacatgaaaaaacttcacgcccaaaattaagaattttgaatgtgaacaatgactttattctagcaatagagagagagtcgtttgtggatcaagtgcgagaaattattgaaaaagctgatgaaatgctcagtgaggatgtcagtgtggaaccagagggtgatcagggattggagagtctacaaggaaaggatgactatggcttttcaggttctcagaaattggaaggagagttcaaacaaccaattcctgcgtcttccatgccacagcaaataggcattcctaccagttctttaactcaagttgttcattctgcgggaaggcggtttatagtgagtcctgtgccagaaagccgattacgagaatcaaaagttttccccagtgaaataacagatacagttgctgcctctacagctcagagccctggaatgaacttgtc

SEQ ID NO: 200215 - DNA, 528 bp, Homo sapiens
  Payload ID: 19503
  Gene Name: WNK lysine deficient protein kinase 1
  ENST ID: ENST00000545285
  CDS Start-End: 1-528
tgaacaggcacattctacaggcacagtcccagggcatataccttctactgtccaagcacagtctcagccccatggggtatatccaccctcaagtgtggcacaggggcagagccagggtcagccatcctcaagtagcttaacaggggtttcatcttcccaacccatacaacatcctcagcagcagcagggaatacagcagacagcccctcctcaacagacagtgcagtattcactttcacagacatcaacctccagtgaggccactactgcacagccagtgagtcagcctcaagctccacaagtcttgcctcaagtatcagctggaaaacagggcttcccacctcgactgccaccacagtacccaggagattcaaatattgctccctcttccaacgtggcttctgtttgcatccattctacagtcctatcccctcccatgccgacagaagtactggctacacctgggtactttcccacagtggtgcagccttatgtggaatcaaatcttttagttcctatgggtggtgt

SEQ ID NO: 200216 - DNA, 722 bp, Homo sapiens
  Payload ID: 19503
  Gene Name: WNK lysine deficient protein kinase 1
  ENST ID: ENST00000574679
  CDS Start-End: 1-722
cctcattctgcgcctgctgtgttaactcataacaatgagagcagaagcaactgtgtatttgaatttcatgttcacacaccaagctcctcttcaggagaaggaggtggaattttacctcagcgtgtttaccgaaatcggcaggttgcagtggacttgaatcaagaagaactgcctcctcaatcagttggattacatggctacttgcagcctgtgactgaagaaaagcataattaccatgccccagaattgaccgtttctgtggtagagcctatcggacagaactggccaataggaagcccagaatattccagtgattcctcacaaatcacttcttcagaccccagtgattttcagtcacctccccctacagggggagcagctgcaccttttggctctgacgtctcaatgccctttatccatctgcctcagacagtgttacaagaatccccacttttcttctgtttcccccaaggaaccacatctcagcaggtcttaactgcctcattttcttcaggaggatctgcacttcatccacaggcacaggggcagagccagggtcagccatcctcaagtagcttaacaggggtttcatcttcccaacccatacaacatcctcagcagcagcagggaatacagcagacagcccctcctcaacagacagtgcagtattcactttcacagacatcaacctccagtgaggccactactgcacagccagtgag

SEQ ID NO: 200217 - DNA, 1401 bp, Homo sapiens
  Payload ID: 19503
  Gene Name: WNK lysine deficient protein kinase 1
  ENST ID: ENST00000574564
  CDS Start-End: 37-1341
cccagttgtgcatgtctgatgtaatttcacatatgaatgtatgaattacttgtcttattcatgttgatacagcctcagtccatggcgcatccgtgtggggggaccccaacatacccagaatcacagatatttttcccaactattcatgaacgtccagtttctttttcaccacctcccacctgcccaccgaaagtagccatttcccagcggcgtaagagcacctccttcctggaagcccaaactcaccacttccaacccctgctgaggactgttggccaaagtcttcttccacctggtggcagcccaactaactggacaccagaggccgtagttatgttgggtactacagccagtagagtaactggagagtcatgtgagatacaggtccatcctatgtttgaaccatctcaagtttacagtgactatagacctggactagtacttccagaagaagctcactattttattcctcaggaagcagtgtatgtagctggggtacattaccaggcccgggtggcagaacagtatgagggcattccatacaactcatcagtactgtcaagtcctatgaaacagatacctgaacagaagccagtacaagggggccctacttcaagttctgtctttgaatttccatctggacaggctttcctggtaggacaccttcagaatctaagattagattctggattgggtccgggatctcccctctctagtatttctgcacctatcagtacagatgctacacgtttgaaatttcaccctgtctttgttcctcattctgcgcctgctgtgttaactcataacaatgagagcagaagcaactgtgtatttgaatttcatgttcacacaccaagctcctcttcaggagaaggaggtggaattttacctcagcgtgtttaccgaaatcggcaggttgcagtggacttgaatcaagaagaactgcctcctcaatcagttggattacatggctacttgcagcctgtgactgaagaaaagcataattaccatgccccagaattgaccgtttctgtggtagagcctatcggacagaactggccaataggaagcccagaatattccagtgattcctcacaaatcacttcttcagaccccagtgattttcagtcacctccccctacagggggagcagctgcaccttttggctctgacgtctcaatgccctttatccatctgcctcagacagtgttacaagaatccccacttttcttctgtttcccccaaggaaccacatctcagcaggtcttaactgcctcattttcttcaggaggatctgcacttcatccacaggttataggaaaacttccacaattattttaaactaccctactttgcaccataacatttaaattttctattccttatttccctgaatcatgg

SEQ ID NO: 200218 - DNA, 7138 bp, Homo sapiens
  Payload ID: 19504
  Gene Name: WNK lysine deficient protein kinase 2
  Uniprot ID: Q9Y3S1
  ENST ID: ENST00000297954
  CDS Start-End: 1-6894
atggacggcgatggcggccgccgagacgtccccggcacgctgatggagcccgggcgcggcgcggggcccgcgggcatggcggagcctcgggcgaaggcggcgcggccggggccccagcgctttctgcggcgcagcgtggtagagtcggaccaggaggagccgccgggcttggaggcagccgaggcgccgggcccgcagcccccgcagcccctgcagcgccgggtgcttctgctctgcaagacgcgccgcctcatcgcggagcgcgcccgcggacgccccgccgcccccgcgcccgcagcgctggtagcgcagccgggagcccccggagcccccgcggacgccggccccgagcccgtgggcacgcaggagcccggcccggaccccatcgcagccgctgtcgaaaccgcgcctgcccccgacggcggccccagggaggaggcggcggcgaccgtgaggaaggaggatgagggggcggccgaggcgaagcctgagcccgggcgcactcgccgggacgagcccgaagaggaggaggacgacgaggacgacctcaaggccgtggccacctctctggacggccgcttcctcaagttcgacatcgagctgggccgcggttccttcaagacggtctacaaggggctggacacggagacctgggtggaggtggcctggtgtgagctgcaggaccggaagctcaccaagctggagcggcagcggttcaaggaagaggctgagatgctgaaaggcctgcagcaccccaacatcgtgcgcttctacgacttctgggagtccagcgccaagggcaagcggtgcattgtgctggtgacggagctgatgacctcagggacgctgaagacatacctgaagcggttcaaggtgatgaagcccaaggttctccgcagctggtgccggcagatcctgaagggcctgctgttcctgcacacaaggacgccacccatcatccaccgagacctgaaatgtgacaatattttcatcaccggaccaactgggtctgtgaagattggcgacttgggcctggccactctgaaaagagcgtcatttgccaaaagtgtgataggtactcccgagttcatggcgcccgagatgtacgaggagcactacgatgagtccgtggacgtctatgcctttgggatgtgcatgctggagatggccacctcggagtacccctactcggagtgccagaatgcggcccagatctaccgcaaggtcacctgtggtatcaagccggccagctttgagaaagtgcacgatcctgaaatcaaggagattattggggagtgtatctgcaaaaacaaggaggaaaggtacgagatcaaagacctgctgagccacgccttcttcgcagaggacacaggcgtgagggtggagctcgcggaggaggaccacggcaggaagtccaccatcgccctgaggctctgggtggaagaccccaagaaactgaagggaaagcccaaggacaatggagccatagagttcaccttcgacctggagaaggagacgccggatgaggtggcccaagagatgattgagtctggattcttccacgagagtgacgtcaagatcgtggccaagtccatccgtgaccgcgtggccttgatccagtggcggcgggagaggatctggcccgcgctgcagcccaaggagcagcaggatgtgggcagcccggacaaggccaggggtccgccggtgcccctgcaggtccaggtgacctaccatgcacaggctgggcagcccgggccaccagagcccgaggagccggaggccgaccagcacctcctgccacctacgttgccgaccagcgccacctccctggcctcggacagcaccttcgacagcggccagggctctaccgtgtactcagactcgcagagcagccagcagagcgtgatgcttggctcccttgccgacgcagcgccgtccccggcccagtgtgtgtgcagcccccctgtgagcgaggggcccgtcctgccgcagagcctgccctcgctgggggcctaccagcagcccacggctgcacctggcttgccggtgggctctgtcccggcccccgcctgccctccgtccctccagcagcacttcccggatccggccatgagcttcgcccccgtgctgccgccgcccagcacccccatgcccacgggcccaggccagccagcaccccccggccagcagcctcctccgctggcccagccgacacccctgccgcaggtcctggccccacagcccgtggtccccctccagccggttcccccccacctgccaccgtacctggctccagcctcccaggtgggggcccccgctcagctgaagcccctccagatgccacaggcgcccctgcagccgcttgctcaagtccctccgcagatgcccccgattcctgttgtgccccccatcacgcccctggcgggaatcgacggcctccctccggccctcccagacctgccgaccgcgactgtgcctcccgtgccaccacctcagtatttctctccagccgtgatcttgccgagcctcgctgccccactcccccctgcgtccccagccttgcctctgcaggctgtgaagctgccccacccccctggggcgcccctggccatgccctgccggaccattgtgccaaatgcaccggccactatccccctgctggccgtagccccaccgggcgtggctgccctgtccattcattctgccgtggcccagctcccaggccaacctgtgtacccagcggccttcccacagatggcgcctactgacgtccctccttccccccatcacacggtgcagaatatgagggccacccctccacagccggcactgcctccacaacccacactgcccccacaacccgtgctgcccccgcaacccacgctgccccctcaacctgtgttgcccccgcaacccacacggccccctcaacctgtgctgcccccgcaacccatgctgcccccacaacctgtgctgcccccgcagccggcactgcctgtgcgccctgagcccctccagccccaccttcctgaacaagctgctccagctgctacaccagggagccagattctgcttggccacccagctccctatgctgtggacgtcgccgctcaggtccccaccgtgcctgtgccaccggctgcggtcctctcgccgcctctgccggaagtgctgctgcctgccgcccctgagctcctgcctcagttccccagctccctggccacggtgtctgcctctgtgcagagtgtgcccacccagactgccacacttctgccaccagcaaacccaccgctgcctggcgggcccgggatcgccagcccttgcccaactgtccagctgacggtggaaccagtccaagaggagcaggcctcacaggacaagccgcccggcctcccgcagagctgtgagagctatggaggttctgatgtcacttctggaaaagagctgagtgacagctgtgaaggcgcctttggagggggcaggctggagggcagggcagcccgaaaacaccaccgcaggtccacgcgtgcgcgctcccggcaggagagggccagccggccccggcttaccatcttgaacgtgtgcaacactggggacaagatggtggagtgccagctggagacgcacaaccacaagatggtgaccttcaagttcgacttggacggggacgcacccgatgaaattgccacgtatatggtggagcatgactttatcctgcaggccgagcgggaaacgttcatcgagcagatgaaggatgtcatggacaaggcagaggacatgctcagcgaggacacagacgccgaccgtggctccgacccagggaccagcccgccacacctcagcacctgcggcctgggcaccggggaggagagccgacaatcccaagccaacgcccccgtgtatcagcagaacgtcctgcacaccgggaagaggtggttcatcatctgtccggtggctgagcaccccgcccccgaggcccctgaatcttcgcccccacttcctctaagctccctgccgccagaagccagccaaggtccatgcagggggctcaccctgccctgtctcccatggcgcagagcagcctgtggggctgtgttcctatccttgttttctgctgaatcagctcagtcaaagcagcctccagattcagcgccctataaagaccagctgtcctcgaaggaacaacccagctttctagccagtcagcagctcctgagccaggcgggccccagcaaccctcctggggcacccccagcccctttggccccctcctcccctcctgtgactgctctgccccaagatggagcagctccagccaccagcaccatgccagagccagcgtcaggaactgccagccaggcagggggtccagggacacctcaggggctgaccagtgagctcgagacgtctcagccactagcggagactcacgaggccccgcttgctgtgcagcccctcgtggtgggcctagcaccttgcactccagctccagaggctgcctcaaccagggacgccagtgccccaagggagcccctgccacctcctgcacctgagcccagcccccacagcgggaccccacagcccgccttgggtcaacctgctcccctgcttcctgccgcagtgggggccgtcagcctggccacctcccagctcccaagcccacccctggggcccaccgtccccccacagccaccctcggccctggagtcggatggggaagggccgccccccagggtgggctttgtggacagcaccatcaagagcctggacgagaagctgcggactctgctctaccaggagcacgtgcccacctcctcagcctcagctgggacccctgtggaggtgggcgacagagacttcaccctggagcccctgagaggggaccagccccgctcagaggtctgcgggggggacctggccctgcccccagtgcctaaggaggcggtctcagggcgtgtccagctgccccagcccttggtggagaagtcagaactggcccccactcgaggggccgtgatggagcagggcacgtcctcgtcaatgacagcagagtcgtctcccaggagtatgctaggctatgacagagatggaaggcaggtggcctcagactcccatgtggtccccagcgtcccccaggatgtacctgcttttgtgagacctgcacgtgtggagcccacagacagggatggtggagaagctggagaaagctcggcagagcccccgccgagtgacatgggcacagtggggggccaggctagccacccccagacactcggcgctcgagctttggggtcccctcggaaacgtccagagcagcaggatgtcagctcaccagccaagactgtgggccgtttctcggtggtcagcactcaggacgagtggaccctggcctccccccacagcctgagatactctgccccacccgacgtctacctggacgaggccccctccagccccgacgtgaagctggcagtgcggcgggcgcagacggcctcctccatcgaggtcggcgtgggcgagcccgtgtccagcgactctggggacgagggccctcgggcgagacccccggtgcagaagcaggcgtccctgcccgtgagtggcagcgtggctggcgacttcgtgaagaaggccaccgccttcctgcagaggccttctcgggccggctcgctgggccccgagacacccagcagggtgggcatgaaggtccccacgatcagcgtgacctccttccattcccagtcgtcctacatcagcagcgacaatgattcggagctcgaggatgctgacataaagaaggagctgcagagtctgcgggagaagcacctgaaggagatctcggagctgcagagccagcagaagcaggagatcgaagctctgtaccgccgcctgggcaagccactgccccccaacgtgggcttcttccacacggcaccccccactggccgccggagaaaaaccagcaagagcaagctgaaggcaggcaagctgctaaatcccctggtgcggcagctcaaggtcgtggcctccagcacaggtcacttggctgactccagcagaggccctcccgctaaggaccctgcccaagccagtgtggggctcactgcagacagcacgggcctgagcgggaaggcagtgcagacccagcagccctgctccgtccgggcctccctgtcttcggacatctgctccggcttagccagtgatggaggcggagcgcgtggccaaggctggacggtttaccacccaacgtctgagagagtgacctataagtctagtagcaaacctcgtgctcgattcctcagtggacccgtatctgtgtccatctggtctgccctgaagcgtctctgcctaggcaaagaacacagcagtaggtcctccaccagcagcctggccccaggccctgagccaggcccccagcccgccctgcacgtccaggcgcaggtgaacaacagcaacaacaagaagggtaccttcacggacgacctgcacaagctggtggacgagtggacgagcaagacggtgggggccgcgcagctgaagcccacgctcaaccagctgaagcagacccagaagctgcaagacatggaggcccaggcaggctgggctgcccctggcgaggcgcgggctatgaccgcacctcgagcaggagtggggatgccacgtctgcccccagcgcccggccctctgtccaccacggtcattcccggagccgccccgaccctgtccgtgcccacaccagatggcgccctcggaaccgcccggagaaaccaggtgtggtttggcctccgagtcccccccaccgcctgctgtgggcacagcactcagccgcgagggggacagcgggtgggcagcaagactgcttcctttgcggcttcagaccctgttcgctcctaggttcctgtggtccacgcgccgtctccacacccacttcctatacttgagttgatggttagaaccttgtcgtcaccctgcagaagtacagtgccttgaatgccagcttttccgttccctgatgaaaagatatgttaaaaaaaattatcggaaaaggtttcatttgcaattggcttgtgcattgataatctttatttactgttttaagttgcagagatgtgaatggtttacaaatctgaagctgaag

SEQ ID NO: 200219 - DNA, 6834 bp, Homo sapiens
  Payload ID: 19504
  Gene Name: WNK lysine deficient protein kinase 2
  ENST ID: ENST00000395477
  CDS Start-End: 1-6654
atggacggcgatggcggccgccgagacgtccccggcacgctgatggagcccgggcgcggcgcggggcccgcgggcatggcggagcctcgggcgaaggcggcgcggccggggccccagcgctttctgcggcgcagcgtggtagagtcggaccaggaggagccgccgggcttggaggcagccgaggcgccgggcccgcagcccccgcagcccctgcagcgccgggtgcttctgctctgcaagacgcgccgcctcatcgcggagcgcgcccgcggacgccccgccgcccccgcgcccgcagcgctggtagcgcagccgggagcccccggagcccccgcggacgccggccccgagcccgtgggcacgcaggagcccggcccggaccccatcgcagccgctgtcgaaaccgcgcctgcccccgacggcggccccagggaggaggcggcggcgaccgtgaggaaggaggatgagggggcggccgaggcgaagcctgagcccgggcgcactcgccgggacgagcccgaagaggaggaggacgacgaggacgacctcaaggccgtggccacctctctggacggccgcttcctcaagttcgacatcgagctgggccgcggttccttcaagacggtctacaaggggctggacacggagacctgggtggaggtggcctggtgtgagctgcaggaccggaagctcaccaagctggagcggcagcggttcaaggaagaggctgagatgctgaaaggcctgcagcaccccaacatcgtgcgcttctacgacttctgggagtccagcgccaagggcaagcggtgcattgtgctggtgacggagctgatgacctcagggacgctgaagacatacctgaagcggttcaaggtgatgaagcccaaggttctccgcagctggtgccggcagatcctgaagggcctgctgttcctgcacacaaggacgccacccatcatccaccgagacctgaaatgtgacaatattttcatcaccggaccaactgggtctgtgaagattggcgacttgggcctggccactctgaaaagagcgtcatttgccaaaagtgtgataggtactcccgagttcatggcgcccgagatgtacgaggagcactacgatgagtccgtggacgtctatgcctttgggatgtgcatgctggagatggccacctcggagtacccctactcggagtgccagaatgcggcccagatctaccgcaaggtcacctgtggtatcaagccggccagctttgagaaagtgcacgatcctgaaatcaaggagattattggggagtgtatctgcaaaaacaaggaggaaaggtacgagatcaaagacctgctgagccacgccttcttcgcagaggacacaggcgtgagggtggagctcgcggaggaggaccacggcaggaagtccaccatcgccctgaggctctgggtggaagaccccaagaaactgaagggaaagcccaaggacaatggagccatagagttcaccttcgacctggagaaggagacgccggatgaggtggcccaagagatgattgagtctggattcttccacgagagtgacgtcaagatcgtggccaagtccatccgtgaccgcgtggccttgatccagtggcggcgggagaggatctggcccgcgctgcagcccaaggagcagcaggatgtgggcagcccggacaaggccaggggtccgccggtgcccctgcaggtccaggtgacctaccatgcacaggctgggcagcccgggccaccagagcccgaggagccggaggccgaccagcacctcctgccacctacgttgccgaccagcgccacctccctggcctcggacagcaccttcgacagcggccagggctctaccgtgtactcagactcgcagagcagccagcagagcgtgatgcttggctcccttgccgacgcagcgccgtccccggcccagtgtgtgtgcagcccccctgtgagcgaggggcccgtcctgccgcagagcctgccctcgctgggggcctaccagcagcccacggctgcacctggcttgccggtgggctctgtcccggcccccgcctgccctccgtccctccagcagcacttcccggatccggccatgagcttcgcccccgtgctgccgccgcccagcacccccatgcccacgggcccaggccagccagcaccccccggccagcagcctcctccgctggcccagccgacacccctgccgcaggtcctggccccacagcccgtggtccccctccagccggttcccccccacctgccaccgtacctggctccagcctcccaggtgggggcccccgctcagctgaagcccctccagatgccacaggcgcccctgcagccgcttgctcaagtccctccgcagatgcccccgattcctgttgtgccccccatcacgcccctggcgggaatcgacggcctccctccggccctcccagacctgccgaccgcgactgtgcctcccgtgccaccacctcagtatttctctccagccgtgatcttgccgagcctcgctgccccactcccccctgcgtccccagccttgcctctgcaggctgtgaagctgccccacccccctggggcgcccctggccatgccctgccggaccattgtgccaaatgcaccggccactatccccctgctggccgtagccccaccgggcgtggctgccctgtccattcattctgccgtggcccagctcccaggccaacctgtgtacccagcggccttcccacagatggcgcctactgacgtccctccttccccccatcacacggtgcagaatatgagggccacccctccacagccggcactgcctccacaacccacactgcccccacaacccgtgctgcccccgcaacccacgctgccccctcaacctgtgttgcccccgcaacccacacggccccctcaacctgtgctgcccccgcaacccatgctgcccccacaacctgtgctgcccccgcagccggcactgcctgtgcgccctgagcccctccagccccaccttcctgaacaagctgctccagctgctacaccagggagccagattctgcttggccacccagctccctatgctgtggacgtcgccgctcaggtccccaccgtgcctgtgccaccggctgcggtcctctcgccgcctctgccggaagtgctgctgcctgccgcccctgagctcctgcctcagttccccagctccctggccacggtgtctgcctctgtgcagagtgtgcccacccagactgccacacttctgccaccagcaaacccaccgctgcctggcgggcccgggatcgccagcccttgcccaactgtccagctgacggtggaaccagtccaagaggagcaggcctcacaggacaagccgcccggcctcccgcagagctgtgagagctatggaggttctgatgtcacttctggaaaagagctgagtgacagctgtgaaggcgcctttggagggggcaggctggagggcagggcagcccgaaaacaccaccgcaggtccacgcgtgcgcgctcccggcaggagagggccagccggccccggcttaccatcttgaacgtgtgcaacactggggacaagatggtggagtgccagctggagacgcacaaccacaagatggtgaccttcaagttcgacttggacggggacgcacccgatgaaattgccacgtatatggtggagcatgactttatcctgcaggccgagcgggaaacgttcatcgagcagatgaaggatgtcatggacaaggcagaggacatgctcagcgaggacacagacgccgaccgtggctccgacccagggaccagcccgccacacctcagcacctgcggcctgggcaccggggaggagagccgacaatcccaagccaacgcccccgtgtatcagcagaacgtcctgcacaccgggaagaggtggttcatcatctgtccggtggctgagcaccccgcccccgaggcccctgaatcttcgcccccacttcctctaagctccctgccgccagaagccagccaagattcagcgccctataaagaccagctgtcctcgaaggaacaacccagctttctagccagtcagcagctcctgagccaggcgggccccagcaaccctcctggggcacccccagcccctttggccccctcctcccctcctgtgactgctctgccccaagatggagcagctccagccaccagcaccatgccagagccagcgtcaggaactgccagccaggcagggggtccagggacacctcaggggctgaccagtgagctcgagacgtctcagccactagcggagactcacgaggccccgcttgctgtgcagcccctcgtggtgggcctagcaccttgcactccagctccagaggctgcctcaaccagggacgccagtgccccaagggagcccctgccacctcctgcacctgagcccagcccccacagcgggaccccacagcccgccttgggtcaacctgctcccctgcttcctgccgcagtgggggccgtcagcctggccacctcccagctcccaagcccacccctggggcccaccgtccccccacagccaccctcggccctggagtcggatggggaagggccgccccccagggtgggctttgtggacagcaccatcaagagcctggacgagaagctgcggactctgctctaccaggagcacgtgcccacctcctcagcctcagctgggacccctgtggaggtgggcgacagagacttcaccctggagcccctgagaggggaccagccccgctcagaggtctgcgggggggacctggccctgcccccagtgcctaaggaggcggtctcagggcgtgtccagctgccccagcccttggtggagaagtcagaactggcccccactcgaggggccgtgatggagcagggcacgtcctcgtcaatgacagcagagtcgtctcccaggagtatgctaggctatgacagagatggaaggcaggtggcctcagactcccatgtggtccccagcgtcccccaggatgtacctgcttttgtgagacctgcacgtgtggagcccacagacagggatggtggagaagctggagaaagctcggcagagcccccgccgagtgacatgggcacagtggggggccaggctagccacccccagacactcggcgctcgagctttggggtcccctcggaaacgtccagagcagcaggatgtcagctcaccagccaagactgtgggccgtttctcggtggtcagcactcaggacgagtggaccctggcctccccccacagcctgagatactctgccccacccgacgtctacctggacgaggccccctccagccccgacgtgaagctggcagtgcggcgggcgcagacggcctcctccatcgaggtcggcgtgggcgagcccgtgtccagcgactctggggacgagggccctcgggcgagacccccggtgcagaagcaggcgtccctgcccgtgagtggcagcgtggctggcgacttcgtgaagaaggccaccgccttcctgcagaggccttctcgggccggctcgctgggccccgagacacccagcagggtgggcatgaaggtccccacgatcagcgtgacctccttccattcccagtcgtcctacatcagcagcgacaatgattcggagctcgaggatgctgacataaagaaggagctgcagagtctgcgggagaagcacctgaaggagatctcggagctgcagagccagcagaagcaggagatcgaagctctgtaccgccgcctgggcaagccactgccccccaacgtgggcttcttccacacggcaccccccactggccgccggagaaaaaccagcaagagcaagctgaaggcaggcaagctgctaaatcccctggtgcggcagctcaaggtcgtggcctccagcacaggtcacttggctgactccagcagaggccctcccgctaaggaccctgcccaagccagtgtggggctcactgcagacagcacgggcctgagcgggaaggcagtgcagacccagcagccctgctccgtccgggcctccctgtcttcggacatctgctccggcttagccagtgatggaggcggagcgcgtggccaaggctggacggtttaccacccaacgtctgagagagtgacctataagtctagtagcaaacctcgtgctcgattcctcagtggacccgtatctgtgtccatctggtctgccctgaagcgtctctgcctaggcaaagaacacagcagtaggtcctccaccagcagcctggccccaggccctgagccaggcccccagcccgccctgcacgtccaggcgcaggtgaacaacagcaacaacaagaagggtaccttcacggacgacctgcacaagctggtggacgagtggacgagcaagacggtgggggccgcgcagctgaagcccacgctcaaccagctgaagcagacccagaagctgcaagacatggaggcccaggcaggctgggctgcccctggcgaggcgcgggctatgaccgcacctcgagcaggagtggggatgccacgtctgcccccagcgcccggccctctgtccaccacggtcattcccggagccgccccgaccctgtccgtgcccacaccagatcctgagagtgagaagcctgactgaccccgcctagacgccaggcccacttcacgccgtctaagtggagaagtgacggaccctcagggccagctgctcctcctgtccagttcacgctgttttgtaaccactttctaagcattttttattcacaattggaaacacaaatgtaatgcaagaataaaaaatattttggggcagaaagga

SEQ ID NO: 200220 - DNA, 3224 bp, Homo sapiens
  Payload ID: 19504
  Gene Name: WNK lysine deficient protein kinase 2
  ENST ID: ENST00000448251
  CDS Start-End: 1-3044
gccagctggagacgcacaaccacaagatggtgaccttcaagttcgacttggacggggacgcacccgatgaaattgccacgtatatggtggagcatgactttatcctgcaggccgagcgggaaacgttcatcgagcagatgaaggatgtcatggacaaggcagaggacatgctcagcgaggacacagacgccgaccgtggctccgacccagggaccagcccgccacacctcagcacctgcggcctgggcaccggggaggagagccgacaatcccaagccaacgcccccgtgtatcagcagaacgtcctgcacaccgggaagaggtggttcatcatctgtccggtggctgagcaccccgcccccgaggcccctgaatcttcgcccccacttcctctaagctccctgccgccagaagccagccaagattcagcgccctataaagaccagctgtcctcgaaggaacaacccagctttctagccagtcagcagctcctgagccaggcgggccccagcaaccctcctggggcacccccagcccctttggccccctcctcccctcctgtgactgctctgccccaagatggagcagctccagccaccagcaccatgccagagccagcgtcaggaactgccagccaggcagggggtccagggacacctcaggggctgaccagtgagctcgagacgtctcagccactagcggagactcacgaggccccgcttgctgtgcagcccctcgtggtgggcctagcaccttgcactccagctccagaggctgcctcaaccagggacgccagtgccccaagggagcccctgccacctcctgcacctgagcccagcccccacagcgggaccccacagcccgccttgggtcaacctgctcccctgcttcctgccgcagtgggggccgtcagcctggccacctcccagctcccaagcccacccctggggcccaccgtccccccacagccaccctcggccctggagtcggatggggaagggccgccccccagggtgggctttgtggacagcaccatcaagagcctggacgagaagctgcggactctgctctaccaggagcacgtgcccacctcctcagcctcagctgggacccctgtggaggtgggcgacagagacttcaccctggagcccctgagaggggaccagccccgctcagaggtctgcgggggggacctggccctgcccccagtgcctaaggaggcggtctcagggcgtgtccagctgccccagcccttggtggagaagtcagaactggcccccactcgaggggccgtgatggagcagggcacgtcctcgtcaatgacagcagagtcgtctcccaggagtatgctaggctatgacagagatggaaggcaggtggcctcagactcccatgtggtccccagcgtcccccaggatgtacctgcttttgtgagacctgcacgtgtggagcccacagacagggatggtggagaagctggagaaagctcggcagagcccccgccgagtgacatgggcacagtggggggccaggctagccacccccagacactcggcgctcgagctttggggtcccctcggaaacgtccagagcagcaggatgtcagctcaccagccaagactgtgggccgtttctcggtggtcagcactcaggacgagtggaccctggcctccccccacagcctgagatactctgccccacccgacgtctacctggacgaggccccctccagccccgacgtgaagctggcagtgcggcgggcgcagacggcctcctccatcgaggtcggcgtgggcgagcccgtgtccagcgactctggggacgagggccctcgggcgagacccccggtgcagaagcaggcgtccctgcccgtgagtggcagcgtggctggcgacttcgtgaagaaggccaccgccttcctgcagaggccttctcgggccggctcgctgggccccgagacacccagcagggtgggcatgaaggtccccacgatcagcgtgacctccttccattcccagtcgtcctacatcagcagcgacaatgattcggagctcgaggatgctgacataaagaaggagctgcagagtctgcgggagaagcacctgaaggagatctcggagctgcagagccagcagaagcaggagatcgaagctctgtaccgccgcctgggcaagccactgccccccaacgtgggcttcttccacacggcaccccccactggccgccggagaaaaaccagcaagagcaagctgaaggcaggcaagctgctaaatcccctggtgcggcagctcaaggtcgtggcctccagcacaggtcacttggctgactccagcagaggccctcccgctaaggaccctgcccaagccagtgtggggctcactgcagacagcacgggcctgagcgggaaggcagtgcagacccagcagccctgctccgtccgggcctccctgtcttcggacatctgctccggcttagccagtgatggaggcggagcgcgtggccaaggctggacggtttaccacccaacgtctgagagagtgacctataagtctagtagcaaacctcgtgctcgattcctcagtggacccgtatctgtgtccatctggtctgccctgaagcgtctctgcctaggcaaagaacacagcagtaggtcctccaccagcagcctggccccaggccctgagccaggcccccagcccgccctgcacgtccaggcgcaggtgaacaacagcaacaacaagaagggtaccttcacggacgacctgcacaagctggtggacgagtggacgagcaagacggtgggggccgcgcagctgaagcccacgctcaaccagctgaagcagacccagaagctgcaagacatggaggcccaggcaggctgggctgcccctggcgaggcgcgggctatgaccgcacctcgagcaggagtggggatgccacgtctgcccccagcgcccggccctctgtccaccacggtcattcccggagccgccccgaccctgtccgtgcccacaccagatcctgagagtgagaagcctgactgaccccgcctagacgccaggcccacttcacgccgtctaagtggagaagtgacggaccctcagggccagctgctcctcctgtccagttcacgctgttttgtaaccactttctaagcattttttattcacaattggaaacacaaatgtaatgcaagaataaaaaatattttggggcagaaagga

SEQ ID NO: 200221 - DNA, 6108 bp, Homo sapiens
  Payload ID: 19504
  Gene Name: WNK lysine deficient protein kinase 2
  ENST ID: ENST00000427277
  CDS Start-End: 5017-6108
atggacggcgatggcggccgccgagacgtccccggcacgctgatggagcccgggcgcggcgcggggcccgcgggcatggcggagcctcgggcgaaggcggcgcggccggggccccagcgctttctgcggcgcagcgtggtagagtcggaccaggaggagccgccgggcttggaggcagccgaggcgccgggcccgcagcccccgcagcccctgcagcgccgggtgcttctgctctgcaagacgcgccgcctcatcgcggagcgcgcccgcggacgccccgccgcccccgcgcccgcagcgctggtagcgcagccgggagcccccggagcccccgcggacgccggccccgagcccgtgggcacgcaggagcccggcccggaccccatcgcagccgctgtcgaaaccgcgcctgcccccgacggcggccccagggaggaggcggcggcgaccgtgaggaaggaggatgagggggcggccgaggcgaagcctgagcccgggcgcactcgccgggacgagcccgaagaggaggaggacgacgaggacgacctcaaggccgtggccacctctctggacggccgcttcctcaagttcgacatcgagctgggccgcggttccttcaagacggtctacaaggggctggacacggagacctgggtggaggtggcctggtgtgagctgcaggaccggaagctcaccaagctggagcggcagcggttcaaggaagaggctgagatgctgaaaggcctgcagcaccccaacatcgtgcgcttctacgacttctgggagtccagcgccaagggcaagcggtgcattgtgctggtgacggagctgatgacctcagggacgctgaagacatacctgaagcggttcaaggtgatgaagcccaaggttctccgcagctggtgccggcagatcctgaagggcctgctgttcctgcacacaaggacgccacccatcatccaccgagacctgaaatgtgacaatattttcatcaccggaccaactgggtctgtgaagattggcgacttgggcctggccactctgaaaagagcgtcatttgccaaaagtgtgataggtactcccgagttcatggcgcccgagatgtacgaggagcactacgatgagtccgtggacgtctatgcctttgggatgtgcatgctggagatggccacctcggagtacccctactcggagtgccagaatgcggcccagatctaccgcaaggtcacctgtggtatcaagccggccagctttgagaaagtgcacgatcctgaaatcaaggagattattggggagtgtatctgcaaaaacaaggaggaaaggtacgagatcaaagacctgctgagccacgccttcttcgcagaggacacaggcgtgagggtggagctcgcggaggaggaccacggcaggaagtccaccatcgccctgaggctctgggtggaagaccccaagaaactgaagggaaagcccaaggacaatggagccatagagttcaccttcgacctggagaaggagacgccggatgaggtggcccaagagatgattgagtctggattcttccacgagagtgacgtcaagatcgtggccaagtccatccgtgaccgcgtggccttgatccagtggcggcgggagaggatctggcccgcgctgcagcccaaggagcagcaggatgtgggcagcccggacaaggccaggggtccgccggtgcccctgcaggtccaggtgacctaccatgcacaggctgggcagcccgggccaccagagcccgaggagccggaggccgaccagcacctcctgccacctacgttgccgaccagcgccacctccctggcctcggacagcaccttcgacagcggccagggctctaccgtgtactcagactcgcagagcagccagcagagcgtgatgcttggctcccttgccgacgcagcgccgtccccggcccagtgtgtgtgcagcccccctgtgagcgaggggcccgtcctgccgcagagcctgccctcgctgggggcctaccagcagcccacggctgcacctggcttgccggtgggctctgtcccggcccccgcctgccctccgtccctccagcagcacttcccggatccggccatgagcttcgcccccgtgctgccgccgcccagcacccccatgcccacgggcccaggccagccagcaccccccggccagcagcctcctccgctggcccagccgacacccctgccgcaggtcctggccccacagcccgtggtccccctccagccggttcccccccacctgccaccgtacctggctccagcctcccaggtgggggcccccgctcagctgaagcccctccagatgccacaggcgcccctgcagccgcttgctcaagtccctccgcagatgcccccgattcctgttgtgccccccatcacgcccctggcgggaatcgacggcctccctccggccctcccagacctgccgaccgcgactgtgcctcccgtgccaccacctcagtatttctctccagccgtgatcttgccgagcctcgctgccccactcccccctgcgtccccagccttgcctctgcaggctgtgaagctgccccacccccctggggcgcccctggccatgccctgccggaccattgtgccaaatgcaccggccactatccccctgctggccgtagccccaccgggcgtggctgccctgtccattcattctgccgtggcccagctcccaggccaacctgtgtacccagcggccttcccacagatggcgcctactgacgtccctccttccccccatcacacggtgcagaatatgagggccacccctccacagccggcactgcctccacaacccacactgcccccacaacccgtgctgcccccgcaacccacgctgccccctcaacctgtgttgcccccgcaacccacacggccccctcaacctgtgctgcccccgcaacccatgctgcccccacaacctgtgctgcccccgcagccggcactgcctgtgcgccctgagcccctccagccccaccttcctgaacaagctgctccagctgctacaccagggagccagattctgcttggccacccagctccctatgctgtggacgtcgccgctcaggtccccaccgtgcctgtgccaccggctgcggtcctctcgccgcctctgccggaagtgctgctgcctgccgcccctgagctcctgcctcagttccccagctccctggccacggtgtctgcctctgtgcagagtgtgcccacccagactgccacacttctgccaccagcaaacccaccgctgcctggcgggcccgggatcgccagcccttgcccaactgtccagctgacggtggaaccagtccaagaggagcaggcctcacaggacaagccgcccggcctcccgcagagctgtgagagctatggaggttctgatgtcacttctggaaaagagctgagtgacagctgtgaaggcgcctttggagggggcaggctggagggcagggcagcccgaaaacaccaccgcaggtccacgcgtgcgcgctcccggcaggagagggccagccggccccggcttaccatcttgaacgtgtgcaacactggggacaagatggtggagtgccagctggagacgcacaaccacaagatggtgaccttcaagttcgacttggacggggacgcacccgatgaaattgccacgtatatggtggagcatgactttatcctgcaggccgagcgggaaacgttcatcgagcagatgaaggatgtcatggacaaggcagaggacatgctcagcgaggacacagacgccgaccgtggctccgacccagggaccagcccgccacacctcagcacctgcggcctgggcaccggggaggagagccgacaatcccaagccaacgcccccgtgtatcagcagaacgtcctgcacaccgggaagaggtggttcatcatctgtccggtggctgagcaccccgcccccgaggcccctgaatcttcgcccccacttcctctaagctccctgccgccagaagccagccaaggtccatgcagggggctcaccctgccctgtctcccatggcgcagagcagcctgtggggctgtgttcctatccttgttttctgctgaatcagctcagtcaaagcagcctccagattcagcgccctataaagaccagctgtcctcgaaggaacaacccagctttctagccagtcagcagctcctgagccaggcgggccccagcaaccctcctggggcacccccagcccctttggccccctcctcccctcctgtgactgctctgccccaagatggagcagctccagccaccagcaccatgccagagccagcgtcaggaactgccagccaggcagggggtccagggacacctcaggggctgaccagtgagctcgagacgtctcagccactagcggagactcacgaggccccgcttgctgtgcagcccctcgtggtgggcctagcaccttgcactccagctccagaggctgcctcaaccagggacgccagtgccccaagggagcccctgccacctcctgcacctgagcccagcccccacagcgggaccccacagcccgccttgggtcaacctgctcccctgcttcctgccgcagtgggggccgtcagcctggccacctcccagctcccaagcccacccctggggcccaccgtccccccacagccaccctcggccctggagtcggatggggaagggccgccccccagggtgggctttgtggacagcaccatcaagagcctggacgagaagctgcggactctgctctaccaggagcacgtgcccacctcctcagcctcagctgggacccctgtggaggtgggcgacagagacttcaccctggagcccctgagaggggaccagccccgctcagaggtctgcgggggggacctggccctgcccccagtgcctaaggaggcggtctcagggcgtgtccagctgccccagcccttggtggagaagtcagaactggcccccactcgaggggccgtgatggagcagggcacgtcctcgtcaatgacagagtcgtctcccaggagtatgctaggctatgacagagatggaaggcaggtggcctcagactcccatgtggtccccagcgtcccccaggatgtacctgcttttgtgagacctgcacgtgtggagcccacagacagggatggtggagaagctggagaaagctcggcagagcccccgccgagtgacatgggcacagtggggggccaggctagccacccccagacactcggcgctcgagctttggggtcccctcggaaacgtccagagcagcaggatgtcagctcaccagccaagactgtgggccgtttctcggtggtcagcactcaggacgagtggaccctggcctccccccacagcctgagatactctgccccacccgacgtctacctggacgaggccccctccagccccgacgtgaagctggcagtgcggcgggcgcagacggcctcctccatcgaggtcggcgtgggcgagcccgtgtccagcgactctggggacgagggccctcgggcgagacccccggtgcagaagcaggcgtccctgcccgtgagtggcagcgtggctggcgacttcgtgaagaaggccacctcctgcagaggccttctcgggccgtcgctgggccccgagacacccagcagggtgggcatgaaggtccccacgatcagcgtgacctccttccattcccagtcgtcctacatcagcagcgacaatgattcggagctcgaggatgctgacataaagaaggagctgcagagtctgcgggagaagcacctgaaggagatctcggagctgcagagccagcagaagcaggagatcgaagctctgtaccgccgcctgggcaagccactgccccccaacgtgggcttcttccacacggcaccccccactggccgccggagaaaaaccagcaagagcaagctgaaggcaggcaagctgctaaatcccctggtgcggcagctcaaggtcgtggcctccagcacaggtcacttggctgactccagcagaggccctcccgctaaggaccccaagccagtgtggggctcactgcagacagcacgggcctga

SEQ ID NO: 200222 - DNA, 2385 bp, Homo sapiens
  Payload ID: 19504
  Gene Name: WNK lysine deficient protein kinase 2
  ENST ID: ENST00000448039
  CDS Start-End: 15-2385
cttggcccacagagatggacggcgatggcggccgccgagacgtccccggcacgctgatggagcccgggcgcggcgcggggcccgcgggcatggcggagcctcgggcgaaggcggcgcggccggggccccagcgctttctgcggcgcagcgtggtagagtcggaccaggaggagccgccgggcttggaggcagccgaggcgccgggcccgcagcccccgcagcccctgcagcgccgggtgcttctgctctgcaagacgcgccgcctcatcgcggagcgcgcccgcggacgccccgccgcccccgcgcccgcagcgctggtagcgcagccgggagcccccggagcccccgcggacgccggccccgagcccgtgggcacgcaggagcccggcccggaccccatcgcagccgctgtcgaaaccgcgcctgcccccgacggcggccccagggaggaggcggcggcgaccgtgaggaaggaggatgagggggcggccgaggcgaagcctgagcccgggcgcactcgccgggacgagcccgaagaggaggaggacgacgaggacgacctcaaggccgtggccacctctctggacggccgcttcctcaagttcgacatcgagctgggccgcggttccttcaagacggtctacaaggggctggacacggagacctgggtggaggtggcctggtgtgagctgcaggaccggaagctcaccaagctggagcggcagcggttcaaggaagaggctgagatgctgaaaggcctgcagcaccccaacatcgtgcgcttctacgacttctgggagtccagcgccaagggcaagcggtgcattgtgctggtgacggagctgatgacctcagggacgctgaagacatacctgaagcggttcaaggtgatgaagcccaaggttctccgcagctggtgccggcagatcctgaagggcctgctgttcctgcacacaaggacgccacccatcatccaccgagacctgaaatgtgacaatattttcatcaccggaccaactgggtctgtgaagattggcgacttgggcctggccactctgaaaagagcgtcatttgccaaaagtgtgataggtactcccgagttcatggcgcccgagatgtacgaggagcactacgatgagtccgtggacgtctatgcctttgggatgtgcatgctggagatggccacctcggagtacccctactcggagtgccagaatgcggcccagatctaccgcaaggtcacctgtggtatcaagccggccagctttgagaaagtgcacgatcctgaaatcaaggagattattggggagtgtatctgcaaaaacaaggaggaaaggtacgagatcaaagacctgctgagccacgccttcttcgcagaggacacaggcgtgagggtggagctcgcggaggaggaccacggcaggaagtccaccatcgccctgaggctctgggtggaagaccccaagaaactgaagggaaagcccaaggacaatggagccatagagttcaccttcgacctggagaaggagacgccggatgaggtggcccaagagatgattgagtctggattcttccacgagagtgacgtcaagatcgtggccaagtccatccgtgaccgcgtggccttgatccagtggcggcgggagaggatctggcccgcgctgcagcccaaggagcagcaggatgtgggcagcccggacaaggccaggggtccgccggtgcccctgcaggtccaggtgacctaccatgcacaggctgggcagcccgggccaccagagcccgaggagccggaggccgaccagcacctcctgccacctacgttgccgaccagcgccacctccctggcctcggacagcaccttcgacagcggccagggctctaccgtgtactcagactcgcagagcagccagcagagcgtgatgcttggctcccttgccgacgcagcgccgtccccggcccagtgtgtgtgcagcccccctgtgagcgaggggcccgtcctgccgcagagcctgccctcgctgggggcctaccagcagcccacggctgcacctcctccgctggcccagccgacacccctgccgcaggtcctggccccacagcccgtggtccccctccagccggttcccccccacctgccaccgtacctggctccagcctcccaggtgggggcccccgctcagctgaagcccctccagatgccacaggcgcccctgcagccgcttgctcaagtccctccgcagatgcccccgattcctgttgtgccccccatcacgcccctggcgggaatcgacggcctccctccggccctcccagacctgccgaccgcgactgtgcctcccgtgccaccacctcagtatttctctccagccgtgatcttgccgagcc

SEQ ID NO: 200223 - DNA, 1937 bp, Homo sapiens
  Payload ID: 19504
  Gene Name: WNK lysine deficient protein kinase 2
  ENST ID: ENST00000453718
  CDS Start-End: 1-1937
ctgcacctgagcccagcccccacagcgggaccccacagcccgccttgggtcaacctgctcccctgcttcctgccgcagtgggggccgtcagcctggccacctcccagctcccaagcccacccctggggcccaccgtccccccacagccaccctcggccctggagtcggatggggaagggccgccccccagggtgggctttgtggacagcaccatcaagagcctggacgagaagctgcggactctgctctaccaggagcacgtgcccacctcctcagcctcagctgggacccctgtggaggtgggcgacagagacttcaccctggagcccctgagaggggaccagccccgctcagaggtctgcgggggggacctggccctgcccccagtgcctaaggaggcggtctcagggcgtgtccagctgccccagcccttggtggagaagtcagaactggcccccactcgaggggccgtgatggagcagggcacgtcctcgtcaatgacagagtcgtctcccaggagtatgctaggctatgacagagatggaaggcaggtggcctcagactcccatgtggtccccagcgtcccccaggatgtacctgcttttgtgagacctgcacgtgtggagcccacagacagggatggtggagaagctggagaaagctcggcagagcccccgccgagtgacatgggcacagtggggggccaggctagccacccccagacactcggcgctcgagctttggggtcccctcggaaacgtccagagcagcaggatgtcagctcaccagccaagactgtgggccgtttctcggtggtcagcactcaggacgagtggaccctggcctccccccacagcctgagatactctgccccacccgacgtctacctggacgaggccccctccagccccgacgtgaagctggcagtgcggcgggcgcagacggcctcctccatcgaggtcggcgtgggcgagcccgtgtccagcgactctggggacgagggccctcgggcgagacccccggtgcagaagcaggcgtccctgcccgtgagtggcagcgtggctggcgacttcgtgaagaaggccaccgccttcctgcagaggccttctcgggccggctcgctgggccccgagacacccagcagggtgggcatgaaggtccccacgatcagcgtgacctccttccattcccagtcgtcctacatcagcagcgacaatgattcggagctcgaggatgctgacataaagaaggagctgcagagtctgcgggagaagcacctgaaggagatctcggagctgcagagccagcagaagcaggagatcgaagctctgtaccgccgcctgggcaagccactgccccccaacgtgggcttcttccacacggcaccccccactggccgccggagaaaaaccagcaagagcaagctgaaggcaggcaagctgctaaatcccctggtgcggcagctcaaggtcgtggcctccagcacaggtcacttggctgactccagcagaggccctcccgctaaggaccctgcccaagccagtgtggggctcactgcagacagcacgggcctgagcgggaaggcagtgcagacccagcagccctgctccgtccgggcctccctgtcttcggacatctgctccggcttagccagtgatggaggcggagcgcgtggccaagggtcctccaccagcagcctggccccaggccctgagccaggcccccagcccgccctgcacgtccaggcgcaggtgaacaacagcaacaacaagaagggtaccttcacggacgacctgcacaagctggtggacgagtggacgagcaagacggtgggggccgcgcagctgaagcccacgctcaaccagctgaagcagacccagaagctgcaagacatggaggcccaggcaggctgggctgcccctggcgaggcgcgggct

SEQ ID NO: 200224 - DNA, 6679 bp, Homo sapiens
  Payload ID: 19504
  Gene Name: WNK lysine deficient protein kinase 2
  ENST ID: ENST00000411624
  CDS Start-End: 1-5320
ggagtgccagaatgcggcccagatctaccgcaaggtcacctgtggtatcaagccggccagctttgagaaagtgcacgatcctgaaatcaaggagattattggggagtgtatctgcaaaaacaaggaggaaaggtacgagatcaaagacctgctgagccacgccttcttcgcagaggacacaggcgtgagggtggagctcgcggaggaggaccacggcaggaagtccaccatcgccctgaggctctgggtggaagaccccaagaaactgaagggaaagcccaaggacaatggagccatagagttcaccttcgacctggagaaggagacgccggatgaggtggcccaagagatgattgagtctggattcttccacgagagtgacgtcaagatcgtggccaagtccatccgtgaccgcgtggccttgatccagtggcggcgggagaggatctggcccgcgctgcagcccaaggagcagcaggatgtgggcagcccggacaaggccaggggtccgccggtgcccctgcaggtccaggtgacctaccatgcacaggctgggcagcccgggccaccagagcccgaggagccggaggccgaccagcacctcctgccacctacgttgccgaccagcgccacctccctggcctcggacagcaccttcgacagcggccagggctctaccgtgtactcagactcgcagagcagccagcagagcgtgatgcttggctcccttgccgacgcagcgccgtccccggcccagtgtgtgtgcagcccccctgtgagcgaggggcccgtcctgccgcagagcctgccctcgctgggggcctaccagcagcccacggctgcacctggcttgccggtgggctctgtcccggcccccgcctgccctccgtccctccagcagcacttcccggatccggccatgagcttcgcccccgtgctgccgccgcccagcacccccatgcccacgggcccaggccagccagcaccccccggccagcagcctcctccgctggcccagccgacacccctgccgcaggtcctggccccacagcccgtggtccccctccagccggttcccccccacctgccaccgtacctggctccagcctcccaggtgggggcccccgctcagctgaagcccctccagatgccacaggcgcccctgcagccgcttgctcaagtccctccgcagatgcccccgattcctgttgtgccccccatcacgcccctggcgggaatcgacggcctccctccggccctcccagacctgccgaccgcgactgtgcctcccgtgccaccacctcagtatttctctccagccgtgatcttgccgagcctcgctgccccactcccccctgcgtccccagccttgcctctgcaggctgtgaagctgccccacccccctggggcgcccctggccatgccctgccggaccattgtgccaaatgcaccggccactatccccctgctggccgtagccccaccgggcgtggctgccctgtccattcattctgccgtggcccagctcccaggccaacctgtgtacccagcggccttcccacagatggcgcctactgacgtccctccttccccccatcacacggtgcagaatatgagggccacccctccacagccggcactgcctccacaacccacactgcccccacaacccgtgctgcccccgcaacccacgctgccccctcaacctgtgttgcccccgcaacccacacggccccctcaacctgtgctgcccccgcaacccatgctgcccccacaacctgtgctgcccccgcagccggcactgcctgtgcgccctgagcccctccagccccaccttcctgaacaagctgctccagctgctacaccagggagccagattctgcttggccacccagctccctatgctgtggacgtcgccgctcaggtccccaccgtgcctgtgccaccggctgcggtcctctcgccgcctctgccggaagtgctgctgcctgccgcccctgagctcctgcctcagttccccagctccctggccacggtgtctgcctctgtgcagagtgtgcccacccagactgccacacttctgccaccagcaaacccaccgctgcctggcgggcccgggatcgccagcccttgcccaactgtccagctgacggtggaaccagtccaagaggagcaggcctcacaggacaagccgcccggcctcccgcagagctgtgagagctatggaggttctgatgtcacttctggaaaagagctgagtgacagctgtgaaggcgcctttggagggggcaggctggagggcagggcagcccgaaaacaccaccgcaggtccacgcgtgcgcgctcccggcaggagagggccagccggccccggcttaccatcttgaacgtgtgcaacactggggacaagatggtggagtgccagctggagacgcacaaccacaagatggtgaccttcaagttcgacttggacggggacgcacccgatgaaattgccacgtatatggtggagcatgactttatcctgcaggccgagcgggaaacgttcatcgagcagatgaaggatgtcatggacaaggcagaggacatgctcagcgaggacacagacgccgaccgtggctccgacccagggaccagcccgccacacctcagcacctgcggcctgggcaccggggaggagagccgacaatcccaagccaacgcccccgtgtatcagcagaacgtcctgcacaccgggaagaggtggttcatcatctgtccggtggctgagcaccccgcccccgaggcccctgaatcttcgcccccacttcctctaagctccctgccgccagaagccagccaagattcagcgccctataaagaccagctgtcctcgaaggaacaacccagctttctagccagtcagcagctcctgagccaggcgggccccagcaaccctcctggggcacccccagcccctttggccccctcctcccctcctgtgactgctctgccccaagatggagcagctccagccaccagcaccatgccagagccagcgtcaggaactgccagccaggcagggggtccagggacacctcaggggctgaccagtgagctcgagacgtctcagccactagcggagactcacgaggccccgcttgctgtgcagcccctcgtggtgggcctagcaccttgcactccagctccagaggctgcctcaaccagggacgccagtgccccaagggagcccctgccacctcctgcacctgagcccagcccccacagcgggaccccacagcccgccttgggtcaacctgctcccctgcttcctgccgcagtgggggccgtcagcctggccacctcccagctcccaagcccacccctggggcccaccgtccccccacagccaccctcggccctggagtcggatggggaagggccgccccccagggtgggctttgtggacagcaccatcaagagcctggacgagaagctgcggactctgctctaccaggagcacgtgcccacctcctcagcctcagctgggacccctgtggaggtgggcgacagagacttcaccctggagcccctgagaggggaccagccccgctcagaggtctgcgggggggacctggccctgcccccagtgcctaaggaggcggtctcagggcgtgtccagctgccccagcccttggtggagaagtcagaactggcccccactcgaggggccgtgatggagcagggcacgtcctcgtcaatgacagcagagtcgtctcccaggagtatgctaggctatgacagagatggaaggcaggtggcctcagactcccatgtggtccccagcgtcccccaggatgtacctgcttttgtgagacctgcacgtgtggagcccacagacagggatggtggagaagctggagaaagctcggcagagcccccgccgagtgacatgggcacagtggggggccaggctagccacccccagacactcggcgctcgagctttggggtcccctcggaaacgtccagagcagcaggatgtcagctcaccagccaagactgtgggccgtttctcggtggtcagcactcaggacgagtggaccctggcctccccccacagcctgagatactctgccccacccgacgtctacctggacgaggccccctccagccccgacgtgaagctggcagtgcggcgggcgcagacggcctcctccatcgaggtcggcgtgggcgagcccgtgtccagcgactctggggacgagggccctcgggcgagacccccggtgcagaagcaggcgtccctgcccgtgagtggcagcgtggctggcgacttcgtgaagaaggccaccgccttcctgcagaggccttctcgggccggctcgctgggccccgagacacccagcagggtgggcatgaaggtccccacgatcagcgtgacctccttccattcccagtcgtcctacatcagcagcgacaatgattcggagctcgaggatgctgacataaagaaggagctgcagagtctgcgggagaagcacctgaaggagatctcggagctgcagagccagcagaagcaggagatcgaagctctgtaccgccgcctgggcaagccactgccccccaacgtgggcttcttccacacggcaccccccactggccgccggagaaaaaccagcaagagcaagctgaaggcaggcaagctgctaaatcccctggtgcggcagctcaaggtcgtggcctccagcacagggtcctccaccagcagcctggccccaggccctgagccaggcccccagcccgccctgcacgtccaggcgcaggtgaacaacagcaacaacaagaagggtaccttcacggacgacctgcacaagctggtggacgagtggacgagcaagacggtgggggccgcgcagctgaagcccacgctcaaccagctgaagcagacccagaagctgcaagacatggaggcccaggcaggctgggctgcccctggcgaggcgcgggctatgaccgcacctcgagcaggagtggggatgccacgtctgcccccagcgcccggccctctgtccaccacggtcattcccggagccgccccgaccctgtccgtgcccacaccaggtactgccctctccaacctcccaaccccaccctgtgcgctgcctctgggtcagtacagaggcctgctcccagctccagtgtcctgggggccctgggcaggccaggtgggccagctgggggcacagggcagctggaacaccccccaggtgcccgtgctgccagtcttcttgcagccacctgtggtcagcatgcctggcccccggctgcggatcacgtagccttctgccctgtcccttgccagatggcgccctcggaaccgcccggagaaaccaggtgtggtttggcctccgagtcccccccaccgcctgctgtgggcacagcactcagccgcgagggggacagcgggtgggcagcaagactgcttcctttgcggcttcagaccctgttcgctcctaggttcctgtggtccacgcgccgtctccacacccacttcctatacttgagttgatggttagaaccttgtcgtcaccctgcagaagtacagtgccttgaatgccagcttttccgttccctgatgaaaagatatgttaaaaaaaattatcggaaaaggtttcatttgcaattggcttgtgcattgataatctttatttactgttttaagttgcagagatgtgaatggtttacaaatctgaagctgaagttcaatctttggttttctgttgtaaatgccttttacaaacattgaattagctaccttaagtattgaagagcttccattgctaggtgagccctgctttgtcctcagtagagtgccggttccctgggctcatccaggggctgagagacggcgggacgctggggcagggcacactggcggagctgcttgctcagtagggaatgtcagttgttgcgctgggccatgagaaatccgccagaaaacgttaggtgagcagacatgccccccatgccagtgggctgctgtgagtgaggataaggtgtgtgttgggcatagaaaccctggctgcccgcccaccctgtggagacaagtgcagctcctccagctggagaggctgccctctctcctgcccacttccctcccttctccatgatttccatggagacctgtggctctgctcacccctggcatgcagaccgctctcccgtccagccctaagcctgctctgcggagggcggggtcattcttctcctggagatttcagtgggactcgtccccagtgggcacaacacagcccttggtgggaggggaaggccccagcctcctccacctcccactggaaagcagactgcttgggactgcccagctgtgaattgtatagtttctgtacttattagaactgggtaaattattttggttcaaatctattattccatcaattcagttagaattgaattttctaggtgattatgcagaatcttctgccagggcacgatgctgtcgtaagagatttctgttctctgtactgggcccccttgccctgttccttgagtgaagtgggggctgccctcacctgtcccccttgcctgtgaatcccttccttgtacatggtggtcagtggcacggaatccccaatagattgtatatctgaaggagaaaaataaacacttttgctcgaaaa

SEQ ID NO: 200225 - DNA, 7792 bp, Homo sapiens
  Payload ID: 19504
  Gene Name: WNK lysine deficient protein kinase 2
  ENST ID: ENST00000432730
  CDS Start-End: 1-6662
gcggccgccgagacgtccccggcacgctgatggagcccgggcgcggcgcggggcccgcgggcatggcggagcctcgggcgaaggcggcgcggccggggccccagcgctttctgcggcgcagcgtggtagagtcggaccaggaggagccgccgggcttggaggcagccgaggcgccgggcccgcagcccccgcagcccctgcagcgccgggtgcttctgctctgcaagacgcgccgcctcatcgcggagcgcgcccgcggacgccccgccgcccccgcgcccgcagcgctggtagcgcagccgggagcccccggagcccccgcggacgccggccccgagcccgtgggcacgcaggagcccggcccggaccccatcgcagccgctgtcgaaaccgcgcctgcccccgacggcggccccagggaggaggcggcggcgaccgtgaggaaggaggatgagggggcggccgaggcgaagcctgagcccgggcgcactcgccgggacgagcccgaagaggaggaggacgacgaggacgacctcaaggccgtggccacctctctggacggccgcttcctcaagttcgacatcgagctgggccgcggttccttcaagacggtctacaaggggctggacacggagacctgggtggaggtggcctggtgtgagctgcaggaccggaagctcaccaagctggagcggcagcggttcaaggaagaggctgagatgctgaaaggcctgcagcaccccaacatcgtgcgcttctacgacttctgggagtccagcgccaagggcaagcggtgcattgtgctggtgacggagctgatgacctcagggacgctgaagacatacctgaagcggttcaaggtgatgaagcccaaggttctccgcagctggtgccggcagatcctgaagggcctgctgttcctgcacacaaggacgccacccatcatccaccgagacctgaaatgtgacaatattttcatcaccggaccaactgggtctgtgaagattggcgacttgggcctggccactctgaaaagagcgtcatttgccaaaagtgtgataggtactcccgagttcatggcgcccgagatgtacgaggagcactacgatgagtccgtggacgtctatgcctttgggatgtgcatgctggagatggccacctcggagtacccctactcggagtgccagaatgcggcccagatctaccgcaaggtcacctgtggtatcaagccggccagctttgagaaagtgcacgatcctgaaatcaaggagattattggggagtgtatctgcaaaaacaaggaggaaaggtacgagatcaaagacctgctgagccacgccttcttcgcagaggacacaggcgtgagggtggagctcgcggaggaggaccacggcaggaagtccaccatcgccctgaggctctgggtggaagaccccaagaaactgaagggaaagcccaaggacaatggagccatagagttcaccttcgacctggagaaggagacgccggatgaggtggcccaagagatgattgagtctggattcttccacgagagtgacgtcaagatcgtggccaagtccatccgtgaccgcgtggccttgatccagtggcggcgggagaggatctggcccgcgctgcagcccaaggagcagcaggatgtgggcagcccggacaaggccaggggtccgccggtgcccctgcaggtccaggtgacctaccatgcacaggctgggcagcccgggccaccagagcccgaggagccggaggccgaccagcacctcctgccacctacgttgccgaccagcgccacctccctggcctcggacagcaccttcgacagcggccagggctctaccgtgtactcagactcgcagagcagccagcagagcgtgatgcttggctcccttgccgacgcagcgccgtccccggcccagtgtgtgtgcagcccccctgtgagcgaggggcccgtcctgccgcagagcctgccctcgctgggggcctaccagcagcccacggctgcacctggcttgccggtgggctctgtcccggcccccgcctgccctccgtccctccagcagcacttcccggatccggccatgagcttcgcccccgtgctgccgccgcccagcacccccatgcccacgggcccaggccagccagcaccccccggccagcagcctcctccgctggcccagccgacacccctgccgcaggtcctggccccacagcccgtggtccccctccagccggttcccccccacctgccaccgtacctggctccagcctcccaggtgggggcccccgctcagctgaagcccctccagatgccacaggcgcccctgcagccgcttgctcaagtccctccgcagatgcccccgattcctgttgtgccccccatcacgcccctggcgggaatcgacggcctccctccggccctcccagacctgccgaccgcgactgtgcctcccgtgccaccacctcagtatttctctccagccgtgatcttgccgagcctcgctgccccactcccccctgcgtccccagccttgcctctgcaggctgtgaagctgccccacccccctggggcgcccctggccatgccctgccggaccattgtgccaaatgcaccggccactatccccctgctggccgtagccccaccgggcgtggctgccctgtccattcattctgccgtggcccagctcccaggccaacctgtgtacccagcggccttcccacagatggcgcctactgacgtccctccttccccccatcacacggtgcagaatatgagggccacccctccacagccggcactgcctccacaacccacactgcccccacaacccgtgctgcccccgcaacccacgctgccccctcaacctgtgttgcccccgcaacccacacggccccctcaacctgtgctgcccccgcaacccatgctgcccccacaacctgtgctgcccccgcagccggcactgcctgtgcgccctgagcccctccagccccaccttcctgaacaagctgctccagctgctacaccagggagccagattctgcttggccacccagctccctatgctgtggacgtcgccgctcaggtccccaccgtgcctgtgccaccggctgcggtcctctcgccgcctctgccggaagtgctgctgcctgccgcccctgagctcctgcctcagttccccagctccctggccacggtgtctgcctctgtgcagagtgtgcccacccagactgccacacttctgccaccagcaaacccaccgctgcctggcgggcccgggatcgccagcccttgcccaactgtccagctgacggtggaaccagtccaagaggagcaggcctcacaggacaagccgcccggcctcccgcagagctgtgagagctatggaggttctgatgtcacttctggaaaagagctgagtgacagctgtgaaggcgcctttggagggggcaggctggagggcagggcagcccgaaaacaccaccgcaggtccacgcgtgcgcgctcccggcaggagagggccagccggccccggcttaccatcttgaacgtgtgcaacactggggacaagatggtggagtgccagctggagacgcacaaccacaagatggtgaccttcaagttcgacttggacggggacgcacccgatgaaattgccacgtatatggtggagcatgactttatcctgcaggccgagcgggaaacgttcatcgagcagatgaaggatgtcatggacaaggcagaggacatgctcagcgaggacacagacgccgaccgtggctccgacccagggaccagcccgccacacctcagcacctgcggcctgggcaccggggaggagagccgacaatcccaagccaacgcccccgtgtatcagcagaacgtcctgcacaccgggaagaggtggttcatcatctgtccggtggctgagcaccccgcccccgaggcccctgaatcttcgcccccacttcctctaagctccctgccgccagaagccagccaagattcagcgccctataaagaccagctgtcctcgaaggaacaacccagctttctagccagtcagcagctcctgagccaggcgggccccagcaaccctcctggggcacccccagcccctttggccccctcctcccctcctgtgactgctctgccccaagatggagcagctccagccaccagcaccatgccagagccagcgtcaggaactgccagccaggcagggggtccagggacacctcaggggctgaccagtgagctcgagacgtctcagccactagcggagactcacgaggccccgcttgctgtgcagcccctcgtggtgggcctagcaccttgcactccagctccagaggctgcctcaaccagggacgccagtgccccaagggagcccctgccacctcctgcacctgagcccagcccccacagcgggaccccacagcccgccttgggtcaacctgctcccctgcttcctgccgcagtgggggccgtcagcctggccacctcccagctcccaagcccacccctggggcccaccgtccccccacagccaccctcggccctggagtcggatggggaagggccgccccccagggtgggctttgtggacagcaccatcaagagcctggacgagaagctgcggactctgctctaccaggagcacgtgcccacctcctcagcctcagctgggacccctgtggaggtgggcgacagagacttcaccctggagcccctgagaggggaccagccccgctcagaggtctgcgggggggacctggccctgcccccagtgcctaaggaggcggtctcagggcgtgtccagctgccccagcccttggtggagaagtcagaactggcccccactcgaggggccgtgatggagcagggcacgtcctcgtcaatgacagcagagtcgtctcccaggagtatgctaggctatgacagagatggaaggcaggtggcctcagactcccatgtggtccccagcgtcccccaggatgtacctgcttttgtgagacctgcacgtgtggagcccacagacagggatggtggagaagctggagaaagctcggcagagcccccgccgagtgacatgggcacagtggggggccaggctagccacccccagacactcggcgctcgagctttggggtcccctcggaaacgtccagagcagcaggatgtcagctcaccagccaagactgtgggccgtttctcggtggtcagcactcaggacgagtggaccctggcctccccccacagcctgagatactctgccccacccgacgtctacctggacgaggccccctccagccccgacgtgaagctggcagtgcggcgggcgcagacggcctcctccatcgaggtcggcgtgggcgagcccgtgtccagcgactctggggacgagggccctcgggcgagacccccggtgcagaagcaggcgtccctgcccgtgagtggcagcgtggctggcgacttcgtgaagaaggccaccgccttcctgcagaggccttctcgggccggctcgctgggccccgagacacccagcagggtgggcatgaaggtccccacgatcagcgtgacctccttccattcccagtcgtcctacatcagcagcgacaatgattcggagctcgaggatgctgacataaagaaggagctgcagagtctgcgggagaagcacctgaaggagatctcggagctgcagagccagcagaagcaggagatcgaagctctgtaccgccgcctgggcaagccactgccccccaacgtgggcttcttccacacggcaccccccactggccgccggagaaaaaccagcaagagcaagctgaaggcaggcaagctgctaaatcccctggtgcggcagctcaaggtcgtggcctccagcacaggtcacttggctgactccagcagaggccctcccgctaaggaccctgcccaagccagtgtggggctcactgcagacagcacgggcctgagcgggaaggcagtgcagacccagcagccctgctccgtccgggcctccctgtcttcggacatctgctccggcttagccagtgatggaggcggagcgcgtggccaaggctggacggtttaccacccaacgtctgagagagtgacctataagtctagtagcaaacctcgtgctcgattcctcagtggacccgtatctgtgtccatctggtctgccctgaagcgtctctgcctaggcaaagaacacagcagtaggtcctccaccagcagcctggccccaggccctgagccaggcccccagcccgccctgcacgtccaggcgcaggtgaacaacagcaacaacaagaagggtaccttcacggacgacctgcacaagctggtggacgagtggacgagcaagacggtgggggccgcgcagctgaagcccacgctcaaccagctgaagcagacccagaagctgcaagacatggaggcccaggcaggctgggctgcccctggcgaggcgcgggctatgaccgcacctcgagcaggagtggggatgccacgtctgcccccagcgcccggccctctgtccaccacggtcattcccggagccgccccgaccctgtccgtgcccacaccaggttcctgtggtccacgcgccgtctccacacccacttcctatacttgagttgatggttagaaccttgtcgtcaccctgcagaagtacagtgccttgaatgccagcttttccgttccctgatgaaaagatatgttaaaaaaaattatcggaaaaggtttcatttgcaattggcttgtgcattgataatctttatttactgttttaagttgcagagatgtgaatggtttacaaatctgaagctgaagttcaatctttggttttctgttgtaaatgccttttacaaacattgaattagctaccttaagtattgaagagcttccattgctaggtgagccctgctttgtcctcagtagagtgccggttccctgggctcatccaggggctgagagacggcgggacgctggggcagggcacactggcggagctgcttgctcagtagggaatgtcagttgttgcgctgggccatgagaaatccgccagaaaacgttaggtgagcagacatgccccccatgccagtgggctgctgtgagtgaggataaggtgtgtgttgggcatagaaaccctggctgcccgcccaccctgtggagacaagtgcagctcctccagctggagaggctgccctctctcctgcccacttccctcccttctccatgatttccatggagacctgtggctctgctcacccctggcatgcagaccgctctcccgtccagccctaagcctgctctgcggagggcggggtcattcttctcctggagatttcagtgggactcgtccccagtgggcacaacacagcccttggtgggaggggaaggccccagcctcctccacctcccactggaaagcagactgcttgggactgcccagctgtgaattgtatagtttctgtacttattagaactgggtaaattattttggttcaaatctattattccatcaattcagttagaattgaattttctaggtgattatgcagaatcttctgccagggcacgatgctgtcgtaagagatttctgttctctgtactgggcccccttgccctgttccttgagtgaagtgggggctgccctcacctgtcccccttgcctgtgaatcccttccttgtacatggtggtcagtggcacggaatccccaatagattgtatatctgaaggagaaaaataaacacttttgctcg

SEQ ID NO: 200226 - DNA, 11341 bp, Homo sapiens
  Payload ID: 19505
  Gene Name: WNK lysine deficient protein kinase 3
  Uniprot ID: Q9BYP7
  ENST ID: ENST00000354646
  CDS Start-End: 440-5842
ctcagctccgggccgagcgcgagcttgggctcgtaccccgctcccctctctccgcccgctctttacctaccggccgtagctggcccggtgggctcgcggggagacgctcgcgcgcgcaagcgcacacgacgcggagcggagctcgagacatcgaggagaggagtaagaagcatcggaggaggcgatcgaggaggaggcggtgtgtgtgtatgtgtctattctacggtgtggctcgtcgtggggcgagaggaggctcgagagagggcgagggagaagcgaaaagagtaagagagtcttcctttgcgagagcctctaatctggttgctatggaaatacatgaccacgcaaaaggaagtccattctgataattctgatacctgagatgtaactggactgaagagtagaaacaggaaaaattttagtgccaactttaattacaatggccactgattcaggggatccagccagcacagaagattctgagaaacctgatggaatttcatttgaaaacagagttccccaggtcgctgcaactttgacagtagaagctagactaaaggagaaaaacagtaccttctctgcttctggggaaactgtagaaaggaagagatttttccgaaagagtgttgaaatgacggaagatgacaaagttgccgaatcatcccccaaagatgagagaattaaggctgcaatgaatattccaagagtagataagcttccttcaaatgtgttgagaggtggacaagaagttaaatatgaacagtgttcaaagtcaacctcagaaatctcaaaagattgtttcaaggagaaaaatgaaaaggaaatggaagaagaagcagaaatgaaggctgtagctacttctcctagtggcagattcctgaaatttgacatagaactaggaagaggagcatttaaaacagtatataaaggactggacactgaaacatgggttgaggttgcttggtgtgagctgcaggaccgaaagttaaccaaagctgagcagcaaagattcaaggaagaagcagagatgttgaagggtctccagcaccccaatatagttcgattttatgattcctgggaatctatattaaaaggaaagaaatgtattgtattagtgactgaactaatgacatctgggaccttaaagacgtacttaaaacgatttaaagtcatgaaaccaaaggtcttaaggagctggtgcaggcaaattttaaaggggttgcagttcttgcacactaggactcctcctattattcaccgggatctgaagtgtgacaatattttcatcacgggacccactggatctgtgaagattggtgatctaggattagccaccttaatgcgtacctcatttgctaagagtgtcattggaactcctgagtttatggctccagagatgtatgaagaacactatgatgaatccgtagatgtttatgcttttggaatgtgtatgctggaaatggccacatcggagtatccttattctgagtgtcagaatgcagctcaaatataccggaaagtaactagtggcataaaaccagccagcttcaataaagtcactgatcctgaagtcaaagaaatcattgaaggatgtattcgtcaaaacaaatctgaaaggttgtctatcagggacctattaaaccatgcattttttgctgaggatacaggactgagggtggagttagcagaagaagatgattgctcaaattcatcccttgctttaagactctgggttgaagaccctaaaaaattgaaaggcaaacacaaagacaatgaagctattgaatttagtttcaacttagaaacagatacacctgaggaagtagcatatgaaatggtcaagtctgggttcttccatgaaagtgattccaaagctgttgctaaatccattagagaccgggtgacgccaataaagaagacaagagagaagaagcctgctggctgtttggaagaacgcagggattctcagtgcaagtctatggggaatgtattccctcagccccagaatacaactttaccccttgctcccgctcagcaaactggggctgaatgtgaagaaactgaagttgatcaacatgttagacaacagcttctacaaagaaaaccacagcagcactgctcctctgttacaggtgacaatttgtctgaggcaggagctgcatcagttatacattcagatacttcaagtcagcccagtgtagcctattcctcaaatcaaacgatgggctctcaaatggtttctaatatcccgcaggctgaagtaaatgttccagggcaaatttattcatctcagcaactagtaggacattaccagcaagtttcagggttacagaagcattcaaagctgactcagccgcagattttgcctttggttcaaggtcagtccactgttttacctgtacatgtccttggaccgacagttgtttcacaaccccaggtttccccattaactgttcagaaggtcccacagataaagcctgtatcccaaccagttggagctgaacaacaagcagctcttctaaaaccagatttagttcgaagcttgaatcaagatgtggcaactacgaaggaaaacgtcagtagccctgataacccaagtggaaatggcaaacaggatcggatcaaacagagaagagcttcctgtccccgaccagagaaggggactaaatttcagcttaccgtccttcaggtatcaacctctggagataacatggtagagtgtcagctggagacacacaacaacaagatggtcaccttcaagtttgatgttgatggtgatgcgccagaggatattgcagactatatggttgaagataactttgtgctggaaagtgagaaagaaaaatttgtagaagaattgagagctattgtaggtcaagcccaggagatccttcatgtccactttgccacagaaagagccactggagttgattctattactgtggactccaacagtagccagacagggtcatctgaacaagtacagataaattctacatctactcaaaccagcaatgaatctgctcctcagtcatccccagttggtcggtggcgattctgtatcaatcagacgataagaaaccgtgagactcagtctcctccttctcttcagcattccatgtctgcggttcctggccgacatccacttcctagtccaaaaaacacaagtaataaggaaatatcacgggacacattgctcactatagaaaataatccatgccaccgtgcacttttcacctccaaatcagaacacaaggatgtggttgatggtaagatttctgaatgtgctagtgtagaaaccaagcagccagctatactttatcaagtggaagataacaggcagataatggcaccagttactaatagttccagttactctactacttcagttcgtgcagttccagctgaatgtgagggactcaccaaacaagcaagcatattcatacctgtgtatccatgtcaccaaactgccagtcaggctgatgcacttatgtcccatcctggcgaatcaactcagacttctggtaactctcttacaactctggcatttgatcaaaagcctcaaaccttatcagtacagcagccagctatggatgcagagtttatttctcaagaaggagaaactacagtgaacactgaagcaagttctcctaagacagtcattcccactcagacccctggccttgaaccaactacccttcaacccactactgtcctggaatcagatggagaaagacctccaaaactggagtttgcagacaaccgaattaaaactctggatgaaaaattaagaaacttgctctatcaggagcacagcatctctagcatctatcccgagagtcagaaggatacccaaagcatagactctccattttcttcctctgctgaagataccctctcctgtccagtgacagaagtcatagccatcagtcactgtggaattaaagatagccctgtacaatcccctaatttccaacagacaggctctaagcttctgtccaatgtggctgcaagtcagcctgctaatatatcagtgttcaaaagggacctgaatgtgataacttctgtacccagcgaattgtgtttacatgagatgtcctcagatgcttcacttccaggggatccagaggcctatcctgctgctgtgtcaagcggtggagccattcatctgcagacaggaggtggatattttggcctaagctttacttgtcctagtctcaaaaatcctattagcaagaaatcctggactcgcaaattaaaaagctgggcatacaggctacggcagtcaaccagctttttcaagagatcaaaagtccgtcaagtggaaacagaagagatgagatcagcaattgctcctgatcccattcctctgacacgggagtccacagctgatactagggctttgaatagatgtaaagcgatgagtggatcatttcagcggggtcggttccaggtgattacaattcctcagcagcagtcagcaaaaatgacatcttttggaatagaacacatatcagtgttcagtgagacaaaccattctagtgaagaagcctttattaaaacagcaaagtctcagttggtagaaatagaacctgccacacaaaatccaaaaacttcgttttcttatgagaagttacaagctcttcaggaaacctgtaaagaaaataaaggagttcccaaacaaggtgacaacttcttatctttcagcgcagcttgtgagactgatgtatcttcagtgaccccagaaaaggaatttgaagaaacttcagccacaggaagtagcatgcagtctggatctgaactgttgcttaaagagagagagatattgactgctgggaaacagcctagctctgatagtgaattttcagccagtcttgctggcagtggaaagtcagtggcaaagactggtccagagagtaatcagtgcttaccacaccacgaagaacaagcttatgctcaaacacagagttcactcttctattcgccatcttccccaatgagcagtgatgatgaatcagaaatagaggatgaggacttgaaggtggagcttcaaagattacgagaaaaacacattcaggaggtggtaaatcttcaaacccagcagaataaggagctgcaggagctctatgaacgccttcggtcaattaaagatagcaaaacccaatctactgagattcctttgccacctgcatcaccacgtcgaccaagatctttcaaaagcaaacttcgaagccgcccccagtccttgacacatgtggacaatggcatagttgctacagggaaaagctgccttataaatgagttggaaaatccactgtgtgtggagagtaatgcagcatcatgccaacagtctccagccagtaaaaaagggatgttcacagatgacttacacaagctggtggatgactggacaaaggaagcagtaggaaattctcttattaagccaagtttaaaccaacttaaacaaagtcaacacaaactagagacagaaaactggaataaagtatctgaaaatactccgtctactatgggctacacatcaacatggatttcttctctgtcccaaatccgtggagctgtcccaacttccttgccacaaggactctcactcccttcatttcctgggccattatcatcatatggaatgcctcacgtttgtcagtataatgctgtggcgggggcggggtatccagtacagtgggtaggaatttcaggaacaacacaacaatctgtagtaattcccgcccaatctgggggaccattccagccagggatgaatatgcaggcatttccaacttcatcagtgcagaatcctgccacaatccctcctggtcctaaatgaatcagagtagatggtgataaaaagggaggttttttcagaattattttcaggacacccaagatattaaagtttcttcctcttgggttctgtcatattttccctcatttgagtttactttagactatatattttttgttccagtgtggtatttgatacagctcatcattctgtagaaatgtgcagtttgcagatagaacactgcacacagaaatgttttttcacttcaaattctatcctctttgatacttgattttttaaaaatactgttcagaatgctttaataagctcagcttgagcattaccatttccaggacactttccatgaattgttgagaagctccccatcccccgccttttttttttttttttttaactgctgctatctgcagctggatactcttctttaaaaatgtttaaaaattatttagattgattctccccaaatgtggatgaactgagaccctccatcagccagagtcttatgggatcttcacttcacatgtttgtcttaggtttacctttcacagaaggcagggtaacttgctgcaggaaacgttttggtgtataaaattagaatcacttttttttttttttttgagatggagtctctctctgtcacccaggttggagtgcagtggtgtgatcttggctcactgctgcaacctccccctcctgggttcaagcgattctcctgcctcagcctcctgagtagctgggactacaggcgccagccaccatgcctggctaatttttgtatttttagtagaggatggggtttcactatgttggccagactggtctcaaactcctaaccttgtgatccgccctccttagcccccccaaaaaattacaataattttgtcaaccaatacagaacatgagccctttttaaatgtgatttcccgtcatcacagcagtaggatgaagccttgttttgggtgagacagagggaaagggaaaaaacagaattgtaacagttccttgattctgcagatactgctgctgttttacgatttcagtaataattcaaagcagctgtctccttgtttctcacatgcatactacattggttttgagcatctgagaggcattggtttgtcttgcattcttttgcaaggcatatattgcagctgatatgaatctcgtttggggggaatccttgtattcctaacaagggggattaaagctacacctcaatccattcttctgaagtgaaatttacttgacacagtaggtttcgagacttacatatgaaacactggctttacagggttctcagagatgtggggtatacactgtcctgcagtgagatagtagaccctagaaggatactatttaagttgtccttagctctttttaattacaatttttagttgttagaatttctttttagtatctatagtatcttagatgattttagatcttaaatgagtttggcagcctctttagaatctgagagagatcactgtcaagttgcactttactgggttttatccagttttaggaggaggggaggcaatgtcaaaatgtacacctttggtttttaagaaggttaactataataatgttaaaggctagtcacagggttacctaatgctcagtctgtgaaacctaaatagaattcttaaaatgttatttaccaactaagtattcatgttcaaattacttaccttccactctgaagactttaaggtcatttctaatacacatttacctaattaggagttctgtctactagtaaacattccaaattgctacccaacattactgttaacagattttcctccgtattcttctaaaaattataccccatgggcttgccaggtaatgacgaaaacttaatgggtgtacttttttttttttttgcacagtctactttgtgacattaagtacctcttttccaaaaaaaaaaaaaaatgtgttttatgttgcttacctgaggatcacatccattatcaagaagattctgtcgctataatttgaggcatctagggcagcattttgagaattgctgttgataagatccactgtttcttttcatagaacatgatctgttttgtatgagtctttccaaatgttaagtacagattcttcaaatttcttgtacagtattggtttgcagtttaaagtgattttaggacattagtgtaatgcaaatgcttgcattgcactgttttccatatgtataaaaacaatgctcctaaaatccctaattctttaaaactgcctgtgtttcattataaaaagttggctttgtgtaattacaccgagccatacaacctataaagtgaaaatactgcagattttaggaccccttcttctctagtcacaatcattttaaacagtgtaccccaggatgaaaaaagctccatggctgacatgtacaattacatgtattaatgactgctctacatcctatgttctgcctttggccaccacctctattccacatataattcatcattcttgtttgcctgcagactcttgcagtgccttgtaatatttacaatcttttcaggtttttgctggaaagaaaagtagtcttctaaagtttgaagatggtgaatagtgtactgctgtctccatgctgactgcagtaaccgggttatcatatatgttatgtatacattatgtatatataacatgtgtacatttaaaaatacagaaaaaagtgagcttgtgcagaaatggagaaaacaatgttattctcatcactgtggggttttattaaaattattttttcccatgacttacatgtttggttcagattatagtcactttgactgtaaatactggctagttttctatccagggcttttgcattatttcataattttgctaaatcatataatagtgctattttcatccttgtctgaggtacttttcctccccagaaataattaacttgaggtaaagctcagaaattcccttcttaacaaagagcctactatataaaaagggccttcctttccaaaaaacacacaaacctgtccttttcattttccttcttgtagaggagaaaatggttgtacttaaccatcctgcttgtaaagtttattcagaggatagtctgtatgtccagccaccatgtttacttctcaaagtgcaagtctgatgaatagtactgtatctccatatgtggtaatgtgagcatttcatcatgaagtacctgctgctatgtctgtgaagttgggtgtaacatcataagaatatgaaaccagtattggtgtaaatctaatgaaaataaccctatgtatatttgtagcagtcttgaatctctatttaaggtaatttgctgtaatataacaaatattcattctgtttttcatcccttccttgccagttttatatcaagcatgaattccaatggtttgacagcaaaattatctgtgaaagtttaaaaggcacttttctgctgtgatttttggattgagtgtggagtgttatgtacagtttgatgggatatatcattttagaaccccagatttaattctagtccaattaattttgtttaactacctcgttttcagtgctgttttgggtgcacaagtaaacactacctgtgaaacttgcttttttgccttgattctcagtattctttcagattataaatctggtctgcctcttttttcccagtgctagccaacagtttgagatgagagggatcatcactctcatctgtgtttaagtggagagccatgtgcttctgtgaaatatgctttggggatttgggggtggagagcagaagaataattgaaattggtggcaatataggatttaggtgtaggagttagttataaaataaacaaatggtaagaaagtacctgaattagacaatccagtgcctataactttgcattttttattagagatgcatttctcgtctgtgtgcctaaagggcaatgggttgaaattgctttaactaccacagcgaaatatttgacaaatccttcagcaatggcctatcattcaacatatattagcacagtgctaggtatttgcagtggtattttgttaccttaaaacggccaaatgcatttagttgaaatgtagttgatagtaagggttttatataactttatccaatctctaaagtttatggaagcattgactttcttctttgctgtcttttctgagtgatgaaaatgatgcattccttttttttccttgaaaactcagcaaatgtttgtaaccagatgttccttgtttcacatgtttactgtgtaacactacagcatatttaatattggtaaatactgtatttcagtcattatgcataagtacattcctgaggtatatttgccatcattttgggattcagttattttatcttctgtttgggtcagaaaaacttgaactatctgaggtggtatgcaggccattttctagaagattgttttttgaatctgtagtttatcaaggacttgttccccccctccctttgtttagaagaggaatcagaaaaggggggtggtgtgtagaaaaggcctttgatttgataggtgtaatttctaagattgaaattttaaaaatgcagatcgtaagatagtaacactcaaacttgataaaatcctttgaattgaaattagtatgaaatttttatggaaccaaatgccttcaggtcaccctggaaatagtctttgtatgtgaaagatcaacacaaacattggtcaggaaccctgacagccaatatatgaaggagcctgggatagtaactaggttacactaaagttattttcaactaagatagctagacgagtgtacaaaccaatagctcctattctggaaggttttctttttattaaaaaaaattcaaacaaggttaaaagtcaagcaagaagggaagagagaaactgggttctgagaaaaaaatgtgccagtataaaataaactcctaaatgcgtgcttgtcatcctctagtttttttttaagttgaatttcttttccactgtaacttaagatttgagattgaggtttgcggtccagaacataccctcagcagatacagtgactaactggaaagtgcagttgttcaaggtctgtcatgctcaatcacctaaagctataatttgtttgatatattaagcatgtagacctagtgcagcatgggagccactcaggaagtttatgcaattaataaactttcagcataatttactatgaagtatgcagaatttcaccctcttctccacacttaacatttagttgtatatgtgaactctcctttcttaattggggaatgtagcattatatagaatgttgttaaagttaattttaatcctttttgacattaacctttttttttttttggtaaaccaagtgatctgcctttcagcaactgtcttattttggttctttgaaactgtgatttttatttcatttgtacccaaccattgtaagtattttgttttgtttcctggaaattctgttttgaaacagaaaataaaggctgtgttaaatgagtatgttatcttattaaaatgctgccatagtcactgc

SEQ ID NO: 200227 - DNA, 5403 bp, Homo sapiens
  Payload ID: 19505
  Gene Name: WNK lysine deficient protein kinase 3
  Uniprot ID: Q9BYP7
  ENST ID: ENST00000375159
  CDS Start-End: 1-5403
atggccactgattcaggggatccagccagcacagaagattctgagaaacctgatggaatttcatttgaaaacagagttccccaggtcgctgcaactttgacagtagaagctagactaaaggagaaaaacagtaccttctctgcttctggggaaactgtagaaaggaagagatttttccgaaagagtgttgaaatgacggaagatgacaaagttgccgaatcatcccccaaagatgagagaattaaggctgcaatgaatattccaagagtagataagcttccttcaaatgtgttgagaggtggacaagaagttaaatatgaacagtgttcaaagtcaacctcagaaatctcaaaagattgtttcaaggagaaaaatgaaaaggaaatggaagaagaagcagaaatgaaggctgtagctacttctcctagtggcagattcctgaaatttgacatagaactaggaagaggagcatttaaaacagtatataaaggactggacactgaaacatgggttgaggttgcttggtgtgagctgcaggaccgaaagttaaccaaagctgagcagcaaagattcaaggaagaagcagagatgttgaagggtctccagcaccccaatatagttcgattttatgattcctgggaatctatattaaaaggaaagaaatgtattgtattagtgactgaactaatgacatctgggaccttaaagacgtacttaaaacgatttaaagtcatgaaaccaaaggtcttaaggagctggtgcaggcaaattttaaaggggttgcagttcttgcacactaggactcctcctattattcaccgggatctgaagtgtgacaatattttcatcacgggacccactggatctgtgaagattggtgatctaggattagccaccttaatgcgtacctcatttgctaagagtgtcattggaactcctgagtttatggctccagagatgtatgaagaacactatgatgaatccgtagatgtttatgcttttggaatgtgtatgctggaaatggccacatcggagtatccttattctgagtgtcagaatgcagctcaaatataccggaaagtaactagtggcataaaaccagccagcttcaataaagtcactgatcctgaagtcaaagaaatcattgaaggatgtattcgtcaaaacaaatctgaaaggttgtctatcagggacctattaaaccatgcattttttgctgaggatacaggactgagggtggagttagcagaagaagatgattgctcaaattcatcccttgctttaagactctgggttgaagaccctaaaaaattgaaaggcaaacacaaagacaatgaagctattgaatttagtttcaacttagaaacagatacacctgaggaagtagcatatgaaatggtcaagtctgggttcttccatgaaagtgattccaaagctgttgctaaatccattagagaccgggtgacgccaataaagaagacaagagagaagaagcctgctggctgtttggaagaacgcagggattctcagtgcaagtctatggggaatgtattccctcagccccagaatacaactttaccccttgctcccgctcagcaaactggggctgaatgtgaagaaactgaagttgatcaacatgttagacaacagcttctacaaagaaaaccacagcagcactgctcctctgttacaggtgacaatttgtctgaggcaggagctgcatcagttatacattcagatacttcaagtcagcccagtgtagcctattcctcaaatcaaacgatgggctctcaaatggtttctaatatcccgcaggctgaagtaaatgttccagggcaaatttattcatctcagcaactagtaggacattaccagcaagtttcagggttacagaagcattcaaagctgactcagccgcagattttgcctttggttcaaggtcagtccactgttttacctgtacatgtccttggaccgacagttgtttcacaaccccaggtttccccattaactgttcagaaggtcccacagataaagcctgtatcccaaccagttggagctgaacaacaagcagctcttctaaaaccagatttagttcgaagcttgaatcaagatgtggcaactacgaaggaaaacgtcagtagccctgataacccaagtggaaatggcaaacaggatcggatcaaacagagaagagcttcctgtccccgaccagagaaggggactaaatttcagcttaccgtccttcaggtatcaacctctggagataacatggtagagtgtcagctggagacacacaacaacaagatggtcaccttcaagtttgatgttgatggtgatgcgccagaggatattgcagactatatggttgaagataactttgtgctggaaagtgagaaagaaaaatttgtagaagaattgagagctattgtaggtcaagcccaggagatccttcatgtccactttgccacagaaagagccactggagttgattctattactgtggactccaacagtagccagacagggtcatctgaacaagtacagataaattctacatctactcaaaccagcaatgaatctgctcctcagtcatccccagttggtcggtggcgattctgtatcaatcagacgataagaaaccgtgagactcagtctcctccttctcttcagcattccatgtctgcggttcctggccgacatccacttcctagtccaaaaaacacaagtaataaggaaatatcacgggacacattgctcactatagaaaataatccatgccaccgtgcacttttcacctccaaatcagaacacaaggatgtggttgatggtaagatttctgaatgtgctagtgtagaaaccaagcagccagctatactttatcaagtggaagataacaggcagataatggcaccagttactaatagttccagttactctactacttcagttcgtgcagttccagctgaatgtgagggactcaccaaacaagcaagcatattcatacctgtgtatccatgtcaccaaactgccagtcaggctgatgcacttatgtcccatcctggcgaatcaactcagacttctggtaactctcttacaactctggcatttgatcaaaagcctcaaaccttatcagtacagcagccagctatggatgcagagtttatttctcaagaaggagaaactacagtgaacactgaagcaagttctcctaagacagtcattcccactcagacccctggccttgaaccaactacccttcaacccactactgtcctggaatcagatggagaaagacctccaaaactggagtttgcagacaaccgaattaaaactctggatgaaaaattaagaaacttgctctatcaggagcacagcatctctagcatctatcccgagagtcagaaggatacccaaagcatagactctccattttcttcctctgctgaagataccctctcctgtccagtgacagaagtcatagccatcagtcactgtggaattaaagatagccctgtacaatcccctaatttccaacagacaggctctaagcttctgtccaatgtggctgcaagtcagcctgctaatatatcagtgttcaaaagggacctgaatgtgataacttctgtacccagcgaattgtgtttacatgagatgtcctcagatgcttcacttccaggggatccagaggcctatcctgctgctgtgtcaagcggtggagccattcatctgcagacaggaggtggatattttggcctaagctttacttgtcctagtctcaaaaatcctattagcaagaaatcctggactcgcaaattaaaaagctgggcatacaggctacggcagtcaaccagctttttcaagagatcaaaagtccgtcaagtggaaacagaagagatgagatcagcaattgctcctgatcccattcctctgacacgggagtccacagctgatactagggctttgaatagatgtaaagcgatgagtggatcatttcagcggggtcggttccaggtgattacaattcctcagcagcagtcagcaaaaatgacatcttttggaatagaacacatatcagtgttcagtgagacaaaccattctagtgaagaagcctttattaaaacagcaaagtctcagttggtagaaatagaacctgccacacaaaatccaaaaacttcgttttcttatgagaagttacaagctcttcaggaaacctgtaaagaaaataaaggagttcccaaacaaggtgacaacttcttatctttcagcgcagcttgtgagactgatgtatcttcagtgaccccagaaaaggaatttgaagaaacttcagccacaggaagtagcatgcagtctggatctgaactgttgcttaaagagagagagatattgactgctgggaaacagcctagctctgatagtgaattttcagccagtcttgctggcagtggaaagtcagtggcaaagactggtccagagagtaatcagtgcttaccacaccacgaagaacaagcttatgctcaaacacagagttcactcttctattcgccatcttccccaatgagcagtgatgatgaatcagaaatagaggatgaggacttgaaggtggagcttcaaagattacgagaaaaacacattcaggaggtggtaaatcttcaaacccagcagaataaggagctgcaggagctctatgaacgccttcggtcaattaaagatagcaaaacccaatctactgagattcctttgccacctgcatcaccacgtcgaccaagatctttcaaaagcaaacttcgaagccgcccccagtccttgacacatgtggacaatggcatagttgctacagggaaaagctgccttataaatgagttggaaaatccactgtgtgtggagagtaatgcagcatcatgccaacagtctccagccagtaaaaaagggatgttcacagatgacttacacaagctggtggatgactggacaaaggaagcagtaggaaattctcttattaagccaagtttaaaccaacttaaacaaagtcaacacaaactagagacagaaaactggaataaagtatctgaaaatactccgtctactatgggctacacatcaacatggatttcttctctgtcccaaatccgtggagctgtcccaacttccttgccacaaggactctcactcccttcatttcctgggccattatcatcatatggaatgcctcacgtttgtcagtataatgctgtggcgggggcggggtatccagtacagtgggtaggaatttcaggaacaacacaacaatctgtagtaattcccgcccaatctgggggaccattccagccagggatgaatatgcaggcatttccaacttcatcagtgcagaatcctgccacaatccctcctggtcctaaatga

SEQ ID NO: 200228 - DNA, 11172 bp, Homo sapiens
  Payload ID: 19505
  Gene Name: WNK lysine deficient protein kinase 3
  Uniprot ID: Q9BYP7
  ENST ID: ENST00000375169
  CDS Start-End: 440-5671
ctcagctccgggccgagcgcgagcttgggctcgtaccccgctcccctctctccgcccgctctttacctaccggccgtagctggcccggtgggctcgcggggagacgctcgcgcgcgcaagcgcacacgacgcggagcggagctcgagacatcgaggagaggagtaagaagcatcggaggaggcgatcgaggaggaggcggtgtgtgtgtatgtgtctattctacggtgtggctcgtcgtggggcgagaggaggctcgagagagggcgagggagaagcgaaaagagtaagagagtcttcctttgcgagagcctctaatctggttgctatggaaatacatgaccacgcaaaaggaagtccattctgataattctgatacctgagatgtaactggactgaagagtagaaacaggaaaaattttagtgccaactttaattacaatggccactgattcaggggatccagccagcacagaagattctgagaaacctgatggaatttcatttgaaaacagagttccccaggtcgctgcaactttgacagtagaagctagactaaaggagaaaaacagtaccttctctgcttctggggaaactgtagaaaggaagagatttttccgaaagagtgttgaaatgacggaagatgacaaagttgccgaatcatcccccaaagatgagagaattaaggctgcaatgaatattccaagagtagataagcttccttcaaatgtgttgagaggtggacaagaagttaaatatgaacagtgttcaaagtcaacctcagaaatctcaaaagattgtttcaaggagaaaaatgaaaaggaaatggaagaagaagcagaaatgaaggctgtagctacttctcctagtggcagattcctgaaatttgacatagaactaggaagaggagcatttaaaacagtatataaaggactggacactgaaacatgggttgaggttgcttggtgtgagctgcaggaccgaaagttaaccaaagctgagcagcaaagattcaaggaagaagcagagatgttgaagggtctccagcaccccaatatagttcgattttatgattcctgggaatctatattaaaaggaaagaaatgtattgtattagtgactgaactaatgacatctgggaccttaaagacgtacttaaaacgatttaaagtcatgaaaccaaaggtcttaaggagctggtgcaggcaaattttaaaggggttgcagttcttgcacactaggactcctcctattattcaccgggatctgaagtgtgacaatattttcatcacgggacccactggatctgtgaagattggtgatctaggattagccaccttaatgcgtacctcatttgctaagagtgtcattggaactcctgagtttatggctccagagatgtatgaagaacactatgatgaatccgtagatgtttatgcttttggaatgtgtatgctggaaatggccacatcggagtatccttattctgagtgtcagaatgcagctcaaatataccggaaagtaactagtggcataaaaccagccagcttcaataaagtcactgatcctgaagtcaaagaaatcattgaaggatgtattcgtcaaaacaaatctgaaaggttgtctatcagggacctattaaaccatgcattttttgctgaggatacaggactgagggtggagttagcagaagaagatgattgctcaaattcatcccttgctttaagactctgggttgaagaccctaaaaaattgaaaggcaaacacaaagacaatgaagctattgaatttagtttcaacttagaaacagatacacctgaggaagtagcatatgaaatggtcaagtctgggttcttccatgaaagtgattccaaagctgttgctaaatccattagagaccgggtgacgccaataaagaagacaagagagaagaagcctgctggctgtttggaagaacgcagggattctcagtgcaagtctatggggaatgtattccctcagccccagaatacaactttaccccttgctcccgctcagcaaactggggctgaatgtgaagaaactgaagttgatcaacatgttagacaacagcttctacaaagaaaaccacagcagcactgctcctctgttacaggtgacaatttgtctgaggcaggagctgcatcagttatacattcagatacttcaagtcagcccagtgtagcctattcctcaaatcaaacgatgggctctcaaatggtttctaatatcccgcaggctgaagtaaatgttccagggcaaatttattcatctcagcaactagtaggacattaccagcaagtttcagggttacagaagcattcaaagctgactcagccgcagattttgcctttggttcaaggtcagtccactgttttacctgtacatgtccttggaccgacagttgtttcacaaccccaggtttccccattaactgttcagaaggtcccacagataaagcctgtatcccaaccagttggagctgaacaacaagcagctcttctaaaaccagatttagttcgaagcttgaatcaagatgtggcaactacgaaggaaaacgtcagtagccctgataacccaagtggaaatggcaaacaggatcggatcaaacagagaagagcttcctgtccccgaccagagaaggggactaaatttcagcttaccgtccttcaggtatcaacctctggagataacatggtagagtgtcagctggagacacacaacaacaagatggtcaccttcaagtttgatgttgatggtgatgcgccagaggatattgcagactatatggttgaagataactttgtgctggaaagtgagaaagaaaaatttgtagaagaattgagagctattgtaggtcaagcccaggagatccttcatgtccactttgccacagaaagagccactggagttgattctattactgtggactccaacagtagccagacagggtcatctgaacaagtacagataaattctacatctactcaaaccagcaatgaatctgctcctcagtcatccccagttggtcggtggcgattctgtatcaatcagacgataagaaaccgtgagactcagtctcctccttctcttcagcattccatgtctgcggttcctggccgacatccacttcctagtccaaaaaacacaagtaataaggaaatatcacgggacacattgctcactatagaaaataatccatgccaccgtgcacttttcacctccaaatcagaacacaaggatgtggttgatggtaagatttctgaatgtgctagtgtagaaaccaagcagccagctatactttatcaagtggaagataacaggcagataatggcaccagttactaatagttccagttactctactacttcagttcgtgcagttccagctgaatgtgagggactcaccaaacaagcaagcatattcatacctgtgtatccatgtcaccaaactgccagtcaggctgatgcacttatgtcccatcctggcgaatcaactcagacttctggtaactctcttacaactctggcatttgatcaaaagcctcaaaccttatcagtacagcagccagctatggatgcagagtttatttctcaagaaggagaaactacagtgaacactgaagcaagttctcctaagacagtcattcccactcagacccctggccttgaaccaactacccttcaacccactactgtcctggaatcagatggagaaagacctccaaaactggagtttgcagacaaccgaattaaaactctggatgaaaaattaagaaacttgctctatcaggagcacagcatctctagcatctatcccgagagtcagaaggatacccaaagcatagactctccattttcttcctctgctgaagataccctctcctgtccagtgacagaagtcatagccatcagtcactgtggaattaaagatagccctgtacaatcccctaatttccaacagacaggctctaagcttctgtccaatgtggctgcaagtcagcctgctaatatatcagtgttcaaaagggacctgaatgtgataacttctgtacccagcgaattgtgtttacatgagatgtcctcagatgcttcacttccaggggatccagaggcctatcctgctgctgtgtcaagcggtggagccattcatctgcagacaggagtggaaacagaagagatgagatcagcaattgctcctgatcccattcctctgacacgggagtccacagctgatactagggctttgaatagatgtaaagcgatgagtggatcatttcagcggggtcggttccaggtgattacaattcctcagcagcagtcagcaaaaatgacatcttttggaatagaacacatatcagtgttcagtgagacaaaccattctagtgaagaagcctttattaaaacagcaaagtctcagttggtagaaatagaacctgccacacaaaatccaaaaacttcgttttcttatgagaagttacaagctcttcaggaaacctgtaaagaaaataaaggagttcccaaacaaggtgacaacttcttatctttcagcgcagcttgtgagactgatgtatcttcagtgaccccagaaaaggaatttgaagaaacttcagccacaggaagtagcatgcagtctggatctgaactgttgcttaaagagagagagatattgactgctgggaaacagcctagctctgatagtgaattttcagccagtcttgctggcagtggaaagtcagtggcaaagactggtccagagagtaatcagtgcttaccacaccacgaagaacaagcttatgctcaaacacagagttcactcttctattcgccatcttccccaatgagcagtgatgatgaatcagaaatagaggatgaggacttgaaggtggagcttcaaagattacgagaaaaacacattcaggaggtggtaaatcttcaaacccagcagaataaggagctgcaggagctctatgaacgccttcggtcaattaaagatagcaaaacccaatctactgagattcctttgccacctgcatcaccacgtcgaccaagatctttcaaaagcaaacttcgaagccgcccccagtccttgacacatgtggacaatggcatagttgctacagatccactgtgtgtggagagtaatgcagcatcatgccaacagtctccagccagtaaaaaagggatgttcacagatgacttacacaagctggtggatgactggacaaaggaagcagtaggaaattctcttattaagccaagtttaaaccaacttaaacaaagtcaacacaaactagagacagaaaactggaataaagtatctgaaaatactccgtctactatgggctacacatcaacatggatttcttctctgtcccaaatccgtggagctgtcccaacttccttgccacaaggactctcactcccttcatttcctgggccattatcatcatatggaatgcctcacgtttgtcagtataatgctgtggcgggggcggggtatccagtacagtgggtaggaatttcaggaacaacacaacaatctgtagtaattcccgcccaatctgggggaccattccagccagggatgaatatgcaggcatttccaacttcatcagtgcagaatcctgccacaatccctcctggtcctaaatgaatcagagtagatggtgataaaaagggaggttttttcagaattattttcaggacacccaagatattaaagtttcttcctcttgggttctgtcatattttccctcatttgagtttactttagactatatattttttgttccagtgtggtatttgatacagctcatcattctgtagaaatgtgcagtttgcagatagaacactgcacacagaaatgttttttcacttcaaattctatcctctttgatacttgattttttaaaaatactgttcagaatgctttaataagctcagcttgagcattaccatttccaggacactttccatgaattgttgagaagctccccatcccccgccttttttttttttttttttaactgctgctatctgcagctggatactcttctttaaaaatgtttaaaaattatttagattgattctccccaaatgtggatgaactgagaccctccatcagccagagtcttatgggatcttcacttcacatgtttgtcttaggtttacctttcacagaaggcagggtaacttgctgcaggaaacgttttggtgtataaaattagaatcacttttttttttttttttgagatggagtctctctctgtcacccaggttggagtgcagtggtgtgatcttggctcactgctgcaacctccccctcctgggttcaagcgattctcctgcctcagcctcctgagtagctgggactacaggcgccagccaccatgcctggctaatttttgtatttttagtagaggatggggtttcactatgttggccagactggtctcaaactcctaaccttgtgatccgccctccttagcccccccaaaaaattacaataattttgtcaaccaatacagaacatgagccctttttaaatgtgatttcccgtcatcacagcagtaggatgaagccttgttttgggtgagacagagggaaagggaaaaaacagaattgtaacagttccttgattctgcagatactgctgctgttttacgatttcagtaataattcaaagcagctgtctccttgtttctcacatgcatactacattggttttgagcatctgagaggcattggtttgtcttgcattcttttgcaaggcatatattgcagctgatatgaatctcgtttggggggaatccttgtattcctaacaagggggattaaagctacacctcaatccattcttctgaagtgaaatttacttgacacagtaggtttcgagacttacatatgaaacactggctttacagggttctcagagatgtggggtatacactgtcctgcagtgagatagtagaccctagaaggatactatttaagttgtccttagctctttttaattacaatttttagttgttagaatttctttttagtatctatagtatcttagatgattttagatcttaaatgagtttggcagcctctttagaatctgagagagatcactgtcaagttgcactttactgggttttatccagttttaggaggaggggaggcaatgtcaaaatgtacacctttggtttttaagaaggttaactataataatgttaaaggctagtcacagggttacctaatgctcagtctgtgaaacctaaatagaattcttaaaatgttatttaccaactaagtattcatgttcaaattacttaccttccactctgaagactttaaggtcatttctaatacacatttacctaattaggagttctgtctactagtaaacattccaaattgctacccaacattactgttaacagattttcctccgtattcttctaaaaattataccccatgggcttgccaggtaatgacgaaaacttaatgggtgtacttttttttttttttgcacagtctactttgtgacattaagtacctcttttccaaaaaaaaaaaaaaatgtgttttatgttgcttacctgaggatcacatccattatcaagaagattctgtcgctataatttgaggcatctagggcagcattttgagaattgctgttgataagatccactgtttcttttcatagaacatgatctgttttgtatgagtctttccaaatgttaagtacagattcttcaaatttcttgtacagtattggtttgcagtttaaagtgattttaggacattagtgtaatgcaaatgcttgcattgcactgttttccatatgtataaaaacaatgctcctaaaatccctaattctttaaaactgcctgtgtttcattataaaaagttggctttgtgtaattacaccgagccatacaacctataaagtgaaaatactgcagattttaggaccccttcttctctagtcacaatcattttaaacagtgtaccccaggatgaaaaaagctccatggctgacatgtacaattacatgtattaatgactgctctacatcctatgttctgcctttggccaccacctctattccacatataattcatcattcttgtttgcctgcagactcttgcagtgccttgtaatatttacaatcttttcaggtttttgctggaaagaaaagtagtcttctaaagtttgaagatggtgaatagtgtactgctgtctccatgctgactgcagtaaccgggttatcatatatgttatgtatacattatgtatatataacatgtgtacatttaaaaatacagaaaaaagtgagcttgtgcagaaatggagaaaacaatgttattctcatcactgtggggttttattaaaattattttttcccatgacttacatgtttggttcagattatagtcactttgactgtaaatactggctagttttctatccagggcttttgcattatttcataattttgctaaatcatataatagtgctattttcatccttgtctgaggtacttttcctccccagaaataattaacttgaggtaaagctcagaaattcccttcttaacaaagagcctactatataaaaagggccttcctttccaaaaaacacacaaacctgtccttttcattttccttcttgtagaggagaaaatggttgtacttaaccatcctgcttgtaaagtttattcagaggatagtctgtatgtccagccaccatgtttacttctcaaagtgcaagtctgatgaatagtactgtatctccatatgtggtaatgtgagcatttcatcatgaagtacctgctgctatgtctgtgaagttgggtgtaacatcataagaatatgaaaccagtattggtgtaaatctaatgaaaataaccctatgtatatttgtagcagtcttgaatctctatttaaggtaatttgctgtaatataacaaatattcattctgtttttcatcccttccttgccagttttatatcaagcatgaattccaatggtttgacagcaaaattatctgtgaaagtttaaaaggcacttttctgctgtgatttttggattgagtgtggagtgttatgtacagtttgatgggatatatcattttagaaccccagatttaattctagtccaattaattttgtttaactacctcgttttcagtgctgttttgggtgcacaagtaaacactacctgtgaaacttgcttttttgccttgattctcagtattctttcagattataaatctggtctgcctcttttttcccagtgctagccaacagtttgagatgagagggatcatcactctcatctgtgtttaagtggagagccatgtgcttctgtgaaatatgctttggggatttgggggtggagagcagaagaataattgaaattggtggcaatataggatttaggtgtaggagttagttataaaataaacaaatggtaagaaagtacctgaattagacaatccagtgcctataactttgcattttttattagagatgcatttctcgtctgtgtgcctaaagggcaatgggttgaaattgctttaactaccacagcgaaatatttgacaaatccttcagcaatggcctatcattcaacatatattagcacagtgctaggtatttgcagtggtattttgttaccttaaaacggccaaatgcatttagttgaaatgtagttgatagtaagggttttatataactttatccaatctctaaagtttatggaagcattgactttcttctttgctgtcttttctgagtgatgaaaatgatgcattccttttttttccttgaaaactcagcaaatgtttgtaaccagatgttccttgtttcacatgtttactgtgtaacactacagcatatttaatattggtaaatactgtatttcagtcattatgcataagtacattcctgaggtatatttgccatcattttgggattcagttattttatcttctgtttgggtcagaaaaacttgaactatctgaggtggtatgcaggccattttctagaagattgttttttgaatctgtagtttatcaaggacttgttccccccctccctttgtttagaagaggaatcagaaaaggggggtggtgtgtagaaaaggcctttgatttgataggtgtaatttctaagattgaaattttaaaaatgcagatcgtaagatagtaacactcaaacttgataaaatcctttgaattgaaattagtatgaaatttttatggaaccaaatgccttcaggtcaccctggaaatagtctttgtatgtgaaagatcaacacaaacattggtcaggaaccctgacagccaatatatgaaggagcctgggatagtaactaggttacactaaagttattttcaactaagatagctagacgagtgtacaaaccaatagctcctattctggaaggttttctttttattaaaaaaaattcaaacaaggttaaaagtcaagcaagaagggaagagagaaactgggttctgagaaaaaaatgtgccagtataaaataaactcctaaatgcgtgcttgtcatcctctagtttttttttaagttgaatttcttttccactgtaacttaagatttgagattgaggtttgcggtccagaacataccctcagcagatacagtgactaactggaaagtgcagttgttcaaggtctgtcatgctcaatcacctaaagctataatttgtttgatatattaagcatgtagacctagtgcagcatgggagccactcaggaagtttatgcaattaataaactttcagcataatttactatgaagtatgcagaatttcaccctcttctccacacttaacatttagttgtatatgtgaactctcctttcttaattggggaatgtagcattatatagaatgttgttaaagttaattttaatcctttttgacattaacctttttttttttttggtaaaccaagtgatctgcctttcagcaactgtcttattttggttctttgaaactgtgatttttatttcatttgtacccaaccattgtaagtattttgttttgtttcctggaaattctgttttgaaacagaaaataaaggctgtgttaaatgagtatgttatcttattaaaatgctgccatagtcactgcaa

SEQ ID NO: 200229 - DNA, 715 bp, Homo sapiens
  Payload ID: 19505
  Gene Name: WNK lysine deficient protein kinase 3
  ENST ID: ENST00000458404
  CDS Start-End: 220-715
gggggcgggggagacatgccgtggctgttgcccccgcaacgtaactgggaggccagtatttgtaaatcggtgcttcgacttctaatcccaaagccggcaggttgctatggaaatacatgaccacgcaaaaggaagtccattctgataattctgatacctgagatgtaactggactgaagagtagaaacaggaaaaattttagtgccaactttaattacaatggccactgattcaggggatccagccagcacagaagattctgagaaacctgatggaatttcatttgaaaacagagttccccaggtcgctgcaactttgacagtagaagctagactaaaggagaaaaacagtaccttctctgcttctggggaaactgtagaaaggaagagatttttccgaaagagtgttgaaatgacggaagatgacaaagttgccgaatcatcccccaaagatgagagaattaaggctgcaatgaatattccaagagtagataagcttccttcaaatgtgttgagaggtggacaagaagttaaatatgaacagtgttcaaagtcaacctcagaaatctcaaaagattgtttcaaggagaaaaatgaaaaggaaatggaagaagaagcagaaatgaaggctgtagctacttctcctagtggcagattcctgaaatttgacatagaactaggaagaggagcatttaaaacagtatataaaggactgg

SEQ ID NO: 200230 - DNA, 5400 bp, Homo sapiens
  Payload ID: 19505
  Gene Name: WNK lysine deficient protein kinase 3
  ENST ID: ENST00000620763
  CDS Start-End: 1-5400
atggccactgattcaggggatccagccagcacagaagattctgagaaacctgatggaatttcatttgaaaacagagttccccaggtcgctgcaactttgacagtagaagctagactaaaggagaaaaacagtaccttctctgcttctggggaaactgtagaaaggaagagatttttccgaaagagtgttgaaatgacggaagatgacaaagttgccgaatcatcccccaaagatgagagaattaaggctgcaatgaatattccaagagtagataagcttccttcaaatgtgttgagaggtggacaagaagttaaatatgaacagtgttcaaagtcaacctcagaaatctcaaaagattgtttcaaggagaaaaatgaaaaggaaatggaagaagaagcagaaatgaaggctgtagctacttctcctagtggcagattcctgaaatttgacatagaactaggaagaggagcatttaaaacagtatataaaggactggacactgaaacatgggttgaggttgcttggtgtgagctgcaggaccgaaagttaaccaaagctgagcagcaaagattcaaggaagaagcagagatgttgaagggtctccagcaccccaatatagttcgattttatgattcctgggaatctatattaaaaggaaagaaatgtattgtattagtgactgaactaatgacatctgggaccttaaagacgtacttaaaacgatttaaagtcatgaaaccaaaggtcttaaggagctggtgcaggcaaattttaaaggggttgcagttcttgcacactaggactcctcctattattcaccgggatctgaagtgtgacaatattttcatcacgggacccactggatctgtgaagattggtgatctaggattagccaccttaatgcgtacctcatttgctaagagtgtcattggaactcctgagtttatggctccagagatgtatgaagaacactatgatgaatccgtagatgtttatgcttttggaatgtgtatgctggaaatggccacatcggagtatccttattctgagtgtcagaatgcagctcaaatataccggaaagtaactagtggcataaaaccagccagcttcaataaagtcactgatcctgaagtcaaagaaatcattgaaggatgtattcgtcaaaacaaatctgaaaggttgtctatcagggacctattaaaccatgcattttttgctgaggatacaggactgagggtggagttagcagaagaagatgattgctcaaattcatcccttgctttaagactctgggttgaagaccctaaaaaattgaaaggcaaacacaaagacaatgaagctattgaatttagtttcaacttagaaacagatacacctgaggaagtagcatatgaaatggtcaagtctgggttcttccatgaaagtgattccaaagctgttgctaaatccattagagaccgggtgacgccaataaagaagacaagagagaagaagcctgctggctgtttggaagaacgcagggattctcagtgcaagtctatggggaatgtattccctcagccccagaatacaactttaccccttgctcccgctcagcaaactggggctgaatgtgaagaaactgaagttgatcaacatgttagacaacagcttctacaaagaaaaccacagcagcactgctcctctgttacaggtgacaatttgtctgaggcaggagctgcatcagttatacattcagatacttcaagtcagcccagtgtagcctattcctcaaatcaaacgatgggctctcaaatggtttctaatatcccgcaggctgaagtaaatgttccagggcaaatttattcatctcagcaactagtaggacattaccagcaagtttcagggttacagaagcattcaaagctgactcagccgcagattttgcctttggttcaaggtcagtccactgttttacctgtacatgtccttggaccgacagttgtttcacaaccccaggtttccccattaactgttcagaaggtcccacagataaagcctgtatcccaaccagttggagctgaacaacaagcagctcttctaaaaccagatttagttcgaagcttgaatcaagatgtggcaactacgaaggaaaacgtcagtagccctgataacccaagtggaaatggcaaacaggatcggatcaaacagagaagagcttcctgtccccgaccagagaaggggactaaatttcagcttaccgtccttcaggtatcaacctctggagataacatggtagagtgtcagctggagacacacaacaacaagatggtcaccttcaagtttgatgttgatggtgatgcgccagaggatattgcagactatatggttgaagataactttgtgctggaaagtgagaaagaaaaatttgtagaagaattgagagctattgtaggtcaagcccaggagatccttcatgtccactttgccacagaaagagccactggagttgattctattactgtggactccaacagtagccagacagggtcatctgaacaagtacagataaattctacatctactcaaaccagcaatgaatctgctcctcagtcatccccagttggtcggtggcgattctgtatcaatcagacgataagaaaccgtgagactcagtctcctccttctcttcagcattccatgtctgcggttcctggccgacatccacttcctagtccaaaaaacacaagtaataaggaaatatcacgggacacattgctcactatagaaaataatccatgccaccgtgcacttttcacctccaaatcagaacacaaggatgtggttgatggtaagatttctgaatgtgctagtgtagaaaccaagcagccagctatactttatcaagtggaagataacaggcagataatggcaccagttactaatagttccagttactctactacttcagttcgtgcagttccagctgaatgtgagggactcaccaaacaagcaagcatattcatacctgtgtatccatgtcaccaaactgccagtcaggctgatgcacttatgtcccatcctggcgaatcaactcagacttctggtaactctcttacaactctggcatttgatcaaaagcctcaaaccttatcagtacagcagccagctatggatgcagagtttatttctcaagaaggagaaactacagtgaacactgaagcaagttctcctaagacagtcattcccactcagacccctggccttgaaccaactacccttcaacccactactgtcctggaatcagatggagaaagacctccaaaactggagtttgcagacaaccgaattaaaactctggatgaaaaattaagaaacttgctctatcaggagcacagcatctctagcatctatcccgagagtcagaaggatacccaaagcatagactctccattttcttcctctgctgaagataccctctcctgtccagtgacagaagtcatagccatcagtcactgtggaattaaagatagccctgtacaatcccctaatttccaacagacaggctctaagcttctgtccaatgtggctgcaagtcagcctgctaatatatcagtgttcaaaagggacctgaatgtgataacttctgtacccagcgaattgtgtttacatgagatgtcctcagatgcttcacttccaggggatccagaggcctatcctgctgctgtgtcaagcggtggagccattcatctgcagacaggaggtggatattttggcctaagctttacttgtcctagtctcaaaaatcctattagcaagaaatcctggactcgcaaattaaaaagctgggcatacaggctacggcagtcaaccagctttttcaagagatcaaaagtccgtcaagtggaaacagaagagatgagatcagcaattgctcctgatcccattcctctgacacgggagtccacagctgatactagggctttgaatagatgtaaagcgatgagtggatcatttcagcggggtcggttccaggtgattacaattcctcagcagcagtcagcaaaaatgacatcttttggaatagaacacatatcagtgttcagtgagacaaaccattctagtgaagaagcctttattaaaacagcaaagtctcagttggtagaaatagaacctgccacacaaaatccaaaaacttcgttttcttatgagaagttacaagctcttcaggaaacctgtaaagaaaataaaggagttcccaaacaaggtgacaacttcttatctttcagcgcagcttgtgagactgatgtatcttcagtgaccccagaaaaggaatttgaagaaacttcagccacaggaagtagcatgcagtctggatctgaactgttgcttaaagagagagagatattgactgctgggaaacagcctagctctgatagtgaattttcagccagtcttgctggcagtggaaagtcagtggcaaagactggtccagagagtaatcagtgcttaccacaccacgaagaacaagcttatgctcaaacacagagttcactcttctattcgccatcttccccaatgagcagtgatgatgaatcagaaatagaggatgaggacttgaaggtggagcttcaaagattacgagaaaaacacattcaggaggtggtaaatcttcaaacccagcagaataaggagctgcaggagctctatgaacgccttcggtcaattaaagatagcaaaacccaatctactgagattcctttgccacctgcatcaccacgtcgaccaagatctttcaaaagcaaacttcgaagccgcccccagtccttgacacatgtggacaatggcatagttgctacaggtaaatcagtcataaaagtattaaaaaatccactgtgtgtggagagtaatgcagcatcatgccaacagtctccagccagtaaaaaagggatgttcacagatgacttacacaagctggtggatgactggacaaaggaagcagtaggaaattctcttattaagccaagtttaaaccaacttaaacaaagtcaacacaaactagagacagaaaactggaataaagtatctgaaaatactccgtctactatgggctacacatcaacatggatttcttctctgtcccaaatccgtggagctgtcccaacttccttgccacaaggactctcactcccttcatttcctgggccattatcatcatatggaatgcctcacgtttgtcagtataatgctgtggcgggggcggggtatccagtacagtgggtaggaatttcaggaacaacacaacaatctgtagtaattcccgcccaatctgggggaccattccagccagggatgaatatgcaggcatttccaacttcatcagtgcagaatcctgccacaatccctcctggtcctaaatga

SEQ ID NO: 200231 - DNA, 4001 bp, Homo sapiens
  Payload ID: 19506
  Gene Name: WNK lysine deficient protein kinase 4
  Uniprot ID: Q96J92
  ENST ID: ENST00000246914
  CDS Start-End: 22-3753
ttcggcgccctgctcttcctcatgttggcatccccggccacggagaccaccgtcctcatgtcccagactgaggccgacctggccctgcggcccccgcctcctcttggcaccgcggggcagccccgcctcgggccccctcctcgccgagcgcgccgcttctccgggaaggctgagccccggccgcgctcttctcgtctcagccgccgtagctcagtcgacttggggctgctgagctcttggtccctgccagcctcacccgctccggacccccccgatcctccggactccgctggtcctggccccgcgaggagcccaccgcctagctccaaagaaccccccgagggcacgtggaccgagggagcccctgtgaaggctgcggaagactccgcgcgtcccgagctcccggactctgcagtgggcccggggtccagggagccgctaagggtccctgaagctgtggccctagagcggcggcgggagcaggaagaaaaggaggacatggagacccaggctgtggcaacgtcccccgatggccgatacctcaagtttgacatcgagattggacgtggctccttcaagacggtgtatcgagggctagacaccgacaccacagtggaggtggcctggtgtgagctgcagactcggaaactgtctagagctgagcggcagcgcttctcagaggaggtggagatgctcaaggggctgcagcaccccaacatcgtccgcttctatgattcgtggaagtcggtgctgaggggccaggtttgcatcgtgctggtcaccgaactcatgacctcgggcacgctcaagacgtacctgaggcggttccgggagatgaagccgcgggtccttcagcgctggagccgccaaatcctgcggggacttcatttcctacactcccgggttcctcccatcctgcaccgggatctcaagtgcgacaatgtctttatcacgggacctactggctctgtcaaaatcggggacctgggcctggccacgctcaagcgcgcctcctttgccaagagtgtcatcgggaccccggaattcatggcccccgagatgtacgaggaaaagtacgatgaggccgtggacgtgtacgcgttcggcatgtgcatgctggagatggccacctctgagtacccgtactccgagtgccagaatgccgcgcaaatctaccgcaaggtcacttcgggcagaaagccgaacagcttccacaaggtgaagatacccgaggtgaaggagatcattgaaggctgcatccgcacggataagaacgagaggttcaccatccaggacctcctggcccacgccttcttccgcgaggagcgcggtgtgcacgtggaactagcggaggaggacgacggcgagaagccgggcctcaagctctggctgcgcatggaggacgcgcggcgcggggggcgcccacgggacaaccaggccatcgagttcctgttccagctgggccgggacgcggccgaggaggtggcacaggagatggtggctctgggcttggtctgtgaagccgattaccagccagtggcccgtgcagtacgtgaacgggttgctgccatccagcgaaagcgtgagaagctgcgtaaagcaagggaattggaggcactcccaccagagccaggacctccaccagcaactgtgcccatggcccccggtccccccagtgtcttcccccctgagcctgaggagccagaggcagaccagcaccagcccttccttttccgccacgccagctactcatctaccacttcggattgcgagactgatggctacctcagctcctccggcttcctggatgcctcagaccctgcccttcagccccctgggggggtgccatccagcctggctgagtcccatctctgcctgccctcggcttttgccctatccattccacgttctggccctggaagtgacttttcccccggggacagctatgcctcagatgcagcttcaggccttagcgatgtgggagaagggatgggacaaatgaggagacccccagggaggaatctccggcgcagaccccgatcccggctgcgggtcactagtgtctcagaccagaatgacagagtggttgagtgccagctacagacccataacagcaagatggtgaccttccgatttgatctggatggggacagcccggaagagattgcagctgccatggtatataacgagttcattctgccttcggagcgagatggatttctcagacggattcgggagattatccagcgagtggagaccctgttgaagagagacactggccccatggaggctgctgaagacaccctaagcccccaggaggagccagcaccattacctgccctgcccgtccccctcccagacccatccaatgaagagctccagagcagcacctccctggagcacaggagctggacagccttctccacctcctcatcttctcctggaactcctttgtctcctggaaacccattttcccctggaacccccatttccccaggtcccatcttccccatcacttctcccccatgtcatcccagcccctccccattctcccccatttcttcccaggtctcctcaaatccctctccacaccccaccagctctccacttccattctcctccagcacacccgagtttccggtcccactctctcagtgtccctggagttctctccccacgacttctccacctacgttctctcccacttgttctcaggtcactcttagttcccctttctttcctccgtgcccctccacttcttccttcccctccaccacagcagcccctctcctttctctggctagtgccttctcactggctgtgatgactgtggcccagtccctgctgtccccctcacctgggctcctttcccagtctcctccagcccctcctagtcccctccctagcctgccccttccccctcccgttgctcctggtggccaggaaagcccttcaccccacacagctgaggtggagagtgaggcctcaccacctcctgctcggcccctcccaggggaagccaggctggcgcccatctctgaagagggaaagccgcagcttgttgggcgtttccaagtgacttcatccaaggaaccggctgagcctcttcccttgcagccaacatcccccactctctctggttctccaaaaccttcaacccctcagctcacttcagagagctcagatacagaggacagtgctggaggcgggccagagaccagggaagctctggctgagagcgaccgtgcagctgagggtctgggggctggagttgaggaggaaggagatgatgggaaggaaccccaagttgggggcagcccccaacccctgagccatcccagcccagtgtggatgaactactcctacagcagcctgtgtttgagcagcgaggagtcagaaagcagtggggaagatgaggagttctgggctgagctgcagagtcttcggcagaagcacttgtcagaggtggaaacactacagacactacagaaaaaagaaattgaagatttgtacagccggctggggaagcagcccccaccgggtattgtggccccagctgctatgctgtccagccgccagcgccgcctctccaagggcagcttccccacctcccgccgcaacagcctacagcgctctgagcccccaggccctggcatcatgcgaaggaactctctgagtggcagcagcaccggctcccaggagcagcgggcaagcaagggggtgacattcgccggggatgttggcaggatgtgaattcagaacagaagccatgtatctcccccacaccagggcccaccatggagcttgtgttctcagaatctgatgctttctgatcaacaaaactgagcaaggaagatcccaacactgaaggggtagaaggccaggggggcatggagagtgcagctccattatagtgaagagccaaacatatgtgaactgtttgctgtgtggaggtgttagttctgctgcctaccatcttcatctctagcacctcccctgcc

SEQ ID NO: 200232 - DNA, 3909 bp, Homo sapiens
  Payload ID: 19506
  Gene Name: WNK lysine deficient protein kinase 4
  ENST ID: ENST00000591448
  CDS Start-End: 19-1428
ggcgccctgctcttcctcatgttggcatccccggccacggagaccaccgtcctcatgtcccagactgaggccgacctggccctgcggcccccgcctcctcttggcaccgcggggcagccccgcctcgggccccctcctcgccgagcgcgccgcttctccgggaaggctgagccccggccgcgctcttctcgtctcagccgccgtagctcagtcgacttggggctgctgagctcttggtccctgccagcctcacccgctccggacccccccgatcctccggactccgctggtcctggccccgcgaggagcccaccgcctagctccaaagaaccccccgagggcacgtggaccgagggagcccctgtgaaggctgcggaagactccgcgcgtcccgagctcccggactctgcagtgggcccggggtccagggagccgctaagggtccctgaagctgtggccctagagcggcggcgggagcaggaagaaaaggaggacatggagacccaggctgtggcaacgtcccccgatggccgatacctcaagtttgacatcgagattggacgtggctccttcaagacggtgtatcgagggctagacaccgacaccacagtggaggtggcctggtgtgagctgcagactcggaaactgtctagagctgagcggcagcgcttctcagaggaggtggagatgctcaaggggctgcagcaccccaacatcgtccgcttctatgattcgtggaagtcggtgctgaggggccaggtttgcatcgtgctggtcaccgaactcatgacctcgggcacgctcaagacgtacctgaggcggttccgggagatgaagccgcgggtccttcagcgctggagccgccaaatcctgcggggacttcatttcctacactcccgggttcctcccatcctgcaccgggatctcaagtgcgacaatgtctttatcacgggacctactggctctgtcaaaatcggggacctgggcctggccacgctcaagcgcgcctcctttgccaagagtgtcatcgggaccccggaattcatggcccccgagatgtacgaggaaaagtacgatgaggccgtggacgtgtacgcgttcggcatgtgcatgctggagatggccacctctgagtacccgtactccgagtgccagaatgccgcgcaaatctaccgcaaggtcacttcggttcaccatccaggacctcctggcccacgccttcttccgcgaggagcgcggtgtgcacgtggaactagcggaggaggacgacggcgagaagccgggcctcaagctctggctgcgcatggaggacgcgcggcgcggggggcgcccacgggacaaccaggccatcgagttcctgttccagctgggccgggacgcggccgaggaggtggcacaggagatggtggctctgggcttggtctgtgaagccgattaccagccagtggcccgtgcagtacgtgaacgggttgctgccatccagcgaaagcgtgagaagctgcgtaaagcaagggaattggaggcactcccaccagagccaggacctccaccagcaactgtgcccatggcccccggtccccccagtgtcttcccccctgagcctgaggagccagaggcagaccagcaccagcccttccttttccgccacgccagctactcatctaccacttcggattgcgagactgatggctacctcagctcctccggcttcctggatgcctcagaccctgcccttcagccccctgggggggtgccatccagcctggctgagtcccatctctgcctgccctcggcttttgccctatccattccacgttctggccctggaagtgacttttcccccggggacagctatgcctcagatgcagcttcaggccttagcgatgtgggagaagggatgggacaaatgaggagacccccagggaggaatctccggcgcagaccccgatcccggctgcgggtcactagtgtctcagaccagaatgacagagtggttgagtgccagctacagacccataacagcaagatggtgaccttccgatttgatctggatggggacagcccggaagagattgcagctgccatggtatataacgagttcattctgccttcggagcgagatggatttctcagacggattcgggagattatccagcgagtggagaccctgttgaagagagacactggccccatggaggctgctgaagacaccctaagcccccaggaggagccagcaccattacctgccctgcccgtccccctcccagacccatccaatgaagagctccagagcagcacctccctggagcacaggagctggacagccttctccacctcctcatcttctcctggaactcctttgtctcctggaaacccattttcccctggaacccccatttccccaggtcccatcttccccatcacttctcccccatgtcatcccagcccctccccattctcccccatttcttcccaggtctcctcaaatccctctccacaccccaccagctctccacttccattctcctccagcacacccgagtttccggtcccactctctcagtgtccctggagttctctccccacgacttctccacctacgttctctcccacttgttctcaggtcactcttagttcccctttctttcctccgtgcccctccacttcttccttcccctccaccacagcagcccctctcctttctctggctagtgccttctcactggctgtgatgactgtggcccagtccctgctgtccccctcacctgggctcctttcccagtctcctccagcccctcctagtcccctccctagcctgccccttccccctcccgttgctcctggtggccaggaaagcccttcaccccacacagctgaggtggagagtgaggcctcaccacctcctgctcggcccctcccaggggaagccaggctggcgcccatctctgaagagggaaagccgcagcttgttgggcgtttccaagtgacttcatccaaggaaccggctgagcctcttcccttgcagccaacatcccccactctctctggttctccaaaaccttcaacccctcagctcacttcagagagctcagatacagaggacagtgctggaggcgggccagagaccagggaagctctggctgagagcgaccgtgcagctgagggtctgggggctggagttgaggaggaaggagatgatgggaaggaaccccaagttgggggcagcccccaacccctgagccatcccagcccagtgtggatgaactactcctacagcagcctgtgtttgagcagcgaggagtcagaaagcagtggggaagatgaggagttctgggctgagctgcagagtcttcggcagaagcacttgtcagaggtggaaacactacagacactacagaaaaaagaaattgaagatttgtacagccggctggggaagcagcccccaccgggtattgtggccccagctgctatgctgtccagccgccagcgccgcctctccaagggcagcttccccacctcccgccgcaacagcctacagcgctctgagcccccaggccctggcatcatgcgaaggaactctctgagtggcagcagcaccggctcccaggagcagcgggcaagcaagggggtgacattcgccggggatgttggcaggatgtgaattcagaacagaagccatgtatctcccccacaccagggcccaccatggagcttgtgttctcagaatctgatgctttctgatcaacaaaactgagcaaggaagatcccaacactgaaggggtagaaggccaggggggcatggagagtgcagctccattatagtgaagagccaaacatatgtgaactgtttgctgtgtggaggtgttagttctgctgcctaccatcttcatctctagcacctcccctgcc

SEQ ID NO: 200233 - DNA, 188 bp, Homo sapiens
  Payload ID: 19506
  Gene Name: WNK lysine deficient protein kinase 4
  ENST ID: ENST00000587745
  CDS Start-End: 1-188
accctaagcccccaggaggagccagcaccattacctgccctgcccgtccccctcccagacccatccaatgagggaaagccgcagcttgttgggcgtttccaagtgacttcatccaaggaaccggctgagcctcttcccttgcagccaacatcccccactctctctggttctccaaaaccttcaacccc

SEQ ID NO: 200234 - DNA, 2238 bp, Homo sapiens
  Payload ID: 19507
  Gene Name: WNT inhibitory factor 1
  Uniprot ID: Q9Y5W5
  ENST ID: ENST00000286574
  CDS Start-End: 376-1515
gccccactcctcgctcgcacctcgctcgcgccagcccttcccgctcttctgttctcgctctatttgccccgctgactgctggcctcgccagctttgccagtcttacgtctctgccgcccccactcccgcccgcgccccatcttcttgcgcgactcgcgcccgctggtccccccctcctcctcccgcgtcctgcctgccccctcctcctgctctcgcaggctccttggcacccaggccgggaggcgacgcgcccagccgtctaaacgggaacagccctggctgagggagctgcagcgcagcagagtatctgacggcgccaggttgcgtaggtgcggcacgaggagttttcccggcagcgaggaggtcctgagcagcatggcccggaggagcgccttccctgccgccgcgctctggctctggagcatcctcctgtgcctgctggcactgcgggcggaggccgggccgccgcaggaggagagcctgtacctatggatcgatgctcaccaggcaagagtactcataggatttgaagaagatatcctgattgtttcagaggggaaaatggcaccttttacacatgatttcagaaaagcacaacagagaatgccagctattcctgtcaatatccattccatgaattttacctggcaagctgcagggcaggcagaatacttctatgaattcctgtccttgcgctccctggataaaggcatcatggcagatccaaccgtcaatgtccctctgctgggaacagtgcctcacaaggcatcagttgttcaagttggtttcccatgtcttggaaaacaggatggggtggcagcatttgaagtggatgtgattgttatgaattctgaaggcaacaccattctccaaacacctcaaaatgctatcttctttaaaacatgtcaacaagctgagtgcccaggcgggtgccgaaatggaggcttttgtaatgaaagacgcatctgcgagtgtcctgatgggttccacggacctcactgtgagaaagccctttgtaccccacgatgtatgaatggtggactttgtgtgactcctggtttctgcatctgcccacctggattctatggagtgaactgtgacaaagcaaactgctcaaccacctgctttaatggagggacctgtttctaccctggaaaatgtatttgccctccaggactagagggagagcagtgtgaaatcagcaaatgcccacaaccctgtcgaaatggaggtaaatgcattggtaaaagcaaatgtaagtgttccaaaggttaccagggagacctctgttcaaagcctgtctgcgagcctggctgtggtgcacatggaacctgccatgaacccaacaaatgccaatgtcaagaaggttggcatggaagacactgcaataaaaggtacgaagccagcctcatacatgccctgaggccagcaggcgcccagctcaggcagcacacgccttcacttaaaaaggccgaggagcggcgggatccacctgaatccaattacatctggtgaactccgacatctgaaacgttttaagttacaccaagttcatagcctttgttaacctttcatgtgttgaatgttcaaataatgttcattacacttaagaatactggcctgaattttattagcttcattataaatcactgagctgatatttactcttccttttaagttttctaagtacgtctgtagcatgatggtatagattttcttgtttcagtgctttgggacagattttatattatgtcaattgatcaggttaaaattttcagtgtgtagttggcagatattttcaaaattacaatgcatttatggtgtctgggggcaggggaacatcagaaaggttaaattgggcaaaaatgcgtaagtcacaagaatttggatggtgcagttaatgttgaagttacagcatttcagattttattgtcagatatttagatgtttgttacatttttaaaaattgctcttaatttttaaactctcaatacaatatattttgaccttaccattattccagagattcagtattaaaaaaaaaaaaattacactgtggtagtggcatttaaacaatataatatattctaaacacaatgaaatagggaatataatgtatgaactttttgcattggcttgaagcaatataatatattgtaaacaaaacacagctcttacctaataaacattttatactgtttgtatgtataaaataaaggtgctgctttagttttctga

SEQ ID NO: 200235 - DNA, 429 bp, Homo sapiens
  Payload ID: 19507
  Gene Name: WNT inhibitory factor 1
  ENST ID: ENST00000543094
  CDS Start-End: 1-387
ggagtgaactgtgacaaagcaaactgctcaaccacctgctttaatggagggacctgtttctaccctggaaaatgtatttgccctccaggactagagggagagcagtgtgaaatcagcaaatgcccacaaccctgtcgaaatggaggtaaatgcattggtaaaagcaaatctgtctgcgagcctggctgtggtgcacatggaacctgccatgaacccaacaaatgccaatgtcaagaaggttggcatggaagacactgcaataaaaggtacgaagccagcctcatacatgccctgaggccagcaggcgcccagctcaggcagcacacgccttcacttaaaaaggccgaggagcggcgggatccacctgaatccaattacatctggtgaactccgacatctgaaacgttttaagttacaccaagttcatag

SEQ ID NO: 200236 - DNA, 568 bp, Homo sapiens
  Payload ID: 19507
  Gene Name: WNT inhibitory factor 1
  ENST ID: ENST00000546001
  CDS Start-End: 169-568
gtactgaaggcagatgcttgtgaacagaaatgacccacactaattctttggttttctttttgcttgaaacttctgatttagatgatttcaagtctacctggtttgatcgttttattattttaaaaaccaggatttgaagaagatatcctgattgtttcagaggggaaaatggcaccttttacacatgatttcagaaaagcacaacagagaatgccagctattcctgtcaatatccattccatgaattttacctggcaagctgcagggcaggcagaatacttctatgaattcctgtccttgcgctccctggataaaggcatcatggcagatccaaccgtcaatgtccctctgctgggaacagtgcctcacaaggcatcagttgttcaagttggtttcccatgtcttggaaaacaggatggggtggcagcatttgaagtggatgtgattgttatgaattctgaaggcaacaccattctccaaacacctcaaaatgctatcttctttaaaacatgtcaacaagctgagtgcccaggcgggtgccgaaatggaggcttttgtaatgaaagac

SEQ ID NO: 200237 - DNA, 1205 bp, Homo sapiens
  Payload ID: 19508
  Gene Name: WNT1 inducible signaling pathway protein 1
  Uniprot ID: O95388
  ENST ID: ENST00000220856
  CDS Start-End: 9-851
gtccaggcatgaggtggttcctgccctggacgctggcagcagtgacagcagcagccgccagcaccgtcctggccacggccctctctccagcccctacgaccatggactttaccccagctccactggaggacacctcctcacgcccccaattctgcaagtggccatgtgagtgcccgccatccccaccccgctgcccgctgggggtcagcctcatcacagatggctgtgagtgctgtaagatgtgcgctcagcagcttggggacaactgcacggaggctgccatctgtgacccccaccggggcctctactgtgactacagcggggaccgcccgaggtacgcaataggagtgtgtgcacatgctgtgggtgaggtggaggcatggcacaggaactgcatagcctacacaagcccctggagcccttgctccaccagctgcggcctgggggtctccactcggatctccaatgttaacgcccagtgctggcctgagcaagagagccgcctctgcaacttgcggccatgcgatgtggacatccatacactcattaaggcagggaagaagtgtctggctgtgtaccagccagaggcatccatgaacttcacacttgcgggctgcatcagcacacgctcctatcaacccaagtactgtggagtttgcatggacaataggtgctgcatcccctacaagtctaagactatcgacgtgtccttccagtgtcctgatgggcttggcttctcccgccaggtcctatggattaatgcctgcttctgtaacctgagctgtaggaatcccaatgacatctttgctgacttggaatcctaccctgacttctcagaaattgccaactaggcaggcacaaatcttgggtcttggggactaacccaatgcctgtgaagcagtcagcccttatggccaataacttttcaccaatgagccttagttaccctgatctggacccttggcctccatttctgtctctaaccattcaaatgacgcctgatggtgctgctcaggcccatgctatgagttttctccttgatatcattcagcatctactctaaagaaaaatgcctgtctctagctgttctggactacacccaagcctgatccagcctttccaagtcactagaagtcctgctggatcttgcctaaatcccaagaaatggaatcaggtagacttttaatatcactaatttcttcttt

SEQ ID NO: 200238 - DNA, 3844 bp, Homo sapiens
  Payload ID: 19508
  Gene Name: WNT1 inducible signaling pathway protein 1
  Uniprot ID: O95388
  ENST ID: ENST00000250160
  CDS Start-End: 107-1210
atatctggtgctcctgatgggccggccagtctgggcccagctcccccgagaggtggtcggatcctctgggctgctcggtcgatgcctgtgccactgacgtccaggcatgaggtggttcctgccctggacgctggcagcagtgacagcagcagccgccagcaccgtcctggccacggccctctctccagcccctacgaccatggactttaccccagctccactggaggacacctcctcacgcccccaattctgcaagtggccatgtgagtgcccgccatccccaccccgctgcccgctgggggtcagcctcatcacagatggctgtgagtgctgtaagatgtgcgctcagcagcttggggacaactgcacggaggctgccatctgtgacccccaccggggcctctactgtgactacagcggggaccgcccgaggtacgcaataggagtgtgtgcacaggtggtcggtgtgggctgcgtcctggatggggtgcgctacaacaacggccagtccttccagcctaactgcaagtacaactgcacgtgcatcgacggcgcggtgggctgcacaccactgtgcctccgagtgcgccccccgcgtctctggtgcccccacccgcggcgcgtgagcatacctggccactgctgtgagcagtgggtatgtgaggacgacgccaagaggccacgcaagaccgcaccccgtgacacaggagccttcgatgctgtgggtgaggtggaggcatggcacaggaactgcatagcctacacaagcccctggagcccttgctccaccagctgcggcctgggggtctccactcggatctccaatgttaacgcccagtgctggcctgagcaagagagccgcctctgcaacttgcggccatgcgatgtggacatccatacactcattaaggcagggaagaagtgtctggctgtgtaccagccagaggcatccatgaacttcacacttgcgggctgcatcagcacacgctcctatcaacccaagtactgtggagtttgcatggacaataggtgctgcatcccctacaagtctaagactatcgacgtgtccttccagtgtcctgatgggcttggcttctcccgccaggtcctatggattaatgcctgcttctgtaacctgagctgtaggaatcccaatgacatctttgctgacttggaatcctaccctgacttctcagaaattgccaactaggcaggcacaaatcttgggtcttggggactaacccaatgcctgtgaagcagtcagcccttatggccaataacttttcaccaatgagccttagttaccctgatctggacccttggcctccatttctgtctctaaccattcaaatgacgcctgatggtgctgctcaggcccatgctatgagttttctccttgatatcattcagcatctactctaaagaaaaatgcctgtctctagctgttctggactacacccaagcctgatccagcctttccaagtcactagaagtcctgctggatcttgcctaaatcccaagaaatggaatcaggtagacttttaatatcactaatttcttctttagatgccaaaccacaagactctttgggtccattcagatgaatagatggaatttggaacaatagaataatctattatttggagcctgccaagaggtactgtaatgggtaattctgacgtcagcgcaccaaaactatcctgattccaaatatgtatgcacctcaaggtcatcaaacatttgccaagtgagttgaatagttgcttaattttgatttttaatggaaagttgtatccattaacctgggcattgttgaggttaagtttctcttcacccctacactgtgaagggtacagattaggtttgtcccagtcagaaataaaatttgataaacattcctgttgatgggaaaagcccccagttaatactccagagacagggaaaggtcagcccgtttcagaaggaccaattgactctcacactgaatcagctgctgactggcagggctttgggcagttggccaggctcttccttgaatcttctcccttgtcctgcttggggttcataggaattggtaaggcctctggactggcctgtctggcccctgagagtggtgccctggaacactcctctactcttacagagccttgagagacccagctgcagaccatgccagacccactgaaatgaccaagacaggttcaggtaggggtgtgggtcaaaccaagaagtgggtgcccttggtagcagcctggggtgacctctagagctggaggctgtgggactccaggggcccccgtgttcaggacacatctattgcagagactcatttcacagcctttcgttctgctgaccaaatggccagttttctggtaggaagatggaggtttaccggttgtttagaaacagaaatagacttaataaaggtttaaagctgaagaggttgaagctaaaaggaaaaggttgttgttaatgaatatcaggctattatttattgtattaggaaaatataatatttactgttagaattcttttatttagggccttttctgtgccagacattgctctcagtgctttgcatgtattagctcactgaatcttcacgacaatgttgagaagttcccattattatttctgttcttacaaatgtgaaacggaagctcatagaggtgagaaaactcaaccagagtcacccagttggtgactgggaaagttaggattcagatcgaaattggactgtctttataacccatattttccccctgtttttagagcttccaaatgtgtcagaataggaaaacattgcaataaatggcttgattttttaatgtcatttttccctcttatagtctttctagctccttttcaaaagacgagaatatctgattttctgataatttaggtgcttaagcatccaaaatacatgggacacacaaaaatccaggaatcccctgtagcttattccctctttcccatcggaaccagctctcatcacacatttaaaagatgattctgtttacccaatgctgcatattgaatgttgtgtagttattcacagggaattctgtgcagtgtgcagagagattcctaaacgggaaaaggactgggaatacatcctccttactgtgacctccccaaaacctagtccagtgcaaggtatacagtggtgctcattaaatacttgatgaatacaggaagctgtgcatgtgttcctacttttattcgaagctctcttcttccaaagctacatgaaaatagaattttaacagtcaaaattttatattaagtgccttagcaaaagagacatttaatatttcaaagaaatgcatatgtatgtatacatatatttgtgtatgcgtatgcaagaattcttgtataaagagaattcactccatgaatgatctcttctgtaagtcagtgtgaatcatgttagattttctgagagtgaaaacacctgccatctacaaattacaaggctggataacagctcactccatttgaaattcagtggaaacccaagagctaggttcttactgaatttgcatctcaatttgggaaactgaacttagctttcaaagatcataggaagtctggttggagaaactagggattattctggcaatgggtgcaggaaggtggtcagaataacccagtcgccattggttttgagaaacggaactatcttatgcagagcccggagggcaagtctcagacccatgggttgaagccatggagaaggaaatttggatccaatgtaatgaagcgctttctaagtcagaatttccctgcaatggtgtggcctgattcaataaaaattaagaataataaatataatggaaaaaaa

SEQ ID NO: 200239 - DNA, 1319 bp, Homo sapiens
  Payload ID: 19508
  Gene Name: WNT1 inducible signaling pathway protein 1
  ENST ID: ENST00000377862
  CDS Start-End: 107-217
atatctggtgctcctgatgggccggccagtctgggcccagctcccccgagaggtggtcggatcctctgggctgctcggtcgatgcctgtgccactgacgtccaggcatgaggtggttcctgccctggacgctggcagcagtgacagcagcagccgccagcaccgtcctggccacgatgctgtgggtgaggtggaggcatggcacaggaactgcatagcctacacaagcccctggagcccttgctccaccagctgcggcctgggggtctccactcggatctccaatgttaacgcccagtgctggcctgagcaagagagccgcctctgcaacttgcggccatgcgatgtggacatccatacactcattaaggcagggaagaagtgtctggctgtgtaccagccagaggcatccatgaacttcacacttgcgggctgcatcagcacacgctcctatcaacccaagtactgtggagtttgcatggacaataggtgctgcatcccctacaagtctaagactatcgacgtgtccttccagtgtcctgatgggcttggcttctcccgccaggtcctatggattaatgcctgcttctgtaacctgagctgtaggaatcccaatgacatctttgctgacttggaatcctaccctgacttctcagaaattgccaactaggcaggcacaaatcttgggtcttggggactaacccaatgcctgtgaagcagtcagcccttatggccaataacttttcaccaatgagccttagttaccctgatctggacccttggcctccatttctgtctctaaccattcaaatgacgcctgatggtgctgctcaggcccatgctatgagttttctccttgatatcattcagcatctactctaaagaaaaatgcctgtctctagctgttctggactacacccaagcctgatccagcctttccaagtcactagaagtcctgctggatcttgcctaaatcccaagaaatggaatcaggtagacttttaatatcactaatttcttctttagatgccaaaccacaagactctttgggtccattcagatgaatagatggaatttggaacaatagaataatctattatttggagcctgccaagaggtactgtaatgggtaattctgacgtcagcgcaccaaaactatcctgattccaaatatgtatgcacctcaaggtcatcaaacatttgccaagtgagttgaatagttgcttaattttgatttttaatggaaagttgtatccattaacctgggcattgttgaggttaagtttctcttcacccctacactgtgaagggtacagatta

SEQ ID NO: 200240 - DNA, 716 bp, Homo sapiens
  Payload ID: 19508
  Gene Name: WNT1 inducible signaling pathway protein 1
  Uniprot ID: O95388
  ENST ID: ENST00000517423
  CDS Start-End: 62-529
ccgagaggtggtcggatcctctgggctgctcggtcgatgcctgtgccactgacgtccaggcatgaggtggttcctgccctggacgctggcagcagtgacagcagcagccgccagcaccgtcctggccacggccctctctccagcccctacgaccatggactttaccccagctccactggaggacacctcctcacgcccccaattctgcaagtggccatgtgagtgcccgccatccccaccccgctgcccgctgggggtcagcctcatcacagatggctgtgagtgctgtaagatgtgcgctcagcagcttggggacaactgcacggaggctgccatctgtgacccccaccggggcctctactgtgactacagcggggaccgcccgaggtacgcaataggagtgtgtgcacgcagggaagaagtgtctggctgtgtaccagccagaggcatccatgaacttcacacttgcgggctgcatcagcacacgctcctatcaacccaagtactgtggagtttgcatggacaataggtgctgcatcccctacaagtctaagactatcgacgtgtccttccagtgtcctgatgggcttggcttctcccgccaggtcctatggattaatgcctgcttctgtaacctgagctgtaggaatcccaatgacatctttgctgacttggaatcctaccctgacttctcagaaattgccaactaggcaggc

SEQ ID NO: 200241 - DNA, 545 bp, Homo sapiens
  Payload ID: 19508
  Gene Name: WNT1 inducible signaling pathway protein 1
  Uniprot ID: O95388
  ENST ID: ENST00000519433
  CDS Start-End: 77-445
ctgggcccagctcccccgagaggtggtcggatcctctgggctgctcggtcgatgcctgtgccactgacgtccaggcatgaggtggttcctgccctggacgctggcagcagtgacagcagcagccgccagcaccgtcctggccacggcagggaagaagtgtctggctgtgtaccagccagaggcatccatgaacttcacacttgcgggctgcatcagcacacgctcctatcaacccaagtactgtggagtttgcatggacaataggtgctgcatcccctacaagtctaagactatcgacgtgtccttccagtgtcctgatgggcttggcttctcccgccaggtcctatggattaatgcctgcttctgtaacctgagctgtaggaatcccaatgacatctttgctgacttggaatcctaccctgacttctcagaaattgccaactaggcaggcacaaatcttgggtcttggggactaacccaatgcctgtgaagcagtcagcccttatggccaataacttttcaccaatgagccttagttaccctga

SEQ ID NO: 200242 - DNA, 1403 bp, Homo sapiens
  Payload ID: 19509
  Gene Name: WNT1 inducible signaling pathway protein 2
  Uniprot ID: O76076
  ENST ID: ENST00000190983
  CDS Start-End: 147-899
gtgtgtgtgtgtgtgtgagcgcgcgcgcgcgcgcgcgtgtgtactcgtgcgtgtgcctgtgtgtgcctgggagtgacctcacagctgccggaacataaagactcacaggtccgcctcccaggctcaaagctggctctgcaggggacatgagaggcacaccgaagacccacctcctggccttctccctcctctgcctcctctcaaaggtgcgtacccagctgtgcccgacaccatgtacctgcccctggccacctccccgatgcccgctgggagtacccctggtgctggatggctgtggctgctgccgggtatgtgcacggcggctgggggagccctgcgaccaactccacgtctgcgacgccagccagggcctggtctgccagcccggggcaggacccggtggccggggggccctgtgcctcttggcagaggacgacagcagctgtgaggtgaacggccgcctgtatcgggaaggggagaccttccagccccactgcagcatccgctgccgctgcgaggacggcggcttcacctgcgtgccgctgtgcagcgaggatgtgcggctgcccagctgggactgcccccaccccaggagggtcgaggtcctgggcaagtgctgccctgagtgggtgtgcggccaaggagggggactggggacccagccccttccagcccaaggaccccagttttctggccttgtctcttccctgccccctggtgtcccctgcccagaatggagcacggcctggggaccctgctcgaccacctgtgggctgggcatggccacccgggtgtccaaccagaaccgcttctgccgactggagacccagcgccgcctgtgcctgtccaggccctgcccaccctccaggggtcgcagtccacaaaacagtgccttctagagccgggctgggaatggggacacggtgtccaccatccccagctggtggccctgtgcctgggccctgggctgatggaagatggtccgtgcccaggcccttggctgcaggcaacactttagcttgggtccaccatgcagaacaccaatattaacacgctgcctggtctgtctggatcccgaggtatggcagaggtgcaagacctagtcccctttcctctaactcactgcctaggaggctggccaaggtgtccagggtcctctagcccactccctgcctacacacacagcctatatcaaacatgcacacgggcgagctttctctccgacttcccctgggcaagagatgggacaagcagtcccttaatattgaggctgcagcaggtgctgggctggactggccatttttctgggggtaggatgaagagaaggcacacagagattctggatctcctgctgccttttctggagtttgtaaaattgttcctgaatacaagcctatgcgtga

SEQ ID NO: 200243 - DNA, 1518 bp, Homo sapiens
  Payload ID: 19509
  Gene Name: WNT1 inducible signaling pathway protein 2
  Uniprot ID: O76076
  ENST ID: ENST00000372865
  CDS Start-End: 509-1165
ggagaccttgggtcagctctgcaaaggggttgtttactgaatgcttctggtatctgcagccccgctggggttcggacagggggtctggaatagggcttcacaactacagcagggctaggaccctcttgggctggaaggagctggagaggcctctgcaagctgtcacaggctcttggtgctggcactggctcaggctttcacacacacacacgcgcacacacacacacacacacacacggacaggcacccccttggtggccttcacagtttcaccttcaggtaaatgggctcatcctttgagccatgaggatgggaagcgaagcaaggaatgaaaaagctagtgtgtttgtgtgtgtgtgtgtgtgtgtgtgtgtgtgtgagcgcgcgcgcgcgcgcgcgtgtgtactcgtgcgtgtgcctgtgtgtgcctgggagtgacctcacagctgccggaacataaagactcacaggtccgcctcccaggctcaaagctggctctgcaggggacatgagaggcacaccgaagacccacctcctggccttctccctcctctgcctcctctcaaaggtgcgtacccagctgtgcccgacaccatgtacctgcccctggccacctccccgatgcccgctgggagtacccctggtgctggatggctgtggctgctgccgggtatgtgcacggcggctgggggagccctgcgaccaactccacgtctgcgacgccagccagggcctggtctgccagcccggggcaggacccggtggccggggggccctgtgcctctgtaagcaggaccccagttttctggccttgtctcttccctgccccctggtgtcccctgcccagaatggagcacggcctggggaccctgctcgaccacctgtgggctgggcatggccacccgggtgtccaaccagaaccgcttctgccgactggagacccagcgccgcctgtgcctgtccaggccctgcccaccctccaggggtcgcagtccacaaaacagtgccttctagagccgggctgggaatggggacacggtgtccaccatccccagctggtggccctgtgcctgggccctgggctgatggaagatggtccgtgcccaggcccttggctgcaggcaacactttagcttgggtccaccatgcagaacaccaatattaacacgctgcctggtctgtctggatcccgaggtatggcagaggtgcaagacctagtcccctttcctctaactcactgcctaggaggctggccaaggtgtccagggtcctctagcccactccctgcctacacacacagcctatatcaaacatgcacacgggcgagctttctctccgacttcccctgggcaagagatgggacaagcagtcccttaatattgaggctgcagcaggtgctgggctggactggccatttttctgggggtaggatgaagagaaggcacacagagattctggatctcctgctgccttttctggagtttgtaaaattgttcctgaatacaagcctatgcgtga

SEQ ID NO: 200244 - DNA, 1600 bp, Homo sapiens
  Payload ID: 19509
  Gene Name: WNT1 inducible signaling pathway protein 2
  Uniprot ID: O76076
  ENST ID: ENST00000372868
  CDS Start-End: 344-1096
ctgggccgcggctacccagagtcagggccacggagcttaggagaccttgggtcagctctgcaaaggggttgtttactgaatgcttctggtatctgcagccccgctggggttcggacagggggtctggaatagggcttcacaactacagcagggctaggaccctcttgggctggaaggagctggagaggcctctgcaagctgtcacaggctcttggtgctggcactggctcaggctttcacacacacacacgcgcacacacacacacacacacacacggacaggcacccccttggtggccttcacagtttcaccttcaggctcaaagctggctctgcaggggacatgagaggcacaccgaagacccacctcctggccttctccctcctctgcctcctctcaaaggtgcgtacccagctgtgcccgacaccatgtacctgcccctggccacctccccgatgcccgctgggagtacccctggtgctggatggctgtggctgctgccgggtatgtgcacggcggctgggggagccctgcgaccaactccacgtctgcgacgccagccagggcctggtctgccagcccggggcaggacccggtggccggggggccctgtgcctcttggcagaggacgacagcagctgtgaggtgaacggccgcctgtatcgggaaggggagaccttccagccccactgcagcatccgctgccgctgcgaggacggcggcttcacctgcgtgccgctgtgcagcgaggatgtgcggctgcccagctgggactgcccccaccccaggagggtcgaggtcctgggcaagtgctgccctgagtgggtgtgcggccaaggagggggactggggacccagccccttccagcccaaggaccccagttttctggccttgtctcttccctgccccctggtgtcccctgcccagaatggagcacggcctggggaccctgctcgaccacctgtgggctgggcatggccacccgggtgtccaaccagaaccgcttctgccgactggagacccagcgccgcctgtgcctgtccaggccctgcccaccctccaggggtcgcagtccacaaaacagtgccttctagagccgggctgggaatggggacacggtgtccaccatccccagctggtggccctgtgcctgggccctgggctgatggaagatggtccgtgcccaggcccttggctgcaggcaacactttagcttgggtccaccatgcagaacaccaatattaacacgctgcctggtctgtctggatcccgaggtatggcagaggtgcaagacctagtcccctttcctctaactcactgcctaggaggctggccaaggtgtccagggtcctctagcccactccctgcctacacacacagcctatatcaaacatgcacacgggcgagctttctctccgacttcccctgggcaagagatgggacaagcagtcccttaatattgaggctgcagcaggtgctgggctggactggccatttttctgggggtaggatgaagagaaggcacacagagattctggatctcctgctgccttttctggagtttgtaaaattgttcctgaatacaagcctatgcgtga

SEQ ID NO: 200245 - DNA, 1235 bp, Homo sapiens
  Payload ID: 19510
  Gene Name: WNT1 inducible signaling pathway protein 3
  Uniprot ID: O95389
  ENST ID: ENST00000230529
  CDS Start-End: 111-1175
cctgagtcccgggaggaaagtgctcgcccattcctgacctgtgacacgctcactgcgaaggcaggttattagaagagtcccatgaaaggtggctccacggtcccagcgacatgcaggggctcctcttctccactcttctgcttgctggcctggcacagttctgctgcagggtacagggcactggaccattagatacaacacctgaaggaaggcctggagaagtgtcagatgcacctcagcgtaaacagttttgtcactggccctgcaaatgccctcagcagaagccccgttgccctcctggagtgagcctggtgagagatggctgtggatgctgtaaaatctgtgccaagcaaccaggggaaatctgcaatgaagctgacctctgtgacccacacaaagggctgtattgtgactactcagtagacaggcctaggtacgagactggagtgtgtgcataccttgtagctgttgggtgcgagttcaaccaggtacattatcataatggccaagtgtttcagcccaaccccttgttcagctgcctctgtgtgagtggggccattggatgcacacctctgttcataccaaagctggctggcagtcactgctctggagctaaaggtggaaagaagtctgatcagtcaaactgtagcctggaaccattactacagcagctttcaacaagctacaaaacaatgccagcttatagaaatctcccacttatttggaaaaaaaaatgtcttgtgcaagcaacaaaatggactccctgctccagaacatgtgggatgggaatatctaacagggtgaccaatgaaaacagcaactgtgaaatgagaaaagagaaaagactgtgttacattcagccttgcgacagcaatatattaaagacaataaagattcccaaaggaaaaacatgccaacctactttccaactctccaaagctgaaaaatttgtcttttctggatgctcaagtactcagagttacaaacccactttttgtggaatatgcttggataagagatgctgtatccctaataagtctaaaatgattactattcaatttgattgcccaaatgaggggtcatttaaatggaagatgctgtggattacatcttgtgtgtgtcagagaaactgcagagaacctggagatatattttctgagctcaagattctgtaaaaccaagcaaatgggggaaaagttagtcaatcctgtcatataataaaaaaattagtgagt

SEQ ID NO: 200246 - DNA, 2512 bp, Homo sapiens
  Payload ID: 19510
  Gene Name: WNT1 inducible signaling pathway protein 3
  Uniprot ID: O95389
  ENST ID: ENST00000361714
  CDS Start-End: 100-1164
gtggggtttgcagaggagacaggggagctttgtgtacccggagcaatgaacaagcggcgacttctctacccctcagggtggctccacggtcccagcgacatgcaggggctcctcttctccactcttctgcttgctggcctggcacagttctgctgcagggtacagggcactggaccattagatacaacacctgaaggaaggcctggagaagtgtcagatgcacctcagcgtaaacagttttgtcactggccctgcaaatgccctcagcagaagccccgttgccctcctggagtgagcctggtgagagatggctgtggatgctgtaaaatctgtgccaagcaaccaggggaaatctgcaatgaagctgacctctgtgacccacacaaagggctgtattgtgactactcagtagacaggcctaggtacgagactggagtgtgtgcataccttgtagctgttgggtgcgagttcaaccaggtacattatcataatggccaagtgtttcagcccaaccccttgttcagctgcctctgtgtgagtggggccattggatgcacacctctgttcataccaaagctggctggcagtcactgctctggagctaaaggtggaaagaagtctgatcagtcaaactgtagcctggaaccattactacagcagctttcaacaagctacaaaacaatgccagcttatagaaatctcccacttatttggaaaaaaaaatgtcttgtgcaagcaacaaaatggactccctgctccagaacatgtgggatgggaatatctaacagggtgaccaatgaaaacagcaactgtgaaatgagaaaagagaaaagactgtgttacattcagccttgcgacagcaatatattaaagacaataaagattcccaaaggaaaaacatgccaacctactttccaactctccaaagctgaaaaatttgtcttttctggatgctcaagtactcagagttacaaacccactttttgtggaatatgcttggataagagatgctgtatccctaataagtctaaaatgattactattcaatttgattgcccaaatgaggggtcatttaaatggaagatgctgtggattacatcttgtgtgtgtcagagaaactgcagagaacctggagatatattttctgagctcaagattctgtaaaaccaagcaaatgggggaaaagttagtcaatcctgtcatataataaaaaaattagtgagtataaaatggtggcaaatctactttgtttaaaacagtatgaatgcctattctcagatcactacatttaaggcattagaaacttttaaaaagttatcttaaaaatatacataaaatttgaacaacttaaaaattgaactaatttctaaaatatatcctataattatataatacacagacatttgttaccatctaagcattttgtatatgaaaaaattatgcaatttacaagaaaatattttacaaaataatctggaatacttgctaaagctgtataaaaagtatactaaattttaggctgggcgcagtggttcatgtctgtaatcccagcacttcgggaggccaaggtgggcagatcatttgaggtcaggagtttgagaccagcctggccaacatggtgaaaccctgtctgtaattaaaaaaatacaaaaattagccaagtgtggtggcatgcgcctgtaatcccagctactcgggaggctgagtcagaagaattgcttgaacccaggtggtggaggttgcagtgggtcaagattgcaccactgcactggcacggagaagcgagactcctttgggggagaaaaaaacatactcaatttaaaaaatttaatctatatttgacaatgtagcctaaggtgcccattagttgatacatcattatagggcaagtgaaattctagattaattcttgaacagaaataagattaagctgtaaatatatttagacttttcactgcctgatcttgaatatcagtttcttttggaaaggagaaaatgcaacttttctggccactgttaacaactgcaatctaaaattttttacatcaaatattgtaaaaagttaaatttccaagacaaagaccaagaacagtatcattactttgcaaaggaaagaaatataaagaatacaacttaaaattaacctgtggatctgaaatataaaatgttattaaaaataaattaatgttaaggctagaactgaagattatagtaaccggaacaattatagccatttattgcaaagtttggaagatatcaagcttagtaacattctgttcatttgcataaatgtcatgcagaacaataacaagtagcactgttgaaaaatatagacatttattataaaatcaattggtttgataagaaagcaattatttaaaaagtttaatacaaatacatgttaagtgtacaaattaggattcttttgggcaaacaagttgttatctaaagaagaagcaaaacctccttaacagttgtaataaaacctatgcctgaaaagttggtggctatt

SEQ ID NO: 200247 - DNA, 1089 bp, Homo sapiens
  Payload ID: 19510
  Gene Name: WNT1 inducible signaling pathway protein 3
  ENST ID: ENST00000368663
  CDS Start-End: 3-695
acatgcaggggctcctcttctccactcttctgcttgctggcctggcacagttctgctgcagggtacagggcactggaccattagatacaacacctgaaggaaggcctggagaagtgtcagatgcacctcagcgtaaacagttttgtcactggccctgcaaatgccctcagcagaagccccgttgccctcctggagtgagcctggtgagagatggctgtggatgctgtaaaatctgtgccaagcaaccaggggaaatctgcaatgaagctgacctctgtgacccacacaaagggctgtattgtgactactcagtagacaggcctaggtacgagactggagtgtgtgcataccttgtagctgttgggtgcgagttcaaccaggtacattatcataatggccaagtgtttcagcccaaccccttgttcagctgcctctgtgtgagtggggccattggatgcacacctctgttcataccaaagctggctggcagtcactgctctggagctaaaggtggaaagaagtctgatcagtcaaactgtagcctggaaccattactacagcagctttcaacaagctacaaaacaatgccagcttatagaaatctcccacttatttggaaaaaaaatgtcttgtgcaagcaacaaaatggactccctgctccagaacatgtgggatgggaatatctaacagggtgaccaatgaaaacagcaactgtgaaatgagaaaagagaaaagactgtgttacattcagccttgcgacagcaatatattaaagacaataaagattcccaaaggaaaaacatgccaacctactttccaactctccaaagctgaaaaatttgtcttttctggatgctcaagtactcagagttacaaacccactttttgtggaatatgcttggataagagatgctgtatccctaataagtctaaaatgattactattcaatttgattgcccaaatgaggggtcatttaaatggaagatgctgtggattacatcttgtgtgtgtcagagaaactgcagagaacctggagatatattttctgagctcaagattctgtaaaaccaagcaaatgggggaaaagt

SEQ ID NO: 200248 - DNA, 1305 bp, Homo sapiens
  Payload ID: 19510
  Gene Name: WNT1 inducible signaling pathway protein 3
  ENST ID: ENST00000368664
  CDS Start-End: 85-798
tgtgggaggtagagggtgtgtgttcttgtgcagaggagcgtggggtttgcagaggagacaggggagctttgtgtacccggagcaatgaacaagcggcgacttctctacccctcagggtggctccacggtcccagcgacatgcaggggctcctcttctccactcttctgcttgctggcctggcacagttctgctgcagggtacagggcactggaccattagatacaacacctgaaggaaggcctggagaagtgtcagatgcacctcagcgtaaacagttttgtcactggccctgcaaatgccctcagcagaagccccgttgccctcctggagtgagcctggtgagagatggctgtggatgctgtaaaatctgtgccaagcaaccaggggaaatctgcaatgaagctgacctctgtgacccacacaaagggctgtattgtgactactcagtagacaggcctaggtacgagactggagtgtgtgcataccttgtagctgttgggtgcgagttcaaccaggtacattatcataatggccaagtgtttcagcccaaccccttgttcagctgcctctgtgtgagtggggccattggatgcacacctctgttcataccaaagctggctggcagtcactgctctggagctaaaggtggaaagaagtctgatcagtcaaactgtagcctggaaccattactacagcagctttcaacaagctacaaaacaatgccagatgtgtgccaagcttctaatctgcttcctgcattgaggtctttaaactgttgtctaccttccagcttatagaaatctcccacttatttggaaaaaaaaatgtcttgtgcaagcaacaaaatggactccctgctccagaacatgtgggatgggaatatctaacagggtgaccaatgaaaacagcaactgtgaaatgagaaaagagaaaagactgtgttacattcagccttgcgacagcaatatattaaagacaataaagattcccaaaggaaaaacatgccaacctactttccaactctccaaagctgaaaaatttgtcttttctggatgctcaagtactcagagttacaaacccactttttgtggaatatgcttggataagagatgctgtatccctaataagtctaaaatgattactattcaatttgattgcccaaatgaggggtcatttaaatggaagatgctgtggattacatcttgtgtgtgtcagagaaactgcagagaacctggagatatattttctgagctcaagattctgtaaaaccaagcaaatgggggaaaagttagtcaatcctgtca

SEQ ID NO: 200249 - DNA, 2700 bp, Homo sapiens
  Payload ID: 19510
  Gene Name: WNT1 inducible signaling pathway protein 3
  Uniprot ID: O95389
  ENST ID: ENST00000368666
  CDS Start-End: 233-1351
cctcctgagtcccgggaggaaagtgctcgcccattcctgacctgtgacacgctcactgcgaaggcaggttattagaagagtcccatgaaagtaaacagggtattaaaacggatccttaaaaatgaaagtgcaggctgaaagttggtagtgtgggaggtagagggtgtgtgttcttgtgcagaggagcgtggggtttgcagaggagacaggggagctttgtgtacccggagcaatgaacaagcggcgacttctctacccctcagggtggctccacggtcccagcgacatgcaggggctcctcttctccactcttctgcttgctggcctggcacagttctgctgcagggtacagggcactggaccattagatacaacacctgaaggaaggcctggagaagtgtcagatgcacctcagcgtaaacagttttgtcactggccctgcaaatgccctcagcagaagccccgttgccctcctggagtgagcctggtgagagatggctgtggatgctgtaaaatctgtgccaagcaaccaggggaaatctgcaatgaagctgacctctgtgacccacacaaagggctgtattgtgactactcagtagacaggcctaggtacgagactggagtgtgtgcataccttgtagctgttgggtgcgagttcaaccaggtacattatcataatggccaagtgtttcagcccaaccccttgttcagctgcctctgtgtgagtggggccattggatgcacacctctgttcataccaaagctggctggcagtcactgctctggagctaaaggtggaaagaagtctgatcagtcaaactgtagcctggaaccattactacagcagctttcaacaagctacaaaacaatgccagcttatagaaatctcccacttatttggaaaaaaaaatgtcttgtgcaagcaacaaaatggactccctgctccagaacatgtgggatgggaatatctaacagggtgaccaatgaaaacagcaactgtgaaatgagaaaagagaaaagactgtgttacattcagccttgcgacagcaatatattaaagacaataaagattcccaaaggaaaaacatgccaacctactttccaactctccaaagctgaaaaatttgtcttttctggatgctcaagtactcagagttacaaacccactttttgtggaatatgcttggataagagatgctgtatccctaataagtctaaaatgattactattcaatttgattgcccaaatgaggggtcatttaaatggaagatgctgtggattacatcttgtgtgtgtcagagaaactgcagagaacctggagatatattttctgagctcaagattctgtaaaaccaagcaaatgggggaaaagttagtcaatcctgtcatataataaaaaaattagtgagtataaaatggtggcaaatctactttgtttaaaacagtatgaatgcctattctcagatcactacatttaaggcattagaaacttttaaaaagttatcttaaaaatatacataaaatttgaacaacttaaaaattgaactaatttctaaaatatatcctataattatataatacacagacatttgttaccatctaagcattttgtatatgaaaaaattatgcaatttacaagaaaatattttacaaaataatctggaatacttgctaaagctgtataaaaagtatactaaattttaggctgggcgcagtggttcatgtctgtaatcccagcacttcgggaggccaaggtgggcagatcatttgaggtcaggagtttgagaccagcctggccaacatggtgaaaccctgtctgtaattaaaaaaatacaaaaattagccaagtgtggtggcatgcgcctgtaatcccagctactcgggaggctgagtcagaagaattgcttgaacccaggtggtggaggttgcagtgggtcaagattgcaccactgcactggcacggagaagcgagactcctttgggggagaaaaaaacatactcaatttaaaaaatttaatctatatttgacaatgtagcctaaggtgcccattagttgatacatcattatagggcaagtgaaattctagattaattcttgaacagaaataagattaagctgtaaatatatttagacttttcactgcctgatcttgaatatcagtttcttttggaaaggagaaaatgcaacttttctggccactgttaacaactgcaatctaaaattttttacatcaaatattgtaaaaagttaaatttccaagacaaagaccaagaacagtatcattactttgcaaaggaaagaaatataaagaatacaacttaaaattaacctgtggatctgaaatataaaatgttattaaaaataaattaatgttaaggctagaactgaagattatagtaaccggaacaattatagccatttattgcaaagtttggaagatatcaagcttagtaacattctgttcatttgcataaatgtcatgcagaacaataacaagtagcactgttgaaaaatatagacatttattataaaatcaattggtttgataagaaagcaattatttaaaaagtttaatacaaatacatgttaagtgtacaaattaggattcttttgggcaaacaagttgttatctaaagaagaagcaaaacctccttaacagttgtaataaaacctatgcctgaaaagttggtggctatta

SEQ ID NO: 200250 - DNA, 953 bp, Homo sapiens
  Payload ID: 19510
  Gene Name: WNT1 inducible signaling pathway protein 3
  ENST ID: ENST00000409166
  CDS Start-End: 523-915
tgtgggaggtagagggtgtgtgcatgtaagtgtcttcttctggacctgctggaaaagattgagtctagacagaatttttttttcctgcaattgttagcttggagtgatcagcttagtttggctaaatatgagaccttgtagctgttgggtgcgagttcaaccaggtacattatcataatggccaagtgtttcagcccaaccccttgttcagctgcctctgtgtgagtggggccattggatgcacacctctgttcataccaaagctggctggcagtcactgctctggagctaaaggtggaaagaagtctgatcagtcaaactgtagcctggaaccattactacagcagctttcaacaagctacaaaacaatgccagatgtgtgccaagcttctaatctgcttcctgcattgaggtctttaaactgttgtctaccttccagcttatagaaatctcccacttatttggaaaaaaaaatgtcttgtgcaagcaacaaaatggactccctgctccagaacatgtgggatgggaatatctaacagggtgaccaatgaaaacagcaactgtgaaatgagaaaagagaaaagactgtgttacattcagccttgcgacagcaatatattaaagacaataaagattcccaaaggaaaaacatgccaacctactttccaactctccaaagctgaaaaatttgtcttttctggatgctcaagtactcagagttacaaacccactttttgtggaatatgcttggataagagatgctgtatccctaataagtctaaaatgattactattcaatttgattgcccaaatgaggggtcatttaaatggaagatgctgtggattacatcttgtgtgtgtcagagaaactgcagagaacctggagatatattttctgagctcaagattctgtaaaaccaagcaaatgggggaaaagttagtcaatcctgtca

SEQ ID NO: 200251 - DNA, 1305 bp, Homo sapiens
  Payload ID: 19510
  Gene Name: WNT1 inducible signaling pathway protein 3
  ENST ID: ENST00000454589
  CDS Start-End: 111-770
cctgagtcccgggaggaaagtgctcgcccattcctgacctgtgacacgctcactgcgaaggcaggttattagaagagtcccatgaaaggtggctccacggtcccagcgacatgcaggggctcctcttctccactcttctgcttgctggcctggcacagttctgctgcagggtacagggcactggaccattagatacaacacctgaaggaaggcctggagaagtgtcagatgcacctcagcgtaaacagttttgtcactggccctgcaaatgccctcagcagaagccccgttgccctcctggagtgagcctggtgagagatggctgtggatgctgtaaaatctgtgccaagcaaccaggggaaatctgcaatgaagctgacctctgtgacccacacaaagggctgtattgtgactactcagtagacaggcctaggtacgagactggagtgtgtgcataccttgtagctgttgggtgcgagttcaaccaggtacattatcataatggccaagtgtttcagcccaaccccttgttcagctgcctctgtgtgagtggggccattggatgcacacctctgttcataccaaagctggctggcagtcactgctctggagctaaaggtggaaagaagtctgatcagtcaaactgtagcctggaaccattactacagcagctttcaacaagctacaaaacaatgccagatgtgtgccaagcttctaatctgcttcctgcattgaggtctttaaactgttgtctaccttccagcttatagaaatctcccacttatttggaaaaaaaaatgtcttgtgcaagcaacaaaatggactccctgctccagaacatgtgggatgggaatatctaacagggtgaccaatgaaaacagcaactgtgaaatgagaaaagagaaaagactgtgttacattcagccttgcgacagcaatatattaaagacaataaagattcccaaaggaaaaacatgccaacctactttccaactctccaaagctgaaaaatttgtcttttctggatgctcaagtactcagagttacaaacccactttttgtggaatatgcttggataagagatgctgtatccctaataagtctaaaatgattactattcaatttgattgcccaaatgaggggtcatttaaatggaagatgctgtggattacatcttgtgtgtgtcagagaaactgcagagaacctggagatatattttctgagctcaagattctgtaaaaccaagcaaatgggggaaaagttagtcaatcctgtcatataataaaaaaattagtgagtataaaa

SEQ ID NO: 200252 - DNA, 1250 bp, Homo sapiens
  Payload ID: 19510
  Gene Name: WNT1 inducible signaling pathway protein 3
  Uniprot ID: O95389
  ENST ID: ENST00000604763
  CDS Start-End: 120-1184
cctgagtcccgggaggaaagtgctcgcccattcctgacctgtgacacgctcactgcgaaggcaggttattagaagagtcccatgaaagtaaacaggggtggctccacggtcccagcgacatgcaggggctcctcttctccactcttctgcttgctggcctggcacagttctgctgcagggtacagggcactggaccattagatacaacacctgaaggaaggcctggagaagtgtcagatgcacctcagcgtaaacagttttgtcactggccctgcaaatgccctcagcagaagccccgttgccctcctggagtgagcctggtgagagatggctgtggatgctgtaaaatctgtgccaagcaaccaggggaaatctgcaatgaagctgacctctgtgacccacacaaagggctgtattgtgactactcagtagacaggcctaggtacgagactggagtgtgtgcataccttgtagctgttgggtgcgagttcaaccaggtacattatcataatggccaagtgtttcagcccaaccccttgttcagctgcctctgtgtgagtggggccattggatgcacacctctgttcataccaaagctggctggcagtcactgctctggagctaaaggtggaaagaagtctgatcagtcaaactgtagcctggaaccattactacagcagctttcaacaagctacaaaacaatgccagcttatagaaatctcccacttatttggaaaaaaaaatgtcttgtgcaagcaacaaaatggactccctgctccagaacatgtgggatgggaatatctaacagggtgaccaatgaaaacagcaactgtgaaatgagaaaagagaaaagactgtgttacattcagccttgcgacagcaatatattaaagacaataaagattcccaaaggaaaaacatgccaacctactttccaactctccaaagctgaaaaatttgtcttttctggatgctcaagtactcagagttacaaacccactttttgtggaatatgcttggataagagatgctgtatccctaataagtctaaaatgattactattcaatttgattgcccaaatgaggggtcatttaaatggaagatgctgtggattacatcttgtgtgtgtcagagaaactgcagagaacctggagatatattttctgagctcaagattctgtaaaaccaagcaaatgggggaaaagttagtcaatcctgtcatataataaaaaaattagtgagtataaaa

SEQ ID NO: 200253 - DNA, 2748 bp, Homo sapiens
  Payload ID: 19511
  Gene Name: wntless Wnt ligand secretion mediator
  Uniprot ID: Q5T9L3
  ENST ID: ENST00000262348
  CDS Start-End: 255-1880
ctttaagcgtccacaggcggcggagcggccacaatcacagctccgggcattgggggaacccgagccggctgcgccgggggaatccgtgcgggcgccttccgtcccggtcccatcctcgccgcgctccagcacctctgaagttttgcagcgcccagaaaggaggcgaggaaggagggagtgtgtgagaggagggagcaaaaagctcaccctaaaacatttatttcaaggagaaaagaaaaagggggggcgcaaaaatggctggggcaattatagaaaacatgagcaccaagaagctgtgcattgttggtgggattctgctcgtgttccaaatcatcgcctttctggtgggaggcttgattgctccagggcccacaacggcagtgtcctacatgtcggtgaaatgtgtggatgcccgtaagaaccatcacaagacaaaatggttcgtgccttggggacccaatcattgtgacaagatccgagacattgaagaggcaattccaagggaaattgaagccaatgacatcgtgttttctgttcacattcccctcccccacatggagatgagtccttggttccaattcatgctgtttatcctgcagctggacattgccttcaagctaaacaaccaaatcagagaaaatgcagaagtctccatggacgtttccctggcttaccgtgatgacgcgtttgctgagtggactgaaatggcccatgaaagagtaccacggaaactcaaatgcaccttcacatctcccaagactccagagcatgagggccgttactatgaatgtgatgtccttcctttcatggaaattgggtctgtggcccataagttttaccttttaaacatccggctgcctgtgaatgagaagaagaaaatcaatgtgggaattggggagataaaggatatccggttggtggggatccaccaaaatggaggcttcaccaaggtgtggtttgccatgaagaccttccttacgcccagcatcttcatcattatggtgtggtattggaggaggatcaccatgatgtcccgacccccagtgcttctggaaaaagtcatctttgcccttgggatttccatgacctttatcaatatcccagtggaatggttttccatcgggtttgactggacctggatgctgctgtttggtgacatccgacagggcatcttctatgcgatgcttctgtccttctggatcatcttctgtggcgagcacatgatggatcagcacgagcggaaccacatcgcagggtattggaagcaagtcggacccattgccgttggctccttctgcctcttcatatttgacatgtgtgagagaggggtacaactcacgaatcccttctacagtatctggactacagacattggaacagagctggccatggccttcatcatcgtggctggaatctgcctctgcctctacttcctgtttctatgcttcatggtatttcaggtgtttcggaacatcagtgggaagcagtccagcctgccagctatgagcaaagtccggcggctacactatgaggggctaatttttaggttcaagttcctcatgcttatcaccttggcctgcgctgccatgactgtcatcttcttcatcgttagtcaggtaacggaaggccattggaaatggggcggcgtcacagtccaagtgaacagtgcctttttcacaggcatctatgggatgtggaatctgtatgtctttgctctgatgttcttgtatgcaccatcccataaaaactatggagaagaccagtccaatggcgatctgggtgtccatagtggggaagaactccagctcaccaccactatcacccatgtggacggacccactgagatctacaagttgacccgcaaggaggcccaggagtaggaggctgcagcgcccggctgggacggtctctccataccccagcccctctaactagagtggggagcatgccagagagagctcaatgtacaaatgaatgcctcatggctcttagctgtggtttcttggaccagcggcatggacatttgtcagtttgccttctgacggtagcttttggaggaagattcctgcagccactaatgcattgtgtatgataacaaaaactctggtatgacacattttctgtgatcattgttaattagtgacatagtaacatctgtagcagctggttagtaaacctcatgtgggggtggggtgggggtgtattccttgggggatggtttgggccgaatggggagtggaatatttgacatttttcctgttttaaattctaggatagattttaacatcctttgcggtcccagtccaaggtaggctggtgtcatagtcttctcactcctaatccatgaccactgtttttttcctatttatatcaccaggtagcccactgagttaatatttaagttgtcaatagataagtgtccctgttttgtggcataatataactgaatttcatgagaagatttattccaccaggggtatttcagctttgaaaccaaatctgtgtatctaatactaaccaatctgttggatgtgggttttaaaaaatgtttgctaaactacccaagtaagatttactgtattaaatggccttcgggtctgaaaagcttttttaacttcttgcttaaaatgcgttttattttgataagatacttcaaatagcctccaaaagtgtagatccaatcatttaaataaacctgtatgtatatgcatatgtgtacatgcatatcccctcctgctaaaactcata

SEQ ID NO: 200254 - DNA, 2037 bp, Homo sapiens
  Payload ID: 19511
  Gene Name: wntless Wnt ligand secretion mediator
  Uniprot ID: Q5T9L3
  ENST ID: ENST00000354777
  CDS Start-End: 247-1878
gtccacaggcggcggagcggccacaatcacagctccgggcattgggggaacccgagccggctgcgccgggggaatccgtgcgggcgccttccgtcccggtcccatcctcgccgcgctccagcacctctgaagttttgcagcgcccagaaaggaggcgaggaaggagggagtgtgtgagaggagggagcaaaaagctcaccctaaaacatttatttcaaggagaaaagaaaaagggggggcgcaaaaatggctggggcaattatagaaaacatgagcaccaagaagctgtgcattgttggtgggattctgctcgtgttccaaatcatcgcctttctggtgggaggcttgattgggcccacaacggcagtgtcctacatgtcggtgaaatgtgtggatgcccgtaagaaccatcacaagacaaaatggttcgtgccttggggacccaatcattgtgacaagatccgagacattgaagaggcaattccaagggaaattgaagccaatgacatcgtgttttctgttcacattcccctcccccacatggagatgagtccttggttccaattcatgctgtttatcctgcagctggacattgccttcaagctaaacaaccaaatcagagaaaatgcagaagtctccatggacgtttccctggcttaccgtgatgacgcgtttgctgagtggactgaaatggcccatgaaagagtaccacggaaactcaaatgcaccttcacatctcccaagactccagagcatgagggccgttactatgaatgtgatgtccttcctttcatggaaattgggtctgtggcccataagttttaccttttaaacatccggctgcctgtgaatgagaagaagaaaatcaatgtgggaattggggagataaaggatatccggttggtggggatccaccaaaatggaggcttcaccaaggtgtggtttgccatgaagaccttccttacgcccagcatcttcatcattatggtgtggtattggaggaggatcaccatgatgtcccgacccccagtgcttctggaaaaagtcatctttgcccttgggatttccatgacctttatcaatatcccagtggaatggttttccatcgggtttgactggacctggatgctgctgtttggtgacatccgacagggcatcttctatgcgatgcttctgtccttctggatcatcttctgtggcgagcacatgatggatcagcacgagcggaaccacatcgcagggtattggaagcaagtcggacccattgccgttggctccttctgcctcttcatatttgacatgtgtgagagaggggtacaactcacgaatcccttctacagtatctggactacagacattggaacagagctggccatggccttcatcatcgtggctggaatctgcctctgcctctacttcctgtttctatgcttcatggtatttcaggtgtttcggaacatcagtgggaagcagtccagcctgccagctatgagcaaagtccggcggctacactatgaggggctaatttttaggttcaagttcctcatgcttatcaccttggcctgcgctgccatgactgtcatcttcttcatcgttagtcaggtaacggaaggccattggaaatggggcggcgtcacagtccaagtgaacagtgcctttttcacaggcatctatgggatgtggaatctgtatgtctttgctctgatgttcttgtatgcaccatcccataaaaactatggagaagaccagtccaatggaatgcaactcccatgtaaatcgagggaagattgtgctttgtttgtttcggaactttatcaagaattgttcagcgcttcgaaatattccttcatcaatgacaacgcagcttctggtatttgagtcaacaaggcaacacatgtttatcagctttgcatttgcagttgtcacagtcacattgattgtacttgtatacgcacacaaatacactcatttagcctttatctcaaaatgttaaatataaggaaaaaagcgtcaacaataaatattctttgagtattg

SEQ ID NO: 200255 - DNA, 700 bp, Homo sapiens
  Payload ID: 19511
  Gene Name: wntless Wnt ligand secretion mediator
  ENST ID: ENST00000370971
  CDS Start-End: 225-608
acaatcacagctccgggcattgggggaacccgagccggctgcgccgggggaatccgtgcgggcgccttccgtcccggtcccatcctcgccgcgctccagcacctctgaagttttgcagcgcccagaaaggaggcgaggaaggagggagtgtgtgagaggagggagcaaaaagctcaccctaaaacatttatttcaaggagaaaagaaaaagggggggcgcaaaaatggctggggcaattatagaaaacatgagcaccaagaagctgtgcattgttggtgggattctgctcgtgttccaaatcatcgcctttctggtgggaggcttgattgctccagggcccacaacggcagtgtcctacatgtcggtgaaatgtgtggatgcccgtaagaaccatcacaagacaaaatggttcgtgccttggggacccaatcattgtgacaagatccgagacattgaagaggcaattccaagggaaattgaagccaatgacatcgtgttttctgttcacattcccctcccccacatggagatgagtccttggttccaattcatgctgtttatcctgcagctggacattgccttcaagctaaacaaccaaatcagttaagtgtactctcctctcatccctttcttccctttgagcattgccctctttgggttctttttgagccaattctaataaaagtaaaaatggtaata

SEQ ID NO: 200256 - DNA, 572 bp, Homo sapiens
  Payload ID: 19511
  Gene Name: wntless Wnt ligand secretion mediator
  ENST ID: ENST00000370973
  CDS Start-End: 206-572
acaatcacagctccgggcattgggggaacccgagccggctgcgccgggggaatccgtgcgggcgccttccgtcccggtcccatcctcgccgcgctccagcacctctgaagttttgcagcgcccagaaaggaggcgaggaaggagggagtgtctggacattgccttcaagctaaacaaccaaatcagagaaaatgcagaagtctccatggacgtttccctggcttaccgtgatgacgcgtttgctgagtggactgaaatggcccatgaaagagtaccacggaaactcaaatgcaccttcacatctcccaagactccagagcatgagggccgttactatgaatgtgatgtccttcctttcatggaaattgggtctgtggcccataagttttaccttttaaacatccggctgcctgtgaatgagaagaagaaaatcaatgtgggaattggggagataaaggatatccggttggtggggatccaccaaaatggaggcttcaccaaggtgtggtttgccatgaagaccttccttacgcccagcatcttcatcattatggtgtggtattggaggagga

SEQ ID NO: 200257 - DNA, 2332 bp, Homo sapiens
  Payload ID: 19511
  Gene Name: wntless Wnt ligand secretion mediator
  Uniprot ID: Q5T9L3
  ENST ID: ENST00000370976
  CDS Start-End: 246-1598
tccacaggcggcggagcggccacaatcacagctccgggcattgggggaacccgagccggctgcgccgggggaatccgtgcgggcgccttccgtcccggtcccatcctcgccgcgctccagcacctctgaagttttgcagcgcccagaaaggaggcgaggaaggagggagtgtgtgagaggagggagcaaaaagctcaccctaaaacatttatttcaaggagaaaagaaaaagggggggcgcaaaaatggctggggcaattatagaaaacatgagcaccaagaagctgtgcattgttggtgggattctgctcgtgttccaaatcatcgcctttctggtgggaggcttgattggagaaaatgcagaagtctccatggacgtttccctggcttaccgtgatgacgcgtttgctgagtggactgaaatggcccatgaaagagtaccacggaaactcaaatgcaccttcacatctcccaagactccagagcatgagggccgttactatgaatgtgatgtccttcctttcatggaaattgggtctgtggcccataagttttaccttttaaacatccggctgcctgtgaatgagaagaagaaaatcaatgtgggaattggggagataaaggatatccggttggtggggatccaccaaaatggaggcttcaccaaggtgtggtttgccatgaagaccttccttacgcccagcatcttcatcattatggtgtggtattggaggaggatcaccatgatgtcccgacccccagtgcttctggaaaaagtcatctttgcccttgggatttccatgacctttatcaatatcccagtggaatggttttccatcgggtttgactggacctggatgctgctgtttggtgacatccgacagggcatcttctatgcgatgcttctgtccttctggatcatcttctgtggcgagcacatgatggatcagcacgagcggaaccacatcgcagggtattggaagcaagtcggacccattgccgttggctccttctgcctcttcatatttgacatgtgtgagagaggggtacaactcacgaatcccttctacagtatctggactacagacattggaacagagctggccatggccttcatcatcgtggctggaatctgcctctgcctctacttcctgtttctatgcttcatggtatttcaggtgtttcggaacatcagtgggaagcagtccagcctgccagctatgagcaaagtccggcggctacactatgaggggctaatttttaggttcaagttcctcatgcttatcaccttggcctgcgctgccatgactgtcatcttcttcatcgttagtcaggtaacggaaggccattggaaatggggcggcgtcacagtccaagtgaacagtgcctttttcacaggcatctatgggatgtggaatctgtatgtctttgctctgatgttcttgtatgcaccatcccataaaaactatggagaagaccagtccaatggcgatctgggtgtccatagtggggaagaactccagctcaccaccactatcacccatgtggacggacccactgagatctacaagttgacccgcaaggaggcccaggagtaggaggctgcagcgcccggctgggacggtctctccataccccagcccctctaactagagtggggagcatgccagagagagctcaatgtacaaatgaatgcctcatggctcttagctgtggtttcttggaccagcggcatggacatttgtcagtttgccttctgacggtagcttttggaggaagattcctgcagccactaatgcattgtgtatgataacaaaaactctggtatgacacattttctgtgatcattgttaattagtgacatagtaacatctgtagcagctggttagtaaacctcatgtgggggtggggtgggggtgtattccttgggggatggtttgggccgaatggggagtggaatatttgacatttttcctgttttaaattctaggatagattttaacatcctttgcggtcccagtccaaggtaggctggtgtcatagtcttctcactcctaatccatgaccactgtttttttcctatttatatcaccaggtagcccactgagttaatatttaagttgtcaatagataagtgtccctgttttgtggcataatataactgaatttcatgagaagatttattccaccaggggtatttcagctttgaaaccaaatctgtgtatctaatactaaccaatctgttggatgtgggttttaaaaaatgtttgctaaactacccaagtaagatttactgtattaaatggccttcgggtctgaaaagcttttttaa

SEQ ID NO: 200258 - DNA, 600 bp, Homo sapiens
  Payload ID: 19511
  Gene Name: wntless Wnt ligand secretion mediator
  ENST ID: ENST00000534713
  CDS Start-End: 1-600
aaaacatgagcaccaagaagctgtgcattgttggtgggattctgctcgtgttccaaatcatcgcctttctggtgggaggcttgattggagaaaatgcagaagtctccatggacgtttccctggcttaccgtgatgacgcgtttgctgagtggactgaaatggcccatgaaagagtaccacggaaactcaaatgcaccttcacatctcccaagactccagagcatgagggccgttactatgaatgtgatgtccttcctttcatggaaattgggtctgtggcccataagttttaccttttaaacatccggctgcctgtgaatgagaagaagaaaatcaatgtgggaattggggagataaaggatatccggttggtggggatccaccaaaatggaggcttcaccaaggtgtggtttgccatgaagaccttccttacgcccagcatcttcatcattatggtgtggtattggaggaggatcaccatgatgtcccgacccccagtgcttctggaaaaagtcatctttgcccttgggatttccatgacctttatcaatatcccagtggaatggttttccatcgggtttgactggacctggatgctgc

SEQ ID NO: 200259 - DNA, 1056 bp, Homo sapiens
  Payload ID: 19511
  Gene Name: wntless Wnt ligand secretion mediator
  ENST ID: ENST00000530486
  CDS Start-End: 389-1056
agaaagaagtcgagctgagactttattccgcatctctgtgttttgacttaggcatctattgggtccttttaaaaaaaattctcctcctctttcctaaagagagttctagcagttgggggtggggtggggaccatttcctaaagtcaacgcgtaagttaaaggtctgcaaggcggtccaccggtgatttaaatctcgcacttcggaaaccagaaaaggaaacctgtgagaagctgggcagggggaacccgcttaacatcaacagcaacccctaaatggcatcagaccttggagagacaggttgcaggccagactcgggagccaggcgccagcacccgccagagctctgagccccgaactgctccagggcccacaacggcagtgtcctacatgtcggtgaaatgtgtggatgcccgtaagaaccatcacaagacaaaatggttcgtgccttggggacccaatcattgtgacaagatccgagacattgaagaggcaattccaagggaaattgaagccaatgacatcgtgttttctgttcacattcccctcccccacatggagatgagtccttggttccaattcatgctgtttatcctgcagctggacattgccttcaagctaaacaaccaaatcagagaaaatgcagaagtctccatggacgtttccctggcttaccgtgatgacgcgtttgctgagtggactgaaatggcccatgaaagagtaccacggaaactcaaatgcaccttcacatctcccaagactccagagcatgagggccgttactatgaatgtgatgtccttcctttcatggaaattgggtctgtggcccataagttttaccttttaaacatccggctgcctgtgaatgagaagaagaaaatcaatgtgggaattggggagataaaggatatccggttggtggggatccaccaaaatggaggcttcaccaaggtgtggtttgccatgaagaccttccttacgcccagcatcttcatcattatggtgtggtattggaggaggatcaccatgatgtcccgacccccagtgcttctggaaaa

SEQ ID NO: 200260 - DNA, 779 bp, Homo sapiens
  Payload ID: 19511
  Gene Name: wntless Wnt ligand secretion mediator
  ENST ID: ENST00000491076
  CDS Start-End: 223-339
aatcacagctccgggcattgggggaacccgagccggctgcgccgggggaatccgtgcgggcgccttccgtcccggtcccatcctcgccgcgctccagcacctctgaagttttgcagcgcccagaaaggaggcgaggaaggagggagtgtgtgagaggagggagcaaaaagctcaccctaaaacatttatttcaaggagaaaagaaaaagggggggcgcaaaaatggctggggcaattatagaaaacatgagcaccaagaagctgtgcattgttggtgggattctgctcgtgttccaaatcatcgcctttctggtgggaggcttgattgcatacccataaatgagactattccaaacataaactctccagggcccacaacggcagtgtcctacatgtcggtgaaatgtgtggatgcccgtaagaaccatcacaagacaaaatggttcgtgccttggggacccaatcattgtgacaagatccgagacattgaagaggcaattccaagggaaattgaagccaatgacatcgtgttttctgttcacattcccctcccccacatggagatgagtccttggttccaattcatgctgtttatcctgcagctggacattgccttcaagctaaacaaccaaatcagagaaaatgcagaagtctccatggacgtttccctggcttaccgtgatgacgcgtttgctgagtggactgaaatggcccatgaaagagtaccacggaaactcaaatgcaccttcacatctcccaagactccagagcatgagggc

SEQ ID NO: 200261 - DNA, 524 bp, Homo sapiens
  Payload ID: 19511
  Gene Name: wntless Wnt ligand secretion mediator
  ENST ID: ENST00000533537
  CDS Start-End: 121-524
ggtcgtctttgctaggggctgagggtttgcaatttggggtcccgaccttcgcgccctctgctttcccgccgcactccaccccacgctctgccgtggacaggagaaaatgcagaagtctccatggacgtttccctggcttaccgtgatgacgcgtttgctgagtggactgaaatggcccatgaaagagtaccacggaaactcaaatgcaccttcacatctcccaagactccagagcatgagggccgttactatgaatgtgatgtccttcctttcatggaaattgggtctgtggcccataagttttaccttttaaacatccggctgcctgtgaatgagaagaagaaaatcaatgtgggaattggggagataaaggatatccggttggtggggatccaccaaaatggaggcttcaccaaggtgtggtttgccatgaagaccttccttacgcccagcatcttcatcattatggtgtggtattggaggaggatcaccatgatgtcccgacccccagtgcttctggaaaa

SEQ ID NO: 200262 - DNA, 570 bp, Homo sapiens
  Payload ID: 19511
  Gene Name: wntless Wnt ligand secretion mediator
  ENST ID: ENST00000527864
  CDS Start-End: 1-458
ggttcccttccaatcagctccgggagggcaacgtaatcgactttattaggaacaacagaagagtcggggaactgtgcccggcgcaaacccggagctctgttacaaggctgagatacttgcacgctccagggcccacaacggcagtgtcctacatgtcggtgaaatgtgtggatgcccgtaagaaccatcacaagacaaaatggttcgtgccttggggacccaatcattgtgacaagatccgagacattgaagaggcaattccaagggaaattgaagccaatgacatcgtgttttctgttcacattcccctcccccacatggagatgagtccttggttccaattcatgctgtttatcctgcagctggacattgccttcaagctaaacaaccaaatcacaatgaacaggacttcagagaagagtttgggagtgtggcaaacaagatcctattacacatgatggcttcctgcttatcagagattcacctgtaacaatattacttcatatgagaaaatgcagaagtctccatggacgtttccctggcttaccgtgatgacgcgtttgctgagtg

SEQ ID NO: 200263 - DNA, 555 bp, Homo sapiens
  Payload ID: 19511
  Gene Name: wntless Wnt ligand secretion mediator
  ENST ID: ENST00000471243
  CDS Start-End: 98-555
aacgaacagtggtctgatttggctggagagcaagtttcctcaaggggcgccgtggggaatttagctggctccagggcccacaacggcagtgtcctacatgtcggtgaaatgtgtggatgcccgtaagaaccatcacaagacaaaatggttcgtgccttggggacccaatcattgtgacaagatccgagacattgaagaggcaattccaagggaaattgaagccaatgacatcgtgttttctgttcacattcccctcccccacatggagatgagtccttggttccaattcatgctgtttatcctgcagctggacattgccttcaagctaaacaaccaaatcagagaaaatgcagaagtctccatggacgtttccctggcttaccgtgatgacgcgtttgctgagtggactgaaatggcccatgaaagagtaccacggaaactcaaatgcaccttcacatctcccaagactccagagcatgagggccgttactatgaatgtgatgtccttcctttcatggaaattgggtctgtggcccataagttttaccttttaaa

SEQ ID NO: 200264 - DNA, 8050 bp, Homo sapiens
  Payload ID: 19512
  Gene Name: Wolf-Hirschhorn syndrome candidate 1
  Uniprot ID: O96028
  ENST ID: ENST00000312087
  CDS Start-End: 432-2375
gcatgagccaccgtgcctgtcctagaaccactggtaactcttaactgagacaagatttcgccatgttgcccaggctggtctcgaacttctgagctcaagcgatctacctgcctcgtcctcccaaagtgttggaattgcaggtgtgagccactgcacccggcccttgcctcatgtttgaatgataatttacctgggcataaaattctggacacttgtggtggcacgagctgtctgcttttctgtggagactgcgggttgcagacaccagcagccccctattgctgcacgtcaggtgtcctccacctcagtactgtggacatctcgggccgcatagccctgttgcgcgggcatcctgtgcgttgcaggagatgcagcagcatccatgaccgcaacccatcagagtgttctaagaacggaagcatctgggctggatggaatttagcatcaagcagagtcccctttctgttcagagtgttgtaaagtgcataaagatgaagcaggcaccagaaatcctcggcagtgccaacgggaagactccgagctgcgaggtgaaccgcgagtgttctgtgttcctcagcaaagcccagctctccagtagcctgcaggagggggtcatgcagaagtttaacggccacgacgccctgccctttattccagccgacaagctgaaagatcttacttcccgggtgtttaatggagaacccggcgcacacgatgccaaactgcgttttgagtcccaggaaatgaaagggattgggacaccccctaacactacccctatcaaaaatggctctccagaaattaagctgaaaatcaccaaaacatacatgaatgggaagcctctctttgaatcttccatttgtggtgacagtgctgctgatgtgtctcagtcagaagaaaatggacaaaaaccagaaaacaaggcgagaaggaacaggaagaggagcataaaatatgactccttgctggagcagggccttgtcgaagcagctcttgtgtctaagatctcaagtccttcagataaaaagattccagctaagaaagagtcttgtccaaacactggaagagacaaagaccacctgttgaaatacaacgttggtgatttggtgtggtccaaagtgtcgggttacccttggtggccttgcatggtttctgcagatccactccttcacagctataccaaacttaaaggtcagaaaaagagtgcacgccagtatcacgtacagttctttggtgacgccccagaaagagcttggatatttgagaagagcctcgtagcttttgaaggagaaggacagtttgaaaaattatgccaggaaagtgccaagcaggcacccacgaaagctgagaaaattaagctattgaaaccaatttcagggaaattgagggcccagtgggaaatgggcattgttcaagcagaagaagctgcaagcatgtcagtggaggagcggaaagccaagttcacctttctctatgtgggggaccagcttcatctcaaccctcaagtagccaaggaggctggcattgctgcagagtctttgggagaaatggcagaatcctcaggagtcagtgaagaagctgctgaaaaccccaagtctgtgagagaagagtgcattcccatgaagagaaggcggagggccaaactgtgtagctctgcagagaccctggagagtcaccccgacatagggaagagtactcctcaaaagacggcagaggctgaccccagaagaggagtagggtctcctcctgggaggaagaagaccacagtctccatgccacgaagcaggaagggagatgcagcatcccagtttttggtcttctgtcaaaaacacagggatgaggtggtagctgagcacccagatgcttcaggtgaggagattgaagagctgctcaggtcacagtggagtctgctgagtgagaagcagagagcacgctacaacaccaagtttgccctggtggcccctgtccaggctgaagaagactctggtaatgtaaatgggaaaaaaagaaaccacacaaagaggatacaggaccctacagaagatgctgaagctgaggacacacccaggaaaagactcaggacggacaagcacagtcttcggaagagagacacaatcactgacaaaacggccagaacaagctcttacaaggccatggaggcagcctcctcgctcaagagccaggcagcaacgaaaaatctgtctgatgcatgtaaaccactgaagaagcgaaatcgggcttccacggcagcatcttcagctcttgggtttagcaaaagttcatctccttctgcatccttaactgagaatgagcttttgtgggagcccacaccagtcaagttggatttgaacccagctgctctgtactgcacttagaatgatgtaatattccaggatgctgctgcaggtggcgtatcatcgtacacactcagtgacatttctatcacaatcattttatggaagatgtgtgataatctgtttttactggtattaataaacacatacaatgaagaaaacagataacaaattttaagaccaaggtctcggacagcccgggagacgagccctcggagtccccatacgaaagtgcagacgaaacacaaactgaagtatctgtctcatccaaaaagtctgagcgaggagtgactgccaaaaaggagtatgtgtgccagctgtgtgagaagccgggcagcctcctgctctgtgaaggaccctgctgcggagctttccacctcgcctgccttgggctttcccggaggccagaagggaggttcacctgcagcgagtgtgcctcagggattcactcatgtttcgtgtgtaaagagagcaagacagatgttaagcgctgtgtggtaactcagtgtggaaaattttaccatgaggcttgtgtgaaaaaataccctctgactgtatttgagagccgaggtttccgctgccccctccacagctgtgtgagctgccatgcttccaacccttcaaacccaaggccgtcaaaaggtaaaatgatgcggtgtgtccgctgccccgttgcctatcacagcggggatgcttgtctggcagcaggatgctcagtgatcgcctccaacagcatcatctgcactgcccacttcactgctcggaaggggaagcgacaccacgcccacgtcaacgtgagctggtgcttcgtgtgctccaaaggggggagccttctgtgctgtgagtcctgcccagcggccttccaccctgactgcctgaacatcgagatgcctgacggcagctggttctgcaatgactgcagggctgggaagaagctgcacttccaggatatcatttgggtgaaacttgggaactacagatggtggccggcagaagtttgccatcccaaaaatgttcccccaaatattcagaaaatgaagcacgagattggagaattccctgtgtttttctttgggtctaaagattattactggacgcatcaggcgcgagtgttcccgtacatggagggggaccggggcagccgctaccagggggtcagagggatcggaagagtcttcaaaaacgcactgcaagaagctgaagctcgttttcgtgaaattaagcttcagagggaagcccgagaaacacaggagagcgagcgcaagcccccaccatacaagcacatcaaggtgaataagccttacgggaaagtccagatctacacagcggatatttcagaaatccctaagtgcaactgcaagcccacagatgagaatccttgtggctttgattcggagtgtctgaacaggatgctgatgtttgagtgccacccgcaggtgtgtcccgcgggcgagttctgccagaaccagtgcttcaccaagcgccagtacccagagaccaagatcatcaagacagatggcaaagggtggggcctggtcgccaagagggacatcagaaagggagaatttgttaacgagtacgttggggagctgatcgacgaggaggagtgcatggcgagaatcaagcacgcacacgagaacgacatcacccacttctacatgctcactatagacaaggaccgtataatagacgctggccccaaaggaaactactctcgatttatgaatcacagctgccagcccaactgtgagaccctcaagtggacagtgaatggggacactcgtgtgggcctgtttgccgtctgtgacattcctgcagggacggagctgacttttaactacaacctcgattgtctgggcaatgaaaaaacggtctgccggtgtggagcctccaattgcagtggattcctcggggatagaccaaagacctcgacgaccctttcatcagaggaaaagggcaaaaagaccaagaagaaaacgaggcggcgcagagcaaaaggggaagggaagaggcagtcagaggacgagtgcttccgctgcggtgatggcgggcagctggtgctgtgtgaccgcaagttctgcaccaaggcctaccacctgtcctgcctgggccttggcaagcggcccttcgggaagtgggaatgtccttggcatcattgtgacgtgtgtggcaaaccttcgacttcattttgccacctctgccccaattcgttctgtaaggagcaccaggacgggacagccttcagctgcaccccggacgggcggtcctactgctgtgagcatgacttaggggcggcatcggtcagaagcaccaagactgagaagccccccccagagccagggaagccgaaggggaagaggcggcggcggaggggctggcggagagtcacagagggcaaatagcgccaggcggccgcttggccggatccaggggcggtgcagggcggccggccctgcctgcgggagagggcgagcatgaactggcccggaggacccagctcgagccgccaggacacagacgtacaggcctcctcgggagggagcgcctccccaccactgagccatcctcagcagcgtccgctgcgtctgcactgatgaccgtctgagcccagctcagcgttcctggacaaacagcctcactcctcagcgttaccgccacacttgaatttctccgaatgtcaaggttccctcccactctatttttttaggttaaagttaattggcatatggaatgttttaatctcctctgaaatgtgtagcgtaggcttttcccaagggtcgctagaaactcgtcttcgcgttgccccctttctggctctcagcgccgtcgccactcgggagaggctgggtgaggcccgtgtgaggactgaccctggattcctcgaaactgccattgtgatcattactctgctctttggaaatggctgtatcatttttttgtactaatgtgaattgttcctcagaaacgcttcttttccatcctagtgagaagctggccctgcaggtggtggcagcaatggtgttgtaagatttcctcccgtagttttttctcctcatggatttgaatgaaatgccaataacacgtccactttcaacgtgtagtttacgcggagcactttcgaggcctggccgggttgggcctacttctcacctgggcctatcttctgaactcgctaggttcttatcaacatttgggggataactttgtatatttttttcatttggcttttctttaccagtttctgatttttattctcaatatatttttgctaaacctatttcacaaatcaccaccgactgaagtgtgtgtttactgatgcggccctgagctccatggcgaaaggagtgactttgcagggcgtgagaccgcagtctgcttagagcacaggaagtgacaacttagggagccccgtagggcgctgcaggccccggggaccccagcacgtgggtctaaagagagacggagtctagctctcctgccacccagagtggcttccatctcagcactctgtgggtctggtgatggaagatgcagtctctgctgatcacatgtgccctctgccagggcacctactgagaggtgcggtcctgggggtggaggcctgcctggcaggtgtgcgtgcctcgtacgtgtgttatgggcactggtctaggccaggtatgacacccactctcctgtgagatttcactttagtttttaaaaggtccagttctacagagtgagacctatctatctgagtactacatatgttttaagacttggttctttttttgagggatccttgaccctgggaagtctggagcaccctgagaagggggcaccatgtgtgcctttgcccacgtgtcctgaggggctgcttgtctgggagggagggagagaacattcagcagcaggtgcttttttatggccttttcttaaaataacctaagggggacacatccatcttgcagagaagtttacagaactccccttgaaaactgctgctgaggctcctgttaaattttctgtggcatcttttatgccttggtaaaaactgcagtgtctttggacctgagagtggctactccgtggttttgtgacctgtaagcgtggggttcaggggtgtgtggccctgcagggtcccacgcctccctgagcactgactggaagtttcactggctggtggctgtcccttctcccatcagggtccccagcaaagttaactacacagaggacccaggggaaacgagctgtgtagccactgacttgctcgcgcggccgtggcctctgaggggcactcgccggttaagacagggtgggagtagtgctttccagttcagactctaacttctcccaaagtgtcctaagaaaatactggatcggctcatagatttatgctccttatgatgccctaacttggaaggttgttctagggacaggccgggcagtgtccccacacacaccttagagtcgaaggccccagggccccgctgtcacttgcccaaaagatcccttccggcaggtaagggactaccaatgcttacgtcaaaacagcagaatcggctttgcagtgcactttggggagcagatattaacttatttttgtgttggacagtagtgaaatcttgtgatttttaatcgctttgataatacttccaaattttatgatttttctgaaggaaataatgcaaacattttaaatatgtttctccccctttccaaaaactgttaaactaatgagcaagtaacactaactttgaatgtctctacaatacccgttgataactcagtggagccaggctttggggtagcggccctgagcttgcagggtttctcgccactggggctgaccacgcccccagctgtgaccgtgggtgtggctggctctcggccctgcccagctttgttctgaggacgtggtgacttcctgaacatcagcttcaatcctccatcattaatgtgaagcaaaacacaaaaaccgccccaatccctcaggattccttggcatccgaaaccagcatctgcacctaaacccatacccacccgtgtgcgcccacagggggatgtgtccgaatgggcagcttaaaatgtggtcacctgtgggggaaactcttcaggcacctgaagtgagaacccagctgtccgtcctcaggccggcctttcttccggcgacacccgtccatggctggctgggtccccttcgcagtgtttgtctgtcttgacatctaaaccccggcgtgtgcagtgcccatcttccaggactaccttattttccagaattaaacctgttttataattcaagttaatgcaaatgactgtcagttgccaaatatcttgatcctatgagtgtagttgatgactgtttgttagtcagtagagtaaaatgctgtgtccacggggtgtcacagcctcaccataccctgttgaggtgtgaaatgccccgtcagaaattaaatacaaacttaaatgtgcctattggtgtctaaacttcatacaatgtaaggtcagattccttttaggaatactgggtgctgtcaccaggtttgatagttagacttaaaaacttgaaattcactttttggggggagggatatactgaaatagagagttgagacttgccagttgggggaaaatagcatttaaaatggaaagctgtgtttggaaaattgtgtatgagtatttttgtattaaaaacattttaaaggcttttttcttaa

SEQ ID NO: 200265 - DNA, 7980 bp, Homo sapiens
  Payload ID: 19512
  Gene Name: Wolf-Hirschhorn syndrome candidate 1
  Uniprot ID: O96028
  ENST ID: ENST00000353275
  CDS Start-End: 495-2438
tggtcttgaactcctgaccttgtgatccgctcgcctcagcctcccaaagtgctgggattacaggcatgagccaccgtgcctgtcctagaaccactggtaactcttaactgagacaagatttcgccatgttgcccaggctggtctcgaacttctgagctcaagcgatctacctgcctcgtcctcccaaagtgttggaattgcaggtgtgagccactgcacccggcccttgcctcatgtttgaatgataatttacctgggcataaaattctggacacttgtggtggcacgagctgtctgcttttctgtggagactgcgggttgcagacaccagcagccccctattgctgcacgtcaggtgtcctccacctcagtactgtggacatctcgggccgcatagccctgttgcgcgggcatcctgtgcgttgcaggagatgcagcagcatccatgaccgcaacccatcagagtgttctaagaacggaagcatctgggctggatggaatttagcatcaagcagagtcccctttctgttcagagtgttgtaaagtgcataaagatgaagcaggcaccagaaatcctcggcagtgccaacgggaagactccgagctgcgaggtgaaccgcgagtgttctgtgttcctcagcaaagcccagctctccagtagcctgcaggagggggtcatgcagaagtttaacggccacgacgccctgccctttattccagccgacaagctgaaagatcttacttcccgggtgtttaatggagaacccggcgcacacgatgccaaactgcgttttgagtcccaggaaatgaaagggattgggacaccccctaacactacccctatcaaaaatggctctccagaaattaagctgaaaatcaccaaaacatacatgaatgggaagcctctctttgaatcttccatttgtggtgacagtgctgctgatgtgtctcagtcagaagaaaatggacaaaaaccagaaaacaaggcgagaaggaacaggaagaggagcataaaatatgactccttgctggagcagggccttgtcgaagcagctcttgtgtctaagatctcaagtccttcagataaaaagattccagctaagaaagagtcttgtccaaacactggaagagacaaagaccacctgttgaaatacaacgttggtgatttggtgtggtccaaagtgtcgggttacccttggtggccttgcatggtttctgcagatccactccttcacagctataccaaacttaaaggtcagaaaaagagtgcacgccagtatcacgtacagttctttggtgacgccccagaaagagcttggatatttgagaagagcctcgtagcttttgaaggagaaggacagtttgaaaaattatgccaggaaagtgccaagcaggcacccacgaaagctgagaaaattaagctattgaaaccaatttcagggaaattgagggcccagtgggaaatgggcattgttcaagcagaagaagctgcaagcatgtcagtggaggagcggaaagccaagttcacctttctctatgtgggggaccagcttcatctcaaccctcaagtagccaaggaggctggcattgctgcagagtctttgggagaaatggcagaatcctcaggagtcagtgaagaagctgctgaaaaccccaagtctgtgagagaagagtgcattcccatgaagagaaggcggagggccaaactgtgtagctctgcagagaccctggagagtcaccccgacatagggaagagtactcctcaaaagacggcagaggctgaccccagaagaggagtagggtctcctcctgggaggaagaagaccacagtctccatgccacgaagcaggaagggagatgcagcatcccagtttttggtcttctgtcaaaaacacagggatgaggtggtagctgagcacccagatgcttcaggtgaggagattgaagagctgctcaggtcacagtggagtctgctgagtgagaagcagagagcacgctacaacaccaagtttgccctggtggcccctgtccaggctgaagaagactctggtaatgtaaatgggaaaaaaagaaaccacacaaagaggatacaggaccctacagaagatgctgaagctgaggacacacccaggaaaagactcaggacggacaagcacagtcttcggaagagagacacaatcactgacaaaacggccagaacaagctcttacaaggccatggaggcagcctcctcgctcaagagccaggcagcaacgaaaaatctgtctgatgcatgtaaaccactgaagaagcgaaatcgggcttccacggcagcatcttcagctcttgggtttagcaaaagttcatctccttctgcatccttaactgagaatgagcttttgtgggagcccacaccagtcaagttggatttgaacccagctgctctgtactgcacttagaatgatgtaatattccaggatgctgctgcaggtctcggacagcccgggagacgagccctcggagtccccatacgaaagtgcagacgaaacacaaactgaagtatctgtctcatccaaaaagtctgagcgaggagtgactgccaaaaaggagtatgtgtgccagctgtgtgagaagccgggcagcctcctgctctgtgaaggaccctgctgcggagctttccacctcgcctgccttgggctttcccggaggccagaagggaggttcacctgcagcgagtgtgcctcagggattcactcatgtttcgtgtgtaaagagagcaagacagatgttaagcgctgtgtggtaactcagtgtggaaaattttaccatgaggcttgtgtgaaaaaataccctctgactgtatttgagagccgaggtttccgctgccccctccacagctgtgtgagctgccatgcttccaacccttcaaacccaaggccgtcaaaaggtaaaatgatgcggtgtgtccgctgccccgttgcctatcacagcggggatgcttgtctggcagcaggatgctcagtgatcgcctccaacagcatcatctgcactgcccacttcactgctcggaaggggaagcgacaccacgcccacgtcaacgtgagctggtgcttcgtgtgctccaaaggggggagccttctgtgctgtgagtcctgcccagcggccttccaccctgactgcctgaacatcgagatgcctgacggcagctggttctgcaatgactgcagggctgggaagaagctgcacttccaggatatcatttgggtgaaacttgggaactacagatggtggccggcagaagtttgccatcccaaaaatgttcccccaaatattcagaaaatgaagcacgagattggagaattccctgtgtttttctttgggtctaaagattattactggacgcatcaggcgcgagtgttcccgtacatggagggggaccggggcagccgctaccagggggtcagagggatcggaagagtcttcaaaaacgcactgcaagaagctgaagctcgttttcgtgaaattaagcttcagagggaagcccgagaaacacaggagagcgagcgcaagcccccaccatacaagcacatcaaggtgaataagccttacgggaaagtccagatctacacagcggatatttcagaaatccctaagtgcaactgcaagcccacagatgagaatccttgtggctttgattcggagtgtctgaacaggatgctgatgtttgagtgccacccgcaggtgtgtcccgcgggcgagttctgccagaaccagtgcttcaccaagcgccagtacccagagaccaagatcatcaagacagatggcaaagggtggggcctggtcgccaagagggacatcagaaagggagaatttgttaacgagtacgttggggagctgatcgacgaggaggagtgcatggcgagaatcaagcacgcacacgagaacgacatcacccacttctacatgctcactatagacaaggaccgtataatagacgctggccccaaaggaaactactctcgatttatgaatcacagctgccagcccaactgtgagaccctcaagtggacagtgaatggggacactcgtgtgggcctgtttgccgtctgtgacattcctgcagggacggagctgacttttaactacaacctcgattgtctgggcaatgaaaaaacggtctgccggtgtggagcctccaattgcagtggattcctcggggatagaccaaagacctcgacgaccctttcatcagaggaaaagggcaaaaagaccaagaagaaaacgaggcggcgcagagcaaaaggggaagggaagaggcagtcagaggacgagtgcttccgctgcggtgatggcgggcagctggtgctgtgtgaccgcaagttctgcaccaaggcctaccacctgtcctgcctgggccttggcaagcggcccttcgggaagtgggaatgtccttggcatcattgtgacgtgtgtggcaaaccttcgacttcattttgccacctctgccccaattcgttctgtaaggagcaccaggacgggacagccttcagctgcaccccggacgggcggtcctactgctgtgagcatgacttaggggcggcatcggtcagaagcaccaagactgagaagccccccccagagccagggaagccgaaggggaagaggcggcggcggaggggctggcggagagtcacagagggcaaatagcgccaggcggccgcttggccggatccaggggcggtgcagggcggccggccctgcctgcgggagagggcgagcatgaactggcccggaggacccagctcgagccgccaggacacagacgtacaggcctcctcgggagggagcgcctccccaccactgagccatcctcagcagcgtccgctgcgtctgcactgatgaccgtctgagcccagctcagcgttcctggacaaacagcctcactcctcagcgttaccgccacacttgaatttctccgaatgtcaaggttccctcccactctatttttttaggttaaagttaattggcatatggaatgttttaatctcctctgaaatgtgtagcgtaggcttttcccaagggtcgctagaaactcgtcttcgcgttgccccctttctggctctcagcgccgtcgccactcgggagaggctgggtgaggcccgtgtgaggactgaccctggattcctcgaaactgccattgtgatcattactctgctctttggaaatggctgtatcatttttttgtactaatgtgaattgttcctcagaaacgcttcttttccatcctagtgagaagctggccctgcaggtggtggcagcaatggtgttgtaagatttcctcccgtagttttttctcctcatggatttgaatgaaatgccaataacacgtccactttcaacgtgtagtttacgcggagcactttcgaggcctggccgggttgggcctacttctcacctgggcctatcttctgaactcgctaggttcttatcaacatttgggggataactttgtatatttttttcatttggcttttctttaccagtttctgatttttattctcaatatatttttgctaaacctatttcacaaatcaccaccgactgaagtgtgtgtttactgatgcggccctgagctccatggcgaaaggagtgactttgcagggcgtgagaccgcagtctgcttagagcacaggaagtgacaacttagggagccccgtagggcgctgcaggccccggggaccccagcacgtgggtctaaagagagacggagtctagctctcctgccacccagagtggcttccatctcagcactctgtgggtctggtgatggaagatgcagtctctgctgatcacatgtgccctctgccagggcacctactgagaggtgcggtcctgggggtggaggcctgcctggcaggtgtgcgtgcctcgtacgtgtgttatgggcactggtctaggccaggtatgacacccactctcctgtgagatttcactttagtttttaaaaggtccagttctacagagtgagacctatctatctgagtactacatatgttttaagacttggttctttttttgagggatccttgaccctgggaagtctggagcaccctgagaagggggcaccatgtgtgcctttgcccacgtgtcctgaggggctgcttgtctgggagggagggagagaacattcagcagcaggtgcttttttatggccttttcttaaaataacctaagggggacacatccatcttgcagagaagtttacagaactccccttgaaaactgctgctgaggctcctgttaaattttctgtggcatcttttatgccttggtaaaaactgcagtgtctttggacctgagagtggctactccgtggttttgtgacctgtaagcgtggggttcaggggtgtgtggccctgcagggtcccacgcctccctgagcactgactggaagtttcactggctggtggctgtcccttctcccatcagggtccccagcaaagttaactacacagaggacccaggggaaacgagctgtgtagccactgacttgctcgcgcggccgtggcctctgaggggcactcgccggttaagacagggtgggagtagtgctttccagttcagactctaacttctcccaaagtgtcctaagaaaatactggatcggctcatagatttatgctccttatgatgccctaacttggaaggttgttctagggacaggccgggcagtgtccccacacacaccttagagtcgaaggccccagggccccgctgtcacttgcccaaaagatcccttccggcaggtaagggactaccaatgcttacgtcaaaacagcagaatcggctttgcagtgcactttggggagcagatattaacttatttttgtgttggacagtagtgaaatcttgtgatttttaatcgctttgataatacttccaaattttatgatttttctgaaggaaataatgcaaacattttaaatatgtttctccccctttccaaaaactgttaaactaatgagcaagtaacactaactttgaatgtctctacaatacccgttgataactcagtggagccaggctttggggtagcggccctgagcttgcagggtttctcgccactggggctgaccacgcccccagctgtgaccgtgggtgtggctggctctcggccctgcccagctttgttctgaggacgtggtgacttcctgaacatcagcttcaatcctccatcattaatgtgaagcaaaacacaaaaaccgccccaatccctcaggattccttggcatccgaaaccagcatctgcacctaaacccatacccacccgtgtgcgcccacagggggatgtgtccgaatgggcagcttaaaatgtggtcacctgtgggggaaactcttcaggcacctgaagtgagaacccagctgtccgtcctcaggccggcctttcttccggcgacacccgtccatggctggctgggtccccttcgcagtgtttgtctgtcttgacatctaaaccccggcgtgtgcagtgcccatcttccaggactaccttattttccagaattaaacctgttttataattcaagttaatgcaaatgactgtcagttgccaaatatcttgatcctatgagtgtagttgatgactgtttgttagtcagtagagtaaaatgctgtgtccacggggtgtcacagcctcaccataccctgttgaggtgtgaaatgccccgtcagaaattaaatacaaacttaaatgtgcctattggtgtctaaacttcatacaatgtaaggtcagattccttttaggaatactgggtgctgtcaccaggtttgatagttagacttaaaaacttgaaattcactttttggggggagggatatactgaaatagagagttgagacttgccagttgggggaaaatagcatttaaaatggaaagctgtgtttggaaaattgtgtatgagtatttttgtattaaaaacattttaaaggcttttttcttaa

SEQ ID NO: 200266 - DNA, 2666 bp, Homo sapiens
  Payload ID: 19512
  Gene Name: Wolf-Hirschhorn syndrome candidate 1
  Uniprot ID: O96028
  ENST ID: ENST00000382888
  CDS Start-End: 519-2660
cagctgtgtgagaagccgggcagcctcctgctctgtgaaggaccctgctgcggagctttccacctcgcctgccttgggctttcccggaggccagaagggaggttcacctgcagcgagtgtgcctcaggtgtcgcccggcacagtctggggtctgtgaggatgatgagaggacacctgcacagccgtggcccttcctgcctactcaccgggcccaaggagtctcctatctcacgtcagaacacttcctgggtcaggaagacacctggagagtctcccaggccatggcagccccacagcagcacctcacttatgggagtgtctgtctgcctgcccagaatgataagtgactgctccaccactggccagctgctctcaaggaggaaaggcctcttttcataggagccccttctttcaagcttcttgccagttagactgggcctccccagccaggctgcctagtaagattctcctgtatttcaggtgaagctggagctcagatcgcagcaaggtaatccttgatggctggatctttttgctggagaatgcttggactagtgagcaaggttggaaacagggccaggtgctttagcagcatggctgcctctgaagaggagttgcttgattttagtggctcagaactgcaatttaattcttgttctttgcacctctctctccaccccttctttaactttttgttagggattcactcatgtttcgtgtgtaaagagagcaagacagatgttaagcgctgtgtggtaactcagtgtggaaaattttaccatgaggcttgtgtgaaaaaataccctctgactgtatttgagagccgaggtttccgctgccccctccacagctgtgtgagctgccatgcttccaacccttcaaacccaaggccgtcaaaaggtaaaatgatgcggtgtgtccgctgccccgttgcctatcacagcggggatgcttgtctggcagcaggatgctcagtgatcgcctccaacagcatcatctgcactgcccacttcactgctcggaaggggaagcgacaccacgcccacgtcaacgtgagctggtgcttcgtgtgctccaaaggggggagccttctgtgctgtgagtcctgcccagcggccttccaccctgactgcctgaacatcgagatgcctgacggcagctggttctgcaatgactgcagggctgggaagaagctgcacttccaggatatcatttgggtgaaacttgggaactacagatggtggccggcagaagtttgccatcccaaaaatgttcccccaaatattcagaaaatgaagcacgagattggagaattccctgtgtttttctttgggtctaaagattattactggacgcatcaggcgcgagtgttcccgtacatggagggggaccggggcagccgctaccagggggtcagagggatcggaagagtcttcaaaaacgcactgcaagaagctgaagctcgttttcgtgaaattaagcttcagagggaagcccgagaaacacaggagagcgagcgcaagcccccaccatacaagcacatcaaggtgaataagccttacgggaaagtccagatctacacagcggatatttcagaaatccctaagtgcaactgcaagcccacagatgagaatccttgtggctttgattcggagtgtctgaacaggatgctgatgtttgagtgccacccgcaggtgtgtcccgcgggcgagttctgccagaaccagtgcttcaccaagcgccagtacccagagaccaagatcatcaagacagatggcaaagggtggggcctggtcgccaagagggacatcagaaagggagaatttgttaacgagtacgttggggagctgatcgacgaggaggagtgcatggcgagaatcaagcacgcacacgagaacgacatcacccacttctacatgctcactatagacaaggaccgtataatagacgctggccccaaaggaaactactctcgatttatgaatcacagctgccagcccaactgtgagaccctcaagtggacagtgaatggggacactcgtgtgggcctgtttgccgtctgtgacattcctgcagggacggagctgacttttaactacaacctcgattgtctgggcaatgaaaaaacggtctgccggtgtggagcctccaattgcagtggattcctcggggatagaccaaagacctcgacgaccctttcatcagaggaaaagggcaaaaagaccaagaagaaaacgaggcggcgcagagcaaaaggggaagggaagaggcagtcagaggacgagtgcttccgctgcggtgatggcgggcagctggtgctgtgtgaccgcaagttctgcaccaaggcctaccacctgtcctgcctgggccttggcaagcggcccttcgggaagtgggaatgtccttggcatcattgtgacgtgtgtggcaaaccttcgacttcattttgccacctctgccccaattcgttctgtaaggagcaccaggacgggacagccttcagctgcaccccggacgggcggtcctactgctgtgagcatgacttaggggcggcatcggtcagaagcaccaagactgagaagccccccccagagccagggaagccgaaggggaagaggcggcggcggaggggctggcggagagtcacagagggcaaatagcgccag

SEQ ID NO: 200267 - DNA, 7534 bp, Homo sapiens
  Payload ID: 19512
  Gene Name: Wolf-Hirschhorn syndrome candidate 1
  Uniprot ID: O96028
  ENST ID: ENST00000382891
  CDS Start-End: 140-4237
tggtcttgaactcctgaccttgtgatccgctcgcctcagcctcccaaagtgctgggattacaggcatgagccaccgtgcctgtcctagaaccactggtaactcttaactgtgttctaagaacggaagcatctgggctggatggaatttagcatcaagcagagtcccctttctgttcagagtgttgtaaagtgcataaagatgaagcaggcaccagaaatcctcggcagtgccaacgggaagactccgagctgcgaggtgaaccgcgagtgttctgtgttcctcagcaaagcccagctctccagtagcctgcaggagggggtcatgcagaagtttaacggccacgacgccctgccctttattccagccgacaagctgaaagatcttacttcccgggtgtttaatggagaacccggcgcacacgatgccaaactgcgttttgagtcccaggaaatgaaagggattgggacaccccctaacactacccctatcaaaaatggctctccagaaattaagctgaaaatcaccaaaacatacatgaatgggaagcctctctttgaatcttccatttgtggtgacagtgctgctgatgtgtctcagtcagaagaaaatggacaaaaaccagaaaacaaggcgagaaggaacaggaagaggagcataaaatatgactccttgctggagcagggccttgtcgaagcagctcttgtgtctaagatctcaagtccttcagataaaaagattccagctaagaaagagtcttgtccaaacactggaagagacaaagaccacctgttgaaatacaacgttggtgatttggtgtggtccaaagtgtcgggttacccttggtggccttgcatggtttctgcagatccactccttcacagctataccaaacttaaaggtcagaaaaagagtgcacgccagtatcacgtacagttctttggtgacgccccagaaagagcttggatatttgagaagagcctcgtagcttttgaaggagaaggacagtttgaaaaattatgccaggaaagtgccaagcaggcacccacgaaagctgagaaaattaagctattgaaaccaatttcagggaaattgagggcccagtgggaaatgggcattgttcaagcagaagaagctgcaagcatgtcagtggaggagcggaaagccaagttcacctttctctatgtgggggaccagcttcatctcaaccctcaagtagccaaggaggctggcattgctgcagagtctttgggagaaatggcagaatcctcaggagtcagtgaagaagctgctgaaaaccccaagtctgtgagagaagagtgcattcccatgaagagaaggcggagggccaaactgtgtagctctgcagagaccctggagagtcaccccgacatagggaagagtactcctcaaaagacggcagaggctgaccccagaagaggagtagggtctcctcctgggaggaagaagaccacagtctccatgccacgaagcaggaagggagatgcagcatcccagtttttggtcttctgtcaaaaacacagggatgaggtggtagctgagcacccagatgcttcaggtgaggagattgaagagctgctcaggtcacagtggagtctgctgagtgagaagcagagagcacgctacaacaccaagtttgccctggtggcccctgtccaggctgaagaagactctggtaatgtaaatgggaaaaaaagaaaccacacaaagaggatacaggaccctacagaagatgctgaagctgaggacacacccaggaaaagactcaggacggacaagcacagtcttcggaagagagacacaatcactgacaaaacggccagaacaagctcttacaaggccatggaggcagcctcctcgctcaagagccaggcagcaacgaaaaatctgtctgatgcatgtaaaccactgaagaagcgaaatcgggcttccacggcagcatcttcagctcttgggtttagcaaaagttcatctccttctgcatccttaactgagaatgaggtctcggacagcccgggagacgagccctcggagtccccatacgaaagtgcagacgaaacacaaactgaagtatctgtctcatccaaaaagtctgagcgaggagtgactgccaaaaaggagtatgtgtgccagctgtgtgagaagccgggcagcctcctgctctgtgaaggaccctgctgcggagctttccacctcgcctgccttgggctttcccggaggccagaagggaggttcacctgcagcgagtgtgcctcagggattcactcatgtttcgtgtgtaaagagagcaagacagatgttaagcgctgtgtggtaactcagtgtggaaaattttaccatgaggcttgtgtgaaaaaataccctctgactgtatttgagagccgaggtttccgctgccccctccacagctgtgtgagctgccatgcttccaacccttcaaacccaaggccgtcaaaaggtaaaatgatgcggtgtgtccgctgccccgttgcctatcacagcggggatgcttgtctggcagcaggatgctcagtgatcgcctccaacagcatcatctgcactgcccacttcactgctcggaaggggaagcgacaccacgcccacgtcaacgtgagctggtgcttcgtgtgctccaaaggggggagccttctgtgctgtgagtcctgcccagcggccttccaccctgactgcctgaacatcgagatgcctgacggcagctggttctgcaatgactgcagggctgggaagaagctgcacttccaggatatcatttgggtgaaacttgggaactacagatggtggccggcagaagtttgccatcccaaaaatgttcccccaaatattcagaaaatgaagcacgagattggagaattccctgtgtttttctttgggtctaaagattattactggacgcatcaggcgcgagtgttcccgtacatggagggggaccggggcagccgctaccagggggtcagagggatcggaagagtcttcaaaaacgcactgcaagaagctgaagctcgttttcgtgaaattaagcttcagagggaagcccgagaaacacaggagagcgagcgcaagcccccaccatacaagcacatcaaggtgaataagccttacgggaaagtccagatctacacagcggatatttcagaaatccctaagtgcaactgcaagcccacagatgagaatccttgtggctttgattcggagtgtctgaacaggatgctgatgtttgagtgccacccgcaggtgtgtcccgcgggcgagttctgccagaaccagtgcttcaccaagcgccagtacccagagaccaagatcatcaagacagatggcaaagggtggggcctggtcgccaagagggacatcagaaagggagaatttgttaacgagtacgttggggagctgatcgacgaggaggagtgcatggcgagaatcaagcacgcacacgagaacgacatcacccacttctacatgctcactatagacaaggaccgtataatagacgctggccccaaaggaaactactctcgatttatgaatcacagctgccagcccaactgtgagaccctcaagtggacagtgaatggggacactcgtgtgggcctgtttgccgtctgtgacattcctgcagggacggagctgacttttaactacaacctcgattgtctgggcaatgaaaaaacggtctgccggtgtggagcctccaattgcagtggattcctcggggatagaccaaagacctcgacgaccctttcatcagaggaaaagggcaaaaagaccaagaagaaaacgaggcggcgcagagcaaaaggggaagggaagaggcagtcagaggacgagtgcttccgctgcggtgatggcgggcagctggtgctgtgtgaccgcaagttctgcaccaaggcctaccacctgtcctgcctgggccttggcaagcggcccttcgggaagtgggaatgtccttggcatcattgtgacgtgtgtggcaaaccttcgacttcattttgccacctctgccccaattcgttctgtaaggagcaccaggacgggacagccttcagctgcaccccggacgggcggtcctactgctgtgagcatgacttaggggcggcatcggtcagaagcaccaagactgagaagccccccccagagccagggaagccgaaggggaagaggcggcggcggaggggctggcggagagtcacagagggcaaatagcgccaggcggccgcttggccggatccaggggcggtgcagggcggccggccctgcctgcgggagagggcgagcatgaactggcccggaggacccagctcgagccgccaggacacagacgtacaggcctcctcgggagggagcgcctccccaccactgagccatcctcagcagcgtccgctgcgtctgcactgatgaccgtctgagcccagctcagcgttcctggacaaacagcctcactcctcagcgttaccgccacacttgaatttctccgaatgtcaaggttccctcccactctatttttttaggttaaagttaattggcatatggaatgttttaatctcctctgaaatgtgtagcgtaggcttttcccaagggtcgctagaaactcgtcttcgcgttgccccctttctggctctcagcgccgtcgccactcgggagaggctgggtgaggcccgtgtgaggactgaccctggattcctcgaaactgccattgtgatcattactctgctctttggaaatggctgtatcatttttttgtactaatgtgaattgttcctcagaaacgcttcttttccatcctagtgagaagctggccctgcaggtggtggcagcaatggtgttgtaagatttcctcccgtagttttttctcctcatggatttgaatgaaatgccaataacacgtccactttcaacgtgtagtttacgcggagcactttcgaggcctggccgggttgggcctacttctcacctgggcctatcttctgaactcgctaggttcttatcaacatttgggggataactttgtatatttttttcatttggcttttctttaccagtttctgatttttattctcaatatatttttgctaaacctatttcacaaatcaccaccgactgaagtgtgtgtttactgatgcggccctgagctccatggcgaaaggagtgactttgcagggcgtgagaccgcagtctgcttagagcacaggaagtgacaacttagggagccccgtagggcgctgcaggccccggggaccccagcacgtgggtctaaagagagacggagtctagctctcctgccacccagagtggcttccatctcagcactctgtgggtctggtgatggaagatgcagtctctgctgatcacatgtgccctctgccagggcacctactgagaggtgcggtcctgggggtggaggcctgcctggcaggtgtgcgtgcctcgtacgtgtgttatgggcactggtctaggccaggtatgacacccactctcctgtgagatttcactttagtttttaaaaggtccagttctacagagtgagacctatctatctgagtactacatatgttttaagacttggttctttttttgagggatccttgaccctgggaagtctggagcaccctgagaagggggcaccatgtgtgcctttgcccacgtgtcctgaggggctgcttgtctgggagggagggagagaacattcagcagcaggtgcttttttatggccttttcttaaaataacctaagggggacacatccatcttgcagagaagtttacagaactccccttgaaaactgctgctgaggctcctgttaaattttctgtggcatcttttatgccttggtaaaaactgcagtgtctttggacctgagagtggctactccgtggttttgtgacctgtaagcgtggggttcaggggtgtgtggccctgcagggtcccacgcctccctgagcactgactggaagtttcactggctggtggctgtcccttctcccatcagggtccccagcaaagttaactacacagaggacccaggggaaacgagctgtgtagccactgacttgctcgcgcggccgtggcctctgaggggcactcgccggttaagacagggtgggagtagtgctttccagttcagactctaacttctcccaaagtgtcctaagaaaatactggatcggctcatagatttatgctccttatgatgccctaacttggaaggttgttctagggacaggccgggcagtgtccccacacacaccttagagtcgaaggccccagggccccgctgtcacttgcccaaaagatcccttccggcaggtaagggactaccaatgcttacgtcaaaacagcagaatcggctttgcagtgcactttggggagcagatattaacttatttttgtgttggacagtagtgaaatcttgtgatttttaatcgctttgataatacttccaaattttatgatttttctgaaggaaataatgcaaacattttaaatatgtttctccccctttccaaaaactgttaaactaatgagcaagtaacactaactttgaatgtctctacaatacccgttgataactcagtggagccaggctttggggtagcggccctgagcttgcagggtttctcgccactggggctgaccacgcccccagctgtgaccgtgggtgtggctggctctcggccctgcccagctttgttctgaggacgtggtgacttcctgaacatcagcttcaatcctccatcattaatgtgaagcaaaacacaaaaaccgccccaatccctcaggattccttggcatccgaaaccagcatctgcacctaaacccatacccacccgtgtgcgcccacagggggatgtgtccgaatgggcagcttaaaatgtggtcacctgtgggggaaactcttcaggcacctgaagtgagaacccagctgtccgtcctcaggccggcctttcttccggcgacacccgtccatggctggctgggtccccttcgcagtgtttgtctgtcttgacatctaaaccccggcgtgtgcagtgcccatcttccaggactaccttattttccagaattaaacctgttttataattcaagttaatgcaaatgactgtcagttgccaaatatcttgatcctatgagtgtagttgatgactgtttgttagtcagtagagtaaaatgctgtgtccacggggtgtcacagcctcaccataccctgttgaggtgtgaaatgccccgtcagaaattaaatacaaacttaaatgtgcctattggtgtctaaacttcatacaatgtaaggtcagattccttttaggaatactgggtgctgtcaccaggtttgatagttagacttaaaaacttgaaattcactttttggggggagggatatactgaaatagagagttgagacttgccagttgggggaaaatagcatttaaaatggaaagctgtgtttggaaaattgtgtatgagtatttttgtattaaaaacattttaaaggcttttttcttaactt

SEQ ID NO: 200268 - DNA, 7706 bp, Homo sapiens
  Payload ID: 19512
  Gene Name: Wolf-Hirschhorn syndrome candidate 1
  Uniprot ID: O96028
  ENST ID: ENST00000382892
  CDS Start-End: 315-4412
tggtcttgaactcctgaccttgtgatccgctcgcctcagcctcccaaagtgctgggattacaggcatgagccaccgtgcctgtcctagaaccactggtaactcttaactgctgtctgcttttctgtggagactgcgggttgcagacaccagcagccccctattgctgcacgtcaggtgtcctccacctcagtactgtggacatctcgggccgcatagccctgttgcgcgggcatcctgtgcgttgcaggagatgcagcagcatccatgaccgcaacccatcagagtgttctaagaacggaagcatctgggctggatggaatttagcatcaagcagagtcccctttctgttcagagtgttgtaaagtgcataaagatgaagcaggcaccagaaatcctcggcagtgccaacgggaagactccgagctgcgaggtgaaccgcgagtgttctgtgttcctcagcaaagcccagctctccagtagcctgcaggagggggtcatgcagaagtttaacggccacgacgccctgccctttattccagccgacaagctgaaagatcttacttcccgggtgtttaatggagaacccggcgcacacgatgccaaactgcgttttgagtcccaggaaatgaaagggattgggacaccccctaacactacccctatcaaaaatggctctccagaaattaagctgaaaatcaccaaaacatacatgaatgggaagcctctctttgaatcttccatttgtggtgacagtgctgctgatgtgtctcagtcagaagaaaatggacaaaaaccagaaaacaaggcgagaaggaacaggaagaggagcataaaatatgactccttgctggagcagggccttgtcgaagcagctcttgtgtctaagatctcaagtccttcagataaaaagattccagctaagaaagagtcttgtccaaacactggaagagacaaagaccacctgttgaaatacaacgttggtgatttggtgtggtccaaagtgtcgggttacccttggtggccttgcatggtttctgcagatccactccttcacagctataccaaacttaaaggtcagaaaaagagtgcacgccagtatcacgtacagttctttggtgacgccccagaaagagcttggatatttgagaagagcctcgtagcttttgaaggagaaggacagtttgaaaaattatgccaggaaagtgccaagcaggcacccacgaaagctgagaaaattaagctattgaaaccaatttcagggaaattgagggcccagtgggaaatgggcattgttcaagcagaagaagctgcaagcatgtcagtggaggagcggaaagccaagttcacctttctctatgtgggggaccagcttcatctcaaccctcaagtagccaaggaggctggcattgctgcagagtctttgggagaaatggcagaatcctcaggagtcagtgaagaagctgctgaaaaccccaagtctgtgagagaagagtgcattcccatgaagagaaggcggagggccaaactgtgtagctctgcagagaccctggagagtcaccccgacatagggaagagtactcctcaaaagacggcagaggctgaccccagaagaggagtagggtctcctcctgggaggaagaagaccacagtctccatgccacgaagcaggaagggagatgcagcatcccagtttttggtcttctgtcaaaaacacagggatgaggtggtagctgagcacccagatgcttcaggtgaggagattgaagagctgctcaggtcacagtggagtctgctgagtgagaagcagagagcacgctacaacaccaagtttgccctggtggcccctgtccaggctgaagaagactctggtaatgtaaatgggaaaaaaagaaaccacacaaagaggatacaggaccctacagaagatgctgaagctgaggacacacccaggaaaagactcaggacggacaagcacagtcttcggaagagagacacaatcactgacaaaacggccagaacaagctcttacaaggccatggaggcagcctcctcgctcaagagccaggcagcaacgaaaaatctgtctgatgcatgtaaaccactgaagaagcgaaatcgggcttccacggcagcatcttcagctcttgggtttagcaaaagttcatctccttctgcatccttaactgagaatgaggtctcggacagcccgggagacgagccctcggagtccccatacgaaagtgcagacgaaacacaaactgaagtatctgtctcatccaaaaagtctgagcgaggagtgactgccaaaaaggagtatgtgtgccagctgtgtgagaagccgggcagcctcctgctctgtgaaggaccctgctgcggagctttccacctcgcctgccttgggctttcccggaggccagaagggaggttcacctgcagcgagtgtgcctcagggattcactcatgtttcgtgtgtaaagagagcaagacagatgttaagcgctgtgtggtaactcagtgtggaaaattttaccatgaggcttgtgtgaaaaaataccctctgactgtatttgagagccgaggtttccgctgccccctccacagctgtgtgagctgccatgcttccaacccttcaaacccaaggccgtcaaaaggtaaaatgatgcggtgtgtccgctgccccgttgcctatcacagcggggatgcttgtctggcagcaggatgctcagtgatcgcctccaacagcatcatctgcactgcccacttcactgctcggaaggggaagcgacaccacgcccacgtcaacgtgagctggtgcttcgtgtgctccaaaggggggagccttctgtgctgtgagtcctgcccagcggccttccaccctgactgcctgaacatcgagatgcctgacggcagctggttctgcaatgactgcagggctgggaagaagctgcacttccaggatatcatttgggtgaaacttgggaactacagatggtggccggcagaagtttgccatcccaaaaatgttcccccaaatattcagaaaatgaagcacgagattggagaattccctgtgtttttctttgggtctaaagattattactggacgcatcaggcgcgagtgttcccgtacatggagggggaccggggcagccgctaccagggggtcagagggatcggaagagtcttcaaaaacgcactgcaagaagctgaagctcgttttcgtgaaattaagcttcagagggaagcccgagaaacacaggagagcgagcgcaagcccccaccatacaagcacatcaaggtgaataagccttacgggaaagtccagatctacacagcggatatttcagaaatccctaagtgcaactgcaagcccacagatgagaatccttgtggctttgattcggagtgtctgaacaggatgctgatgtttgagtgccacccgcaggtgtgtcccgcgggcgagttctgccagaaccagtgcttcaccaagcgccagtacccagagaccaagatcatcaagacagatggcaaagggtggggcctggtcgccaagagggacatcagaaagggagaatttgttaacgagtacgttggggagctgatcgacgaggaggagtgcatggcgagaatcaagcacgcacacgagaacgacatcacccacttctacatgctcactatagacaaggaccgtataatagacgctggccccaaaggaaactactctcgatttatgaatcacagctgccagcccaactgtgagaccctcaagtggacagtgaatggggacactcgtgtgggcctgtttgccgtctgtgacattcctgcagggacggagctgacttttaactacaacctcgattgtctgggcaatgaaaaaacggtctgccggtgtggagcctccaattgcagtggattcctcggggatagaccaaagacctcgacgaccctttcatcagaggaaaagggcaaaaagaccaagaagaaaacgaggcggcgcagagcaaaaggggaagggaagaggcagtcagaggacgagtgcttccgctgcggtgatggcgggcagctggtgctgtgtgaccgcaagttctgcaccaaggcctaccacctgtcctgcctgggccttggcaagcggcccttcgggaagtgggaatgtccttggcatcattgtgacgtgtgtggcaaaccttcgacttcattttgccacctctgccccaattcgttctgtaaggagcaccaggacgggacagccttcagctgcaccccggacgggcggtcctactgctgtgagcatgacttaggggcggcatcggtcagaagcaccaagactgagaagccccccccagagccagggaagccgaaggggaagaggcggcggcggaggggctggcggagagtcacagagggcaaatagcgccaggcggccgcttggccggatccaggggcggtgcagggcggccggccctgcctgcgggagagggcgagcatgaactggcccggaggacccagctcgagccgccaggacacagacgtacaggcctcctcgggagggagcgcctccccaccactgagccatcctcagcagcgtccgctgcgtctgcactgatgaccgtctgagcccagctcagcgttcctggacaaacagcctcactcctcagcgttaccgccacacttgaatttctccgaatgtcaaggttccctcccactctatttttttaggttaaagttaattggcatatggaatgttttaatctcctctgaaatgtgtagcgtaggcttttcccaagggtcgctagaaactcgtcttcgcgttgccccctttctggctctcagcgccgtcgccactcgggagaggctgggtgaggcccgtgtgaggactgaccctggattcctcgaaactgccattgtgatcattactctgctctttggaaatggctgtatcatttttttgtactaatgtgaattgttcctcagaaacgcttcttttccatcctagtgagaagctggccctgcaggtggtggcagcaatggtgttgtaagatttcctcccgtagttttttctcctcatggatttgaatgaaatgccaataacacgtccactttcaacgtgtagtttacgcggagcactttcgaggcctggccgggttgggcctacttctcacctgggcctatcttctgaactcgctaggttcttatcaacatttgggggataactttgtatatttttttcatttggcttttctttaccagtttctgatttttattctcaatatatttttgctaaacctatttcacaaatcaccaccgactgaagtgtgtgtttactgatgcggccctgagctccatggcgaaaggagtgactttgcagggcgtgagaccgcagtctgcttagagcacaggaagtgacaacttagggagccccgtagggcgctgcaggccccggggaccccagcacgtgggtctaaagagagacggagtctagctctcctgccacccagagtggcttccatctcagcactctgtgggtctggtgatggaagatgcagtctctgctgatcacatgtgccctctgccagggcacctactgagaggtgcggtcctgggggtggaggcctgcctggcaggtgtgcgtgcctcgtacgtgtgttatgggcactggtctaggccaggtatgacacccactctcctgtgagatttcactttagtttttaaaaggtccagttctacagagtgagacctatctatctgagtactacatatgttttaagacttggttctttttttgagggatccttgaccctgggaagtctggagcaccctgagaagggggcaccatgtgtgcctttgcccacgtgtcctgaggggctgcttgtctgggagggagggagagaacattcagcagcaggtgcttttttatggccttttcttaaaataacctaagggggacacatccatcttgcagagaagtttacagaactccccttgaaaactgctgctgaggctcctgttaaattttctgtggcatcttttatgccttggtaaaaactgcagtgtctttggacctgagagtggctactccgtggttttgtgacctgtaagcgtggggttcaggggtgtgtggccctgcagggtcccacgcctccctgagcactgactggaagtttcactggctggtggctgtcccttctcccatcagggtccccagcaaagttaactacacagaggacccaggggaaacgagctgtgtagccactgacttgctcgcgcggccgtggcctctgaggggcactcgccggttaagacagggtgggagtagtgctttccagttcagactctaacttctcccaaagtgtcctaagaaaatactggatcggctcatagatttatgctccttatgatgccctaacttggaaggttgttctagggacaggccgggcagtgtccccacacacaccttagagtcgaaggccccagggccccgctgtcacttgcccaaaagatcccttccggcaggtaagggactaccaatgcttacgtcaaaacagcagaatcggctttgcagtgcactttggggagcagatattaacttatttttgtgttggacagtagtgaaatcttgtgatttttaatcgctttgataatacttccaaattttatgatttttctgaaggaaataatgcaaacattttaaatatgtttctccccctttccaaaaactgttaaactaatgagcaagtaacactaactttgaatgtctctacaatacccgttgataactcagtggagccaggctttggggtagcggccctgagcttgcagggtttctcgccactggggctgaccacgcccccagctgtgaccgtgggtgtggctggctctcggccctgcccagctttgttctgaggacgtggtgacttcctgaacatcagcttcaatcctccatcattaatgtgaagcaaaacacaaaaaccgccccaatccctcaggattccttggcatccgaaaccagcatctgcacctaaacccatacccacccgtgtgcgcccacagggggatgtgtccgaatgggcagcttaaaatgtggtcacctgtgggggaaactcttcaggcacctgaagtgagaacccagctgtccgtcctcaggccggcctttcttccggcgacacccgtccatggctggctgggtccccttcgcagtgtttgtctgtcttgacatctaaaccccggcgtgtgcagtgcccatcttccaggactaccttattttccagaattaaacctgttttataattcaagttaatgcaaatgactgtcagttgccaaatatcttgatcctatgagtgtagttgatgactgtttgttagtcagtagagtaaaatgctgtgtccacggggtgtcacagcctcaccataccctgttgaggtgtgaaatgccccgtcagaaattaaatacaaacttaaatgtgcctattggtgtctaaacttcatacaatgtaaggtcagattccttttaggaatactgggtgctgtcaccaggtttgatagttagacttaaaaacttgaaattcactttttggggggagggatatactgaaatagagagttgagacttgccagttgggggaaaatagcatttaaaatggaaagctgtgtttggaaaattgtgtatgagtatttttgtattaaaaacattttaaaggcttttttcttaa

SEQ ID NO: 200269 - DNA, 7827 bp, Homo sapiens
  Payload ID: 19512
  Gene Name: Wolf-Hirschhorn syndrome candidate 1
  Uniprot ID: O96028
  ENST ID: ENST00000382895
  CDS Start-End: 432-4529
gcatgagccaccgtgcctgtcctagaaccactggtaactcttaactgagacaagatttcgccatgttgcccaggctggtctcgaacttctgagctcaagcgatctacctgcctcgtcctcccaaagtgttggaattgcaggtgtgagccactgcacccggcccttgcctcatgtttgaatgataatttacctgggcataaaattctggacacttgtggtggcacgagctgtctgcttttctgtggagactgcgggttgcagacaccagcagccccctattgctgcacgtcaggtgtcctccacctcagtactgtggacatctcgggccgcatagccctgttgcgcgggcatcctgtgcgttgcaggagatgcagcagcatccatgaccgcaacccatcagagtgttctaagaacggaagcatctgggctggatggaatttagcatcaagcagagtcccctttctgttcagagtgttgtaaagtgcataaagatgaagcaggcaccagaaatcctcggcagtgccaacgggaagactccgagctgcgaggtgaaccgcgagtgttctgtgttcctcagcaaagcccagctctccagtagcctgcaggagggggtcatgcagaagtttaacggccacgacgccctgccctttattccagccgacaagctgaaagatcttacttcccgggtgtttaatggagaacccggcgcacacgatgccaaactgcgttttgagtcccaggaaatgaaagggattgggacaccccctaacactacccctatcaaaaatggctctccagaaattaagctgaaaatcaccaaaacatacatgaatgggaagcctctctttgaatcttccatttgtggtgacagtgctgctgatgtgtctcagtcagaagaaaatggacaaaaaccagaaaacaaggcgagaaggaacaggaagaggagcataaaatatgactccttgctggagcagggccttgtcgaagcagctcttgtgtctaagatctcaagtccttcagataaaaagattccagctaagaaagagtcttgtccaaacactggaagagacaaagaccacctgttgaaatacaacgttggtgatttggtgtggtccaaagtgtcgggttacccttggtggccttgcatggtttctgcagatccactccttcacagctataccaaacttaaaggtcagaaaaagagtgcacgccagtatcacgtacagttctttggtgacgccccagaaagagcttggatatttgagaagagcctcgtagcttttgaaggagaaggacagtttgaaaaattatgccaggaaagtgccaagcaggcacccacgaaagctgagaaaattaagctattgaaaccaatttcagggaaattgagggcccagtgggaaatgggcattgttcaagcagaagaagctgcaagcatgtcagtggaggagcggaaagccaagttcacctttctctatgtgggggaccagcttcatctcaaccctcaagtagccaaggaggctggcattgctgcagagtctttgggagaaatggcagaatcctcaggagtcagtgaagaagctgctgaaaaccccaagtctgtgagagaagagtgcattcccatgaagagaaggcggagggccaaactgtgtagctctgcagagaccctggagagtcaccccgacatagggaagagtactcctcaaaagacggcagaggctgaccccagaagaggagtagggtctcctcctgggaggaagaagaccacagtctccatgccacgaagcaggaagggagatgcagcatcccagtttttggtcttctgtcaaaaacacagggatgaggtggtagctgagcacccagatgcttcaggtgaggagattgaagagctgctcaggtcacagtggagtctgctgagtgagaagcagagagcacgctacaacaccaagtttgccctggtggcccctgtccaggctgaagaagactctggtaatgtaaatgggaaaaaaagaaaccacacaaagaggatacaggaccctacagaagatgctgaagctgaggacacacccaggaaaagactcaggacggacaagcacagtcttcggaagagagacacaatcactgacaaaacggccagaacaagctcttacaaggccatggaggcagcctcctcgctcaagagccaggcagcaacgaaaaatctgtctgatgcatgtaaaccactgaagaagcgaaatcgggcttccacggcagcatcttcagctcttgggtttagcaaaagttcatctccttctgcatccttaactgagaatgaggtctcggacagcccgggagacgagccctcggagtccccatacgaaagtgcagacgaaacacaaactgaagtatctgtctcatccaaaaagtctgagcgaggagtgactgccaaaaaggagtatgtgtgccagctgtgtgagaagccgggcagcctcctgctctgtgaaggaccctgctgcggagctttccacctcgcctgccttgggctttcccggaggccagaagggaggttcacctgcagcgagtgtgcctcagggattcactcatgtttcgtgtgtaaagagagcaagacagatgttaagcgctgtgtggtaactcagtgtggaaaattttaccatgaggcttgtgtgaaaaaataccctctgactgtatttgagagccgaggtttccgctgccccctccacagctgtgtgagctgccatgcttccaacccttcaaacccaaggccgtcaaaaggtaaaatgatgcggtgtgtccgctgccccgttgcctatcacagcggggatgcttgtctggcagcaggatgctcagtgatcgcctccaacagcatcatctgcactgcccacttcactgctcggaaggggaagcgacaccacgcccacgtcaacgtgagctggtgcttcgtgtgctccaaaggggggagccttctgtgctgtgagtcctgcccagcggccttccaccctgactgcctgaacatcgagatgcctgacggcagctggttctgcaatgactgcagggctgggaagaagctgcacttccaggatatcatttgggtgaaacttgggaactacagatggtggccggcagaagtttgccatcccaaaaatgttcccccaaatattcagaaaatgaagcacgagattggagaattccctgtgtttttctttgggtctaaagattattactggacgcatcaggcgcgagtgttcccgtacatggagggggaccggggcagccgctaccagggggtcagagggatcggaagagtcttcaaaaacgcactgcaagaagctgaagctcgttttcgtgaaattaagcttcagagggaagcccgagaaacacaggagagcgagcgcaagcccccaccatacaagcacatcaaggtgaataagccttacgggaaagtccagatctacacagcggatatttcagaaatccctaagtgcaactgcaagcccacagatgagaatccttgtggctttgattcggagtgtctgaacaggatgctgatgtttgagtgccacccgcaggtgtgtcccgcgggcgagttctgccagaaccagtgcttcaccaagcgccagtacccagagaccaagatcatcaagacagatggcaaagggtggggcctggtcgccaagagggacatcagaaagggagaatttgttaacgagtacgttggggagctgatcgacgaggaggagtgcatggcgagaatcaagcacgcacacgagaacgacatcacccacttctacatgctcactatagacaaggaccgtataatagacgctggccccaaaggaaactactctcgatttatgaatcacagctgccagcccaactgtgagaccctcaagtggacagtgaatggggacactcgtgtgggcctgtttgccgtctgtgacattcctgcagggacggagctgacttttaactacaacctcgattgtctgggcaatgaaaaaacggtctgccggtgtggagcctccaattgcagtggattcctcggggatagaccaaagacctcgacgaccctttcatcagaggaaaagggcaaaaagaccaagaagaaaacgaggcggcgcagagcaaaaggggaagggaagaggcagtcagaggacgagtgcttccgctgcggtgatggcgggcagctggtgctgtgtgaccgcaagttctgcaccaaggcctaccacctgtcctgcctgggccttggcaagcggcccttcgggaagtgggaatgtccttggcatcattgtgacgtgtgtggcaaaccttcgacttcattttgccacctctgccccaattcgttctgtaaggagcaccaggacgggacagccttcagctgcaccccggacgggcggtcctactgctgtgagcatgacttaggggcggcatcggtcagaagcaccaagactgagaagccccccccagagccagggaagccgaaggggaagaggcggcggcggaggggctggcggagagtcacagagggcaaatagcgccaggcggccgcttggccggatccaggggcggtgcagggcggccggccctgcctgcgggagagggcgagcatgaactggcccggaggacccagctcgagccgccaggacacagacgtacaggcctcctcgggagggagcgcctccccaccactgagccatcctcagcagcgtccgctgcgtctgcactgatgaccgtctgagcccagctcagcgttcctggacaaacagcctcactcctcagcgttaccgccacacttgaatttctccgaatgtcaaggttccctcccactctatttttttaggttaaagttaattggcatatggaatgttttaatctcctctgaaatgtgtagcgtaggcttttcccaagggtcgctagaaactcgtcttcgcgttgccccctttctggctctcagcgccgtcgccactcgggagaggctgggtgaggcccgtgtgaggactgaccctggattcctcgaaactgccattgtgatcattactctgctctttggaaatggctgtatcatttttttgtactaatgtgaattgttcctcagaaacgcttcttttccatcctagtgagaagctggccctgcaggtggtggcagcaatggtgttgtaagatttcctcccgtagttttttctcctcatggatttgaatgaaatgccaataacacgtccactttcaacgtgtagtttacgcggagcactttcgaggcctggccgggttgggcctacttctcacctgggcctatcttctgaactcgctaggttcttatcaacatttgggggataactttgtatatttttttcatttggcttttctttaccagtttctgatttttattctcaatatatttttgctaaacctatttcacaaatcaccaccgactgaagtgtgtgtttactgatgcggccctgagctccatggcgaaaggagtgactttgcagggcgtgagaccgcagtctgcttagagcacaggaagtgacaacttagggagccccgtagggcgctgcaggccccggggaccccagcacgtgggtctaaagagagacggagtctagctctcctgccacccagagtggcttccatctcagcactctgtgggtctggtgatggaagatgcagtctctgctgatcacatgtgccctctgccagggcacctactgagaggtgcggtcctgggggtggaggcctgcctggcaggtgtgcgtgcctcgtacgtgtgttatgggcactggtctaggccaggtatgacacccactctcctgtgagatttcactttagtttttaaaaggtccagttctacagagtgagacctatctatctgagtactacatatgttttaagacttggttctttttttgagggatccttgaccctgggaagtctggagcaccctgagaagggggcaccatgtgtgcctttgcccacgtgtcctgaggggctgcttgtctgggagggagggagagaacattcagcagcaggtgcttttttatggccttttcttaaaataacctaagggggacacatccatcttgcagagaagtttacagaactccccttgaaaactgctgctgaggctcctgttaaattttctgtggcatcttttatgccttggtaaaaactgcagtgtctttggacctgagagtggctactccgtggttttgtgacctgtaagcgtggggttcaggggtgtgtggccctgcagggtcccacgcctccctgagcactgactggaagtttcactggctggtggctgtcccttctcccatcagggtccccagcaaagttaactacacagaggacccaggggaaacgagctgtgtagccactgacttgctcgcgcggccgtggcctctgaggggcactcgccggttaagacagggtgggagtagtgctttccagttcagactctaacttctcccaaagtgtcctaagaaaatactggatcggctcatagatttatgctccttatgatgccctaacttggaaggttgttctagggacaggccgggcagtgtccccacacacaccttagagtcgaaggccccagggccccgctgtcacttgcccaaaagatcccttccggcaggtaagggactaccaatgcttacgtcaaaacagcagaatcggctttgcagtgcactttggggagcagatattaacttatttttgtgttggacagtagtgaaatcttgtgatttttaatcgctttgataatacttccaaattttatgatttttctgaaggaaataatgcaaacattttaaatatgtttctccccctttccaaaaactgttaaactaatgagcaagtaacactaactttgaatgtctctacaatacccgttgataactcagtggagccaggctttggggtagcggccctgagcttgcagggtttctcgccactggggctgaccacgcccccagctgtgaccgtgggtgtggctggctctcggccctgcccagctttgttctgaggacgtggtgacttcctgaacatcagcttcaatcctccatcattaatgtgaagcaaaacacaaaaaccgccccaatccctcaggattccttggcatccgaaaccagcatctgcacctaaacccatacccacccgtgtgcgcccacagggggatgtgtccgaatgggcagcttaaaatgtggtcacctgtgggggaaactcttcaggcacctgaagtgagaacccagctgtccgtcctcaggccggcctttcttccggcgacacccgtccatggctggctgggtccccttcgcagtgtttgtctgtcttgacatctaaaccccggcgtgtgcagtgcccatcttccaggactaccttattttccagaattaaacctgttttataattcaagttaatgcaaatgactgtcagttgccaaatatcttgatcctatgagtgtagttgatgactgtttgttagtcagtagagtaaaatgctgtgtccacggggtgtcacagcctcaccataccctgttgaggtgtgaaatgccccgtcagaaattaaatacaaacttaaatgtgcctattggtgtctaaacttcatacaatgtaaggtcagattccttttaggaatactgggtgctgtcaccaggtttgatagttagacttaaaaacttgaaattcactttttggggggagggatatactgaaatagagagttgagacttgccagttgggggaaaatagcatttaaaatggaaagctgtgtttggaaaattgtgtatgagtatttttgtattaaaaacattttaaaggcttttttcttaactta

SEQ ID NO: 200270 - DNA, 8390 bp, Homo sapiens
  Payload ID: 19512
  Gene Name: Wolf-Hirschhorn syndrome candidate 1
  Uniprot ID: O96028
  ENST ID: ENST00000398261
  CDS Start-End: 30-1973
tgttctaagaacggaagcatctgggctggatggaatttagcatcaagcagagtcccctttctgttcagagtgttgtaaagtgcataaagatgaagcaggcaccagaaatcctcggcagtgccaacgggaagactccgagctgcgaggtgaaccgcgagtgttctgtgttcctcagcaaagcccagctctccagtagcctgcaggagggggtcatgcagaagtttaacggccacgacgccctgccctttattccagccgacaagctgaaagatcttacttcccgggtgtttaatggagaacccggcgcacacgatgccaaactgcgttttgagtcccaggaaatgaaagggattgggacaccccctaacactacccctatcaaaaatggctctccagaaattaagctgaaaatcaccaaaacatacatgaatgggaagcctctctttgaatcttccatttgtggtgacagtgctgctgatgtgtctcagtcagaagaaaatggacaaaaaccagaaaacaaggcgagaaggaacaggaagaggagcataaaatatgactccttgctggagcagggccttgtcgaagcagctcttgtgtctaagatctcaagtccttcagataaaaagattccagctaagaaagagtcttgtccaaacactggaagagacaaagaccacctgttgaaatacaacgttggtgatttggtgtggtccaaagtgtcgggttacccttggtggccttgcatggtttctgcagatccactccttcacagctataccaaacttaaaggtcagaaaaagagtgcacgccagtatcacgtacagttctttggtgacgccccagaaagagcttggatatttgagaagagcctcgtagcttttgaaggagaaggacagtttgaaaaattatgccaggaaagtgccaagcaggcacccacgaaagctgagaaaattaagctattgaaaccaatttcagggaaattgagggcccagtgggaaatgggcattgttcaagcagaagaagctgcaagcatgtcagtggaggagcggaaagccaagttcacctttctctatgtgggggaccagcttcatctcaaccctcaagtagccaaggaggctggcattgctgcagagtctttgggagaaatggcagaatcctcaggagtcagtgaagaagctgctgaaaaccccaagtctgtgagagaagagtgcattcccatgaagagaaggcggagggccaaactgtgtagctctgcagagaccctggagagtcaccccgacatagggaagagtactcctcaaaagacggcagaggctgaccccagaagaggagtagggtctcctcctgggaggaagaagaccacagtctccatgccacgaagcaggaagggagatgcagcatcccagtttttggtcttctgtcaaaaacacagggatgaggtggtagctgagcacccagatgcttcaggtgaggagattgaagagctgctcaggtcacagtggagtctgctgagtgagaagcagagagcacgctacaacaccaagtttgccctggtggcccctgtccaggctgaagaagactctggtaatgtaaatgggaaaaaaagaaaccacacaaagaggatacaggaccctacagaagatgctgaagctgaggacacacccaggaaaagactcaggacggacaagcacagtcttcggaagagagacacaatcactgacaaaacggccagaacaagctcttacaaggccatggaggcagcctcctcgctcaagagccaggcagcaacgaaaaatctgtctgatgcatgtaaaccactgaagaagcgaaatcgggcttccacggcagcatcttcagctcttgggtttagcaaaagttcatctccttctgcatccttaactgagaatgagcttttgtgggagcccacaccagtcaagttggatttgaacccagctgctctgtactgcacttagaatgatgtaatattccaggatgctgctgcaggtggcgtatcatcgtacacactcagtgacatttctatcacaatcattttatggaagatgtgtgataatctgtttttactggtattaataaacacatacaatgaagaaaacagataacaaattttaagaccaaggtaagataactaatcaaggccatttaatccgtcacattcatctcataatagaaacacgttcatattccagtggtcaatgtagatttcaagttgaaaggcagtccctttagttgggggctgtccagagctgcagcagggctttgcacggaaggggtggccctgttagagttgcttctcctctagtttgtaacttactggacttttgtggaaaatatcagcgtcgctaccctcagaaacaaactaacagcacacgttaggaggagtcctcatcagctgttctcattgccagtgagatatattcagtattgtagatactacactaatttccaacataagaggcaggaagagttttgattctatccttttttactaaacagttttattatgacactagatacagtaaatttttagaaaaaaataccatttacagtattattgtgaaccatttaacccttttgatccaaggccccggaccaaggggatactgtaatcaggttatgtacaccaacctctgcatcagttgcttctatagagcatcagccctcatgtttcattgtcttaatgtcggggagcagcctggtgtcctgccccaggtgtccgcatttttgcatggtaaggaaaaggcttacttgcccttcagctcataaaagcagaaggtgtgctattcacagtaccatgcgagtagcccacagttaattcccggcagattctttggctgtgttttatctttaatgaacgtttctgactaatattttgttgtaaaccattaagtaatgtaacgcatgtaagatgcttagggtgcctggccaggactccgtggtttcctgttgtgacagtaataatggttataataataaaaatgataaaattgccatcattctatttttatccaaaagtataaattttgctttggcatgaaaagtggtcctcttgactgcattatgcatgcgaggatgaaataaacctagaagtggcagaacactggatttgtgtgtgtggcgctttagggtgctggactgtatggctgagggctggttgggttcctctattggctctgctcaaatgttgcaggatacatagccccaaagatggtctaggagcaatctaagctgtgttactccaaaggacatgaaaaagctcaagagtaaaattaaaattctcaaaaaaaaaccccacgaaatttaaagatggggaaaaaaagatggtataaaaatggctctggttcaataagcagtcacccaaagtaaagactctatcttgaaaggcttttggtgaaaatgaagggatttcatttgaaattacagcatgatgaattttgcatgggtggccagccagctagcccataactgatagatgcattagaagtcagccagcgcataggtgctccctctatattatggagaaagcaaaaccctgcaaatgaccaaatggtgtccaaagagcagcatgacattggcatcagctgaataaccaggggcacatgggggaacgtggatgggaatgatagtgtatctcagcggggggtggggtgacatcgttccctggggacattgggaaggtgggcaggggcaagtgaactcagcactctgcagtgagagggacagtcccatgtgtggcagcattgtcccacttcagatgccaggagtgggctcatcctagaggagcggagttttccgagaggaccatctcctggtttcctgaaggaggtgggtggaaacggctcttgtttgaaagaacttagggaggaccattggcttgccaagagtacagaaattcattatgctgctaatttaacgtggaattccttcatttcataagaacctcaaaataatggtgatacattctagccttaagacatttgaattgccggttgttgaggtgaattttgtttgtcatacatggaaccattttagtcccatttgactcacttcagaccatcttccacacactatgtctgtgcttggagaggggaggtggctctccagtgtaaaacttgaggcattcactagaggtgaaaacttgtcagaatatataaaagcttagattgtagctgttctaaaaacgtaagtactccattgtaatagggtggcatcttcaggtagtgcacatattggcaatagaggtcctgaattgtttttctaagactgatctgagagccattgggccatcaagcctttatatatctgcttctaaaattgccccacctgctctagatggatctttgggcctttcctcagtgttcatgcaaaaattaaatgtcttttttcagcatactgactccaggtgtagttacatctcagtgctgtcttgagtatatattttatctcttatacctgtatctcccaactagaaacagctccagtgtttttaagagaatgtttcttaaaaccaataggaaacttaagcgaggtttcatgacacaacctttcatgtcgtgaaaggcagagggtgactgtgtgtgatgtgcagagtccttggacaggagtcgggggctcctctgtcccactgctgcttcttgagtgggtggagtggtgcttagaggatctccgagaggtccccgcagctctagggagatctgattttgtgttttttgtttaagtacttcacacagaagcctaggtagatttaaaatggggtgctcagggactggggaacaagacggggtggggtggggagatgggcatttggagagtctcatgtagctggagacgttaagagctgagcacaccacaggaaaggagggaggatgctgtgtgagagccatgctgtcaggagcaagcttgctgctcctgtgctgccctggccctggccttgcttgcccatggtgtgtgtgtccagaggtgtgtgtgaggctgccagaacaagtgctgggtctgtcacagagaagtttaaaaaagaaaactaagattataaattagcatctagttccaaaaccaaaaaaagtgcctgtggatgtatataaaattaagatgataagaaagtgctcctgagaaggctcttgccagaagcctgatgtgagtgtgtggcacctgtgatggcagggctgtgagctgggcttctgtcctcctctgtgtcccggcatggaagccagtataagcatttccaaatgagggaaaagtccttggctcgtttgatccagttgagttgaaagggttgccttggcagcagaggctcctctgatggctgacatcagtcactgcgtctgggcctgagacgtgcatggagggctgtaaagccacggattcccctcgctggagaggctcctgtctgatagcggtagatgaaaaataaggtcgttatgactttggcaacttgcttcatttctttttcatttgacttacaacacacttctctaacatctagcccttttaaatttttaattaatttcaaagcttcctctggccaggtagacttttgtatacagaccaggtgagagcccttttgccttagtgtgaaaatgtaacattttatgcttttaaaatcaatagattcatcaccttagttttttaaaaaaaatctataaatagggtaattgctgaggtgtgcggtttatctttgagatgataaagctaaattatagtcttttgccagagaaactgaggtaactgtcattagaaaaggtttcttaaaatactcacaaagctgttattggcttcttaacttctaaaatttggggggtcttgcatttatttattatttatttatttatttatttagagacagagtctcaccctgttggccaggctggagtgcagtaagtggcacaatctcggctcactgcaacctccgcctccttggttccagcaattcttctgcctcagcctcccgagtagctgggactacaagcggctgccaccacacctggctatttttttttgtatttttagtagagacagggtttcgccatattggccaggctggtcttgaactcctgacctcgtgatccacccgcctcaccctcccaaaatgctgggattacaggcgtaagccactgcacctggcggggtcttgcttattttaaaagaaatattctgattcatattttaggactttttgtcaacgaaattggttttgatccctttgggtaccatttttattgttttatgtagaatgttagaaattaccactaatttacctggcagtgatgtcaaattgactgtaattagcaggtagaaaattatttgtattatattcatctgattcctatactggatgagcaaggagcatgcttcctttgggacattcttacagcagggtgtctctccaacagcccgacaggcctcatctttttggttggatacctttgaactccatggttacgtgttaggtccacatttgtgtttttttctagcctacctatagttgttggcctttttgcatataactctcgggtaatattttgaagcatgctgaccatccaggcatatagtattttcaagaaatgactgaggtaggggtgggggtcctggtccggctgatgggggtttgctcagcactgtgccagtggaagcaggtgtattgtgggcagttttgtcattgtcctcaagtccttcgcagacagtgcacagcctgctgtctgcagtcggccagaccaggctcctccccagcacactccctgtgggatggccgctgctcaggacacagtgggacaaagttgggttgataggatattttagattcattttacctttgacaagggcaggccttgaattgggagcagcagccacctggcctcactctggccacaggtgacacttggtccttgctgccacctgcttggggctatgtggctacggctacacaaaagcctgtgcaggttagaagacgactgtggtgtgcagtggtgctctgggagtggagacttcctctgttctcagagactcacccccagccctgaccctagaatttagggatagccaggaagtttctagtttgtgtaacctagaagggtcactttaataaaaattgttatgaactatagtattttagatgatgagtgacttattttaattccactttaacattttactgtgctgttaacttggaagacctgtttgaaattagtcttgatttcacactcatttaatctgctgagcacagggctgttgtcatttgtaaacgcaaacactgtggaggtacttctcgccatcagcttccttctttacaaaaccatcatttcaacatgaaaattatgtcagtttatagaaatatttattgttcaaggtctgtaattgtatttcaaaaacgatgtcgtattcaagttgtgaagggatttgttttgtcaaaaaattaaaaactcaatgtgtatgacgccactctgaagagtaggtgagcgctttgcagtcacagaaggtggcatctgactgcggctcatacaggtcaccctgaagggccacgtgcttttagcagttggctggaatgtgttcactaggttccgttatgtttggtaatatcatcttgaaaagtccctgtaatagatcaaggagactgcattccctgccctgaaggaatgtatttctaaggcaaataggcaacttggtactatcttattctgagtagagagtggagaaagtattttcagactgaagaaaactttgaaaagtcaggagctaagctgctcggagctcagtgccgcagcatggctgtggtggacgcgggaaacaacgggaaagttcttgacagagtctgtgtccgctcagtccctgcacttttcctttccaaatgcatctcgttggatatggaatagatcgtagatgttgtagactgagatttgggactatgttgggaccgtacaggtgaatgtgccacctccacaaatggcttctccgagtgagtcacgtcacctggtgcgtggaggtggagcctgcggctggagtaaggcttgctgtgggacgccctcgtactttgctctccttgcgggtggttgccgagccgagagcattggatcctccccgactgtggctagttgtctgtccggtggctgggagggggtgtggtgggaaaaagtcggaatctctgcaatctgtgtcatggactgtactattgtaaggtctatattctgtatgtgggtcccagaccctgatcaggaaatgagcctcatgtgtgtcgttaacatttatatatttccattcaaaatatgtattcagtgtttatttcctcaaaacagactttgttaatgtaggaaatctctccaagtggaaacgtgctaactttttctgtaaatctgaaataaaaggtgctgttccttcctctg

SEQ ID NO: 200271 - DNA, 5109 bp, Homo sapiens
  Payload ID: 19512
  Gene Name: Wolf-Hirschhorn syndrome candidate 1
  Uniprot ID: O96028
  ENST ID: ENST00000420906
  CDS Start-End: 432-2321
gcatgagccaccgtgcctgtcctagaaccactggtaactcttaactgagacaagatttcgccatgttgcccaggctggtctcgaacttctgagctcaagcgatctacctgcctcgtcctcccaaagtgttggaattgcaggtgtgagccactgcacccggcccttgcctcatgtttgaatgataatttacctgggcataaaattctggacacttgtggtggcacgagctgtctgcttttctgtggagactgcgggttgcagacaccagcagccccctattgctgcacgtcaggtgtcctccacctcagtactgtggacatctcgggccgcatagccctgttgcgcgggcatcctgtgcgttgcaggagatgcagcagcatccatgaccgcaacccatcagagtgttctaagaacggaagcatctgggctggatggaatttagcatcaagcagagtcccctttctgttcagagtgttgtaaagtgcataaagatgaagcaggcaccagaaatcctcggcagtgccaacgggaagactccgagctgcgaggtgaaccgcgagtgttctgtgttcctcagcaaagcccagctctccagtagcctgcaggagggggtcatgcagaagtttaacggccacgacgccctgccctttattccagccgacaagctgaaagatcttacttcccgggtgtttaatggagaacccggcgcacacgatgccaaactgcgttttgagtcccaggaaatgaaagggattgggacaccccctaacactacccctatcaaaaatggctctccagaaattaagctgaaaatcaccaaaacatacatgaatgggaagcctctctttgaatcttccatttgtggtgacagtgctgctgatgtgtctcagtcagaagaaaatggacaaaaaccagaaaacaaggcgagaaggaacaggaagaggagcataaaatatgactccttgctggagcagggccttgtcgaagcagctcttgtgtctaagatctcaagtccttcagataaaaagattccagctaagaaagagtcttgtccaaacactggaagagacaaagaccacctgttgaaatacaacgttggtgatttggtgtggtccaaagtgtcgggttacccttggtggccttgcatggtttctgcagatccactccttcacagctataccaaacttaaaggtcagaaaaagagtgcacgccagtatcacgtacagttctttggtgacgccccagaaagagcttggatatttgagaagagcctcgtagcttttgaaggagaaggacagtttgaaaaattatgccaggaaagtgccaagcaggcacccacgaaagctgagaaaattaagctattgaaaccaatttcagggaaattgagggcccagtgggaaatgggcattgttcaagcagaagaagctgcaagcatgtcagtggaggagcggaaagccaagttcacctttctctatgtgggggaccagcttcatctcaaccctcaagtagccaaggaggctggcattgctgcagagtctttgggagaaatggcagaatcctcaggagtcagtgaagaagctgctgaaaaccccaagtctgtgagagaagagtgcattcccatgaagagaaggcggagggccaaactgtgtagctctgcagagaccctggagagtcaccccgacatagggaagagtactcctcaaaagacggcagaggctgaccccagaagaggagtagggtctcctcctgggaggaagaagaccacagtctccatgccacgaagcaggaagggagatgcagcatcccagtttttggtcttctgtcaaaaacacagggatgaggtggtagctgagcacccagatgcttcaggtgaggagattgaagagctgctcaggtcacagtggagtctgctgagtgagaagcagagagcacgctacaacaccaagtttgccctggtggcccctgtccaggctgaagaagactctggtaatgtaaatgggaaaaaaagaaaccacacaaagaggatacaggaccctacagaagatgctgaagctgaggacacacccaggaaaagactcaggacggacaagcacagtcttcggaagagagacacaatcactgacaaaacggccagaacaagctcttacaaggccatggaggcagcctcctcgctcaagagccaggcagcaacgaaaaatctgtctgatgcatgtaaaccactgaagaagcgaaatcgggcttccacggcagcatcttcagctcttgggtttagcaaaagttcatctccttctgcatccttaactgagaatgaggtaaaataataataataacgataaccatggcattggtatgaaggccatttagctgcccacgctgcagtgtgagtaatgctcagacttcataagcgcagcattggtgctcactgccagtgcagatgttttagggcctcttggctaactcagattcatgaaatggacaaacagtgcactatgttagtttatttgagcactttttatacacacgcacacagtgtctgtgtacatgtacagatatacttcagtcttgatgcagtttcatagttcttaaaatctgtctgaagaatgttgtgttctgtgtagccctcacactgtaagagttcacatggaagtaagtctgcgttggttctgaaagggcacagtgtcagttgagctgacatatactgggtggggtggaaggcgactcacacaccacacctgattcctgttgcttccagacctaggctcatggaggaagccaaagatttctttgttctcatgcatttcatggctttggtcctttaaattctggcacatttttagttacttgagtgttgaggtgagtcagaactaccattgtaatatgactcctgtgttctggacttgcagagtacatgatagcaaaataaagccatttggggctgctgcctgccatcattgtaacatgacacttagactttattatcaaacctaaattttttgccgttgccaaaaacaacaaatagccacagaacgtaggtgtgacacttttttgttcggaggtagttttggtttcctgatttttagggattaccttcatagagctttggagttttaatttcttgttatttggttctccgtgatgctgtttttctcattgtagacatgggtcctgtttttgtcatgtttatgaggagatgataactgggggcccttttggaacagggtagtgaggcaagggttggacaggccccttactcttgctgagtcagaaggcggcacttctggccaggtctctgccatggtccccaggaaggatggggtgtgcctcagttgtttccactcattagaggagtgtaggccttccagtgcaggaaggtcagggacctaggcaacctgggcggggctcatagagctctgcggcttgccactctgaatcctcagcgaccactcctccgagtgggattttctgcagggactcaaaccaactcagtggtggtcgagacctgttcacggatggtgggactggggctgctttacagtttgatacgtgtagataattaagcattttgtgatgtttggacacactggagaaaaggcagtaagaattatttactgaaacatctaggagcttactgaaatatgaaaaggcaaattttatacaaattatttttcctttttcctttctttcttgtccaagttcaggttaaaatcttagaaaattaaatgaaaggtcatttacagttccaaagaagaatattaaacatttttcacttaagttgagatttttgctttaaagagcttttaatgagtttttctgttatcataattttggtccggttattcacttgagttgttgcttatactgttgtcaggtacagtagagagaacatggagcctgctgagatcttctctgttattcctgatcctaagtcatgtatatcgaaggctttgatttagagtaatgcatgaggccagtgtagcggggtcgaggcctgcccatgagtcaggggagctcagtctccctggcctaggcagttgtcctgaccttgagaagacatagatgaagcattttatcatcattagacttaaattttaattcttcagaatgtcagaagttgataggttgttaaatacatttatataatacattaaatatgtgaaattaatacaccttcctacattttgaaggtgatgcatagatcccatagtgtgcatcatgttccttatatgaaaacgtttaaattactgggtcttttccattaaactacttttgtatggcttagataaatcttccattagtgttcatttttatagaattatgctgttaaaactactttaggtgaacaaataaacttgtctattatatattaacgcgactgaactacagtaaatgtttgtgatgtttccaatgctgaatgcctgttagcatatgaggcaaagtgtagtgttataaaaaacagcctgttgactgctgggcccgattctgatatgagttaggtgaccatgagaattgctgtttgaggtccacactgacacacacccattgggtcacaccccctttgcatgtttgtatttcctccctttcatcacatttgtttgaaataaggtacttttatagggttggtatttcagaacactttaggtcatgttgtagtttaaattcttcttgaaaaaggtatatgtgataaataaaaatttttattggaataattattacatggtactacatcaccctgaggaagagaataaattaaaattacacacttgcatgacaaaggcctgtgaaggaattaatgtgatttaagtgttttgtaacttcattttttattcctttagtagagcaaattcttatttttttcgccttcactggtaacagcttttgtgggagcccacaccagtcaagttggatttgaacccagctgctctgtactgcacttagaatgatgtaatattccaggatgctgctgcaggtggcgtatcatcgtacacactcagtgacatttctatcacaatcattttatggaagatgtgtgataatctgtttttactggtattaataaacacatacaatgaagaaaacagataacaaattttaagaccaaggtaagataac

SEQ ID NO: 200272 - DNA, 835 bp, Homo sapiens
  Payload ID: 19512
  Gene Name: Wolf-Hirschhorn syndrome candidate 1
  Uniprot ID: O96028
  ENST ID: ENST00000436793
  CDS Start-End: 14-835
gcatctgggctggatggaatttagcatcaagcagagtcccctttctgttcagagtgttgtaaagtgcataaagatgaagcaggcaccagaaatcctcggcagtgccaacgggaagactccgagctgcgaggtgaaccgcgagtgttctgtgttcctcagcaaagcccagctctccagtagcctgcaggagggggtcatgcagaagtttaacggccacgacgccctgccctttattccagccgacaagctgaaagatcttacttcccgggtgtttaatggagaacccggcgcacacgatgccaaactgcgttttgagtcccaggaaatgaaagggattgggacaccccctaacactacccctatcaaaaatggctctccagaaattaagctgaaaatcaccaaaacatacatgaatgggaagcctctctttgaatcttccatttgtggtgacagtgctgctgatgtgtctcagtcagaagaaaatggacaaaaaccagaaaacaaggcgagaaggaacaggaagaggagcataaaatatgactccttgctggagcagggccttgtcgaagcagctcttgtgtctaagatctcaagtccttcagataaaaagattccagctaagaaagagtcttgtccaaacactggaagagacaaagaccacctgttgaaatacaacgttggtgatttggtgtggtccaaagtgtcgggttacccttggtggccttgcatggtttctgcagatccactccttcacagctataccaaacttaaaggtattttcaaatcaaagaagtttgaacacttaaaaacaagtcaaattgtactgaaagattaa

SEQ ID NO: 200273 - DNA, 528 bp, Homo sapiens
  Payload ID: 19512
  Gene Name: Wolf-Hirschhorn syndrome candidate 1
  ENST ID: ENST00000507820
  CDS Start-End: 417-528
gccgccgccgccgccccctccccgcctgggccctaccgccgcacggccccggccccctcccagcctgccgctccggagagccgcccgccgaggatgcgacgcaccgcagagatgggtctcgccatcaccatgttgcccagtctggtctccaactcctgggctcaagcgatcctcctgccttggtctcccaaagtgctgggattacagagacaagatttcgccatgttgcccaggctggtctcgaacttctgagctcaagcgatctacctgcctcgtcctcccaaagtgttggaattgcaggtgtgagccactgcacccggcccttgcctcatgtttgaatgataatttacctgggcataaaattctggacacttgtggtggcacgagtgttctaagaacggaagcatctgggctggatggaatttagcatcaagcagagtcccctttctgttcagagtgttgtaaagtgcataaagatgaagcaggcaccagaaatcctcggcagtgccaacgggaagactccgagct

SEQ ID NO: 200274 - DNA, 3964 bp, Homo sapiens
  Payload ID: 19512
  Gene Name: Wolf-Hirschhorn syndrome candidate 1
  Uniprot ID: O96028
  ENST ID: ENST00000514045
  CDS Start-End: 112-2001
gggccctaccgccgcacggccccggccccctcccagcctgccgctccggagagccgcccgccgaggatgcgacgcaccgcagtgttctaagaacggaagcatctgggctggatggaatttagcatcaagcagagtcccctttctgttcagagtgttgtaaagtgcataaagatgaagcaggcaccagaaatcctcggcagtgccaacgggaagactccgagctgcgaggtgaaccgcgagtgttctgtgttcctcagcaaagcccagctctccagtagcctgcaggagggggtcatgcagaagtttaacggccacgacgccctgccctttattccagccgacaagctgaaagatcttacttcccgggtgtttaatggagaacccggcgcacacgatgccaaactgcgttttgagtcccaggaaatgaaagggattgggacaccccctaacactacccctatcaaaaatggctctccagaaattaagctgaaaatcaccaaaacatacatgaatgggaagcctctctttgaatcttccatttgtggtgacagtgctgctgatgtgtctcagtcagaagaaaatggacaaaaaccagaaaacaaggcgagaaggaacaggaagaggagcataaaatatgactccttgctggagcagggccttgtcgaagcagctcttgtgtctaagatctcaagtccttcagataaaaagattccagctaagaaagagtcttgtccaaacactggaagagacaaagaccacctgttgaaatacaacgttggtgatttggtgtggtccaaagtgtcgggttacccttggtggccttgcatggtttctgcagatccactccttcacagctataccaaacttaaaggtcagaaaaagagtgcacgccagtatcacgtacagttctttggtgacgccccagaaagagcttggatatttgagaagagcctcgtagcttttgaaggagaaggacagtttgaaaaattatgccaggaaagtgccaagcaggcacccacgaaagctgagaaaattaagctattgaaaccaatttcagggaaattgagggcccagtgggaaatgggcattgttcaagcagaagaagctgcaagcatgtcagtggaggagcggaaagccaagttcacctttctctatgtgggggaccagcttcatctcaaccctcaagtagccaaggaggctggcattgctgcagagtctttgggagaaatggcagaatcctcaggagtcagtgaagaagctgctgaaaaccccaagtctgtgagagaagagtgcattcccatgaagagaaggcggagggccaaactgtgtagctctgcagagaccctggagagtcaccccgacatagggaagagtactcctcaaaagacggcagaggctgaccccagaagaggagtagggtctcctcctgggaggaagaagaccacagtctccatgccacgaagcaggaagggagatgcagcatcccagtttttggtcttctgtcaaaaacacagggatgaggtggtagctgagcacccagatgcttcaggtgaggagattgaagagctgctcaggtcacagtggagtctgctgagtgagaagcagagagcacgctacaacaccaagtttgccctggtggcccctgtccaggctgaagaagactctggtaatgtaaatgggaaaaaaagaaaccacacaaagaggatacaggaccctacagaagatgctgaagctgaggacacacccaggaaaagactcaggacggacaagcacagtcttcggaagagagacacaatcactgacaaaacggccagaacaagctcttacaaggccatggaggcagcctcctcgctcaagagccaggcagcaacgaaaaatctgtctgatgcatgtaaaccactgaagaagcgaaatcgggcttccacggcagcatcttcagctcttgggtttagcaaaagttcatctccttctgcatccttaactgagaatgaggtaaaataataataataacgataaccatggcattggtatgaaggccatttagctgcccacgctgcagtgtgagtaatgctcagacttcataagcgcagcattggtgctcactgccagtgcagatgttttagggcctcttggctaactcagattcatgaaatggacaaacagtgcactatgttagtttatttgagcactttttatacacacgcacacagtgtctgtgtacatgtacagatatacttcagtcttgatgcagtttcatagttcttaaaatctgtctgaagaatgttgtgttctgtgtagccctcacactgtaagagttcacatggaagtaagtctgcgttggttctgaaagggcacagtgtcagttgagctgacatatactgggtggggtggaaggcgactcacacaccacacctgattcctgttgcttccagacctaggctcatggaggaagccaaagatttctttgttctcatgcatttcatggctttggtcctttaaattctggcacatttttagttacttgagtgttgaggtgagtcagaactaccattgtaatatgactcctgtgttctggacttgcagagtacatgatagcaaaataaagccatttggggctgctgcctgccatcattgtaacatgacacttagactttattatcaaacctaaattttttgccgttgccaaaaacaacaaatagccacagaacgtaggtgtgacacttttttgttcggaggtagttttggtttcctgatttttagggattaccttcatagagctttggagttttaatttcttgttatttggttctccgtgatgctgtttttctcattgtagacatgggtcctgtttttgtcatgtttatgaggagatgataactgggggcccttttggaacagggtagtgaggcaagggttggacaggccccttactcttgctgagtcagaaggcggcacttctggccaggtctctgccatggtccccaggaaggatggggtgtgcctcagttgtttccactcattagaggagtgtaggccttccagtgcaggaaggtcagggacctaggcaacctgggcggggctcatagagctctgcggcttgccactctgaatcctcagcgaccactcctccgagtgggattttctgcagggactcaaaccaactcagtggtggtcgagacctgttcacggatggtgggactggggctgctttacagtttgatacgtgtagataattaagcattttgtgatgtttggacacactggagaaaaggcagtaagaattatttactgaaacatctaggagcttactgaaatatgaaaaggcaaattttatacaaattatttttcctttttcctttctttcttgtccaagttcaggttaaaatcttagaaaattaaatgaaaggtcatttacagttccaaagaagaatattaaacatttttcacttaagttgagatttttgctttaaagagcttttaatgagtttttctgttatcataattttggtccggttattcacttgagttgttgcttatactgttgtcaggtacagtagagagaacatggagcctgctgagatcttctctgttattcctgatcctaagtcatgtatatcgaaggctttgatttagagtaatgcatgaggccagtgtagcggggtcgaggcctgcccatgagtcaggggagctcagtctccctggcctaggcagttgtcctgaccttgagaagacatagatgaagcattttatcatcattagacttaaattttaattcttcagaatgtcagaagttgataggttgttaaatacatttatataatacattaaatatgtgaaattaatacaccttcctacattttgaaggtgatgcatagatcccatagtgtgcatcatgttccttatatgaaaacgtttaaattactgggtcttttccattaaactacttttgtatggcttagataaa

SEQ ID NO: 200275 - DNA, 1212 bp, Homo sapiens
  Payload ID: 19512
  Gene Name: Wolf-Hirschhorn syndrome candidate 1
  ENST ID: ENST00000509115
  CDS Start-End: 37-1212
accatagtgttctaagaacggaagcatctgggctggatggaatttagcatcaagcagagtcccctttctgttcagagtgttgtaaagtgcataaagatgaagcaggcaccagaaatcctcggcagtgccaacgggaagactccgagctgcgaggtgaaccgcgagtgttctgtgttcctcagcaaagcccagctctccagtagcctgcaggagggggtcatgcagaagtttaacggccacgacgccctgccctttattccagccgacaagctgaaagatcttacttcccgggtgtttaatggagaacccggcgcacacgatgccaaactgcgttttgagtcccaggaaatgaaagggattgggacaccccctaacactacccctatcaaaaatggctctccagaaattaagctgaaaatcaccaaaacatacatgaatgggaagcctctctttgaatcttccatttgtggtgacagtgctgctgatgtgtctcagtcagaagaaaatggacaaaaaccagaaaacaaggcgagaaggaacaggaagaggagcataaaatatgactccttgctggagcagggccttgtcgaagcagctcttgtgtctaagatctcaagtccttcagataaaaagattccagctaagaaagagtcttgtccaaacactggaagagacaaagaccacctgttgaaatacaacgttggtgatttggtgtggtccaaagtgtcgggttacccttggtggccttgcatggtttctgcagatccactccttcacagctataccaaacttaaaggtcagaaaaagagtgcacgccagtatcacgtacagttctttggtgacgccccagaaagagcttggatatttgagaagagcctcgtagcttttgaaggagaaggacagtttgaaaaattatgccaggaaagtgccaagcaggcacccacgaaagctgagaaaattaagctattgaaaccaatttcagggaaattgagggcccagtgggaaatgggcattgttcaagcagaagaagctgcaagcatgtcagtggaggagcggaaagccaagttcacctttctctatgtgggggaccagcttcatctcaaccctcaagtagccaaggaggctggcattgctgcagagtctttgggagaaatggcagaatcctcaggagtcagtgaagaagctgctgaaaaccccaagtctgtgagagaa

SEQ ID NO: 200276 - DNA, 4251 bp, Homo sapiens
  Payload ID: 19512
  Gene Name: Wolf-Hirschhorn syndrome candidate 1
  Uniprot ID: O96028
  ENST ID: ENST00000508803
  CDS Start-End: 149-4246
cgctgcgcccgccgccgccgccgccccctccccgcctgggccctaccgccgcacggccccggccccctcccagcctgccgctccggagagccgcccgccgaggatgcgacgcaccgcagtgttctaagaacggaagcatctgggctggatggaatttagcatcaagcagagtcccctttctgttcagagtgttgtaaagtgcataaagatgaagcaggcaccagaaatcctcggcagtgccaacgggaagactccgagctgcgaggtgaaccgcgagtgttctgtgttcctcagcaaagcccagctctccagtagcctgcaggagggggtcatgcagaagtttaacggccacgacgccctgccctttattccagccgacaagctgaaagatcttacttcccgggtgtttaatggagaacccggcgcacacgatgccaaactgcgttttgagtcccaggaaatgaaagggattgggacaccccctaacactacccctatcaaaaatggctctccagaaattaagctgaaaatcaccaaaacatacatgaatgggaagcctctctttgaatcttccatttgtggtgacagtgctgctgatgtgtctcagtcagaagaaaatggacaaaaaccagaaaacaaggcgagaaggaacaggaagaggagcataaaatatgactccttgctggagcagggccttgtcgaagcagctcttgtgtctaagatctcaagtccttcagataaaaagattccagctaagaaagagtcttgtccaaacactggaagagacaaagaccacctgttgaaatacaacgttggtgatttggtgtggtccaaagtgtcgggttacccttggtggccttgcatggtttctgcagatccactccttcacagctataccaaacttaaaggtcagaaaaagagtgcacgccagtatcacgtacagttctttggtgacgccccagaaagagcttggatatttgagaagagcctcgtagcttttgaaggagaaggacagtttgaaaaattatgccaggaaagtgccaagcaggcacccacgaaagctgagaaaattaagctattgaaaccaatttcagggaaattgagggcccagtgggaaatgggcattgttcaagcagaagaagctgcaagcatgtcagtggaggagcggaaagccaagttcacctttctctatgtgggggaccagcttcatctcaaccctcaagtagccaaggaggctggcattgctgcagagtctttgggagaaatggcagaatcctcaggagtcagtgaagaagctgctgaaaaccccaagtctgtgagagaagagtgcattcccatgaagagaaggcggagggccaaactgtgtagctctgcagagaccctggagagtcaccccgacatagggaagagtactcctcaaaagacggcagaggctgaccccagaagaggagtagggtctcctcctgggaggaagaagaccacagtctccatgccacgaagcaggaagggagatgcagcatcccagtttttggtcttctgtcaaaaacacagggatgaggtggtagctgagcacccagatgcttcaggtgaggagattgaagagctgctcaggtcacagtggagtctgctgagtgagaagcagagagcacgctacaacaccaagtttgccctggtggcccctgtccaggctgaagaagactctggtaatgtaaatgggaaaaaaagaaaccacacaaagaggatacaggaccctacagaagatgctgaagctgaggacacacccaggaaaagactcaggacggacaagcacagtcttcggaagagagacacaatcactgacaaaacggccagaacaagctcttacaaggccatggaggcagcctcctcgctcaagagccaggcagcaacgaaaaatctgtctgatgcatgtaaaccactgaagaagcgaaatcgggcttccacggcagcatcttcagctcttgggtttagcaaaagttcatctccttctgcatccttaactgagaatgaggtctcggacagcccgggagacgagccctcggagtccccatacgaaagtgcagacgaaacacaaactgaagtatctgtctcatccaaaaagtctgagcgaggagtgactgccaaaaaggagtatgtgtgccagctgtgtgagaagccgggcagcctcctgctctgtgaaggaccctgctgcggagctttccacctcgcctgccttgggctttcccggaggccagaagggaggttcacctgcagcgagtgtgcctcagggattcactcatgtttcgtgtgtaaagagagcaagacagatgttaagcgctgtgtggtaactcagtgtggaaaattttaccatgaggcttgtgtgaaaaaataccctctgactgtatttgagagccgaggtttccgctgccccctccacagctgtgtgagctgccatgcttccaacccttcaaacccaaggccgtcaaaaggtaaaatgatgcggtgtgtccgctgccccgttgcctatcacagcggggatgcttgtctggcagcaggatgctcagtgatcgcctccaacagcatcatctgcactgcccacttcactgctcggaaggggaagcgacaccacgcccacgtcaacgtgagctggtgcttcgtgtgctccaaaggggggagccttctgtgctgtgagtcctgcccagcggccttccaccctgactgcctgaacatcgagatgcctgacggcagctggttctgcaatgactgcagggctgggaagaagctgcacttccaggatatcatttgggtgaaacttgggaactacagatggtggccggcagaagtttgccatcccaaaaatgttcccccaaatattcagaaaatgaagcacgagattggagaattccctgtgtttttctttgggtctaaagattattactggacgcatcaggcgcgagtgttcccgtacatggagggggaccggggcagccgctaccagggggtcagagggatcggaagagtcttcaaaaacgcactgcaagaagctgaagctcgttttcgtgaaattaagcttcagagggaagcccgagaaacacaggagagcgagcgcaagcccccaccatacaagcacatcaaggtgaataagccttacgggaaagtccagatctacacagcggatatttcagaaatccctaagtgcaactgcaagcccacagatgagaatccttgtggctttgattcggagtgtctgaacaggatgctgatgtttgagtgccacccgcaggtgtgtcccgcgggcgagttctgccagaaccagtgcttcaccaagcgccagtacccagagaccaagatcatcaagacagatggcaaagggtggggcctggtcgccaagagggacatcagaaagggagaatttgttaacgagtacgttggggagctgatcgacgaggaggagtgcatggcgagaatcaagcacgcacacgagaacgacatcacccacttctacatgctcactatagacaaggaccgtataatagacgctggccccaaaggaaactactctcgatttatgaatcacagctgccagcccaactgtgagaccctcaagtggacagtgaatggggacactcgtgtgggcctgtttgccgtctgtgacattcctgcagggacggagctgacttttaactacaacctcgattgtctgggcaatgaaaaaacggtctgccggtgtggagcctccaattgcagtggattcctcggggatagaccaaagacctcgacgaccctttcatcagaggaaaagggcaaaaagaccaagaagaaaacgaggcggcgcagagcaaaaggggaagggaagaggcagtcagaggacgagtgcttccgctgcggtgatggcgggcagctggtgctgtgtgaccgcaagttctgcaccaaggcctaccacctgtcctgcctgggccttggcaagcggcccttcgggaagtgggaatgtccttggcatcattgtgacgtgtgtggcaaaccttcgacttcattttgccacctctgccccaattcgttctgtaaggagcaccaggacgggacagccttcagctgcaccccggacgggcggtcctactgctgtgagcatgacttaggggcggcatcggtcagaagcaccaagactgagaagccccccccagagccagggaagccgaaggggaagaggcggcggcggaggggctggcggagagtcacagagggcaaatagcgcca

SEQ ID NO: 200277 - DNA, 690 bp, Homo sapiens
  Payload ID: 19512
  Gene Name: Wolf-Hirschhorn syndrome candidate 1
  ENST ID: ENST00000511904
  CDS Start-End: 1-492
agctctgcagagaccctggagagtcaccccgacatagggaagagtactcctcaaaagacggcagaggctgaccccagaagaggagtagggtctcctcctgggaggaagaagaccacagtctccatgccacgaagcaggaagggagatgcagcatcccagtttttggtcttctgtcaaaaacacagggatgaggtggtagctgagcacccagatgcttcaggtgaggagattgaagagctgctcaggtcacagtggagtctgctgagtgagaagcagagagcacgctacaacaccaagtttgccctggtggcccctgtccaggctgaagaagactctggtaatgtaaatgggaaaaaaagaaaccacacaaagaggatacaggaccctacagaagatgctgaagctgaggacacacccaggaaaagactcaggacggacaagcacagtcttcggaagcaacgaaaaatctgtctgatgcatgtaaaccactgaagaagcgaaatcgggcttccacggcagcatcttcagctcttgggtttagcaaaagttcatctccttctgcatccttaactgagaatgaggtctcggacagcccgggagacgagccctcggagtccccatacgaaagtgcagacgaaacacaaactgaagtatctgtctcatccaaaaagtctgagcgaggagtgactg

SEQ ID NO: 200278 - DNA, 851 bp, Homo sapiens
  Payload ID: 19512
  Gene Name: Wolf-Hirschhorn syndrome candidate 1
  ENST ID: ENST00000514329
  CDS Start-End: 1-851
aaatctgtctgatgcatgtaaaccactgaagaagcgaaatcgggcttccacggcagcatcttcagctcttgggtttagcaaaagttcatctccttctgcatccttaactgagaatgaggtctcggacagcccgggagacgagccctcggagtccccatacgaaagtgcagacgaaacacaaactgaagtatctgtctcatccaaaaagtctgagcgaggagtgactgccaaaaaggagtatgtgtgccagctgtgtgagaagccgggcagcctcctgctctgtgaaggaccctgctgcggagctttccacctcgcctgccttgggctttcccggaggccagaagggaggttcacctgcagcgagtgtgcctcaggatgctcagtgatcgcctccaacagcatcatctgcactgcccacttcactgctcggaaggggaagcgacaccacgcccacgtcaacgtgagctggtgcttcgtgtgctccaaaggggggagccttctgtgctgtgagtcctgcccagcggccttccaccctgactgcctgaacatcgagatgcctgacggcagctggttctgcaatgactgcagggctgggaagaagctgcacttccaggatatcatttgggtgaaacttgggaactacagatggtggccggcagaagtttgccatcccaaaaatgttcccccaaatattcagaaaatgaagcacgagattggagaattccctgtgtttttctttgggtctaaagattattactggacgcatcaggcgcgagtgttcccgtacatggagggggaccggggcagccgctaccagggggtcagagggatcggaagagtcttcaaaaacg

SEQ ID NO: 200279 - DNA, 8568 bp, Homo sapiens
  Payload ID: 19512
  Gene Name: Wolf-Hirschhorn syndrome candidate 1
  Uniprot ID: O96028
  ENST ID: ENST00000503128
  CDS Start-End: 208-2151
cagctgtctgcttttctgtggagactgcgggttgcagacaccagcagccccctattgctgcacgtcaggtgtcctccacctcagtactgtggacatctcgggccgcatagccctgttgcgcgggcatcctgtgcgttgcaggagatgcagcagcatccatgaccgcaacccatcagagtgttctaagaacggaagcatctgggctggatggaatttagcatcaagcagagtcccctttctgttcagagtgttgtaaagtgcataaagatgaagcaggcaccagaaatcctcggcagtgccaacgggaagactccgagctgcgaggtgaaccgcgagtgttctgtgttcctcagcaaagcccagctctccagtagcctgcaggagggggtcatgcagaagtttaacggccacgacgccctgccctttattccagccgacaagctgaaagatcttacttcccgggtgtttaatggagaacccggcgcacacgatgccaaactgcgttttgagtcccaggaaatgaaagggattgggacaccccctaacactacccctatcaaaaatggctctccagaaattaagctgaaaatcaccaaaacatacatgaatgggaagcctctctttgaatcttccatttgtggtgacagtgctgctgatgtgtctcagtcagaagaaaatggacaaaaaccagaaaacaaggcgagaaggaacaggaagaggagcataaaatatgactccttgctggagcagggccttgtcgaagcagctcttgtgtctaagatctcaagtccttcagataaaaagattccagctaagaaagagtcttgtccaaacactggaagagacaaagaccacctgttgaaatacaacgttggtgatttggtgtggtccaaagtgtcgggttacccttggtggccttgcatggtttctgcagatccactccttcacagctataccaaacttaaaggtcagaaaaagagtgcacgccagtatcacgtacagttctttggtgacgccccagaaagagcttggatatttgagaagagcctcgtagcttttgaaggagaaggacagtttgaaaaattatgccaggaaagtgccaagcaggcacccacgaaagctgagaaaattaagctattgaaaccaatttcagggaaattgagggcccagtgggaaatgggcattgttcaagcagaagaagctgcaagcatgtcagtggaggagcggaaagccaagttcacctttctctatgtgggggaccagcttcatctcaaccctcaagtagccaaggaggctggcattgctgcagagtctttgggagaaatggcagaatcctcaggagtcagtgaagaagctgctgaaaaccccaagtctgtgagagaagagtgcattcccatgaagagaaggcggagggccaaactgtgtagctctgcagagaccctggagagtcaccccgacatagggaagagtactcctcaaaagacggcagaggctgaccccagaagaggagtagggtctcctcctgggaggaagaagaccacagtctccatgccacgaagcaggaagggagatgcagcatcccagtttttggtcttctgtcaaaaacacagggatgaggtggtagctgagcacccagatgcttcaggtgaggagattgaagagctgctcaggtcacagtggagtctgctgagtgagaagcagagagcacgctacaacaccaagtttgccctggtggcccctgtccaggctgaagaagactctggtaatgtaaatgggaaaaaaagaaaccacacaaagaggatacaggaccctacagaagatgctgaagctgaggacacacccaggaaaagactcaggacggacaagcacagtcttcggaagagagacacaatcactgacaaaacggccagaacaagctcttacaaggccatggaggcagcctcctcgctcaagagccaggcagcaacgaaaaatctgtctgatgcatgtaaaccactgaagaagcgaaatcgggcttccacggcagcatcttcagctcttgggtttagcaaaagttcatctccttctgcatccttaactgagaatgagcttttgtgggagcccacaccagtcaagttggatttgaacccagctgctctgtactgcacttagaatgatgtaatattccaggatgctgctgcaggtggcgtatcatcgtacacactcagtgacatttctatcacaatcattttatggaagatgtgtgataatctgtttttactggtattaataaacacatacaatgaagaaaacagataacaaattttaagaccaaggtaagataactaatcaaggccatttaatccgtcacattcatctcataatagaaacacgttcatattccagtggtcaatgtagatttcaagttgaaaggcagtccctttagttgggggctgtccagagctgcagcagggctttgcacggaaggggtggccctgttagagttgcttctcctctagtttgtaacttactggacttttgtggaaaatatcagcgtcgctaccctcagaaacaaactaacagcacacgttaggaggagtcctcatcagctgttctcattgccagtgagatatattcagtattgtagatactacactaatttccaacataagaggcaggaagagttttgattctatccttttttactaaacagttttattatgacactagatacagtaaatttttagaaaaaaataccatttacagtattattgtgaaccatttaacccttttgatccaaggccccggaccaaggggatactgtaatcaggttatgtacaccaacctctgcatcagttgcttctatagagcatcagccctcatgtttcattgtcttaatgtcggggagcagcctggtgtcctgccccaggtgtccgcatttttgcatggtaaggaaaaggcttacttgcccttcagctcataaaagcagaaggtgtgctattcacagtaccatgcgagtagcccacagttaattcccggcagattctttggctgtgttttatctttaatgaacgtttctgactaatattttgttgtaaaccattaagtaatgtaacgcatgtaagatgcttagggtgcctggccaggactccgtggtttcctgttgtgacagtaataatggttataataataaaaatgataaaattgccatcattctatttttatccaaaagtataaattttgctttggcatgaaaagtggtcctcttgactgcattatgcatgcgaggatgaaataaacctagaagtggcagaacactggatttgtgtgtgtggcgctttagggtgctggactgtatggctgagggctggttgggttcctctattggctctgctcaaatgttgcaggatacatagccccaaagatggtctaggagcaatctaagctgtgttactccaaaggacatgaaaaagctcaagagtaaaattaaaattctcaaaaaaaaaccccacgaaatttaaagatggggaaaaaaagatggtataaaaatggctctggttcaataagcagtcacccaaagtaaagactctatcttgaaaggcttttggtgaaaatgaagggatttcatttgaaattacagcatgatgaattttgcatgggtggccagccagctagcccataactgatagatgcattagaagtcagccagcgcataggtgctccctctatattatggagaaagcaaaaccctgcaaatgaccaaatggtgtccaaagagcagcatgacattggcatcagctgaataaccaggggcacatgggggaacgtggatgggaatgatagtgtatctcagcggggggtggggtgacatcgttccctggggacattgggaaggtgggcaggggcaagtgaactcagcactctgcagtgagagggacagtcccatgtgtggcagcattgtcccacttcagatgccaggagtgggctcatcctagaggagcggagttttccgagaggaccatctcctggtttcctgaaggaggtgggtggaaacggctcttgtttgaaagaacttagggaggaccattggcttgccaagagtacagaaattcattatgctgctaatttaacgtggaattccttcatttcataagaacctcaaaataatggtgatacattctagccttaagacatttgaattgccggttgttgaggtgaattttgtttgtcatacatggaaccattttagtcccatttgactcacttcagaccatcttccacacactatgtctgtgcttggagaggggaggtggctctccagtgtaaaacttgaggcattcactagaggtgaaaacttgtcagaatatataaaagcttagattgtagctgttctaaaaacgtaagtactccattgtaatagggtggcatcttcaggtagtgcacatattggcaatagaggtcctgaattgtttttctaagactgatctgagagccattgggccatcaagcctttatatatctgcttctaaaattgccccacctgctctagatggatctttgggcctttcctcagtgttcatgcaaaaattaaatgtcttttttcagcatactgactccaggtgtagttacatctcagtgctgtcttgagtatatattttatctcttatacctgtatctcccaactagaaacagctccagtgtttttaagagaatgtttcttaaaaccaataggaaacttaagcgaggtttcatgacacaacctttcatgtcgtgaaaggcagagggtgactgtgtgtgatgtgcagagtccttggacaggagtcgggggctcctctgtcccactgctgcttcttgagtgggtggagtggtgcttagaggatctccgagaggtccccgcagctctagggagatctgattttgtgttttttgtttaagtacttcacacagaagcctaggtagatttaaaatggggtgctcagggactggggaacaagacggggtggggtggggagatgggcatttggagagtctcatgtagctggagacgttaagagctgagcacaccacaggaaaggagggaggatgctgtgtgagagccatgctgtcaggagcaagcttgctgctcctgtgctgccctggccctggccttgcttgcccatggtgtgtgtgtccagaggtgtgtgtgaggctgccagaacaagtgctgggtctgtcacagagaagtttaaaaaagaaaactaagattataaattagcatctagttccaaaaccaaaaaaagtgcctgtggatgtatataaaattaagatgataagaaagtgctcctgagaaggctcttgccagaagcctgatgtgagtgtgtggcacctgtgatggcagggctgtgagctgggcttctgtcctcctctgtgtcccggcatggaagccagtataagcatttccaaatgagggaaaagtccttggctcgtttgatccagttgagttgaaagggttgccttggcagcagaggctcctctgatggctgacatcagtcactgcgtctgggcctgagacgtgcatggagggctgtaaagccacggattcccctcgctggagaggctcctgtctgatagcggtagatgaaaaataaggtcgttatgactttggcaacttgcttcatttctttttcatttgacttacaacacacttctctaacatctagcccttttaaatttttaattaatttcaaagcttcctctggccaggtagacttttgtatacagaccaggtgagagcccttttgccttagtgtgaaaatgtaacattttatgcttttaaaatcaatagattcatcaccttagttttttaaaaaaaatctataaatagggtaattgctgaggtgtgcggtttatctttgagatgataaagctaaattatagtcttttgccagagaaactgaggtaactgtcattagaaaaggtttcttaaaatactcacaaagctgttattggcttcttaacttctaaaatttggggggtcttgcatttatttattatttatttatttatttatttagagacagagtctcaccctgttggccaggctggagtgcagtaagtggcacaatctcggctcactgcaacctccgcctccttggttccagcaattcttctgcctcagcctcccgagtagctgggactacaagcggctgccaccacacctggctatttttttttgtatttttagtagagacagggtttcgccatattggccaggctggtcttgaactcctgacctcgtgatccacccgcctcaccctcccaaaatgctgggattacaggcgtaagccactgcacctggcggggtcttgcttattttaaaagaaatattctgattcatattttaggactttttgtcaacgaaattggttttgatccctttgggtaccatttttattgttttatgtagaatgttagaaattaccactaatttacctggcagtgatgtcaaattgactgtaattagcaggtagaaaattatttgtattatattcatctgattcctatactggatgagcaaggagcatgcttcctttgggacattcttacagcagggtgtctctccaacagcccgacaggcctcatctttttggttggatacctttgaactccatggttacgtgttaggtccacatttgtgtttttttctagcctacctatagttgttggcctttttgcatataactctcgggtaatattttgaagcatgctgaccatccaggcatatagtattttcaagaaatgactgaggtaggggtgggggtcctggtccggctgatgggggtttgctcagcactgtgccagtggaagcaggtgtattgtgggcagttttgtcattgtcctcaagtccttcgcagacagtgcacagcctgctgtctgcagtcggccagaccaggctcctccccagcacactccctgtgggatggccgctgctcaggacacagtgggacaaagttgggttgataggatattttagattcattttacctttgacaagggcaggccttgaattgggagcagcagccacctggcctcactctggccacaggtgacacttggtccttgctgccacctgcttggggctatgtggctacggctacacaaaagcctgtgcaggttagaagacgactgtggtgtgcagtggtgctctgggagtggagacttcctctgttctcagagactcacccccagccctgaccctagaatttagggatagccaggaagtttctagtttgtgtaacctagaagggtcactttaataaaaattgttatgaactatagtattttagatgatgagtgacttattttaattccactttaacattttactgtgctgttaacttggaagacctgtttgaaattagtcttgatttcacactcatttaatctgctgagcacagggctgttgtcatttgtaaacgcaaacactgtggaggtacttctcgccatcagcttccttctttacaaaaccatcatttcaacatgaaaattatgtcagtttatagaaatatttattgttcaaggtctgtaattgtatttcaaaaacgatgtcgtattcaagttgtgaagggatttgttttgtcaaaaaattaaaaactcaatgtgtatgacgccactctgaagagtaggtgagcgctttgcagtcacagaaggtggcatctgactgcggctcatacaggtcaccctgaagggccacgtgcttttagcagttggctggaatgtgttcactaggttccgttatgtttggtaatatcatcttgaaaagtccctgtaatagatcaaggagactgcattccctgccctgaaggaatgtatttctaaggcaaataggcaacttggtactatcttattctgagtagagagtggagaaagtattttcagactgaagaaaactttgaaaagtcaggagctaagctgctcggagctcagtgccgcagcatggctgtggtggacgcgggaaacaacgggaaagttcttgacagagtctgtgtccgctcagtccctgcacttttcctttccaaatgcatctcgttggatatggaatagatcgtagatgttgtagactgagatttgggactatgttgggaccgtacaggtgaatgtgccacctccacaaatggcttctccgagtgagtcacgtcacctggtgcgtggaggtggagcctgcggctggagtaaggcttgctgtgggacgccctcgtactttgctctccttgcgggtggttgccgagccgagagcattggatcctccccgactgtggctagttgtctgtccggtggctgggagggggtgtggtgggaaaaagtcggaatctctgcaatctgtgtcatggactgtactattgtaaggtctatattctgtatgtgggtcccagaccctgatcaggaaatgagcctcatgtgtgtcgttaacatttatatatttccattcaaaatatgtattcagtgtttatttcctcaaaacagactttgttaatgtaggaaatctctccaagtggaaacgtgctaactttttctgtaaatctgaaataaaaggtgctgttccttcctctg

SEQ ID NO: 200280 - DNA, 816 bp, Homo sapiens
  Payload ID: 19512
  Gene Name: Wolf-Hirschhorn syndrome candidate 1
  ENST ID: ENST00000515806
  CDS Start-End: 220-816
ggtcttgctcccttgcgcaggcgagagtacagtggcacgatcatagctcactgtagcctccaactcctgggctcaagcagtcctcctacttcaggctaccaaagtgctgggattacaggtgtgagcgtgagccactacacctggctaatttttgttggctgtttttaatctaccacacttttatagcaagtgttctaagaacggaagcatctgggctggatggaatttagcatcaagcagagtcccctttctgttcagagtgttgtaaagtgcataaagatgaagcaggcaccagaaatcctcggcagtgccaacgggaagactccgagctgcgaggtgaaccgcgagtgttctgtgttcctcagcaaagcccagctctccagtagcctgcaggagggggtcatgcagaagtttaacggccacgacgccctgccctttattccagccgacaagctgaaagatcttacttcccgggtgtttaatggagaacccggcgcacacgatgccaaactgcgttttgagtcccaggaaatgaaagggattgggacaccccctaacactacccctatcaaaaatggctctccagaaattaagctgaaaatcaccaaaacatacatgaatgggaagcctctctttgaatcttccatttgtggtgacagtgctgctgatgtgtctcagtcagaagaaaatggacaaaaaccagaaaacaaggcgagaaggaacaggaagaggagcataaaatatgactccttgctggagcagggccttgtcgaagcagctcttgtgtctaagatctcaagtccttcagataaaaag

SEQ ID NO: 200281 - DNA, 1095 bp, Homo sapiens
  Payload ID: 19512
  Gene Name: Wolf-Hirschhorn syndrome candidate 1
  Uniprot ID: O96028
  ENST ID: ENST00000512700
  CDS Start-End: 6-827
gctggatggaatttagcatcaagcagagtcccctttctgttcagagtgttgtaaagtgcataaagatgaagcaggcaccagaaatcctcggcagtgccaacgggaagactccgagctgcgaggtgaaccgcgagtgttctgtgttcctcagcaaagcccagctctccagtagcctgcaggagggggtcatgcagaagtttaacggccacgacgccctgccctttattccagccgacaagctgaaagatcttacttcccgggtgtttaatggagaacccggcgcacacgatgccaaactgcgttttgagtcccaggaaatgaaagggattgggacaccccctaacactacccctatcaaaaatggctctccagaaattaagctgaaaatcaccaaaacatacatgaatgggaagcctctctttgaatcttccatttgtggtgacagtgctgctgatgtgtctcagtcagaagaaaatggacaaaaaccagaaaacaaggcgagaaggaacaggaagaggagcataaaatatgactccttgctggagcagggccttgtcgaagcagctcttgtgtctaagatctcaagtccttcagataaaaagattccagctaagaaagagtcttgtccaaacactggaagagacaaagaccacctgttgaaatacaacgttggtgatttggtgtggtccaaagtgtcgggttacccttggtggccttgcatggtttctgcagatccactccttcacagctataccaaacttaaaggtattttcaaatcaaagaagtttgaacacttaaaaacaagtcaaattgtactgaaagattaatagtgaaaaatcatcccctgccttcctctctcctccccagaggtcagaaaaagagtgcacgccagtatcacgtacagttctttggtgacgccccagaaagagcttggatatttgagaagagcctcgtagcttttgaaggagaaggacagtttgaaaaattatgccaggaaagtgccaagcaggcacccacgaaagctgagaaaattaagctattgaaaccaatttcagggaaattgagggcccagtgggaaatgggcattgttcaagc

SEQ ID NO: 200282 - DNA, 3995 bp, Homo sapiens
  Payload ID: 19513
  Gene Name: Wolf-Hirschhorn syndrome candidate 1-like 1
  Uniprot ID: Q9BZ95
  ENST ID: ENST00000316985
  CDS Start-End: 519-2456
gggggctttgtgcgcggcggcggcgggagaggcggcggcggcggccagcacggaggcggaggccgagggggctgtgcacaggtcgccgcggagaggcgtgcgaattccgagccgagcgccgaggaccgtgctacccaggccgggctgccagccgcaggctcctctctggcagcagcggcggcgcggcgacccccgtccctcggcctccccttcccatcccacctcccgagccttcctcttcccgcagcacgcccggcccggcccggccgtggccctcctcagtgccggccgccatggcagaggcgtccggcgcggggaaaatctagcccggggatttcatgcggcctagctcggttccgcctcctcctcgcgcggccccagcggctgcccgcaccccagccccactccgggcctccgtgtctctcctgtgatcgcactgacacggccggggggttagaatggaacaaactgaaggcccgatgagagaaagggaaagttaaggatgctggagcagaacaatggatttctctttctctttcatgcaagggatcatgggaaacacaattcagcaaccacctcaactcattgactccgccaacatccgtcaggaggatgcctttgataacaacagtgacattgctgaagatggtggccagacaccatatgaagctactttgcagcaaggctttcagtacccagctacaacagaagatcttcctccactcacaaatgggtatccatcatcaatcagtgtgtatgaaactcaaaccaaataccagtcatataatcagtatcctaatgggtcagccaatggctttggtgcagttagaaactttagccccactgactattatcattcagaaattccaaacacaagaccacatgaaattctggaaaaaccttcccctccacagccaccacctcctccttcggtaccacaaactgtgattccaaagaagactggctcacctgaaattaaactaaaaataaccaaaactatccagaatggcagggaattgtttgagtcttccctttgtggagaccttttaaatgaagtacaggcaagtgagcacacgaaatcaaagcatgaaagcagaaaagaaaagaggaaaaaaagcaacaagcatgactcatcaagatctgaagagcgcaagtcacacaaaatccccaaattagaaccagaggaacaaaatagaccaaatgagagggttgacactgtatcagaaaaaccaagggaagaaccagtactaaaagaggaagccccagttcagccaatactatcttctgttccaacaacggaagtgtccactggtgttaagtttcaggttggcgatcttgtgtggtccaaggtgggaacctatccttggtggccttgtatggtttcaagtgatccccagcttgaggttcatactaaaattaacacaagaggtgcccgagaatatcatgtccagttttttagcaaccagccagagagggcgtgggttcatgaaaaacgggtacgagagtataaaggtcataaacagtatgaagaattactggctgaggcaaccaaacaagccagcaatcactctgagaaacaaaagattcggaaaccccgacctcagagagaacgtgctcagtgggatattggcattgcccatgcagagaaagcattgaaaatgactcgagaagaaagaatagaacagtatacttttatttacattgataaacagcctgaagaggctttatcccaagcaaaaaagagtgttgcctccaaaaccgaagttaaaaaaacccgacgaccaagatctgtgctgaatactcagccagaacagaccaatgcaggggaggtggcctcctcactctcaagtactgaaattcggagacatagccagaggcggcacacaagtgcggaagaggaagagccaccgcctgttaaaatagcctggaaaactgcggcagcaaggaaatccttaccagcttccattacgatgcacaaagggagcctggatttgcagaagtgtaacatgtctccagttgtgaaaattgaacaagtgtttgctcttcagaatgctacaggggatgggaaatttatcgatcaatttgtttattcaacaaagggaattggtaacaaaacagaaataagtgtcagggggcaagacaggcttataatttctacaccaaaccagagaaatgaaaagccaacgcagagtgtatcatctcctgaagcaacatctggttctacaggctcagtagaaaagaagcaacagagaagatcaattagaactcgttctgaatcagagaaatccactgaggttgtgccaaagaagaagatcaaaaaggagcaggttgaaacagttcctcaggctacagtgaagactggattacagaaagggtcggcggaccggggagtgcagggctctgtcagattcagtgacagctccgtctccgcagcgattgaggaaactgtggactgagattcctgtacaatttcatcccagaaactccagacttgtagtctccatgcaagatttctttgtcggcggcttgataaacagtttctttgttttcgattttgatttcgccaatcatcattattggcattttcctgcctggtttcttcttcaagactctgaacaattgctttaacagtcaaatgatttttttttttcggtttgagctggatgggtacagcttaaatcatgggtccagcctaaaaaccaccatttaacttacactgatcaatttcaacatggactgtttttggttttttgtttttaaataaagcatcattaatgcacatctgcaggggtttgccaaacagcccaaactgtatacattacaatcattaaaagttcttattttttttaatattagtgccgttatcatggagaacagcatgacagctgtctttggcagtctgtcatttttctagcattttcagaaactcatcggaaatggcggtacctgtgtttcccttcgaaagcctctcagtacagcactcctgttcctctgttaaaactccttgttaatccagtgatcttttaggccaaggaaatattttgtgatggtgttctgggtccatacaccagcaatgaaggagatagatttgtgtacttgtgttttttaatcagcattaacatgggcaggcaccctcatttatagatgtcaggaaacattcagtgaaaaacttgtagaatgggatgtgataacgaggttccagtaatctgagcagtctaacgaggcccacctcctccaccacagaacgtggctatgttccaagtgctactctcactcagcctgttgcggatcttcatggcctcaggagacttgtttctccatgggctcttctggactgcacacttccaccatagcttgctgggttgatctagatgtctgtttgttgtatggaaattttgggggaaaaaatccaaaacacaaactgtgggttgaaatattaaccgtctccttggttccttggtattcaccgtgcctgatctgcacatttcatcgtggctgtttctgtatagcctatactgcattagcccaagagattgttgctttgtaactttttgcactattgttttggctggatttgtattacacacagttttaaaaaaaacaattccacactattctctgccttttttttcctatttatttcttcccgcacaaattccacatagaggccttcccatccagctctacgtgatttggctgcacttgaacactgattgtccatttacagccctcagcaatgtgccttctaaatggcatgacatatgtagatgtgctgcagcgcttgttaatggtcacaataaatgccacttcaccaaggaagtctcagatgaacaattatgaacatccaaattttattggggggcaataatcaactgaattgcaaaatttgggggaaaatggcactatccgtgtacgaatcgaatacaaatcaaagatttgtcacatccctaataaaaacaagatggagatgtctctgcaaccatatttgtaagcta

SEQ ID NO: 200283 - DNA, 10776 bp, Homo sapiens
  Payload ID: 19513
  Gene Name: Wolf-Hirschhorn syndrome candidate 1-like 1
  Uniprot ID: Q9BZ95
  ENST ID: ENST00000317025
  CDS Start-End: 519-4832
gggggctttgtgcgcggcggcggcgggagaggcggcggcggcggccagcacggaggcggaggccgagggggctgtgcacaggtcgccgcggagaggcgtgcgaattccgagccgagcgccgaggaccgtgctacccaggccgggctgccagccgcaggctcctctctggcagcagcggcggcgcggcgacccccgtccctcggcctccccttcccatcccacctcccgagccttcctcttcccgcagcacgcccggcccggcccggccgtggccctcctcagtgccggccgccatggcagaggcgtccggcgcggggaaaatctagcccggggatttcatgcggcctagctcggttccgcctcctcctcgcgcggccccagcggctgcccgcaccccagccccactccgggcctccgtgtctctcctgtgatcgcactgacacggccggggggttagaatggaacaaactgaaggcccgatgagagaaagggaaagttaaggatgctggagcagaacaatggatttctctttctctttcatgcaagggatcatgggaaacacaattcagcaaccacctcaactcattgactccgccaacatccgtcaggaggatgcctttgataacaacagtgacattgctgaagatggtggccagacaccatatgaagctactttgcagcaaggctttcagtacccagctacaacagaagatcttcctccactcacaaatgggtatccatcatcaatcagtgtgtatgaaactcaaaccaaataccagtcatataatcagtatcctaatgggtcagccaatggctttggtgcagttagaaactttagccccactgactattatcattcagaaattccaaacacaagaccacatgaaattctggaaaaaccttcccctccacagccaccacctcctccttcggtaccacaaactgtgattccaaagaagactggctcacctgaaattaaactaaaaataaccaaaactatccagaatggcagggaattgtttgagtcttccctttgtggagaccttttaaatgaagtacaggcaagtgagcacacgaaatcaaagcatgaaagcagaaaagaaaagaggaaaaaaagcaacaagcatgactcatcaagatctgaagagcgcaagtcacacaaaatccccaaattagaaccagaggaacaaaatagaccaaatgagagggttgacactgtatcagaaaaaccaagggaagaaccagtactaaaagaggaagccccagttcagccaatactatcttctgttccaacaacggaagtgtccactggtgttaagtttcaggttggcgatcttgtgtggtccaaggtgggaacctatccttggtggccttgtatggtttcaagtgatccccagcttgaggttcatactaaaattaacacaagaggtgcccgagaatatcatgtccagttttttagcaaccagccagagagggcgtgggttcatgaaaaacgggtacgagagtataaaggtcataaacagtatgaagaattactggctgaggcaaccaaacaagccagcaatcactctgagaaacaaaagattcggaaaccccgacctcagagagaacgtgctcagtgggatattggcattgcccatgcagagaaagcattgaaaatgactcgagaagaaagaatagaacagtatacttttatttacattgataaacagcctgaagaggctttatcccaagcaaaaaagagtgttgcctccaaaaccgaagttaaaaaaacccgacgaccaagatctgtgctgaatactcagccagaacagaccaatgcaggggaggtggcctcctcactctcaagtactgaaattcggagacatagccagaggcggcacacaagtgcggaagaggaagagccaccgcctgttaaaatagcctggaaaactgcggcagcaaggaaatccttaccagcttccattacgatgcacaaagggagcctggatttgcagaagtgtaacatgtctccagttgtgaaaattgaacaagtgtttgctcttcagaatgctacaggggatgggaaatttatcgatcaatttgtttattcaacaaagggaattggtaacaaaacagaaataagtgtcagggggcaagacaggcttataatttctacaccaaaccagagaaatgaaaagccaacgcagagtgtatcatctcctgaagcaacatctggttctacaggctcagtagaaaagaagcaacagagaagatcaattagaactcgttctgaatcagagaaatccactgaggttgtgccaaagaagaagatcaaaaaggagcaggttgaaacagttcctcaggctacagtgaagactggattacagaaaggtgccagcgagatttcagattcctgtaaacctctaaagaaaaggagtcgcgcctcaactgatgtagaaatgactagttcagcatacagagacacatctgactccgattctagaggactgagtgacctgcaggtaggctttggaaagcaagtagatagcccttcagctactgcagatgcagacgtttctgatgtgcagtccatggattcaagtttgtcgagaagaggcactggaatgagtaagaaggacactgtatgtcagatttgtgaaagctctggtgactctctgattccttgtgagggagagtgctgcaaacactttcacctggagtgcctgggattggcatcacttcctgatagcaagttcatctgcatggaatgtaaaactgggcagcacccatgtttttcgtgtaaagtgtctggtaaagatgtgaagcgttgttctgttggtgcttgtgggaaattttatcatgaagcctgtgtccgcaaattccccactgccatctttgaatcaaaaggattccgctgtcctcagcactgctgctctgcctgctctatggagaaagatatccacaaagcaagtaaaggccgcatgatgagatgtttaagatgtccagttgcctatcactctggagatgcttgcattgcggccggaagcatgttagtatcctcctacattctcatctgtagtaatcattccaaacggagcagtaattcttctgctgtaaatgtaggcttttgtttcgtttgtgccagagggctgatagttcaggaccattcagaccccatgttcagttcatatgcctataagtcccactacctactgaatgaatcaaatcgtgctgagttgatgaaattacctatgattccttcttcgtcagcttccaaaaagaaatgtgagaaaggtggaagattgctctgctgtgaatcgtgcccagcttccttccacccggaatgcctaagcatagaaatgccagaaggctgctggaattgtaatgactgtaaagctggcaagaaactacattacaagcagattgtttgggtcaaattgggaaattacagatggtggccagcagagatctgcaaccccaggtctgtgccactgaacatccagggccttaaacatgacttgggggacttccctgtattcttctttggttctcatgactactactgggtacaccagggcagagtgttcccttatgttgaaggagacaaaagctttgctgaagggcagactagtattaacaagaccttcaaaaaggcactggaagaagctgcaaaacgtttccaggaattgaaagcacaaagagaaagtaaagaagccctagagattgaaaaaaactcaagaaaaccccctccctacaaacacatcaaagctaacaaagtaataggaaaggtgcagatccaggttgctgacctgtcagagattccccgctgtaactgcaagccagctgatgaaaacccttgtggcttggaatcggagtgcctgaacagaatgttgcagtatgaatgccacccgcaggtgtgcccagctggagatcgttgtcagaaccagtgctttacaaagagactataccctgatgcagagatcatcaaaacggagcggagaggctggggcctcaggaccaaaaggagcattaagaagggtgaatttgtaaatgaatacgtcggtgaattaattgatgaagaagaatgcagattgcgaatcaagcgagcccacgagaacagtgtaactaatttttatatgttaactgttaccaaggaccgtataattgatgccggcccaaaaggaaattattctcgcttcatgaaccacagttgtaatcccaactgtgaaacacaaaagtggacagtgaatggagatgttcgagtgggactatttgctctctgtgatattcctgcagggatggagttaacatttaattataacctagattgtctgggcaacggcagaacggagtgccactgtggagcagataactgcagtggttttctaggagtgcggccaaagtcggcatgtgcgtcaacaaatgaagagaaggcaaaaaatgctaagttaaaacagaagagacgaaagatcaaaacagaaccaaagcagatgcatgaagattactgttttcaatgtggagatggtggagagctggtcatgtgtgacaaaaaagactgtcccaaagcataccacctcctatgccttaacctgactcagccaccatatggaaagtgggagtgtccgtggcatcagtgcgatgagtgcagcagtgcagctgtttccttctgtgaattctgtccacattcattttgtaaagatcatgaaaagggggccctggttccctctgcactggaaggccgcctctgctgctcggaacatgaccccatggctcctgtgtcaccagaatactggagcaagataaaatgtaaatgggaatcacaagatcatggagaagaagtaaaagaataaatgtgtggtgtcccctcctttctatttaagtgaaaaaagcaaatagatcatgcatttaaaaagaagagactgctacagtgcatacagcctttgccatcggaactgccttattaaagcaaaaatgggaaaccagttcatgcaggcagaagcagttggtggtgtctggtttttgtttgatttggttggtttgggattcttttgtggagggttaaattcccttggtcttttcttgccttttattgtgcttcagtgccattgcagcttgaaaaagaaatgtttttgctgttaaaataagaacaaagagaaaagtaagttttgttaatgagataaatttaaagtctaagatgtgttccttggttgtataaagcaaaagtagccatcattcctttatttattttcatttttaggaatttcaagaagtgtagttcaatagtctaatcaagtgtgtgtgtgttttaagtaggaatctgagaaagccctctaggaaagggtatgataagctttatatacctctttactgagcagtaggtaggctcacttctctttcccttcaaaatgcttttcataggcttagagaagggctctatggaagtattaaatctggcctcttgaaaacaatgcctcggtggattttacctctgtggtcttaaacaaggtgggctttgtactatggtaactttacctagaagggtatatggtgtgtttccttggtggaaggaaaaaaaggaatggatgtgctcactgatttttaaaacgttttccattgacatggatggtttgggttttggatgaagtgcgtttctgtggatatgaagcatagttggaatggtcactcctattttcctgacactgattaaggcagctaaagggggatgaaggcataaaccaaaatttggatcatataagcaccattttctgtccaattttattgtagaccctggtcttaattggagagaattacaggcattttattttttgtctctgttttcctctcctactcaaacatttcttttgtcatctgaccattcagtcatgtttcctggtaaaaccacacaagtgagtttgaattgtatttgaatagatctttttggttgagttcctaatttggggggtgaaagtagtaggggcatccccaggttacatgtaaagaatttctattattatccagtacttaagattgctcccattgagtaaggggaagaacttctacttttacagggtgcataagagccacacaaacacacttcatcttaggaagcacttggagaaaactcccaagaaagtcagtgttagcaaaaatggttgatggtgatgcttgactcttatagatgcgagtataccaagatgtctgctcaccaaactcacttgcttttaatgcttaggaatatgtatattccagtattccttgtatgaaaataattagtaatgtcagacattgttgtaacactgtactaagtagaagtctagggttagcttgaatgaatgttaactttctctgtgaattttgactgcttacaattgctggtacctggtagcatttattttccctcaagtacctagtaaccttatgaaggtagggagggtagatgctctaccacattccttcagctgtattgagtgttccatttgcttatcaatttagagctcttctatggaaagagggtgaaaatctgttttgtgcctcttttttttgtatgtaaatgtgcaattatactggattttctcttgtaaaaaacactacaattcttttactgaagctcctaaactgccatttgcctgactccagcaattaattctgcggtgactcattgggcttccagtacttctgttgattagatatggtcccaaaagaaagagcaaaatggaaaatgcgatccatgtcaccaaatataattgctacaagtaacatgaaatacagctcaccaaaacactaaactttgctcttgagcaattatatagtttgatgtccttttaaaaaataagaaaagctaggttttatcatactaaaattttattttgtatatgatgtttggttttttaaacttactaacataaggatttcctttaatattccaaatacagttcttgaaacagtatccaacatgaaatcttatctccttgcttttagacttagtgctatttactatctaaagacttttctatggtaagccagggtacatcctatatactacagataccttaggtttcagtatttttatgcagcttcttcattgtgtcacattttgttttcatatctgtaacagagctctgctgaaattaaaaaaaaattatgattaataggattgtttcaccatttcagaaatcagagtagaaaacaaaatagctgccaggtgcagtggctcacacctgtaatcccagcactttgggaggccgaggtgggcagatcatgaggtcaggagtttgagaccagcctgaccaacatggtgaaaccctgtctctgctaaaaatacaaaaaggagccgggcatggtggcacatacctgtagtcccagtttctcaggaggcagaggttgcagtgagccaagatcacatcactgcactccagcctgggtgacagagcgagactccatctcaaaaaaaaaaggtaaccatagttctgaagtctttggccatgaatgttctttaatggtctaaaaagcggttttagtcatgctggtgccaaggagttctcctcacacctccatagcgtcaatgttgacctatttgatatatttttaagttgcagattatagatgcagaaagagaaaattgtcctttatgtgtgcatgagtatacatgcactgtgcctgtgatacaccaatgaaatattccaaaagacattgctcactcatagtctgaagttggtatttgttaacttttaaatctatatgtggtcagagtgtaagtggctggtttttattcttgtccaacaatgaaataacttaaagcagcatgggctaatggtggtattttttttaaccacatgttaatttgttgaaggaagaagtgaacataagatttttgataatcagcctaaagcttcagaaactggatcagtaagagctaaagatgaaatcctgggaaactttctcaggcactgtgcaggggagggaggggctggaccgccactgctgcgagggaagaatcagaagagctgcctgtggctggctgagaagggcaaggtggatggctcttcattcctggaaggctgaagcagccagaggcagtgattcacctctttaatgtctaatcagggagagatacaggagtgaggtgggttttattttcatttttgttttaacaagttcccactcttatcttaattctcaaaaatgatctggcctcatctatagaactggctgagttggggaatcatttaaaatttgggattttctgtacaagtcaagaacatatgtgaaagctaaaaaagtaatggaggcagggggactgctcccagctcccttctgccatttacacaaaatatttgaaaacatgtctgtaaataacgttgtggaactgagatattgagtatctaatcatgtaaaggaccctcagatgggacaggctattggacaactttcctggttcatgaagtggaatttcctttttgagtagtttcttgcatggtgtattccaataggtcaaacccagacctactgtttgcaaacaggccatctgtagagaatacaatctctggactgcccaggacttgttgcttgtctttcatttcattttaaatacaaagctcttcctttagcattcaccttgaagtcaaggtgttggctgccacatgccatgtcctcttaacaagataagaaaacagtggctatggagccctcacagctgggaagctgacattctatacttccatatgagaaaaaggacattggaaagttgctttatttctgggcagcgtagactaaagttacttttcacaaggctgatgcatccagcctcccccagttgtccaagttggtgcagacatgaattgatgaatggaaacactttcctttggcctagggccacctagaattggtctctggttatttgtaaaacaaaaagtagaacttgcttccattttcagatggactagggaatactataattagacagctttgcaatgaattaacaaatactgaaaagttggaaatgtgtatatactgaaatctcaccaacttttacctggggtggggtaccaggagaaagggaaccccctttctcctggtaaagggtaaggggggggataatgtttaccacaggtacgaaatagtcactttaacattgagacctctgcctcattgaattcaggttttttaagtacttgaaactcttcagattctccttattttagtttctttttacatttatgaagtagaaagcattgttttgtaaactgttttgaaaataaatagcctagtctcttatcctctttagcgtggattaaaggtgaagttctgcaaatgggagagtgttcacagtagatagctcagattgattgaacacatttgaggaagagactcctgcatgagataccagcatttttacaaatactttttatgtacattctttattttgtcattttgtcaaccctctccccaagcacatcttctttccttttactatgtctatgtagggaaaaaaacaaaacaaaaaattgcacttacgttacactcccaaaatgtgggtaatccgtgtctttcaaaaaacatttctgttttttgttttgttttggtcagtccattgcataagtgacaagtttgggtgcttgtggcacgtatgtatgaagcgggagggggatgagaattgcctgtccttcagtaggctgtaaaagtaatttacatgtaagtaaaaagggaaaatagaatagatgccaaagtcatttattcagtccttagttttcttatgtggcattactgcatctgctagttagtgagaaagcaccctcagcttttactgctcccctccctgcctgccaacacacttgatgtgtgcaaacagccctcaagtatctgtcagatgacctatataaggtattgaataaggtattcttgtcagtttagaaatggactggataaaacttacttggttgtcattattttatctcatttgtcctgttacatgccctatgttaagataattatattgccactaataatcaagatgctaaatgagtattacaactggctaatatcattttttatatacaagggtatgtgtatatttggaattgatatgagaaactcatttgtacccatttgagtgatattgcacaacaaacacagatacctacagactccgttttcattttctcgtgttctttatgataatgatctttgtagattggttatttctgtactttatctgtaataaactttgtagatcctgtgaaccattactttgcctaaatcacttgagacttgagtctttaataacaaagcatcaatattcactaaagtcaatctcttttgagtttctgtgacttggctagaagctcttgacactaagggattagtgttaattttccctgggggtgttccactagggcattactgtataatgacttgatgttgccacatagacttcaagatatataatattttgaggattttgttgattggcctatgttttattgcatagtgtgaaacgtgtaaagcttggttaacctgtatatagatagcttattgttgactagttatagtgtatttagggttgcctgtaatatttaagcttctttactgatgtgtgtgctggtaggaacatataatttttgtacattatatttactgagatgttgccttttttattttacaaatactttggaattccaatgtgttttttgcttccgtgaggattaatttggaaaggtttttaatgacattccactgatttcagattttgcttgagattgacttcaataaattgtcctgtatgttccaaattaaata

SEQ ID NO: 200284 - DNA, 5276 bp, Homo sapiens
  Payload ID: 19513
  Gene Name: Wolf-Hirschhorn syndrome candidate 1-like 1
  Uniprot ID: Q9BZ95
  ENST ID: ENST00000433384
  CDS Start-End: 492-4658
agaggcggcggcggcggccagcacggaggcggaggccgagggggctgtgcacaggtcgccgcggagaggcgtgcgaattccgagccgagcgccgaggaccgtgctacccaggccgggctgccagccgcaggctcctctctggcagcagcggcggcgcggcgacccccgtccctcggcctccccttcccatcccacctcccgagccttcctcttcccgcagcacgcccggcccggcccggccgtggccctcctcagtgccggccgccatggcagaggcgtccggcgcggggaaaatctagcccggggatttcatgcggcctagctcggttccgcctcctcctcgcgcggccccagcggctgcccgcaccccagccccactccgggcctccgtgtctctcctgtgatcgcactgacacggccggggggttagaatggaacaaactgaaggcccgatgagagaaagggaaagttaaggatgctggagcagaacaatggatttctctttctctttcatgcaagggatcatgggaaacacaattcagcaaccacctcaactcattgactccgccaacatccgtcaggaggatgcctttgataacaacagtgacattgctgaagatggtggccagacaccatatgaagctactttgcagcaaggctttcagtacccagctacaacagaagatcttcctccactcacaaatgggtatccatcatcaatcagtgtgtatgaaactcaaaccaaataccagtcatataatcagtatcctaatgggtcagccaatggctttggtgcagttagaaactttagccccactgactattatcattcagaaattccaaacacaagaccacatgaaattctggaaaaaccttcccctccacagccaccacctcctccttcggtaccacaaactgtgattccaaagaagactggctcacctgaaattaaactaaaaataaccaaaactatccagaatggcagggaattgtttgagtcttccctttgtggagaccttttaaatgaagtacaggcaagtgagcacacgaaatcaaagcatgaaagcagaaaagaaaagaggaaaaaaagcaacaagcatgactcatcaagatctgaagagcgcaagtcacacaaaatccccaaattagaaccagaggaacaaaatagaccaaatgagagggttgacactgtatcagaaaaaccaagggaagaaccagtactaaaagaggaagccccagttcagccaatactatcttctgttccaacaacggaagtgtccactggtgttaagtttcaggttggcgatcttgtgtggtccaaggtgggaacctatccttggtggccttgtatggtttcaagtgatccccagcttgaggttcatactaaaattaacacaagaggtgcccgagaatatcatgtccagttttttagcaaccagccagagagggcgtgggttcatgaaaaacgggtacgagagtataaaggtcataaacagtatgaagaattactggctgaggcaaccaaacaagccagcaatcactctgagaaacaaaagattcggaaaccccgacctcagagagaacgtgctcagtgggatattggcattgcccatgcagagaaagcattgaaaatgactcgagaagaaagaatagaacagtatacttttatttacattgataaacagcctgaagaggctttatcccaagcaaaaaagagtgttgcctccaaaaccgaagttaaaaaaacccgacgaccaagatctgtgctgaatactcagccagaacagaccaatgcaggggaggtggcctcctcactctcaagtactgaaattcggagacatagccagaggcggcacacaagtgcggaagaggaagagccaccgcctgttaaaatagcctggaaaactgcggcagcaaggaaatccttaccagcttccattacgatgcacaaagggagcctggatttgcagaagtgtaacatgtctccagttgtgaaaattgaacaagtgtttgctcttcagaatgctacaggggatgggaaatttatcgatcaatttgtttattcaacaaagggaattggtaacaaaacagaaataagtgtcagggggcaagacaggcttataatttctacaccaaaccagagaaatgaaaagccaacgcagagtgtatcatctcctgaagcaacatctggttctacaggctcagtagaaaagaagcaacagagaagatcaattagaactcgttctgaatcagagaaatccactgaggttgtgccaaagaagaagatcaaaaaggagcaggttgaaacagttcctcaggctacagtgaagactggattacagaaaggtgccagcgagatttcagattcctgtaaacctctaaagaaaaggagtcgcgcctcaactgatgtagaaatgactagttcagcatacagagacacatctgactccgattctagaggactgagtgacctgcaggtaggctttggaaagcaagtagatagcccttcagctactgcagatgcagacgtttctgatgtgcagtccatggattcaagtttgtcgagaagaggcactggaatgagtaagaaggacactgtatgtcagatttgtgaaagctctggtgactctctgattccttgtgagggagagtgctgcaaacactttcacctggagtgcctgggattggcatcacttcctgatagcaagttcatctgcatggaatgtaaaactgggcagcacccatgtttttcgtgtaaagtgtctggtaaagatgtgaagcgttgttctgttggtgcttgtgggaaattttatcatgaagcctgtgtccgcaaattccccactgccatctttgaatcaaaaggattccgctgtcctcagcactgctgctctgcctgctctatggagaaagatatccacaaagcaagtaaaggccgcatgatgagatgtttaagatgtccagttgcctatcactctggagatgcttgcattgcggccggaagcatgttagtatcctcctacattctcatctgtagtaatcattccaaacggagcagtaattcttctgctgtaaatgtaggcttttgtttcgtttgtgccagaggtggaagattgctctgctgtgaatcgtgcccagcttccttccacccggaatgcctaagcatagaaatgccagaaggctgctggaattgtaatgactgtaaagctggcaagaaactacattacaagcagattgtttgggtcaaattgggaaattacagatggtggccagcagagatctgcaaccccaggtctgtgccactgaacatccagggccttaaacatgacttgggggacttccctgtattcttctttggttctcatgactactactgggtacaccagggcagagtgttcccttatgttgaaggagacaaaagctttgctgaagggcagactagtattaacaagaccttcaaaaaggcactggaagaagctgcaaaacgtttccaggaattgaaagcacaaagagaaagtaaagaagccctagagattgaaaaaaactcaagaaaaccccctccctacaaacacatcaaagctaacaaagtaataggaaaggtgcagatccaggttgctgacctgtcagagattccccgctgtaactgcaagccagctgatgaaaacccttgtggcttggaatcggagtgcctgaacagaatgttgcagtatgaatgccacccgcaggtgtgcccagctggagatcgttgtcagaaccagtgctttacaaagagactataccctgatgcagagatcatcaaaacggagcggagaggctggggcctcaggaccaaaaggagcattaagaagggtgaatttgtaaatgaatacgtcggtgaattaattgatgaagaagaatgcagattgcgaatcaagcgagcccacgagaacagtgtaactaatttttatatgttaactgttaccaaggaccgtataattgatgccggcccaaaaggaaattattctcgcttcatgaaccacagttgtaatcccaactgtgaaacacaaaagtggacagtgaatggagatgttcgagtgggactatttgctctctgtgatattcctgcagggatggagttaacatttaattataacctagattgtctgggcaacggcagaacggagtgccactgtggagcagataactgcagtggttttctaggagtgcggccaaagtcggcatgtgcgtcaacaaatgaagagaaggcaaaaaatgctaagttaaaacagaagagacgaaagatcaaaacagaaccaaagcagatgcatgaagattactgttttcaatgtggagatggtggagagctggtcatgtgtgacaaaaaagactgtcccaaagcataccacctcctatgccttaacctgactcagccaccatatggaaagtgggagtgtccgtggcatcagtgcgatgagtgcagcagtgcagctgtttccttctgtgaattctgtccacattcattttgtaaagatcatgaaaagggggccctggttccctctgcactggaaggccgcctctgctgctcggaacatgaccccatggctcctgtgtcaccagaatactggagcaagataaaatgtaaatgggaatcacaagatcatggagaagaagtaaaagaataaatgtgtggtgtcccctcctttctatttaagtgaaaaaagcaaatagatcatgcatttaaaaagaagagactgctacagtgcatacagcctttgccatcggaactgccttattaaagcaaaaatgggaaaccagttcatgcaggcagaagcagttggtggtgtctggtttttgtttgatttggttggtttgggattcttttgtggagggttaaattcccttggtcttttcttgccttttattgtgcttcagtgccattgcagcttgaaaaagaaatgtttttgctgttaaaataagaacaaagagaaaagtaagttttgttaatgagataaatttaaagtctaagatgtgttccttggttgtataaagcaaaagtagccatcattcctttatttattttcatttttaggaatttcaagaagtgtagttcaatagtctaatcaagtgtgtgtgtgttttaagtaggaatctgagaaagccctctaggaaagggtatgataagctttatatacctctttactgagcagtaggtaggctcacttctctttcccttcaaaatgcttttcataggcttagagaagggctctatggaagtattaaatctggcctcttgaaaacaa

SEQ ID NO: 200285 - DNA, 301 bp, Homo sapiens
  Payload ID: 19513
  Gene Name: Wolf-Hirschhorn syndrome candidate 1-like 1
  ENST ID: ENST00000534539
  CDS Start-End: 257-301
ttccttttcctctccgacatcagtatgaatctggaaggggccaattcagactgttagccccctttctttctattcatgaactcttttccccttacgtcttgggtcattttaaattattcataaccgccaaaggaggtagtgatgttttccatcactacctttttgatgcttttctccctctctttaccctcttccttctggttgcaaacaaggcccgatgagagaaagggaaagttaaggatgctggagcagaacaatggatttctctttctctttcatgcaagggatcatgggaaacaca

SEQ ID NO: 200286 - DNA, 577 bp, Homo sapiens
  Payload ID: 19513
  Gene Name: Wolf-Hirschhorn syndrome candidate 1-like 1
  ENST ID: ENST00000534155
  CDS Start-End: 502-577
cagcacggaggcggaggccgagggggctgtgcacaggtcgccgcggagaggcgtgcgaattccgagccgagcgccgaggaccgtgctacccaggccgggctgccagccgcaggctcctctctggcagcagcggcggcgcggcgacccccgtccctcggcctccccttcccatcccacctcccgagccttcctcttcccgcagcacgcccggcccggcccggccgtggccctcctcagtgccggccgccatggcagaggcgtccggcgcggggaaaatctagcccggggatttcatgcggcctagctcggttccgcctcctcctcgcgcggccccagcggctgcccgcaccccagccccactccgggcctccgtgtctctcctgtgatcgcactgacacggccggggggttagaatggaacaaactgaagggatgctcctgaaactgaagacaaccaagcccgatgagagaaagggaaagttaaggatgctggagcagaacaatggatttctctttctctttcatgcaagggatcatgggaaacacaattcagcaaccacctcaactcattgactccg

SEQ ID NO: 200287 - DNA, 4471 bp, Homo sapiens
  Payload ID: 19513
  Gene Name: Wolf-Hirschhorn syndrome candidate 1-like 1
  Uniprot ID: Q9BZ95
  ENST ID: ENST00000527502
  CDS Start-End: 93-4373
tgtgatcgcactgacacggccggggggttagaatggaacaaactgaaggcccgatgagagaaagggaaagttaaggatgctggagcagaacaatggatttctctttctctttcatgcaagggatcatgggaaacacaattcagcaaccacctcaactcattgactccgccaacatccgtcaggaggatgcctttgataacaacagtgacattgctgaagatggtggccagacaccatatgaagctactttgcagcaaggctttcagtacccagctacaacagaagatcttcctccactcacaaatgggtatccatcatcaatcagtgtgtatgaaactcaaaccaaataccagtcatataatcagtatcctaatgggtcagccaatggctttggtgcagttagaaactttagccccactgactattatcattcagaaattccaaacacaagaccacatgaaattctggaaaaaccttcccctccacagccaccacctcctccttcggtaccacaaactgtgattccaaagaagactggctcacctgaaattaaactaaaaataaccaaaactatccagaatggcagggaattgtttgagtcttccctttgtggagaccttttaaatgaagtacaggcaagtgagcacacgaaatcaaagcatgaaagcagaaaagaaaagaggaaaaaaagcaacaagcatgactcatcaagatctgaagagcgcaagtcacacaaaatccccaaattagaaccagaggaacaaaatagaccaaatgagagggttgacactgtatcagaaaaaccaagggaagaaccagtactaaaagaggaagccccagttcagccaatactatcttctgttccaacaacggaagtgtccactggtgttaagtttcaggttggcgatcttgtgtggtccaaggtgggaacctatccttggtggccttgtatggtttcaagtgatccccagcttgaggttcatactaaaattaacacaagaggtgcccgagaatatcatgtccagttttttagcaaccagccagagagggcgtgggttcatgaaaaacgggtacgagagtataaaggtcataaacagtatgaagaattactggctgaggcaaccaaacaagccagcaatcactctgagaaacaaaagattcggaaaccccgacctcagagagaacgtgctcagtgggatattggcattgcccatgcagagaaagcattgaaaatgactcgagaagaaagaatagaacagtatacttttatttacattgataaacagcctgaagaggctttatcccaagcaaaaaagagtgttgcctccaaaaccgaagttaaaaaaacccgacgaccaagatctgtgctgaatactcagccagaacagaccaatgcaggggaggtggcctcctcactctcaagtactgaaattcggagacatagccagaggcggcacacaagtgcggaagaggaagagccaccgcctgttaaaatagcctggaaaactgcggcagcaaggaaatccttaccagcttccattacgatgcacaaagggagcctggatttgcagaagtgtaacatgtctccagttgtgaaaattgaacaagtgtttgctcttcagaatgctacaggggatgggaaatttatcgatcaatttgtttattcaacaaagggaattggtaacaaaacagaaataagtgtcagggggcaagacaggcttataatttctacaccaaaccagagaaatgaaaagccaacgcagagtgtatcatctcctgaagcaacatctggttctacaggctcagtagaaaagaagcaacagagaagatcaattagaactcgttctgaatcagagaaatccactgaggttgtgccaaagaagaagatcaaaaaggagcaggttgaaacagttcctcaggctacagtgaagactggattacagaaaggtgccagcgagatttcagattcctgtaaacctctaaagaaaaggagtcgcgcctcaactgatgtagaaatgactagttcagcatacagagacacatctgactccgattctagaggactgagtgacctgcaggtaggctttggaaagcaagtagatagcccttcagctactgcagatgcagacgtttctgatgtgcagtccatggattcaagtttgtcgagaagaggcactggaatgagtaagaaggacactgtatgtcagatttgtgaaagctctggtgactctctgattccttgtgagggagagtgctgcaaacactttcacctggagtgcctgggattggcatcacttcctgatagcaagttcatctgcatggaatgtaaaactgggcagcacccatgtttttcgtgtaaagtgtctggtaaagatgtgaagcgttgttctgttggtgcttgtgggaaattttatcatgaagcctgtgtccgcaaattccccactgccatctttgaatcaaaaggattccgctgtcctcagcactgctgctctgcctgctctatggagaaagatatccacaaagcaagtaaaggccgcatgatgagatgtttaagatgtccagttgcctatcactctggagatgcttgcattgcggccggaagcatgttagtatcctcctacattctcatctgtagtaatcattccaaacggagcagtaattcttctgctgtaaatgtaggcttttgtttcgtttgtgccagagggctgatagttcaggaccattcagaccccatgttcagttcatatgcctataagtcccactacctactgaatgaatcaaatcgtgctgagttgatgaaattacctatgattccttcttcgtcagcttccaaaaagaaatgtgagaaaggtggaagattgctctgctgtgaatcgtgcccagcttccttccacccggaatgcctaagcatagaaatgccagaaggctgctggaattgtaatgactgtaaagctggcaagaaactacattacaagcagattgtttgggtcaaattgggaaattacagatggtggccagcagagatctgcaaccccaggtctgtgccactgaacatccagggccttaaacatgacttgggggacttccctgtattcttctttggttctcatgactactactgggtacaccagggcagagtgttcccttatgttgaaggagacaaaagctttgctgaagggcagactagtattaacaagaccttcaaaaaggcactggaagaagctgcaaaacgtttccaggaattgaaagcacaaagagaaagtaaagaagccctagagattgaaaaaaactcaagaaaaccccctccctacaaacacatcaaagctaacaaagtaataggaaaggtgcagatccaggttgctgacctgtcagagattccccgctgtaactgcaagccagctgatgaaaacccttgtggcttggaatcggagtgcctgaacagaatgttgcagtatgaatgccacccgcaggtgtgcccagctggagatcgttgtcagaaccagtgctttacaaagagactataccctgatgcagagatcatcaaaacggagcggagaggctggggcctcaggaccaaaaggagcattaagaagggtgaatttgtaaatgaatacgtcggtgaattaattgatgaagaagaatgcagattgcgaatcaagcgagcccacgagaacagtgaccgtataattgatgccggcccaaaaggaaattattctcgcttcatgaaccacagttgtaatcccaactgtgaaacacaaaagtggacagtgaatggagatgttcgagtgggactatttgctctctgtgatattcctgcagggatggagttaacatttaattataacctagattgtctgggcaacggcagaacggagtgccactgtggagcagataactgcagtggttttctaggagtgcggccaaagtcggcatgtgcgtcaacaaatgaagagaaggcaaaaaatgctaagttaaaacagaagagacgaaagatcaaaacagaaccaaagcagatgcatgaagattactgttttcaatgtggagatggtggagagctggtcatgtgtgacaaaaaagactgtcccaaagcataccacctcctatgccttaacctgactcagccaccatatggaaagtgggagtgtccgtggcatcagtgcgatgagtgcagcagtgcagctgtttccttctgtgaattctgtccacattcattttgtaaagatcatgaaaagggggccctggttccctctgcactggaaggccgcctctgctgctcggaacatgaccccatggctcctgtgtcaccagaatactggagcaagataaaatgtaaatgggaatcacaagatcatggagaagaagtaaaagaataaatgtgtggtgtcccctcctttctatttaagtgaaaaaagcaaatagatcatgcatttaaaaagaagagactgctacagtgcatacagcctttgccatc

SEQ ID NO: 200288 - DNA, 1524 bp, Homo sapiens
  Payload ID: 19513
  Gene Name: Wolf-Hirschhorn syndrome candidate 1-like 1
  ENST ID: ENST00000528627
  CDS Start-End: 1-234
ataagtgtcagggggcaagacaggcttataatttctacaccaaaccagagaaatgaaaagccaacgcagagtgtatcatctcctgaagcaacatctggttctacaggctcagtagaaaagaagcaacagagaagatcaattagaactcgttctgaatcagagaaatccactgaggttgtgccaaagaagaagatcaaaaaggagcaggttggcttcctacatgtagagagttaaaacattgtatttgtaaatgttgtggcttacattcctgtcttaaaagaaagagaaactttcccccacactgagtttcctttctggactatcttaacgcttctgtcctggtgggttccagtgctcagttttaatacagccatccctgtgattctgcttcaagcattttcacagaaaacaggtttcaggagatgggaagccagtggtgcaagacttaaaaaatccttcacatttatttagaagtttctgttatcagcagaatgatttcatgtttttatgatttttatttggaaccatcattgagttcctttttttttttttaagtttgatttttggtttaagctgctggtatatattgttttttattttttaaacaaatcaatttaatttatattcttatatttaagaagcagatattcatagatgatctgttttttctgttaatatcgcagattttttggaatgttattttcccagtggaatattcacctgatatcaggttgtcagataaataatatttaggtaaaaaaaggtgtgtgggggggttgcattttgactgaagtgtattaaaccagtgtaatcaatgtagtaagatacatttaaatcaacttttcaaataaaattttagaagccattcttctttaaattaaactcacaatcagattttttcttaatttttttgttaaagaatatccattcttacagcctaaacacctgctagcaaacaaaacaaattctgaatagaattagttccaataagttttatattttttaaaccatttatatggaagaatgtgagcttttctatttaaaatatttccttcatgattttaaacttccaaatttaaaagctaactttgtgggtgctctgtggtatcaccaagcaagtgaaacagtttttccagaatatttaactaaaatttaaatagtatactaatttgtcattcatttatcatattaactttcatatttcatacttaggaaattatattccaaaaaatctttctaagctcttgaaaatctatagttattcattaccaaaatgaagttgtgattttgccagctggttcccaaaatcagtctgtgaccagtcagttttaaactaataagcagaatgagtataaaaagtgggacaaattgttaatgccactgtgttatagttagtagtagaacaataccagtgattgtttagaagattttatatttgtattactaattgtatcttataaaagcgtttctgttgtatgtttttttacctgttgtaaaaaaaataaaattttttttaaaaagctt

SEQ ID NO: 200289 - DNA, 1032 bp, Homo sapiens
  Payload ID: 19513
  Gene Name: Wolf-Hirschhorn syndrome candidate 1-like 1
  ENST ID: ENST00000529223
  CDS Start-End: 187-1032
gtagtgctaggaagggctgaggagggaacgacggggagggggcgacctagggatggagcgccagaccccaggaggaatggaaggggaagcgggtggcctgaaagggctcgaggggagtcctgacggaggagcagatggcaaggcccgatgagagaaagggaaagttaaggatgctggagcagaacaatggatttctctttctctttcatgcaagggatcatgggaaacacaattcagcaaccacctcaactcattgactccgccaacatccgtcaggaggatgcctttgataacaacagtgacattgctgaagatggtggccagacaccatatgaagctactttgcagcaaggctttcagtacccagctacaacagaagatcttcctccactcacaaatgggtatccatcatcaatcagtgtgtatgaaactcaaaccaaataccagtcatataatcagtatcctaatgggtcagccaatggctttggtgcagttagaaactttagccccactgactattatcattcagaaattccaaacacaagaccacatgaaattctggaaaaaccttcccctccacagccaccacctcctccttcggtaccacaaactgtgattccaaagaagactggctcacctgaaattaaactaaaaataaccaaaactatccagaatggcagggaattgtttgagtcttccctttgtggagaccttttaaatgaagtacaggcaagtgagcacacgaaatcaaagcatgaaagcagaaaagaaaagaggaaaaaaagcaacaagcatgactcatcaagatctgaagagcgcaagtcacacaaaatccccaaattagaaccagaggaacaaaatagaccaaatgagagggttgacactgtatcagaaaaaccaagggaagaaccagtactaaaagaggaagccccagttcagccaatactatcttctgttccaacaacggaagtgtccactggtgttaagtttcaggttggcgatcttgtgtggtccaaggtgggaacctatcct

SEQ ID NO: 200290 - DNA, 3640 bp, Homo sapiens
  Payload ID: 19514
  Gene Name: Wolfram syndrome 1 (wolframin)
  Uniprot ID: O76024
  ENST ID: ENST00000226760
  CDS Start-End: 171-2843
gtgcagaaggccgcgctagccggctcttcagcagcgagtgcagattgctcccccgcggccgcagatctcccgtttgcgccgcgttcagctgctcccgaacaacttttctgccggcccagaggccccagggcgtcgcagcgccgcgtgcggcccactcacgggccggcaggatggactccaacactgctccgctgggcccctcctgcccacagcccccgccagcaccgcagccccaggcgcgttcccgactcaatgccacagcctcgttggagcaggagaggagcgaaaggccccgagcacccggaccccaggctggccctggccctggtgttagagacgcagcggcccccgctgaaccccaggcccagcataccaggagccgggaaagagcagacggcaccgggcctacaaagggagacatggaaatcccctttgaagaagtcctggagagggccaaggccggggaccccaaggcacagactgaggtggggaagcactacctgcagttggccggcgacacggatgaagaactcaacagctgcaccgctgtggactggctggtcctcgccgcgaagcagggccgtcgcgaggctgtgaagctgcttcgccggtgcttggcggacagaagaggcatcacgtccgagaacgaacgggaggtgaggcagctctcctccgagaccgacctggagagggccgtgcgcaaggcagccctggtcatgtactggaagctcaaccccaagaagaagaagcaggtggccgtggcggagctgctggagaatgtcggccaggtcaacgagcacgatggaggggcgcagccaggccccgtgcccaagtccctgcagaagcagaggcgcatgctggagcgcctggtcagcagcgagtccaagaactacatcgcgctggatgactttgtggagatcactaagaagtacgccaagggcgtcatccccagcagcctgttcctgcaggacgacgaagatgatgacgagctggcggggaagagccctgaggacctgccactgcgtctgaaggtggtcaagtaccccctgcacgccatcatggagatcaaggagtacctgattgacatggcctccagggcaggcatgcactggctgtccaccatcatccccacgcaccacatcaacgcgctcatcttcttcttcatcgtcagcaacctcaccatcgacttcttcgccttcttcatcccgctggtcatcttctacctgtccttcatctccatggtgatctgcaccctcaaggtgttccaggacagcaaggcctgggagaacttccgcaccctcaccgacctgctgctgcgcttcgagcccaacctggatgtggagcaggccgaggtcaacttcggctggaaccacctggagccctatgcccatttcctgctctctgtcttcttcgtcatcttctccttccccatcgccagcaaggactgcatcccctgctcggagctggctgtcatcaccggcttctttaccgtgaccagctacctgagcctgagcacccatgcagagccctacacgcgcagggccctggccaccgaggtcaccgccggcctgctatcgctgctgccctccatgcccttgaattggccctacctgaaggtccttggccagaccttcatcaccgtgcctgtcggccacctggtcgtcctcaacgtcagcgtcccgtgcctgctctatgtctacctgctctatctcttcttccgcatggcacagctgaggaatttcaagggcacctactgctaccttgtgccctacctggtgtgcttcatgtggtgtgagctctccgtggtcatcctgctggagtccaccggcctggggctgctccgcgcctccatcggctacttcctcttcctctttgccctccccatcctggtggccggcctggccctggtgggcgtgctgcagttcgcccggtggttcacgtctctggagctcaccaagatcgcagtcaccgtggcggtctgtagtgtgcccctgctgttgcgctggtggaccaaggccagcttctctgtggtggggatggtgaagtccctgacgcggagctccatggtcaagctcatcctggtgtggctcacggccatcgtgctgttctgctggttctatgtgtaccgctcagagggcatgaaggtctacaactccacactgacctggcagcagtatggtgcgctgtgcgggccacgcgcctggaaggagaccaacatggcgcgcacccagatcctctgcagccacctggagggccacagggtcacgtggaccggccgcttcaagtacgtccgcgtgactgacatcgacaacagcgccgagtctgccatcaacatgctcccgttcttcatcggcgactggatgcgctgcctctacggcgaggcctaccctgcctgcagccctggcaacacctccacggccgaggaggagctctgtcgccttaagctgctggccaagcacccctgccacatcaagaagttcgaccgctacaagtttgagattaccgtgggcatgccattcagcagcggcgctgacggctcgcgcagccgcgaggaggacgacgtcaccaaggacatcgtgctgcgggccagcagcgagttcaagagcgtgctgctcagcctgcgccagggcagcctcatcgagttcagcaccatcctggagggccgcctgggcagcaagtggcctgtcttcgagctcaaggccatcagctgcctcaactgcatggcccagctctcacccaccaggcggcacgtgaagatcgagcacgactggcgcagcaccgtgcatggcgccgtgaagttcgccttcgacttctttttcttcccattcctgtcggcggcctgaggatggtccgccacgaggagcttccagtgcatgttgccatgaggcctttccccagtgtggccccagcccgacaggcatgcaccagtgccgcctgtgcccacgtgtgcagactgtggctgcagagaccttgcgaccatgtgtagattgcgtggaccccgacaaagggaaggctgctgtgtagctctgtccactctgaataccaagtgtgttgggaattgcatgccatctccaccctgagcctgacctttctgagtgacatgggtgtgccaggctagactaggaggttccggtgtctggaaaagcactttacagatgagattccctctcctcccccaccttcaagcaccctgttccctctttctttcttttgtgttggatttgtttaaaaaccaaataagcatctgtgtaacctccacagtagcatttcttatttgtttggtcactgctacaccttagcagctcttcccctttcctgggggatgtgcacggcagcttgagcctgtcacgtggtcaaggcccggccccatcagaggctgggggaggcggcacattggcagtgtgtcacactgagctgggcaccacaggctgcctcatgaccctcctgtccagcaggtagtgggtgaatgtgtgaaggtcttgcctgaatccatcaggacttgggaaacagagaaccctgtgggggcggctgtgggggaggtccctgccagtgtttagaagagcctgactgtgttcagtgccttggagcagaaagccagggtcctgagtggctgaaataaaagcctctggtggaacctgca

SEQ ID NO: 200291 - DNA, 3255 bp, Homo sapiens
  Payload ID: 19514
  Gene Name: Wolfram syndrome 1 (wolframin)
  Uniprot ID: O76024
  ENST ID: ENST00000503569
  CDS Start-End: 168-2840
cgtgcagaaggccgcgctagccggctcttcagcagcgagtgcagattgctcccccgcggccgcagatctcccgtttgcgccgcgttcagctgctcccgaacaacttttctgccggcccagaggccccagggcgtcgcagcgccgcgtgcggcccactcacgggccggatggactccaacactgctccgctgggcccctcctgcccacagcccccgccagcaccgcagccccaggcgcgttcccgactcaatgccacagcctcgttggagcaggagaggagcgaaaggccccgagcacccggaccccaggctggccctggccctggtgttagagacgcagcggcccccgctgaaccccaggcccagcataccaggagccgggaaagagcagacggcaccgggcctacaaagggagacatggaaatcccctttgaagaagtcctggagagggccaaggccggggaccccaaggcacagactgaggtggggaagcactacctgcagttggccggcgacacggatgaagaactcaacagctgcaccgctgtggactggctggtcctcgccgcgaagcagggccgtcgcgaggctgtgaagctgcttcgccggtgcttggcggacagaagaggcatcacgtccgagaacgaacgggaggtgaggcagctctcctccgagaccgacctggagagggccgtgcgcaaggcagccctggtcatgtactggaagctcaaccccaagaagaagaagcaggtggccgtggcggagctgctggagaatgtcggccaggtcaacgagcacgatggaggggcgcagccaggccccgtgcccaagtccctgcagaagcagaggcgcatgctggagcgcctggtcagcagcgagtccaagaactacatcgcgctggatgactttgtggagatcactaagaagtacgccaagggcgtcatccccagcagcctgttcctgcaggacgacgaagatgatgacgagctggcggggaagagccctgaggacctgccactgcgtctgaaggtggtcaagtaccccctgcacgccatcatggagatcaaggagtacctgattgacatggcctccagggcaggcatgcactggctgtccaccatcatccccacgcaccacatcaacgcgctcatcttcttcttcatcgtcagcaacctcaccatcgacttcttcgccttcttcatcccgctggtcatcttctacctgtccttcatctccatggtgatctgcaccctcaaggtgttccaggacagcaaggcctgggagaacttccgcaccctcaccgacctgctgctgcgcttcgagcccaacctggatgtggagcaggccgaggtcaacttcggctggaaccacctggagccctatgcccatttcctgctctctgtcttcttcgtcatcttctccttccccatcgccagcaaggactgcatcccctgctcggagctggctgtcatcaccggcttctttaccgtgaccagctacctgagcctgagcacccatgcagagccctacacgcgcagggccctggccaccgaggtcaccgccggcctgctatcgctgctgccctccatgcccttgaattggccctacctgaaggtccttggccagaccttcatcaccgtgcctgtcggccacctggtcgtcctcaacgtcagcgtcccgtgcctgctctatgtctacctgctctatctcttcttccgcatggcacagctgaggaatttcaagggcacctactgctaccttgtgccctacctggtgtgcttcatgtggtgtgagctctccgtggtcatcctgctggagtccaccggcctggggctgctccgcgcctccatcggctacttcctcttcctctttgccctccccatcctggtggccggcctggccctggtgggcgtgctgcagttcgcccggtggttcacgtctctggagctcaccaagatcgcagtcaccgtggcggtctgtagtgtgcccctgctgttgcgctggtggaccaaggccagcttctctgtggtggggatggtgaagtccctgacgcggagctccatggtcaagctcatcctggtgtggctcacggccatcgtgctgttctgctggttctatgtgtaccgctcagagggcatgaaggtctacaactccacactgacctggcagcagtatggtgcgctgtgcgggccacgcgcctggaaggagaccaacatggcgcgcacccagatcctctgcagccacctggagggccacagggtcacgtggaccggccgcttcaagtacgtccgcgtgactgacatcgacaacagcgccgagtctgccatcaacatgctcccgttcttcatcggcgactggatgcgctgcctctacggcgaggcctaccctgcctgcagccctggcaacacctccacggccgaggaggagctctgtcgccttaagctgctggccaagcacccctgccacatcaagaagttcgaccgctacaagtttgagattaccgtgggcatgccattcagcagcggcgctgacggctcgcgcagccgcgaggaggacgacgtcaccaaggacatcgtgctgcgggccagcagcgagttcaagagcgtgctgctcagcctgcgccagggcagcctcatcgagttcagcaccatcctggagggccgcctgggcagcaagtggcctgtcttcgagctcaaggccatcagctgcctcaactgcatggcccagctctcacccaccaggcggcacgtgaagatcgagcacgactggcgcagcaccgtgcatggcgccgtgaagttcgccttcgacttctttttcttcccattcctgtcggcggcctgaggatggtccgccacgaggagcttccagtgcatgttgccatgaggcctttccccagtgtggccccagcccgacaggcatgcaccagtgccgcctgtgcccacgtgtgcagactgtggctgcagagaccttgcgaccatgtgtagattgcgtggaccccgacaaagggaaggctgctgtgtagctctgtccactctgaataccaagtgtgttgggaattgcatgccatctccaccctgagcctgacctttctgagtgacatgggtgtgccaggctagactaggaggttccggtgtctggaaaagcactttacagatgagattccctctcctcccccaccttcaagcaccctgttccctctttctttcttttgtgttggatttgtttaaaaaccaaataagcatctgtgtaacctcca

SEQ ID NO: 200292 - DNA, 755 bp, Homo sapiens
  Payload ID: 19514
  Gene Name: Wolfram syndrome 1 (wolframin)
  ENST ID: ENST00000506362
  CDS Start-End: 1-755
agcagggccgtcgcgaggctgtgaagctgcttcgccggtgcttggcggacagaagaggcatcacgtccgagaacgaacgggaggtgaggcagctctcctccgagaccgacctggagagggccgtgcgcaaggcagccctggtcatgtactggaagctcaaccccaagaagaagaagcaggtggccgtggcggagctgctggagaatgtcggccaggtcaacgagcacgatggaggggcgcagccaggccccgtgcccaagtccctgcagaagcagaggcgcatgctggagcgcctggtcagcagcgagttgtggggcgcccatgctgttttctctcatgcttcagccaagaactacatcgcgctggatgactttgtggagatcactaagaagtacgccaagggcgtcatccccagcagcctgttcctgcaggacgacgaagatgatgacgagctggcggggaagagccctgaggacctgccactgcgtctgaaggtggtcaagtaccccctgcacgccatcatggagatcaaggagtacctgattgacatggcctccagggcaggcatgcactggctgtccaccatcatccccacgcaccacatcaacgcgctcatcttcttcttcatcgtcagcaacctcaccatcgacttcttcgccttcttcatcccgctggtcatcttctacctgtccttcatctccatggtgatctgcaccctcaaggtgttccaggacagcaaggcctgggagaacttc

SEQ ID NO: 200293 - DNA, 5819 bp, Homo sapiens
  Payload ID: 19515
  Gene Name: WSC domain containing 1
  Uniprot ID: Q658N2
  ENST ID: ENST00000317744
  CDS Start-End: 328-2055
ggcgcgggtgcgggcgccccagccggccgcgatcgcgggatttctgcgccaggagatgaggggcggtagagccctggaatggagatgtccttgacgcctgggcagaggctgcagctgcaggaccctgtggccactggagataagtaatggtgccatttgaacacctactggaaacggggcaggaacagtgagtgaccccaggcgagcacaggcaggtgccaggagccaggatgcaaggatgacgcctccggaggccctggcctcactcccacctgggcgctaggagccatcccggggctccagccaggagccctgctgcccaggggcatggccaaacctttcttccgactccagaagtttctccgccgaacacagttcctgctgttcttcctcacggctgcctacctgatgaccggcagcctgctgctgctgcagcgggtccgcgtggctctcccacagggcccccgggcacccggccccctgcagaccttgccagtggccgccgtggcgctgggcgtgggcttgctggacagcagagccctgcacgaccctcgagtcagcccagagctgctgctgggtgtggacatgctgcagagccccctgacccggccccggcccggcccccgctggctccggagccgcaactcggagctgcgtcagttgcgtcgccgctggttccaccacttcatgagtgactcccagggaccgcccgccctgggccccgaggctgccaggcccgccatccacagccgaggcacctacattggatgcttcagtgacgatggccacgagaggactctgaaaggagctgtgttttatgacttgagaaagatgactgtctcccactgccaggatgcgtgtgctgagcggtcctatgtctacgccggcttggaggccggggcggagtgttactgcgggaaccggctgccagcggtgagcgtggggctggaagagtgtaaccatgagtgcaaaggcgagaagggctctgtgtgcggggctgtggaccggctctccgtgtaccgtgtggacgagctgcagccgggctccaggaagcggcggaccgccacctaccgcggatgcttccgactgccagagaacatcacacatgccttccccagctccctgatacaggccaatgtgaccgtggggacttgctcgggcttttgttcccagaaagagttccccttggccattctcaggggctgggaatgctactgtgcttaccctaccccccggttcaacctgcgggatgccatggacagctcagtatgtggccaggaccctgaggcacagaggctggcagaatactgtgaggtctaccagacacctgtgcaagacactcgttgtacagacaggaggttcctgcctaacaaatccaaagtgtttgtggctttgtcaagcttcccaggagccgggaacacatgggcacggcacctcattgagcatgccactggcttctatacagggagctactactttgatggaaccctctacaacaaagggttcaagggcgaaaaggaccactggcggagccgacgcaccatctgtgtcaaaacccacgagagtggcaggagggagattgagatgtttgattcagccatcctgctaatccggaacccatacaggtccctggtggcagaattcaacagaaaatgtgccgggcacctgggatatgcagctgaccgcaactggaagagcaaagagtggccggactttgtcaacagctacgcctcgtggtggtcctcgcacgtcctggactggctcaagtacgggaagcggctgctggtggtgcactacgaggagctgcggcgcagcctggtgcccacgttacgggagatggtggccttcctcaacgtgtctgtgagcgaggagcggctgctctgcgtggagaacaacaaggagggcagcttccggcggcgcggccggcgctcccacgaccctgagcccttcaccccggagatgaaagacttgatcaatggctacatccggacggtggaccaagccctgcgtgaccacaactggacggggctgcccagggagtatgtgcccagatgataggcctggcccacgccgccgcccccgctgagtgacgcaatcgcaccacggggctgcgctccccactctgatgctcaggcccgtggcctcactgggacgaacggtgggtggggggctcaccctggtgctgcctcccgcacaaggagacctggacacaacagacacacatcacaaggcgaacacaaatggacacacatacctggccacgaacccacacctcctcagacactcagacaccactccaggctcatagccccgtcttgatgcagagaagccacccacgtggggtgtgccaggcacccccagatacaaatgcagccacgcacagacgtaacacacaggtgccaggccgtgtgctcctggaggctggctggctgtctctctcacacagatacacgtgcgctccctgggatccgggaggccctgggcttcctgtgtgtagccctggcatagacttgctcgtcagggtgttcgactctgggatgctgggccgggcagacatttatgctctgagcagcaaggaccattgggatggaggtgggcacaaagactgctgcttccagggtgtgcggccctggccgtgtgtctgacatcccataaatgtgtgtgtggtgtgactacgggcaccacaaactccgcagccttgcctctcttttctctgtggctgggctggctgcaccatgggcagggttgaggactgccccccaccccgcccaagccaatgcagacactgacctcaagaccagccacaccaagtctgtgcactgcccaccacccccttcaacccctcctacaccatgctccggggcctggggcctccttgcctggcttcttcctccagctatcctcagggaagctggagattcaagtcatgccccagaagcaaggtgtaagcatgggggcgtggggaagagggcaggagctgaagttccaggggagcccaggacccctggggacctgtacactagcaggatgggtcttgggagttggcatggggagattgtaagggctgtatctccgcgattactggtactggtgctccacccataggggccctgttctctctggggtcccacactggggtcatgagagctagttagtactcagcctgacccctaggtctggtcctgccagcctgggatgggggtcaatgtatgctacacatcttgggctcacaagtgaggctgtggaggccaggaggttcaagtatggagggtaggagtgcaacccaggagcaacgctcaaggtggccgagatgcagggaggattgtggcgatccggttgcacactggcctctgtggaggtcagggaggtgggaaggtgggtgggcctgaactcaggcagcccttcagtggcttcttcaggcctaggataaccctggccaggccccatggtcctgctctgggtcagctgtcagggagacctcccttcagcctgagccaagctgcattgggaggagaaggcagggtgagggatctgggagagcaggacgttgagatatcctgaccctctgcttcctagcctgatgatggggaacccagagccacccgctatgagcacaggccgggggtggaaggcccagtagagctgcccttccccagatggaagcttcctccaaccttcagtttggccagtgggtgggtttgggcatctgtgcccctggtggcctccaaatccttcctgggattcccccaaacccacactgatgcgaagctgttcttgaccctcccatagcatcaactcagttcagctcaaagctagaaacaccaaggtctttgaaaatgtttattggctcaggatagcttcggcatccaatctgcgaaggcccctgatggagctatttcttcctagtatcaggagcaattgagacccctcaggagtttccacactgctgtggacgggatagccagggcagacctgcatcccagagcaagcctagatccttgaaagcaatgtcaggcgtggcagtggggaagccatggaggctgggaagggcaaagtgtggagagaggagtgaccgggactggagccagggtctggggagagcaacagcaccaggcttttcctggtagttggattggtacattcactgctgccaggtacccagagatgtcatctctctccaggtagagcatcaccagctcctgtggccttgtagatgactctgtacctcagtgaagagtgcaggcaagtagagtgatggggtcagtgtccatccagtttacgctgagtcagtccatacagcaagacacctggcacttggcaggtactcctggatgttgatgagcaaggaagagcaacggccctgtcagctggcagtggtcctcacagccttcatcccaggtctgcctacgtgggagatctcatcagaaacaggaacggggatctgtctgtgcttgcaggaaagtccatttgtttttctccaagttaggtctcatctacagctcttagcttctcagtaaagaggatactctcccaaccagccaaggaataaaagctgatctgtatgtagggcagaagtgtggcaaatgcatcaggaaccggttagaacagaacagagaaaccctgactgtctacagattccaactttaatagcaagcctgtggagttacacaaacctgtgttaaaacatgtaatttttatggatttcatctcccgttgtggatcaatttggaaaaaccaaaatatgtaattttaaaaaactaaaacacatcctggtagtcccagtgatgtgtaaatgagagagaagaatagacaggcttccaaaccctgggaagaaagctgcttaattatgtgaacatcttataatgaagtctcttgcagctaaaattagattttgagtgcatgaatctgtgataatgtttgcatatcagaatgcattctccccttaaaagtagcagtagccacttggttcttagggggccccaagaggagaggagaagtgctgaggttgatgttacgactgcaagaattcttgggacacaggtttgttttctgctgacttgctcggaaacccattggaggtatctgaaatgtgatgactccaaaggggttcatttcactatagggagaaattgattcgtctgacttcctatttatcaccactcaatattgggtgagttggtctgaacaaggtggggataaagtagagtggaaataatgtagagtcgtcagactgaaaggccaggttgtagtcccagctcttatctgccatcttggacaaagcttttcccatctccagtctcagtttcccatccataaaatgggggaagtggtaggtcttgctgattgcatccacattcattcctccatttcctttcccagcaaccccccatttctgtttgggaattcatatgatctgccagagcctctccaggggtggaatacatgtcctggactaagccaatgacaccttccatctttccagctatggtgactgggttaggtatgatcttgtgagttaagacaatgaagccagagggaatttcaagacttatgggaatgctgggtagaagctgttttaattcccctgttgaatgtgaaaaaggtagtagtattcctgggtctttatgatgaccaccttgggccttgggatcatgaccaggaatcacgtgaagctgacaccactgaagggagagttgagaggcagaaagagatcaagtccttggtgaaattgtttaagtacaggatcaagccttgcttgagattggccttacctctggactttttttgttatatgagctaataaattctgtttattgttt

SEQ ID NO: 200294 - DNA, 2665 bp, Homo sapiens
  Payload ID: 19515
  Gene Name: WSC domain containing 1
  Uniprot ID: Q658N2
  ENST ID: ENST00000539421
  CDS Start-End: 353-2080
ggtcagcggagggtttgctccgtctcttggtgaacttgaacagaggcagaggcaaaagcaaaacatttctgcgccaggagatgaggggcggtagagccctggaatggagatgtccttgacgcctgggcagaggctgcagctgcaggaccctgtggccactggagataagtaatggtgccatttgaacacctactggaaacggggcaggaacagtgagtgaccccaggcgagcacaggcaggtgccaggagccaggatgcaaggatgacgcctccggaggccctggcctcactcccacctgggcgctaggagccatcccggggctccagccaggagccctgctgcccaggggcatggccaaacctttcttccgactccagaagtttctccgccgaacacagttcctgctgttcttcctcacggctgcctacctgatgaccggcagcctgctgctgctgcagcgggtccgcgtggctctcccacagggcccccgggcacccggccccctgcagaccttgccagtggccgccgtggcgctgggcgtgggcttgctggacagcagagccctgcacgaccctcgagtcagcccagagctgctgctgggtgtggacatgctgcagagccccctgacccggccccggcccggcccccgctggctccggagccgcaactcggagctgcgtcagttgcgtcgccgctggttccaccacttcatgagtgactcccagggaccgcccgccctgggccccgaggctgccaggcccgccatccacagccgaggcacctacattggatgcttcagtgacgatggccacgagaggactctgaaaggagctgtgttttatgacttgagaaagatgactgtctcccactgccaggatgcgtgtgctgagcggtcctatgtctacgccggcttggaggccggggcggagtgttactgcgggaaccggctgccagcggtgagcgtggggctggaagagtgtaaccatgagtgcaaaggcgagaagggctctgtgtgcggggctgtggaccggctctccgtgtaccgtgtggacgagctgcagccgggctccaggaagcggcggaccgccacctaccgcggatgcttccgactgccagagaacatcacacatgccttccccagctccctgatacaggccaatgtgaccgtggggacttgctcgggcttttgttcccagaaagagttccccttggccattctcaggggctgggaatgctactgtgcttaccctaccccccggttcaacctgcgggatgccatggacagctcagtatgtggccaggaccctgaggcacagaggctggcagaatactgtgaggtctaccagacacctgtgcaagacactcgttgtacagacaggaggttcctgcctaacaaatccaaagtgtttgtggctttgtcaagcttcccaggagccgggaacacatgggcacggcacctcattgagcatgccactggcttctatacagggagctactactttgatggaaccctctacaacaaagggttcaagggcgaaaaggaccactggcggagccgacgcaccatctgtgtcaaaacccacgagagtggcaggagggagattgagatgtttgattcagccatcctgctaatccggaacccatacaggtccctggtggcagaattcaacagaaaatgtgccgggcacctgggatatgcagctgaccgcaactggaagagcaaagagtggccggactttgtcaacagctacgcctcgtggtggtcctcgcacgtcctggactggctcaagtacgggaagcggctgctggtggtgcactacgaggagctgcggcgcagcctggtgcccacgttacgggagatggtggccttcctcaacgtgtctgtgagcgaggagcggctgctctgcgtggagaacaacaaggagggcagcttccggcggcgcggccggcgctcccacgaccctgagcccttcaccccggagatgaaagacttgatcaatggctacatccggacggtggaccaagccctgcgtgaccacaactggacggggctgcccagggagtatgtgcccagatgataggcctggcccacgccgccgcccccgctgagtgacgcaatcgcaccacggggctgcgctccccactctgatgctcaggcccgcacaaggagacctggacacaacagacacacatcacaaggcgaacacaaatggacacacatacctggccacgaacccacacctcctcagacactcagacaccactccaggctcatagccccgtcttgatgcagagaagccacccacgtggggtgtgccaggcacccccagatacaaatgcagccacgcacagacgtaacacacaggtgccaggccgtgtgctcctggaggctggctggctgtctctctcacacagatacacgtgcgctccctgggatccgggaggccctgggcttcctgtgtgtagccctggcatagacttgctcgtcagggtgttcgactctgggatgctgggccgggcagacatttatgctctgagcagcaaggaccattgggatggaggtgggcacaaagactgctgcttccagggtgtgcggccctggccgtgtgtctgacatcccataaatgtgtgtgtggtgtgactacgggcaccacaaactccgc

SEQ ID NO: 200295 - DNA, 2168 bp, Homo sapiens
  Payload ID: 19515
  Gene Name: WSC domain containing 1
  ENST ID: ENST00000571494
  CDS Start-End: 1-410
ccggcagcctgctgctgctgcagcgggtccgcgtggctctcccacagggcccccgggcacccggccccctgcagaccttgccagtggccgccgtggcgctgggcgtgggcttgctggacagcagagccctgcacgaccctcgagtcagcccagagctgctgctgggtgtggacatgctgcagagccccctgacccggccccggcccggcccccgctggctccggagccgcaactcggagctgcgtcagttgcgtcgccgctggttccaccacttcatgagtgactcccagggaccgcccgccctgggccccgaggctgccaggcccgccatccacagccgaggtcctatgtctacgccggcttggaggccggggcggagtgttactgcgggaaccggctgccagcggtgagcgtggggctggaagagtgtaaccatgagtgcaaaggcgagaagggctctgtgtgcggggctgtggaccggctctccgtgtaccgtgtggacgagctgcagccgggctccaggaagcggcggaccgccacctaccgcggatgcttccgactgccagagaacatcacacatgccttccccagctccctgatacaggccaatgtgaccgtggggacttgctcgggcttttgttcccagaaagagttccccttggccattctcaggggctgggaatgctactgtgcttaccctaccccccggttcaacctgcgggatgccatggacagctcagtatgtggccaggaccctgaggcacagaggctggcagaatactgtgaggtctaccagacacctgtgcaagacactcgttgtacagacaggaggttcctgcctaacaaatccaaagtgtttgtggctttgtcaagcttcccaggagccgggaacacatgggcacggcacctcattgagcatgccactggcttctatacagggagctactactttgatggaaccctctacaacaaagggttcaagggcgaaaaggaccactggcggagccgacgcaccatctgtgtcaaaacccacgagagtggcaggagggagattgagatgtttgattcagccatcctgctaatccggaacccatacaggtccctggtggcagaattcaacagaaaatgtgccgggcacctgggatatgcagctgaccgcaactggaagagcaaagagtggccggactttgtcaacagctacgcctcgtggtggtcctcgcacgtcctggactggctcaagtacgggaagcggctgctggtggtgcactacgaggagctgcggcgcagcctggtgcccacgttacgggagatggtggccttcctcaacgtgtctgtgagcgaggagcggctgctctgcgtggagaacaacaaggagggcagcttccggcggcgcggccggcgctcccacgaccctgagcccttcaccccggagatgaaagacttgatcaatggctacatccggacggtggaccaagccctgcgtgaccacaactggacggggctgcccagggagtatgtgcccagatgataggcctggcccacgccgccgcccccgctgagtgacgcaatcgcaccacggggctgcgctccccactctgatgctcaggcccgtggcctcactgggacgaacggtgggtggggggctcaccctggtgctgcctcccgcacaaggagacctggacacaacagacacacatcacaaggcgaacacaaatggacacacatacctggccacgaacccacacctcctcagacactcagacaccactccaggctcatagccccgtcttgatgcagagaagccacccacgtggggtgtgccaggcacccccagatacaaatgcagccacgcacagacgtaacacacaggtgccaggccgtgtgctcctggaggctggctggctgtctctctcacacagatacacgtgcgctccctgggatccgggaggccctgggcttcctgtgtgtagccctggcatagacttgctcgtcagggtgttcgactctgggatgctgggccgggcagacatttatgctctgagcagcaaggaccattgggatggaggtgggcacaaagactgctgcttccagggtgtgcggccctggccgtgtgtctgacatcccataaatgtgtgtgtggtgtgactacgggcaccacaaactccgca

SEQ ID NO: 200296 - DNA, 2129 bp, Homo sapiens
  Payload ID: 19515
  Gene Name: WSC domain containing 1
  Uniprot ID: Q658N2
  ENST ID: ENST00000574232
  CDS Start-End: 353-2080
ggtcagcggagggtttgctccgtctcttggtgaacttgaacagaggcagaggcaaaagcaaaacatttctgcgccaggagatgaggggcggtagagccctggaatggagatgtccttgacgcctgggcagaggctgcagctgcaggaccctgtggccactggagataagtaatggtgccatttgaacacctactggaaacggggcaggaacagtgagtgaccccaggcgagcacaggcaggtgccaggagccaggatgcaaggatgacgcctccggaggccctggcctcactcccacctgggcgctaggagccatcccggggctccagccaggagccctgctgcccaggggcatggccaaacctttcttccgactccagaagtttctccgccgaacacagttcctgctgttcttcctcacggctgcctacctgatgaccggcagcctgctgctgctgcagcgggtccgcgtggctctcccacagggcccccgggcacccggccccctgcagaccttgccagtggccgccgtggcgctgggcgtgggcttgctggacagcagagccctgcacgaccctcgagtcagcccagagctgctgctgggtgtggacatgctgcagagccccctgacccggccccggcccggcccccgctggctccggagccgcaactcggagctgcgtcagttgcgtcgccgctggttccaccacttcatgagtgactcccagggaccgcccgccctgggccccgaggctgccaggcccgccatccacagccgaggcacctacattggatgcttcagtgacgatggccacgagaggactctgaaaggagctgtgttttatgacttgagaaagatgactgtctcccactgccaggatgcgtgtgctgagcggtcctatgtctacgccggcttggaggccggggcggagtgttactgcgggaaccggctgccagcggtgagcgtggggctggaagagtgtaaccatgagtgcaaaggcgagaagggctctgtgtgcggggctgtggaccggctctccgtgtaccgtgtggacgagctgcagccgggctccaggaagcggcggaccgccacctaccgcggatgcttccgactgccagagaacatcacacatgccttccccagctccctgatacaggccaatgtgaccgtggggacttgctcgggcttttgttcccagaaagagttccccttggccattctcaggggctgggaatgctactgtgcttaccctaccccccggttcaacctgcgggatgccatggacagctcagtatgtggccaggaccctgaggcacagaggctggcagaatactgtgaggtctaccagacacctgtgcaagacactcgttgtacagacaggaggttcctgcctaacaaatccaaagtgtttgtggctttgtcaagcttcccaggagccgggaacacatgggcacggcacctcattgagcatgccactggcttctatacagggagctactactttgatggaaccctctacaacaaagggttcaagggcgaaaaggaccactggcggagccgacgcaccatctgtgtcaaaacccacgagagtggcaggagggagattgagatgtttgattcagccatcctgctaatccggaacccatacaggtccctggtggcagaattcaacagaaaatgtgccgggcacctgggatatgcagctgaccgcaactggaagagcaaagagtggccggactttgtcaacagctacgcctcgtggtggtcctcgcacgtcctggactggctcaagtacgggaagcggctgctggtggtgcactacgaggagctgcggcgcagcctggtgcccacgttacgggagatggtggccttcctcaacgtgtctgtgagcgaggagcggctgctctgcgtggagaacaacaaggagggcagcttccggcggcgcggccggcgctcccacgaccctgagcccttcaccccggagatgaaagacttgatcaatggctacatccggacggtggaccaagccctgcgtgaccacaactggacggggctgcccagggagtatgtgcccagatgataggcctggcccacgccgccgcccccgctgagtgacgcaatcgcaccac

SEQ ID NO: 200297 - DNA, 677 bp, Homo sapiens
  Payload ID: 19515
  Gene Name: WSC domain containing 1
  ENST ID: ENST00000571973
  CDS Start-End: 416-677
actcttgttaactccatgcgtctgaaagccctcagctccgttaagctgtgttcctggaccgcctgggggcctgtgcctatgcactgctccatctctcccatgtttcaggcttcatccatggctctggatttctgcgccaggagatgaggggcggtagagccctggaatggagatgtccttgacgcctgggcagaggctgcagctgcaggaccctgtggccactggagataagtaatggtgccatttgaacacctactggaaacggggcaggaacagtgagtgaccccaggcgagcacaggcaggtgccaggagccaggatgcaaggatgacgcctccggaggccctggcctcactcccacctgggcgctaggagccatcccggggctccagccaggagccctgctgcccaggggcatggccaaacctttcttccgactccagaagtttctccgccgaacacagttcctgctgttcttcctcacggctgcctacctgatgaccggcagcctgctgctgctgcagcgggtccgcgtggctctcccacagggcccccgggcacccggccccctgcagaccttgccagtggccgccgtggcgctgggcgtgggcttgctggacagcagagccctgcacgaccctcgagtcagcccagagctgctgctgggtgtggacatgc

SEQ ID NO: 200298 - DNA, 1059 bp, Homo sapiens
  Payload ID: 19515
  Gene Name: WSC domain containing 1
  ENST ID: ENST00000576083
  CDS Start-End: 518-1059
cgcgcccgcccgcccgccccgccgttcagcccggacgccagcagccccggggagccaggcggcggcgccctgtgcccgggcgcgtgggtccgcttgccgcgggcggccggagacgtgcgggcgccggggcttctgggctccgggcactgcggggggctgcgggctcggcgcccggggaaggcgggccatgggcgcgggtgcgggcgccccagccggccgcgatcgcgggatttctgcgccaggagatgaggggcggtagagccctggaatggagatgtccttgacgcctgggcagaggctgcagctgcaggaccctgtggccactggagataagtaatggtgccatttgaacacctactggaaacggggcaggaacagtgagtgaccccaggcgagcacaggcaggtgccaggagccaggatgcaaggatgacgcctccggaggccctggcctcactcccacctgggcgctaggagccatcccggggctccagccaggagccctgctgcccaggggcatggccaaacctttcttccgactccagaagtttctccgccgaacacagttcctgctgttcttcctcacggctgcctacctgatgaccggcagcctgctgctgctgcagcgggtccgcgtggctctcccacagggcccccgggcacccggccccctgcagaccttgccagtggccgccgtggcgctgggcgtgggcttgctggacagcagagccctgcacgaccctcgagtcagcccagagctgctgctgggtgtggacatgctgcagagccccctgacccggccccggcccggcccccgctggctccggagccgcaactcggagctgcgtcagttgcgtcgccgctggttccaccacttcatgagtgactcccagggaccgcccgccctgggccccgaggctgccaggcccgccatccacagccgaggcacctacattggatgcttcagtgacgatggccacgagaggactctgaaaggagctgtgttttatgacttgagaaagatgactgtctcccactgccaggatgcgtgtgctgagcg

SEQ ID NO: 200299 - DNA, 1573 bp, Homo sapiens
  Payload ID: 19515
  Gene Name: WSC domain containing 1
  ENST ID: ENST00000573634
  CDS Start-End: 117-1496
ttttaggaagacggagtaagaggcaccaccacctgctcctgctgcctctgctgtcctcagcttctgggagcatcttagcagccagctccgggtgaggacagggtccaccggtgcacatggcagagcagggcagatgctgtgacttggcggctttgggggaacagggtggggctcctccctgggaaaaatctttaggcacctacattggatgcttcagtgacgatggccacgagaggactctgaaaggagctgtgttttatgacttgagaaagatgactgtctcccactgccaggatgcgtgtgctgagcggtcctatgtctacgccggcttggaggccggggcggagtgttactgcgggaaccggctgccagcggtgagcgtggggctggaagagtgtaaccatgagtgcaaaggcgagaagggctctgtgtgcggggctgtggaccggctctccgtgtaccgtgtggacgagctgcagccgggctccaggaagcggcggaccgccacctaccgcggatgcttccgactgccagagaacatcacacatgccttccccagctccctgatacaggccaatgtgaccgtggggacttgctcgggcttttgttcccagaaagagttccccttggccattctcaggggctgggaatgctactgtgcttaccctaccccccggttcaacctgcgggatgccatggacagctcagtatgtggccaggaccctgaggcacagaggctggcagaatactgtgaggtctaccagacacctgtgcaagacactcgttgtacagacaggaggttcctgcctaacaaatccaaagtgtttgtggctttgtcaagcttcccaggagccgggaacacatgggcacggcacctcattgagcatgccactggcttctatacagggagctactactttgatggaaccctctacaacaaagggttcaagggcgaaaaggaccactggcggagccgacgcaccatctgtgtcaaaacccacgagagtggcaggagggagattgagatgtttgattcagccatcctgctaatccggaacccatacaggtccctggtggcagaattcaacagaaaatgtgccgggcacctgggatatgcagctgaccgcaactggaagagcaaagagtggccggactttgtcaacagctacgcctcgtggtggtcctcgcacgtcctggactggctcaagtacgggaagcggctgctggtggtgcactacgaggagctgcggcgcagcctggtgcccacgttacgggagatggtggccttcctcaacgtgtctgtgagcgaggagcggctgctctgcgtggagaacaacaaggagggcagcttccggcggcgcggccggcgctcccacgaccctgagcccttcaccccggagatgaaagacttgatcaatggctacatccggacggtggaccaagccctgcgtgaccacaactggacggggctgcccagggagtatgtgcccagatgataggcctggcccacgccgccgcccccgctgagtgacgcaatcgcaccacggggctgcgctccccactctgatgctca

SEQ ID NO: 200300 - DNA, 494 bp, Homo sapiens
  Payload ID: 19515
  Gene Name: WSC domain containing 1
  ENST ID: ENST00000576947
  CDS Start-End: 416-494
aagtgcaaattctcagattctcccggagttgcctagtcaggaactctggggtaggggccagcaggctttgtatttaacgctgtctccagctgaaaggaataaatccgcctcagagtgggtcccagtgtatccctcggaagttctttctttcctgaacattctcgcctctgtcggggagttagaaaagctgttcattctgcgtccagataaaagagctcgcctcctcttttatccccgtcgcacactgagacggggccagccaggcccgggctcgccctccacgccggtgagctccatcaaatggccagctggtcacagccatgcttccctttctgcaggcacctacattggatgcttcagtgacgatggccacgagaggactctgaaaggagctgtgttttatgacttgagaaagatgactgtctcccactgccaggatgcgtgtgctgagcggtcctatgtctacgccggcttggaggccggggcggagtgtt

SEQ ID NO: 200301 - DNA, 5884 bp, Homo sapiens
  Payload ID: 19515
  Gene Name: WSC domain containing 1
  Uniprot ID: Q658N2
  ENST ID: ENST00000574946
  CDS Start-End: 391-2118
atgaaactcccttttaggaagacggagtaagaggcaccaccacctgctcctgctgcctctgctgtcctcagcttctgggagcatcttagcagccagctccggatttctgcgccaggagatgaggggcggtagagccctggaatggagatgtccttgacgcctgggcagaggctgcagctgcaggaccctgtggccactggagataagtaatggtgccatttgaacacctactggaaacggggcaggaacagtgagtgaccccaggcgagcacaggcaggtgccaggagccaggatgcaaggatgacgcctccggaggccctggcctcactcccacctgggcgctaggagccatcccggggctccagccaggagccctgctgcccaggggcatggccaaacctttcttccgactccagaagtttctccgccgaacacagttcctgctgttcttcctcacggctgcctacctgatgaccggcagcctgctgctgctgcagcgggtccgcgtggctctcccacagggcccccgggcacccggccccctgcagaccttgccagtggccgccgtggcgctgggcgtgggcttgctggacagcagagccctgcacgaccctcgagtcagcccagagctgctgctgggtgtggacatgctgcagagccccctgacccggccccggcccggcccccgctggctccggagccgcaactcggagctgcgtcagttgcgtcgccgctggttccaccacttcatgagtgactcccagggaccgcccgccctgggccccgaggctgccaggcccgccatccacagccgaggcacctacattggatgcttcagtgacgatggccacgagaggactctgaaaggagctgtgttttatgacttgagaaagatgactgtctcccactgccaggatgcgtgtgctgagcggtcctatgtctacgccggcttggaggccggggcggagtgttactgcgggaaccggctgccagcggtgagcgtggggctggaagagtgtaaccatgagtgcaaaggcgagaagggctctgtgtgcggggctgtggaccggctctccgtgtaccgtgtggacgagctgcagccgggctccaggaagcggcggaccgccacctaccgcggatgcttccgactgccagagaacatcacacatgccttccccagctccctgatacaggccaatgtgaccgtggggacttgctcgggcttttgttcccagaaagagttccccttggccattctcaggggctgggaatgctactgtgcttaccctaccccccggttcaacctgcgggatgccatggacagctcagtatgtggccaggaccctgaggcacagaggctggcagaatactgtgaggtctaccagacacctgtgcaagacactcgttgtacagacaggaggttcctgcctaacaaatccaaagtgtttgtggctttgtcaagcttcccaggagccgggaacacatgggcacggcacctcattgagcatgccactggcttctatacagggagctactactttgatggaaccctctacaacaaagggttcaagggcgaaaaggaccactggcggagccgacgcaccatctgtgtcaaaacccacgagagtggcaggagggagattgagatgtttgattcagccatcctgctaatccggaacccatacaggtccctggtggcagaattcaacagaaaatgtgccgggcacctgggatatgcagctgaccgcaactggaagagcaaagagtggccggactttgtcaacagctacgcctcgtggtggtcctcgcacgtcctggactggctcaagtacgggaagcggctgctggtggtgcactacgaggagctgcggcgcagcctggtgcccacgttacgggagatggtggccttcctcaacgtgtctgtgagcgaggagcggctgctctgcgtggagaacaacaaggagggcagcttccggcggcgcggccggcgctcccacgaccctgagcccttcaccccggagatgaaagacttgatcaatggctacatccggacggtggaccaagccctgcgtgaccacaactggacggggctgcccagggagtatgtgcccagatgataggcctggcccacgccgccgcccccgctgagtgacgcaatcgcaccacggggctgcgctccccactctgatgctcaggcccgtggcctcactgggacgaacggtgggtggggggctcaccctggtgctgcctcccgcacaaggagacctggacacaacagacacacatcacaaggcgaacacaaatggacacacatacctggccacgaacccacacctcctcagacactcagacaccactccaggctcatagccccgtcttgatgcagagaagccacccacgtggggtgtgccaggcacccccagatacaaatgcagccacgcacagacgtaacacacaggtgccaggccgtgtgctcctggaggctggctggctgtctctctcacacagatacacgtgcgctccctgggatccgggaggccctgggcttcctgtgtgtagccctggcatagacttgctcgtcagggtgttcgactctgggatgctgggccgggcagacatttatgctctgagcagcaaggaccattgggatggaggtgggcacaaagactgctgcttccagggtgtgcggccctggccgtgtgtctgacatcccataaatgtgtgtgtggtgtgactacgggcaccacaaactccgcagccttgcctctcttttctctgtggctgggctggctgcaccatgggcagggttgaggactgccccccaccccgcccaagccaatgcagacactgacctcaagaccagccacaccaagtctgtgcactgcccaccacccccttcaacccctcctacaccatgctccggggcctggggcctccttgcctggcttcttcctccagctatcctcagggaagctggagattcaagtcatgccccagaagcaaggtgtaagcatgggggcgtggggaagagggcaggagctgaagttccaggggagcccaggacccctggggacctgtacactagcaggatgggtcttgggagttggcatggggagattgtaagggctgtatctccgcgattactggtactggtgctccacccataggggccctgttctctctggggtcccacactggggtcatgagagctagttagtactcagcctgacccctaggtctggtcctgccagcctgggatgggggtcaatgtatgctacacatcttgggctcacaagtgaggctgtggaggccaggaggttcaagtatggagggtaggagtgcaacccaggagcaacgctcaaggtggccgagatgcagggaggattgtggcgatccggttgcacactggcctctgtggaggtcagggaggtgggaaggtgggtgggcctgaactcaggcagcccttcagtggcttcttcaggcctaggataaccctggccaggccccatggtcctgctctgggtcagctgtcagggagacctcccttcagcctgagccaagctgcattgggaggagaaggcagggtgagggatctgggagagcaggacgttgagatatcctgaccctctgcttcctagcctgatgatggggaacccagagccacccgctatgagcacaggccgggggtggaaggcccagtagagctgcccttccccagatggaagcttcctccaaccttcagtttggccagtgggtgggtttgggcatctgtgcccctggtggcctccaaatccttcctgggattcccccaaacccacactgatgcgaagctgttcttgaccctcccatagcatcaactcagttcagctcaaagctagaaacaccaaggtctttgaaaatgtttattggctcaggatagcttcggcatccaatctgcgaaggcccctgatggagctatttcttcctagtatcaggagcaattgagacccctcaggagtttccacactgctgtggacgggatagccagggcagacctgcatcccagagcaagcctagatccttgaaagcaatgtcaggcgtggcagtggggaagccatggaggctgggaagggcaaagtgtggagagaggagtgaccgggactggagccagggtctggggagagcaacagcaccaggcttttcctggtagttggattggtacattcactgctgccaggtacccagagatgtcatctctctccaggtagagcatcaccagctcctgtggccttgtagatgactctgtacctcagtgaagagtgcaggcaagtagagtgatggggtcagtgtccatccagtttacgctgagtcagtccatacagcaagacacctggcacttggcaggtactcctggatgttgatgagcaaggaagagcaacggccctgtcagctggcagtggtcctcacagccttcatcccaggtctgcctacgtgggagatctcatcagaaacaggaacggggatctgtctgtgcttgcaggaaagtccatttgtttttctccaagttaggtctcatctacagctcttagcttctcagtaaagaggatactctcccaaccagccaaggaataaaagctgatctgtatgtagggcagaagtgtggcaaatgcatcaggaaccggttagaacagaacagagaaaccctgactgtctacagattccaactttaatagcaagcctgtggagttacacaaacctgtgttaaaacatgtaatttttatggatttcatctcccgttgtggatcaatttggaaaaaccaaaatatgtaattttaaaaaactaaaacacatcctggtagtcccagtgatgtgtaaatgagagagaagaatagacaggcttccaaaccctgggaagaaagctgcttaattatgtgaacatcttataatgaagtctcttgcagctaaaattagattttgagtgcatgaatctgtgataatgtttgcatatcagaatgcattctccccttaaaagtagcagtagccacttggttcttagggggccccaagaggagaggagaagtgctgaggttgatgttacgactgcaagaattcttgggacacaggtttgttttctgctgacttgctcggaaacccattggaggtatctgaaatgtgatgactccaaaggggttcatttcactatagggagaaattgattcgtctgacttcctatttatcaccactcaatattgggtgagttggtctgaacaaggtggggataaagtagagtggaaataatgtagagtcgtcagactgaaaggccaggttgtagtcccagctcttatctgccatcttggacaaagcttttcccatctccagtctcagtttcccatccataaaatgggggaagtggtaggtcttgctgattgcatccacattcattcctccatttcctttcccagcaaccccccatttctgtttgggaattcatatgatctgccagagcctctccaggggtggaatacatgtcctggactaagccaatgacaccttccatctttccagctatggtgactgggttaggtatgatcttgtgagttaagacaatgaagccagagggaatttcaagacttatgggaatgctgggtagaagctgttttaattcccctgttgaatgtgaaaaaggtagtagtattcctgggtctttatgatgaccaccttgggccttgggatcatgaccaggaatcacgtgaagctgacaccactgaagggagagttgagaggcagaaagagatcaagtccttggtgaaattgtttaagtacaggatcaagccttgcttgagattggccttacctctggactttttttgttatatgagctaataaattctgtttattgtttaa

SEQ ID NO: 200302 - DNA, 570 bp, Homo sapiens
  Payload ID: 19515
  Gene Name: WSC domain containing 1
  ENST ID: ENST00000576233
  CDS Start-End: 435-570
ttttacagatggggaagctgaggcccagcaaggttaagcaacctacccagtgtcacacagctggccagtaacaaagctgggatttaaacctggctttgtccagtgctcctgcaacacagctggtccttggataaagcaagcacaggatttctgcgccaggagatgaggggcggtagagccctggaatggagatgtccttgacgcctgggcagaggctgcagctgcaggaccctgtggccactggagataagtaatggtgccatttgaacacctactggaaacggggcaggaacagtgagtgaccccaggcgagcacaggcaggtgccaggagccaggatgcaaggatgacgcctccggaggccctggcctcactcccacctgggcgctaggagccatcccggggctccagccaggagccctgctgcccaggggcatggccaaacctttcttccgactccagaagtttctccgccgaacacagttcctgctgttcttcctcacggctgcctacctgatgaccggcagcctgctgctgctgcagcgggtccgcgtggctctcccacagggcc

SEQ ID NO: 200303 - DNA, 759 bp, Homo sapiens
  Payload ID: 19515
  Gene Name: WSC domain containing 1
  ENST ID: ENST00000573619
  CDS Start-End: 626-759
ccatattaggaaacccactggcacgctccgccgttatcttcgcaagacttccgttgttgcctcaagttgcagattgccttttaacagagaagaaagtgacaggaatgtgctggcactgatgacacagtaatgaccaaggtaaacaaggacctgctctagcctgacaggctggtcttcagtgttttggccatctccctacctgatcaccctgaagcaacacccacaagcagacaagctctgcccagtgagacagcacagaaaagcctccccgggatgtctggcagctcctacttggttccactggaaagaaaataagaggtcattattcacaaacaagatttctgcgccaggagatgaggggcggtagagccctggaatggagatgtccttgacgcctgggcagaggctgcagctgcaggaccctgtggccactggagataagtaatggtgccatttgaacacctactggaaacggggcaggaacagtgagtgaccccaggcgagcacaggcaggtgccaggagccaggatgcaaggatgacgcctccggaggccctggcctcactcccacctgggcgctaggagccatcccggggctccagccaggagccctgctgcccaggggcatggccaaacctttcttccgactccagaagtttctccgccgaacacagttcctgctgttcttcctcacggctgcctacctgatgaccggcagcctgctgctgctgcagcgggtccgcgtggctctcccacaggg

SEQ ID NO: 200304 - DNA, 4710 bp, Homo sapiens
  Payload ID: 19516
  Gene Name: WSC domain containing 2
  Uniprot ID: Q2TBF2
  ENST ID: ENST00000332082
  CDS Start-End: 819-2516
tttctcataaaatctctgctggaccagccactcctagtggggagcccagggtggtctgggagtgctgcatgcacccagctgctgtatcaccaggacatcaggaggtggagatgttcgcttgtgtgttctccactgcccaaacccaggtggttattctgcaacagctacaacttgagtaagaccaaaacacaactcaagtggactttctaaaaagagaataatttattttggctcccagacatcaaaattcgcaagggattgcttcaggtggcatccctgagtcctgatgcctgactggatggaggcccaccagcttctgttcccatgaggtagaaaggccaagcttggtcttcagctggggaagaggccagaaacaaggcccccagtgaaataacccagatccattggcctgaggagcagagaaagggcaagaagtgaactgcagctgctggtaaccctcagaaaccttctccaagtgctattctcacagttctttaggaacactctgaagtgaagaacaatatgtaggaaaatgggaccaacttatgtgtgttctgagcctcaaaacccccttgttggcccaaagaagctcaccttcagtttgggagggctggtaagctccatcctttctcatggcctcagccaagcattgaacttgccctccccttctggccttggtgatcactttttcaggaagagtgagactgaggacccccaagtgttccatccctaaggaaagcttgggaaaccaagccccttccatcctctcccaagcaccccagccaagccccagagagccagtccggaatgatcccactatggccaagctctggttcaaattccagcggtacttccgccggaaacctgtgcgcttctttaccttcctggcactctacctgactgctgggagccttgtcttccttcactctggctttgtgggccagcccgctgtctcggggaaccaggcgaaccccgctgctgcaggaggcccagctgagggtgctgagctgtccttcttgggtgacatgcatctgggcagaggtttccgggacacaggtgaagcctcaagcattgctcgcaggtacggaccctggttcaagggcaaggatgggaatgagagagccaagcttggcgactacggtggagcctggagccgagccctcaaggggagggttgtccgggagaaggaggaagagcgagccaagtacatcggctgctacctggatgacacccagagtcgggcccttcgaggagtgtccttttttgactacaaaaagatgaccatcttccgttgccaggacaactgtgctgaacggggttacctgtatggcgggctggagttcggcgccgagtgctactgcggccacaagatccaggcgacgaacgtgagcgaggcagagtgcgacatggagtgcaagggcgagcgaggcagcgtgtgcggcggcgccaaccgcctctctgtctaccggctgcagctggcccaggagtcggcccgcaggtatggaagtgcagtgttccggggctgcttccgcaggcccgacaacctttccctggccttacccgtgacagctgccatgctgaacatgtctgtggacaaatgcgtggacttctgcactgagaaggagtacccgctggcagctcttgcaggcaccgcctgccactgtgggtttcccaccacccgattcccgctccatgacagagaggatgagcagctctgtgcccagaagtgcagcgcggaggagtttgagagctgcgggactcctagttacttcattgtgtaccagacacaagtccaagacaaccgttgcatggacagaaggttcctgccaggcaagtccaagcagctcattgctttggccagcttcccaggtgctggcaacacgtgggctcgccacctcattgaattggccacaggcttctacactggcagctactacttcgatggctccctctacaacaaagggtttaaaggtgagcgggaccactggcgcagcggacggaccatctgcatcaagacgcacgaaagcggccagaaagagatcgaggccttcgacgccgccatcctgctcatccgcaacccctacaaagccctcatggctgagttcaaccgcaagtacggcggccacataggctttgctgcgcatgcccactggaagggcaaagagtggccagagttcgtgaggaactatgccccgtggtgggccactcacacactggactggctcaagtttggcaagaaggtgctggtggtgcactttgaggacctgaagcaggacctctttgtccagctgggccggatggtcagcctgctgggcgtggctgtcagggaggaccggctgctctgtgtggagagccagaaggatggcaacttcaagcgctcagggctccggaagctcgagtatgacccctatactgcggacatgcagaagaccatctctgcctacatcaagatggtggatgcagccctcaaagggcggaacctaacgggtgtccccgatgactactacccaagatgatgcgtccacacagggggagggtagactgggagtcctgaccacgcaggccctggggactcaagacccctggttacccccactcatctgtcctctctttggtctggggacaatccccttggctgctctttgccttcaatgagtttcctgcatgacagaggaggctcaagggaagagattgcccaggcactaccactctgctcacatgttccccccttggcaatgtggggcatcttgtttagggggttctagttacatggactcttttctgtctcctgggtccctgcccccaccactctgggttccatttgtgggagggagggctcatccacatcatggagacttgctggatgccccatggcaattgtcaaggctcttgatgcaagagcccagggggctattgtaaaaacttggccccagatgcttgtcccttctgggctgagatttcgcagcccccttctcatctccacccaagaagtgctggcaccgatgtttaactcaggccaccttctgttctaaagaaagattgctgggaagtttctccgtggccttaggtttctgacatcctggatagtgtggggaggtaatggtgctcacagtaggttaattggagacaccatgtggggccattggtgttatgagccccccaggccacactgcttctcagaaatgagctgcttgcctttccacctccagggcatgaaccctgcccctttctatccatgctgtgtccaggaggtgaccttgagatcctgataccaccttcaaggaacctcaggcaccaacagtgagcccacgaggatggtcacatgccatgtgcagaatttgacttaagagagagccccagtgacacatctctccatggtgggctccagtcagtcttacactgcccttctgacccctacaaatgggtcctttgctatccaggtgagacagcaagagtgttcttaatcagatggaaccacacccaaaatggacccccactaccttcccagaccatatatctccccttgatcatagtccaacagggccagcttcccttgggggccctttaaggaatggggtgaatgaaattgtgtcatttctatacaaacactgctctcttgatgctgaaatgccaaaccgaaggatttctgaggacctaaatcacggagcatcaatcttacaaagtgttggtccagagtcccatctcttccccaaccctggataccagtagcttcccacccagtccaaacctgcaccatccatcattatgtagatgaaaaagccataggtcatagcctctttgctattctattggagtagcctccctaggcagtccctctgaagccttggagtgcaggtaaatgctcattcccaagtagcaaagagaccatggagaaggtgcgtgtaaagagatatatttttgtaagaggaatatgattaatacattccgccccttggaacctggccatgcaaagcaagggcacagggattagacctgtggcacacttccccaattccctcatctgtaggatttgggctgccccaggcccacccagggggctctgaatgtattttgtaccgtgtttctttcccccaggagaatttttagtcttctttcatgaagcagtggaggggttggcctcccttctactgggaggttgactctctctgggagactcttggtccaagacctgggtcagttctttgctggtggtcccctctgaccacaagcttctgcctgaagattcctcaggtcaacaccatcattaaatgcgagttttgttgatgattctaccatgtggtagagtgttgtgtaagacaggttcacaaatgggatgttttcctagtgtgtgtgtgtgtgtgtgtgtgtgtgtatgagagagagagagagagacaacagagacagagagaggcagagaggcatagagagacagagagagagacaagaaacagagatagacagaaaatgttcggggtggcaggcgggttggtgtataactgctttgtgcctgtgtgactctggcatagctgctcagggagaattacgtgcctctgtgtgtaaaattgcctttgtgttctcctgcctttctatgttttgaaactgtatcccacaagttgccggtatgaccatcttatttgtaatgagtctgtgcaggtccttgtgtatggaattgcacccgtgtaaaggaggaaatggtcagtgtgcatgaaa

SEQ ID NO: 200305 - DNA, 569 bp, Homo sapiens
  Payload ID: 19516
  Gene Name: WSC domain containing 2
  ENST ID: ENST00000551638
  CDS Start-End: 199-569
agcagctgggaaggcgcccacagagcgggcgcgccaagcgggacgcgggagtcgcagagagggaccccgggcgcctgctgagctcagctggcagagtttgcaagtggcggagacccttcagccaagtacatcggctgctacctggatgacacccagagtcgggcccttcgaggagtgtccttttttgactacaaaaagatgaccatcttccgttgccaggacaactgtgctgaacggggttacctgtatggcgggctggagttcggcgccgagtgctactgcggccacaagatccaggcgacgaacgtgagcgaggcagagtgcgacatggagtgcaagggcgagcgaggcagcgtgtgcggcggcgccaaccgcctctctgtctaccggctgcagctggcccaggagtcggcccgcaggtatggaagtgcagtgttccggggctgcttccgcaggcccgacaacctttccctggccttacccgtgacagctgccatgctgaacatgtctgtggacaaatgcgtggacttctgcactgagaaggagtacccgctggcagctcttgcagg

SEQ ID NO: 200306 - DNA, 3534 bp, Homo sapiens
  Payload ID: 19516
  Gene Name: WSC domain containing 2
  Uniprot ID: Q2TBF2
  ENST ID: ENST00000549903
  CDS Start-End: 1-1758
atggccaagctctggttcaaattccagcggtacttccgccggaaacctgtgcgcttctttaccttcctggcactctacctgactgctgggagccttgtcttccttcactctggctttgtgggccagcccgctgtctcggggaaccaggcgaaccccgctgctgcaggaggcccagctgagggtgctgagctgtccttcttgggtgacatgcatctgggcagaggtttccgggacacaggtgaagcctcaagcattgctcgcaggtacggaccctggttcaagggcaaggatgggaatgagagagccaagcttggcgactacggtggagcctggagccgagccctcaaggggagggttgtccgggagaaggaggaagagcgagccaagtacatcggctgctacctggatgacacccagagtcgggcccttcgaggagtgtccttttttgactacaaaaagatgaccatcttccgttgccaggacaactgtgctgaacggggttacctgtatggcgggctggagttcggcgccgagtgctactgcggccacaagatccaggcgacgaacgtgagcgaggcagagtgcgacatggagtgcaagggcgagcgaggcagcgtgtgcggcggcgccaaccgcctctctgtctaccggctgcagctggcccaggagtcggcccgcaggtatggaagtgcagtgttccggggctgcttccgcaggcccgacaacctttccctggccttacccgtgacagctgccatgctgaacatgtctgtggacaaatgcgtggacttctgcactgagaaggagtacccgctggcagctcttgcaggcaccgcctgccactgtgggtttcccaccacccgattcccgctccatgacagagaggatgagcagctctgtgcccagaagtgcagcgcggaggagtttgagagctgcgggactcctagttacttcattgtgtaccagacacaagtccaagacaaccgttgcatggacagaaggttcctgccaggcaagtccaagcagctcattgctttggccagcttcccaggtgctggcaacacgtgggctcgccacctcattgaattggccacaggcttctacactggcagctactacttcgatggctccctctacaacaaagggtttaaaggtgagcgggaccactggcgcagcggacggaccatctgcatcaagacgcacgaaagcggccagaaagagatcgaggccttcgacgccgccatcctgctcatccgcaacccctacaaagccctcatggctgagttcaaccgcaagtacggcggccacataggctttgctgcgcatgcccactggaagggcaaaggagccgtaccaggatctttgcaaatcttatttcgctcgatttgcacagcatctgtaggagagtggccagagttcgtgaggaactatgccccgtggtgggccactcacacactggactggctcaagtttggcaagaaggtgctggtggtgcactttgaggacctgaagcaggacctctttgtccagctgggccggatggtcagcctgctgggcgtggctgtcagggaggaccggctgctctgtgtggagagccagaaggatggcaacttcaagcgctcagggctccggaagctcgagtatgacccctatactgcggacatgcagaagaccatctctgcctacatcaagatggtggatgcagccctcaaagggcggaacctaacgggtgtccccgatgactactacccaagatgatgcgtccacacagggggagggtagactgggagtcctgaccacgcaggccctggggactcaagacccctggttacccccactcatctgtcctctctttggtctggggacaatccccttggctgctctttgccttcaatgagtttcctgcatgacagaggaggctcaagggaagagattgcccaggcactaccactctgctcacatgttccccccttggcaatgtggggcatcttgtttagggggttctagttacatggactcttttctgtctcctgggtccctgcccccaccactctgggttccatttgtgggagggagggctcatccacatcatggagacttgctggatgccccatggcaattgtcaaggctcttgatgcaagagcccagggggctattgtaaaaacttggccccagatgcttgtcccttctgggctgagatttcgcagcccccttctcatctccacccaagaagtgctggcaccgatgtttaactcaggccaccttctgttctaaagaaagattgctgggaagtttctccgtggccttaggtttctgacatcctggatagtgtggggaggtaatggtgctcacagtaggttaattggagacaccatgtggggccattggtgttatgagccccccaggccacactgcttctcagaaatgagctgcttgcctttccacctccagggcatgaaccctgcccctttctatccatgctgtgtccaggaggtgaccttgagatcctgataccaccttcaaggaacctcaggcaccaacagtgagcccacgaggatggtcacatgccatgtgcagaatttgacttaagagagagccccagtgacacatctctccatggtgggctccagtcagtcttacactgcccttctgacccctacaaatgggtcctttgctatccaggtgagacagcaagagtgttcttaatcagatggaaccacacccaaaatggacccccactaccttcccagaccatatatctccccttgatcatagtccaacagggccagcttcccttgggggccctttaaggaatggggtgaatgaaattgtgtcatttctatacaaacactgctctcttgatgctgaaatgccaaaccgaaggatttctgaggacctaaatcacggagcatcaatcttacaaagtgttggtccagagtcccatctcttccccaaccctggataccagtagcttcccacccagtccaaacctgcaccatccatcattatgtagatgaaaaagccataggtcatagcctctttgctattctattggagtagcctccctaggcagtccctctgaagccttggagtgcaggtaaatgctcattcccaagtagcaaagagaccatggagaaggtgcgtgtaaagagatatatttttgtaagaggaatatgattaatacattccgccccttggaacctggccatgcaaagcaagggcacagggattagacctgtggcacacttccccaattccctcatctgtaggatttgggctgccccaggcccacccagggggctctgaatgtattttgtaccgtgtttctttcccccaggagaatttttagtcttctttcatgaagcagtggaggggttggcctcccttctactgggaggttgactctctctgggagactcttggtccaagacctgggtcagttctttgctggtggtcccctctgaccacaagcttctgcctgaagattcctcaggtcaacaccatcattaaatgcgagttttgttgatgattcta

SEQ ID NO: 200307 - DNA, 4481 bp, Homo sapiens
  Payload ID: 19516
  Gene Name: WSC domain containing 2
  Uniprot ID: Q2TBF2
  ENST ID: ENST00000547525
  CDS Start-End: 1008-2705
atccccggggcgggtgcccgcgcggggcctcgccgcggctcggggcacccgcagtgccgcccgcccgagcgccaggctcacaggagcccggctttcacttcctctcgcttccgcccgcctccctggctcgccggctggcgtcgccaccgcctcctcgtccccggccaccgctgtcgccgctgctgcaattcaaggcgcacactatcccactttcccgctggaggcgcagaggatgccccttgagccagacctggagaaatagccccagggcccggcaggaggagccttggtggcgagaaaggaaatccaggctcccctttccttaaagccactgcagcagctgggaaggcgcccacagagcgggcgcgccaagcgggacgcgggagtcgcagagagggaccccgggcgcctgctgagctcagctggcagagtttgcaagtggcggagacccttcaggtggcatccctgagtcctgatgcctgactggatggaggcccaccagcttctgttcccatgaggtagaaaggccaagcttggtcttcagctggggaagaggccagaaacaaggcccccagtgaaataacccagatccattggcctgaggagcagagaaagggcaagaagtgaactgcagctgctggtaaccctcagaaaccttctccaagtgctattctcacagttctttaggaacactctgaagtgaagaacaatatgtaggaaaatgggaccaacttatgtgtgttctgagcctcaaaacccccttgttggcccaaagaagctcaccttcagtttgggagggctggtaagctccatcctttctcatggcctcagccaagcattgaacttgccctccccttctggccttggtgatcactttttcaggaagagtgagactgaggacccccaagtgttccatccctaaggaaagcttgggaaaccaagccccttccatcctctcccaagcaccccagccaagccccagagagccagtccggaatgatcccactatggccaagctctggttcaaattccagcggtacttccgccggaaacctgtgcgcttctttaccttcctggcactctacctgactgctgggagccttgtcttccttcactctggctttgtgggccagcccgctgtctcggggaaccaggcgaaccccgctgctgcaggaggcccagctgagggtgctgagctgtccttcttgggtgacatgcatctgggcagaggtttccgggacacaggtgaagcctcaagcattgctcgcaggtacggaccctggttcaagggcaaggatgggaatgagagagccaagcttggcgactacggtggagcctggagccgagccctcaaggggagggttgtccgggagaaggaggaagagcgagccaagtacatcggctgctacctggatgacacccagagtcgggcccttcgaggagtgtccttttttgactacaaaaagatgaccatcttccgttgccaggacaactgtgctgaacggggttacctgtatggcgggctggagttcggcgccgagtgctactgcggccacaagatccaggcgacgaacgtgagcgaggcagagtgcgacatggagtgcaagggcgagcgaggcagcgtgtgcggcggcgccaaccgcctctctgtctaccggctgcagctggcccaggagtcggcccgcaggtatggaagtgcagtgttccggggctgcttccgcaggcccgacaacctttccctggccttacccgtgacagctgccatgctgaacatgtctgtggacaaatgcgtggacttctgcactgagaaggagtacccgctggcagctcttgcaggcaccgcctgccactgtgggtttcccaccacccgattcccgctccatgacagagaggatgagcagctctgtgcccagaagtgcagcgcggaggagtttgagagctgcgggactcctagttacttcattgtgtaccagacacaagtccaagacaaccgttgcatggacagaaggttcctgccaggcaagtccaagcagctcattgctttggccagcttcccaggtgctggcaacacgtgggctcgccacctcattgaattggccacaggcttctacactggcagctactacttcgatggctccctctacaacaaagggtttaaaggtgagcgggaccactggcgcagcggacggaccatctgcatcaagacgcacgaaagcggccagaaagagatcgaggccttcgacgccgccatcctgctcatccgcaacccctacaaagccctcatggctgagttcaaccgcaagtacggcggccacataggctttgctgcgcatgcccactggaagggcaaagagtggccagagttcgtgaggaactatgccccgtggtgggccactcacacactggactggctcaagtttggcaagaaggtgctggtggtgcactttgaggacctgaagcaggacctctttgtccagctgggccggatggtcagcctgctgggcgtggctgtcagggaggaccggctgctctgtgtggagagccagaaggatggcaacttcaagcgctcagggctccggaagctcgagtatgacccctatactgcggacatgcagaagaccatctctgcctacatcaagatggtggatgcagccctcaaagggcggaacctaacgggtgtccccgatgactactacccaagatgatgcgtccacacagggggagggtagactgggagtcctgaccacgcaggccctggggactcaagacccctggttacccccactcatctgtcctctctttggtctggggacaatccccttggctgctctttgccttcaatgagtttcctgcatgacagaggaggctcaagggaagagattgcccaggcactaccactctgctcacatgttccccccttggcaatgtggggcatcttgtttagggggttctagttacatggactcttttctgtctcctgggtccctgcccccaccactctgggttccatttgtgggagggagggctcatccacatcatggagacttgctggatgccccatggcaattgtcaaggctcttgatgcaagagcccagggggctattgtaaaaacttggccccagatgcttgtcccttctgggctgagatttcgcagcccccttctcatctccacccaagaagtgctggcaccgatgtttaactcaggccaccttctgttctaaagaaagattgctgggaagtttctccgtggccttaggtttctgacatcctggatagtgtggggaggtaatggtgctcacagtaggttaattggagacaccatgtggggccattggtgttatgagccccccaggccacactgcttctcagaaatgagctgcttgcctttccacctccagggcatgaaccctgcccctttctatccatgctgtgtccaggaggtgaccttgagatcctgataccaccttcaaggaacctcaggcaccaacagtgagcccacgaggatggtcacatgccatgtgcagaatttgacttaagagagagccccagtgacacatctctccatggtgggctccagtcagtcttacactgcccttctgacccctacaaatgggtcctttgctatccaggtgagacagcaagagtgttcttaatcagatggaaccacacccaaaatggacccccactaccttcccagaccatatatctccccttgatcatagtccaacagggccagcttcccttgggggccctttaaggaatggggtgaatgaaattgtgtcatttctatacaaacactgctctcttgatgctgaaatgccaaaccgaaggatttctgaggacctaaatcacggagcatcaatcttacaaagtgttggtccagagtcccatctcttccccaaccctggataccagtagcttcccacccagtccaaacctgcaccatccatcattatgtagatgaaaaagccataggtcatagcctctttgctattctattggagtagcctccctaggcagtccctctgaagccttggagtgcaggtaaatgctcattcccaagtagcaaagagaccatggagaaggtgcgtgtaaagagatatatttttgtaagaggaatatgattaatacattccgccccttggaacctggccatgcaaagcaagggcacagggattagacctgtggcacacttccccaattccctcatctgtaggatttgggctgccccaggcccacccagggggctctgaatgtattttgtaccgtgtttctttcccccaggagaatttttagtcttctttcatgaagcagtggaggggttggcctcccttctactgggaggttgactctctctgggagactcttggtccaagacctgggtcagttctttgctggtggtcccctctgaccacaagcttctgcctgaagattcctcaggtcaacaccatcattaaatgcgagttttgttgatgattcta

SEQ ID NO: 200308 - DNA, 7130 bp, Homo sapiens
  Payload ID: 19517
  Gene Name: WW and C2 domain containing 1
  Uniprot ID: Q8IX03
  ENST ID: ENST00000265293
  CDS Start-End: 503-3844
ggggcagcgcggttacctgcaccgcccgagccgcacctggcggaggcagaagtcacaaacccggcgagctcagagcggtggagcggagaggagggacggcacccggctgcagggaggagggaggcggcagcggcagcggcggcgtggagggcgcagcgcgccgcgcggcggaggagggcagacggcggcggcggcggcgctcggctcgctctgcccggccggctgggcgcgcacccgggctcgcaccgcgccgctgcggacgcacatggcagcgtgagaggccggcggcgggaggagcgggcggcgccgggtcggggctgcagggccgcatggacagcggcgccaccccggccggcccctactagggccccccatctgcgggcgccaccccccggatcatggtgcctcggcggccgcccgggctaagagcggccggctggagccgctgagcccccgctgcggccgggagctgcatgggggagcgccggcagcgcttgggaagatgccccggccggagctgcccctgccggagggctgggaggaggcgcgcgacttcgacggcaaggtctactacatagaccacacgaaccgcaccaccagctggatcgacccgcgggacaggtacaccaaaccgctcacctttgctgactgcattagtgatgagttgccgctaggatgggaagaggcatatgacccacaggttggagattacttcatagaccacaacaccaaaaccactcagattgaggatcctcgagtacaatggcggcgggagcaggaacatatgctgaaggattacctggtggtggcccaggaggctctgagtgcacaaaaggagatctaccaggtgaagcagcagcgcctggagcttgcacagcaggagtaccagcaactgcatgccgtctgggagcataagctgggctcccaggtcagcttggtctctggttcatcatccagctccaagtatgaccctgagatcctgaaagctgaaattgccactgcaaaatcccgggtcaacaagctgaagagagagatggttcacctccagcacgagctgcagttcaaagagcgtggctttcagaccctgaagaaaatcgataagaaaatgtctgatgctcagggcagctacaaactggatgaagctcaggctgtcttgagagaaacaaaagccatcaaaaaggctattacctgtggggaaaaggaaaagcaagatctcattaagagccttgccatgttgaaggacggcttccgcactgacagggggtctcactcagacctgtggtccagcagcagctctctggagagttcgagtttcccgctaccgaaacagtacctggatgtgagctcccagacagacatctcgggaagcttcggcatcaacagcaacaatcagttggcagagaaggtcagattgcgccttcgatatgaagaggctaagagaaggatcgccaacctgaagatccagctggccaagcttgacagtgaggcctggcctggggtgctggactcagagagggaccggctgatccttatcaacgagaaggaggagctgctgaaggagatgcgcttcatcagcccccgcaagtggacccagggggaggtggagcagctggagatggcccggaagcggctggaaaaggacctgcaggcagcccgggacacccagagcaaggcgctgacggagaggttaaagttaaacagtaagaggaaccagcttgtgagagaactggaggaagccacccggcaggtggcaactctgcactcccagctgaaaagtctctcaagcagcatgcagtccctgtcctcaggcagcagccccggatccctcacgtccagccggggctccctggttgcatccagcctggactcctccacttcagccagcttcactgacctctactatgacccctttgagcagctggactcagagctgcagagcaaggtggagttcctgctcctggagggggccaccggcttccggccctcaggctgcatcaccaccatccacgaggatgaggtggccaagacccagaaggcagagggaggtggccgcctgcaggctctgcgttccctgtctggcaccccaaagtccatgacctccctatccccacgttcctctctctcctccccctccccaccctgttcccctctcatggctgaccccctcctggctggtgatgccttcctcaactccttggagtttgaagacccggagctgagtgccactctttgtgaactgagccttggtaacagcgcccaggaaagataccggctggaggaaccaggaacggagggcaagcagctgggccaagctgtgaatacggcccaggggtgtggcctgaaagtggcctgtgtctcagccgccgtatcggacgagtcagtggctggagacagtggtgtgtacgaggcttccgtgcagagactgggtgcttcagaagctgctgcatttgacagtgacgaatcggaagcagtgggtgcgacccgaattcagattgccctgaagtatgatgagaagaataagcaatttgcaatattaatcatccagctgagtaacctttctgctctgttgcagcaacaagaccagaaagtgaatatccgcgtggctgtccttccttgctctgaaagcacaacctgcctgttccggacccggcctctggacgcctcagacactctagtgttcaatgaggtgttctgggtatccatgtcctatccagcccttcaccagaagaccttaagagtcgatgtctgtaccaccgacaggagccatctggaagagtgcctgggaggcgcccagatcagcctggcggaggtctgccggtctggggagaggtcgactcgctggtacaaccttctcagctacaaatacttgaagaaacagagcagggagctcaagccagtgggagtcatggcccctgcctcagggcctgccagcacggacgctgtgtctgctctgttggaacagacagcagtggagctggagaagaggcaggagggcaggagcagcacacagacactggaagacagctggaggtatgaggagaccagtgagaatgaggcagtagccgaggaagaggaggaggaggtggaggaggaggagggagaagaggatgttttcaccgagaaagcctcacctgatatggatgggtacccagcattaaaggtggacaaagagaccaacacggagaccccggccccatcccccacagtggtgcgacctaaggaccggagagtgggcaccccgtcccaggggccatttcttcgagggagcaccatcatccgctctaagaccttctccccaggaccccagagccagtacgtgtgccggctgaatcggagtgatagtgacagctccactctgtccaaaaagccaccttttgttcgaaactccctggagcgacgcagcgtccggatgaagcggccttcctcggtcaagtcgctgcgctccgagcgtctgatccgtacctcgctggacctggagttagacctgcaggcgacaagaacctggcacagccaattgacccaggagatctcggtgctgaaggagctcaaggagcagctggaacaagccaagagccacggggagaaggagctgccacagtggttgcgtgaggacgagcgtttccgcctgctgctgaggatgctggagaagcggcagatggaccgagcggagcacaagggtgagcttcagacagacaagatgatgagggcagctgccaaggatgtgcacaggctccgaggccagagctgtaaggaacccccagaagttcagtctttcagggagaagatggcatttttcacccggcctcggatgaatatcccagctctctctgcagatgacgtctaatcgccagaaaagtatttcctttgttccactgaccaggctgtgaacattgactgtggctaaagttatttatgtggtgttatatgaaggtactgagtcacaagtcctctagtgctcttgttggtttgaagatgaaccgactttttagtttgggtcctactgttgttattaaaaacagaacaaaaacaaaacacacacacacacaaaaacagaaacaaaaaaaaccagcattaaaataataagattgtatagtttgtatatttaggagtgtatttttgggaaagaaaatttaaatgaactaaagcagtattgagttgctgctcttcttaaaatcgtttagattttttttggtttgtacagctccaccttttagaggtcttactgcaataagaagtaatgcctgggggacggtaatcctaataggacgtcccgcacttgtcacagtacagctaatttttcctagttaacatattttgtacaatattaaaaaaatgcacagaaaccattgggggggattcagaggtgcatccacggatcttcttgagctgtgacgtgtttttatgtggctgcccaacgtggagcgggcagtgtgataggctgggtgggctaagcagcctagtctatgtgggtgacaggccacgctggtctcagatgcccagtgaagccactaacatgagtgaggggagggctgtggggaactccattcagttttatctccatcaataaagtggcctttcaaaaagaatcttcctcttgctctctttttctttcctacccctcacttcatctgtttccctgatttttgactctcccctttccagtcatttctttcccacccatccgcagtcctggaaacatttattttttcttttgcccactgttttcatttgctcattaaattaaaatgactgctcggctcattgggaatccacatccccaagttagactggggatatgctctctgtactgtctccttctatggaattccaccccacccagagagagatgacttcacagtttgttcatatgagcatcatcccatgtcgtccccaacccaggggctggtaggtgctacagcttgtgcttcatgctgctcctgtggcccctattcctacccagctcagagctttgcagggtctactgcagacaatcagaagtcagtttctaacaaatagcaacagccacaaatctcttcctccttcctctctgacattaccctgtgcaacttttctcaaagtctgttgcaccactcagcaaagcaagttgcaccagctatatcagaatcacctggggcagcctattaaaaatgcagactgttgagaccatcctggctaacacggtgaaaccctgtctctactaaaaatacaaaaaattagccggccgtggtggcgggcagctactcgggaggctgaggcaggagaatgacctgaacctgggaggcagagcttgcagtgagctgagattgtgccactgcactccagcctgggtgacagagcaagactccgtctcaaaaaaaaaaaaaaaagaaaaatgcagactggctggcgcggtggctcatgcttgtaatcccagcactttgggaggctgaggcgggcagatcaactgagatcgggggttcgagaccagcctgatcaacatggagaaacctggtctctactaaaaatacataattagctgggcgtagtggcgcatacctgtaatcccagctacttgggtggccaaggcttgaacccaggaggcggaggttgcggtgagccgagatggcgccattgactccagcctgggcaacaagagcgtaactccatctcaaaaaaataataataataaaaataaaatgcagactgtcaggtcctctctagacccactgaactatcccgcccaccctgggacggtccccagtgccagtgttttacccatgttccctctgtaagtcttatgcacaccgcaatttgagagccccactggtataaagtgagtgaaacccaggcagagacaggcaaaatggtgaggcccgcatcctattggtgagtcacacagggaacgctgaaattcatggccttctccaggctactgggaacccatgggcggtgatggagggagtggtgccaccttcacttgctgctgaggctcttccccctctccccagcatactccttacctggctgtctctcctcatgtataaggaacctatagtggtgtagaatctactcttcttccccctgtggcttccaggcccccctgtatagctgctatccagcccgatttctcaccactggcccagggcttcctcctgccccgtggcttcacgtctctgaacacatcaatctctgatgttctctctccttccattgaattccaccagacacattcagggtttacttcgtaatgtcttcatatgagtatcaatcaacaccttccccaactcaattgtactaggttgtagagcacaaggatggtctcgtgctgctctgtggcacctgtgcctacactcctctgagctttgaggaggctgctctctttgctgaccccatgatcttttctgcccttctgttaagggcattggccacagcaacggggcaaatgccccaagctggctgtaagtgacccatccctttggctcccatgattagaccaaggagaggcatggggtccagctgagccattcagaaccattccttagcattttccactcaaaggttagagatgagattttctcttcccaaggctacctctggccatggttccagcttcatgggggcaatgggattaggaaaatgaggtcaacctgcaaaggaaagcagatgcaagagatggagacagaatgggggtgtcctggggatcttggagcctgaattcattggcacaaaaggcagcagcatcctcactgtatctgcagtccatttggactcaataaaaactttgaaagtcacatgtgttatggaattccttctcagtgacacattcatctgtgctcagttgtcccagcaagggtcagcccctcatacccctgcagcatccgctgctatgaagcagagctgtaaacgccctccctgtgtataggaaaagctacatggagcaaatcctcctgcctgaagaagtgcatctcagcatcacttcagctgtcggggcatttgtggggagaaccagaccacctctgcggaaggcagcagaccctcttccagccatggatggagttgaattctctataaacggttcaccagcaaaccaccaatacattccattgtttgcctagagagaaatttaaaaataaataaatgttcacttataa

SEQ ID NO: 200309 - DNA, 3980 bp, Homo sapiens
  Payload ID: 19517
  Gene Name: WW and C2 domain containing 1
  ENST ID: ENST00000393895
  CDS Start-End: 1-3241
caggtacaccaaaccgctcacctttgctgactgcattagtgatgagttgccgctaggatgggaagaggcatatgacccacaggttggagattacttcatagaccacaacaccaaaaccactcagattgaggatcctcgagtacaatggcggcgggagcaggaacatatgctgaaggattacctggtggtggcccaggaggctctgagtgcacaaaaggagatctaccaggtgaagcagcagcgcctggagcttgcacagcaggagtaccagcaactgcatgccgtctgggagcataagctgggctcccaggtcagcttggtctctggttcatcatccagctccaagtatgaccctgagatcctgaaagctgaaattgccactgcaaaatcccgggtcaacaagctgaagagagagatggttcacctccagcacgagctgcagttcaaagagcgtggctttcagaccctgaagaaaatcgataagaaaatgtctgatgctcagggcagctacaaactggatgaagctcaggctgtcttgagagaaacaaaagccatcaaaaaggctattacctgtggggaaaaggaaaagcaagatctcattaagagccttgccatgttgaaggacggcttccgcactgacagggggtctcactcagacctgtggtccagcagcagctctctggagagttcgagtttcccgctaccgaaacagtacctggatgtgagctcccagacagacatctcgggaagcttcggcatcaacagcaacaatcagttggcagagaaggtcagattgcgccttcgatatgaagaggctaagagaaggatcgccaacctgaagatccagctggccaagcttgacagtgaggcctggcctggggtgctggactcagagagggaccggctgatccttatcaacgagaaggaggagctgctgaaggagatgcgcttcatcagcccccgcaagtggacccagggggaggtggagcagctggagatggcccggaagcggctggaaaaggacctgcaggcagcccgggacacccagagcaaggcgctgacggagaggttaaagttaaacagtaagaggaaccagcttgtgagagaactggaggaagccacccggcaggtggcaactctgcactcccagctgaaaagtctctcaagcagcatgcagtccctgtcctcaggcagcagccccggatccctcacgtccagccggggctccctggttgcatccagcctggactcctccacttcagccagcttcactgacctctactatgacccctttgagcagctggactcagagctgcagagcaaggtggagttcctgctcctggagggggccaccggcttccggccctcaggctgcatcaccaccatccacgaggatgaggtggccaagacccagaaggcagagggaggtggccgcctgcaggctctgcgttccctgtctggcaccccaaagtccatgacctccctatccccacgttcctctctctcctccccctccccaccctgttcccctctcatggctgaccccctcctggctggtgatgccttcctcaactccttggagtttgaagacccggagctgagtgccactctttgtgaactgagccttggtaacagcgcccaggaaagataccggctggaggaaccaggaacggagggcaagcagctgggccaagctgtgaatacggcccaggggtgtggcctgaaagtggcctgtgtctcagccgccgtatcggacgagtcagtggctggagacagtggtgtgtacgaggcttccgtgcagagactgggtgcttcagaagctgctgcatttgacagtgacgaatcggaagcagtgggtgcgacccgaattcagattgccctgaagtatgatgagaagaataagcaatttgcaatattaatcatccagctgagtaacctttctgctctgttgcagcaacaagaccagaaagtgaatatccgcgtggctgtccttccttgctctgaaagcacaacctgcctgttccggacccggcctctggacgcctcagacactctagtgttcaatgaggtgttctgggtatccatgtcctatccagcccttcaccagaagaccttaagagtcgatgtctgtaccaccgacaggagccatctggaagagtgcctgggaggcgcccagatcagcctggcggaggtctgccggtctggggagaggtcgactcgctggtacaaccttctcagctacaaatacttgaagaaacagagcagggagctcaagccagtgggagtcatggcccctgcctcagggcctgccagcacggacgctgtgtctgctctgttggaacagacagcagtggagctggagaagaggcaggagggcaggagcagcacacagacactggaagacagctggaggtatgaggagaccagtgagaatgaggcagtagccgaggaagaggaggaggaggtggaggaggaggagggagaagaggatgttttcaccgagaaagcctcacctgatatggatgggtacccagcattaaaggtggacaaagagaccaacacggagaccccggccccatcccccacagtggtgcgacctaaggaccggagagtgggcaccccgtcccaggggccatttcttcgagggagcaccatcatccgctctaagaccttctccccaggaccccagagccagtacgtgtgccggctgaatcggagtgatagtgacagctccactctgtccaaaaagccaccttttgttcgaaactccctggagcgacgcagcgtccggatgaagcggccgtccccacccccacagccttcctcggtcaagtcgctgcgctccgagcgtctgatccgtacctcgctggacctggagttagacctgcaggcgacaagaacctggcacagccaattgacccaggagatctcggtgctgaaggagctcaaggagcagctggaacaagccaagagccacggggagaaggagctgccacagtggttgcgtgaggacgagcgtttccgcctgctgctgaggatgctggagaagcggatggaccgagcggagcacaagggtgagcttcagacagacaagatgatgagggcagctgccaaggatgtgcacaggctccgaggccagagctgtaaggaacccccagaagttcagtctttcagggagaagatggcatttttcacccggcctcggatgaatatcccagctctctctgcagatgacgtctaatcgccagaaaagtatttcctttgttccactgaccaggctgtgaacattgactgtggctaaagttatttatgtggtgttatatgaaggtactgagtcacaagtcctctagtgctcttgttggtttgaagatgaaccgactttttagtttgggtcctactgttgttattaaaaacagaacaaaaacaaaacacacacacacacaaaaacagaaacaaaaaaaaccagcattaaaataataagattgtatagtttgtatatttaggagtgtatttttgggaaagaaaatttaaatgaactaaagcagtattgagttgctgctcttcttaaaatcgtttagattttttttggtttgtacagctccaccttttagaggtcttactgcaataagaagtaatgcctgggggacggtaatcctaataggacgtcccgcacttgtcacagtacagctaatttttcctagttaacatattttgtacaatattaaaaaaatgcacagaaaccattgggggggattcagaggtgcatccacggatcttcttgagctgtgacgtgtttttatgtggctgcccaacgtggagcgggcagtgtgataggctgggtgggctaagcagcctagtctatgtgggtgacaggccacgctggtctcagatgcccagtgaagccactaacatgagtgaggggagggctgtggggaactccattcagttttatctccatcaataaagtggcctttcaaaaa

SEQ ID NO: 200310 - DNA, 3562 bp, Homo sapiens
  Payload ID: 19517
  Gene Name: WW and C2 domain containing 1
  Uniprot ID: Q8IX03
  ENST ID: ENST00000521089
  CDS Start-End: 4-3363
aagatgccccggccggagctgcccctgccggagggctgggaggaggcgcgcgacttcgacggcaaggtctactacatagaccacacgaaccgcaccaccagctggatcgacccgcgggacaggtacaccaaaccgctcacctttgctgactgcattagtgatgagttgccgctaggatgggaagaggcatatgacccacaggttggagattacttcatagaccacaacaccaaaaccactcagattgaggatcctcgagtacaatggcggcgggagcaggaacatatgctgaaggattacctggtggtggcccaggaggctctgagtgcacaaaaggagatctaccaggtgaagcagcagcgcctggagcttgcacagcaggagtaccagcaactgcatgccgtctgggagcataagctgggctcccaggtcagcttggtctctggttcatcatccagctccaagtatgaccctgagatcctgaaagctgaaattgccactgcaaaatcccgggtcaacaagctgaagagagagatggttcacctccagcacgagctgcagttcaaagagcgtggctttcagaccctgaagaaaatcgataagaaaatgtctgatgctcagggcagctacaaactggatgaagctcaggctgtcttgagagaaacaaaagccatcaaaaaggctattacctgtggggaaaaggaaaagcaagatctcattaagagccttgccatgttgaaggacggcttccgcactgacagggggtctcactcagacctgtggtccagcagcagctctctggagagttcgagtttcccgctaccgaaacagtacctggatgtgagctcccagacagacatctcgggaagcttcggcatcaacagcaacaatcagttggcagagaaggtcagattgcgccttcgatatgaagaggctaagagaaggatcgccaacctgaagatccagctggccaagcttgacagtgaggcctggcctggggtgctggactcagagagggaccggctgatccttatcaacgagaaggaggagctgctgaaggagatgcgcttcatcagcccccgcaagtggacccagggggaggtggagcagctggagatggcccggaagcggctggaaaaggacctgcaggcagcccgggacacccagagcaaggcgctgacggagaggttaaagttaaacagtaagaggaaccagcttgtgagagaactggaggaagccacccggcaggtggcaactctgcactcccagctgaaaagtctctcaagcagcatgcagtccctgtcctcaggcagcagccccggatccctcacgtccagccggggctccctggttgcatccagcctggactcctccacttcagccagcttcactgacctctactatgacccctttgagcagctggactcagagctgcagagcaaggtggagttcctgctcctggagggggccaccggcttccggccctcaggctgcatcaccaccatccacgaggatgaggtggccaagacccagaaggcagagggaggtggccgcctgcaggctctgcgttccctgtctggcaccccaaagtccatgacctccctatccccacgttcctctctctcctccccctccccaccctgttcccctctcatggctgaccccctcctggctggtgatgccttcctcaactccttggagtttgaagacccggagctgagtgccactctttgtgaactgagccttggtaacagcgcccaggaaagataccggctggaggaaccaggaacggagggcaagcagctgggccaagctgtgaatacggcccaggggtgtggcctgaaagtggcctgtgtctcagccgccgtatcggacgagtcagtggctggagacagtggtgtgtacgaggcttccgtgcagagactgggtgcttcagaagctgctgcatttgacagtgacgaatcggaagcagtgggtgcgacccgaattcagattgccctgaagtatgatgagaagaataagcaatttgcaatattaatcatccagctgagtaacctttctgctctgttgcagcaacaagaccagaaagtgaatatccgcgtggctgtccttccttgctctgaaagcacaacctgcctgttccggacccggcctctggacgcctcagacactctagtgttcaatgaggtgttctgggtatccatgtcctatccagcccttcaccagaagaccttaagagtcgatgtctgtaccaccgacaggagccatctggaagagtgcctgggaggcgcccagatcagcctggcggaggtctgccggtctggggagaggtcgactcgctggtacaaccttctcagctacaaatacttgaagaaacagagcagggagctcaagccagtgggagtcatggcccctgcctcagggcctgccagcacggacgctgtgtctgctctgttggaacagacagcagtggagctggagaagaggcaggagggcaggagcagcacacagacactggaagacagctggaggtatgaggagaccagtgagaatgaggcagtagccgaggaagaggaggaggaggtggaggaggaggagggagaagaggatgttttcaccgagaaagcctcacctgatatggatgggtacccagcattaaaggtggacaaagagaccaacacggagaccccggccccatcccccacagtggtgcgacctaaggaccggagagtgggcaccccgtcccaggggccatttcttcgagggagcaccatcatccgctctaagaccttctccccaggaccccagagccagtacgtgtgccggctgaatcggagtgatagtgacagctccactctgtccaaaaagccaccttttgttcgaaactccctggagcgacgcagcgtccggatgaagcggccgtccccacccccacagccttcctcggtcaagtcgctgcgctccgagcgtctgatccgtacctcgctggacctggagttagacctgcaggcgacaagaacctggcacagccaattgacccaggagatctcggtgctgaaggagctcaaggagcagctggaacaagccaagagccacggggagaaggagctgccacagtggttgcgtgaggacgagcgtttccgcctgctgctgaggatgctggagaagcggcagatggaccgagcggagcacaagggtgagcttcagacagacaagatgatgagggcagctgccaaggatgtgcacaggctccgaggccagagctgtaaggaacccccagaagttcagtctttcagggagaagatggcatttttcacccggcctcggatgaatatcccagctctctctgcagatgacgtctaatcgccagaaaagtatttcctttgttccactgaccaggctgtgaacattgactgtggctaaagttatttatgtggtgttatatgaaggtactgagtcacaagtcctctagtgctcttgttggtttgaagatgaaccgactttttagtttgggtcctactgttgttattaaaaacagaacaaaaacaaaacacacacacac

SEQ ID NO: 200311 - DNA, 2077 bp, Homo sapiens
  Payload ID: 19517
  Gene Name: WW and C2 domain containing 1
  ENST ID: ENST00000524038
  CDS Start-End: 1-1335
tttgcaatattaatcatccagctgagtaacctttctgctctgttgcagcaacaagaccagaaagtgaatatccgcgtggctgtccttccttgctctgaaagcacaacctgcctgttccggacccggcctctggacgcctcagacactctagtgttcaatgaggtgttctgggtatccatgtcctatccagcccttcaccagaagaccttaagagtcgatgtctgtaccaccgacaggagccatctggaagagtgcctgggaggcgcccagatcagcctggcggaggtctgccggtctggggagaggtcgactcgctggtacaaccttctcagctacaaatacttgaagaaacagagcagggagctcaagccagtgggagtcatggcccctgcctcagggcctgccagcacggacgctgtgtctgctctgttggaacagacagcagtggagctggagaagaggcaggagggcaggagcagcacacagacactggaagacagctggaggtatgaggagaccagtgagaatgaggcagtagccgaggaagaggaggaggaggtggaggaggaggagggagaagaggatgttttcaccgagaaagcctcacctgatatggatgggtacccagcattaaaggtggacaaagagaccaacacggagaccccggccccatcccccacagtggtgcgacctaaggaccggagagtgggcaccccgtcccaggggccatttcttcgagggagcaccatcatccgctctaagaccttctccccaggaccccagagccagtacgtgtgccggctgaatcggagtgatagtgacagctccactctgtccaaaaagccaccttttgttcgaaactccctggagcgacgcagcgtccggatgaagcggccgtccccacccccacagccttcctcggtcaagtcgctgcgctccgagcgtctgatccgtacctcgctggacctggagttagacctgcaggcgacaagaacctggcacagccaattgacccaggagatctcggtgctgaaggagctcaaggagcagctggaacaagccaagagccacggggagaaggagctgccacagtggttgcgtgaggacgagcgtttccgcctgctgctgaggatgctggagaagcggatggaccgagcggagcacaagggtgagcttcagacagacaagatgatgagggcagctgccaaggatgtgcacaggctccgaggccagagctgtaaggaacccccagaagttcagtctttcagggagaagatggcatttttcacccggcctcggatgaatatcccagctctctctgcagatgacgtctaatcgccagaaaagtatttcctttgttccactgaccaggctgtgaacattgactgtggctaaagttatttatgtggtgttatatgaaggtactgagtcacaagtcctctagtgctcttgttggtttgaagatgaaccgactttttagtttgggtcctactgttgttattaaaaacagaacaaaaacaaaacacacacacacacaaaaacagaaacaaaaaaaaccagcattaaaataataagattgtatagtttgtatatttaggagtgtatttttgggaaagaaaatttaaatgaactaaagcagtattgagttgctgctcttcttaaaatcgtttagattttttttggtttgtacagctccaccttttagaggtcttactgcaataagaagtaatgcctgggggacggtaatcctaataggacgtcccgcacttgtcacagtacagctaatttttcctagttaacatattttgtacaatattaaaaaaatgcacagaaaccattgggggggattcagaggtgcatccacggatcttcttgagctgtgacgtgtttttatgtggctgcccaacgtggagcgggcagtgtgataggctgggtgggctaagcagcctagtctatgtgggtgacaggccacgctggtctcagatgcccagtgaagccactaacatgagtgaggggagggctgtggggaactccattcagttttatctccatcaataaagtggcctttcaaaaagaa

SEQ ID NO: 200312 - DNA, 3408 bp, Homo sapiens
  Payload ID: 19517
  Gene Name: WW and C2 domain containing 1
  ENST ID: ENST00000524228
  CDS Start-End: 1-2668
caaaaaggctattacctgtggggaaaaggaaaagcaagatctcattaagagccttgccatgttgaaggacggcttccgcactgacagggggtctcactcagacctgtggtccagcagcagctctctggagagttcgagtttcccgctaccgaaacagtacctggatgtgagctcccagacagacatctcgggaagcttcggcatcaacagcaacaatcagttggcagagaaggtcagattgcgccttcgatatgaagaggctaagagaaggatcgccaacctgaagatccagctggccaagcttgacagtgaggcctggcctggggtgctggactcagagagggaccggctgatccttatcaacgagaaggaggagctgctgaaggagatgcgcttcatcagcccccgcaagtggacccagggggaggtggagcagctggagatggcccggaagcggctggaaaaggacctgcaggcagcccgggacacccagagcaaggcgctgacggagaggttaaagttaaacagtaagaggaaccagcttgtgagagaactggaggaagccacccggcaggtggcaactctgcactcccagctgaaaagtctctcaagcagcatgcagtccctgtcctcaggcagcagccccggatccctcacgtccagccggggctccctggttgcatccagcctggactcctccacttcagccagcttcactgacctctactatgacccctttgagcagctggactcagagctgcagagcaaggtggagttcctgctcctggagggggccaccggcttccggccctcaggctgcatcaccaccatccacgaggatgaggtggccaagacccagaaggcagagggaggtggccgcctgcaggctctgcgttccctgtctggcaccccaaagtccatgacctccctatccccacgttcctctctctcctccccctccccaccctgttcccctctcatggctgaccccctcctggctggtgatgccttcctcaactccttggagtttgaagacccggagctgagtgccactctttgtgaactgagccttggtaacagcgcccaggaaagataccggctggaggaaccaggaacggagggcaagcagctgggccaagctgtgaatacggcccaggggtgtggcctgaaagtggcctgtgtctcagccgccgtatcggacgagtcagtggctggagacagtggtgtgtacgaggcttccgtgcagagactgggtgcttcagaagctgctgcatttgacagtgacgaatcggaagcagtgggtgcgacccgaattcagattgccctgaagtatgatgagaagaataagcaatttgcaatattaatcatccagctgagtaacctttctgctctgttgcagcaacaagaccagaaagtgaatatccgcgtggctgtccttccttgctctgaaagcacaacctgcctgttccggacccggcctctggacgcctcagacactctagtgttcaatgaggtgttctgggtatccatgtcctatccagcccttcaccagaagaccttaagagtcgatgtctgtaccaccgacaggagccatctggaagagtgcctgggaggcgcccagatcagcctggcggaggtctgccggtctggggagaggtcgactcgctggtacaaccttctcagctacaaatacttgaagaaacagagcagggagctcaagccagtgggagtcatggcccctgcctcagggcctgccagcacggacgctgtgtctgctctgttggaacagacagcagtggagctggagaagaggcaggagggcaggagcagcacacagacactggaagacagctggaggtatgaggagaccagtgagaatgaggcagtagccgaggaagaggaggaggaggtggaggaggaggagggagaagaggatgttttcaccgagaaagcctcacctgatatggatgggtacccagcattaaaggtggacaaagagaccaacacggagaccccggccccatcccccacagtggtgcgacctaaggaccggagagtgggcaccccgtcccaggggccatttcttcgagggagcaccatcatccgctctaagaccttctccccaggaccccagagccagtacgtgtgccggctgaatcggagtgatagtgacagctccactctgtccaaaaagccaccttttgttcgaaactccctggagcgacgcagcgtccggatgaagcggccttcctcggtcaagtcgctgcgctccgagcgtctgatccgtacctcgctggacctggagttagacctgcaggcgacaagaacctggcacagccaattgacccaggagatctcggtgctgaaggagctcaaggagcagctggaacaagccaagagccacggggagaaggagctgccacagtggttgcgtgaggacgagcgtttccgcctgctgctgaggatgctggagaagcggatggaccgagcggagcacaagggtgagcttcagacagacaagatgatgagggcagctgccaaggatgtgcacaggctccgaggccagagctgtaaggaacccccagaagttcagtctttcagggagaagatggcatttttcacccggcctcggatgaatatcccagctctctctgcagatgacgtctaatcgccagaaaagtatttcctttgttccactgaccaggctgtgaacattgactgtggctaaagttatttatgtggtgttatatgaaggtactgagtcacaagtcctctagtgctcttgttggtttgaagatgaaccgactttttagtttgggtcctactgttgttattaaaaacagaacaaaaacaaaacacacacacacacaaaaacagaaacaaaaaaaaccagcattaaaataataagattgtatagtttgtatatttaggagtgtatttttgggaaagaaaatttaaatgaactaaagcagtattgagttgctgctcttcttaaaatcgtttagattttttttggtttgtacagctccaccttttagaggtcttactgcaataagaagtaatgcctgggggacggtaatcctaataggacgtcccgcacttgtcacagtacagctaatttttcctagttaacatattttgtacaatattaaaaaaatgcacagaaaccattgggggggattcagaggtgcatccacggatcttcttgagctgtgacgtgtttttatgtggctgcccaacgtggagcgggcagtgtgataggctgggtgggctaagcagcctagtctatgtgggtgacaggccacgctggtctcagatgcccagtgaagccactaacatgagtgaggggagggctgtggggaactccattcagttttatctccatcaataaagtggcctttcaaaaag

SEQ ID NO: 200313 - DNA, 1014 bp, Homo sapiens
  Payload ID: 19517
  Gene Name: WW and C2 domain containing 1
  ENST ID: ENST00000619752
  CDS Start-End: 1-1014
atgtcctatccagcccttcaccagaagaccttaagagtcgatgtctgtaccaccgacaggagccatctggaagagtgcctgggaggcgcccagatcagcctggcggaggtctgccggtctggggagaggtcgactcgctggtacaaccttctcagctacaaatacttgaagaaacagagcagggagctcaagccagtgggagtcatggcccctgcctcagggcctgccagcacggtgagctgggaccaggacgctgtgtctgctctgttggaacagacagcagtggagctggagaagaggcaggagggcaggagcagcacacagacactggaagacagctggaggtatgaggagaccagtgagaatgaggcagtagccgaggaagaggaggaggaggtggaggaggaggagggagaagaggatgttttcaccgagaaagcctcacctgatatggatgggtacccagcattaaaggtggacaaagagaccaacacggagaccccggccccatcccccacagtggtgcgacctaaggaccggagagtgggcaccccgtcccaggggccatttcttcgagggagcaccatcatccgctctaagaccttctccccaggaccccagagccagtacgtgtgccggctgaatcggagtgatagtgacagctccactctgtccaaaaagccaccttttgttcgaaactccctggagcgacgcagcgtccggatgaagcggccttcctcggtcaagtcgctgcgctccgagcgtctgatccgtacctcgctggacctggagttagacctgcaggcgacaagaacctggcacagccaattgacccaggagatctcggtgctgaaggagctcaaggagcagctggaacaagccaagagccacggggagaaggagctgccacagtggttgcgtgaggacgagcgtttccgcctgctgctgaggatgctggagaagcggcagatggaccgagcggagcacaagggtgagcttcagacaacaagatga

SEQ ID NO: 200314 - DNA, 8826 bp, Homo sapiens
  Payload ID: 19518
  Gene Name: WW and C2 domain containing 2
  Uniprot ID: Q6AWC2
  ENST ID: ENST00000403733
  CDS Start-End: 200-3778
ctgatccgcagcggggccgcgaacagcgtttcctgaggcacctcccgcgcgtggttccgccgcgccccgcgccctgcgcccctcagcccctcgccggcgcccgcgtcgcgggttggcagcctagcccggcagccgcgttcccgccgcgtcccgcgcccggtacctatggaggcgccgctcgccggcgaggccgccgaccatgcctaggagggccgggagcggtcagctgccgctgccccggggctgggaggaggccagggactacgacggcaaggtcttctacattgaccacaacaccaggaggaccagctggatcgacccccgggacaggttaacgaagcccttgtcatttgctgattgtgttggggatgagctgccgtggggatgggaagcagggtttgaccctcagattggtgtctactacatcgatcacatcaacaaaaccacgcagatagaagatccaagaaaacaatggaggggggaacaggagaagatgctcaaggactacctctctgtggcacaggatgccctccggacacagaaggaactgtaccatgtgaaggagcagaggctggcgctggccctggatgaatacgtgcgattaaatgatgcctataaggaaaagtcaagttctcacacaagcttattctcaggatcttcatccagtactaaatatgatcccgatattttaaaagctgagatctccactacaagattaagggttaaaaagctaaagagagagctctcacagatgaagcaggaactgctctataaagaacaaggctttgaaacattgcagcaaattgataaaaaaatgtctggaggccagagcgggtatgaactcagtgaagccaaagccattctaacagaactaaaatctatcagaaaggcaattagctcaggagaaaaagaaaaacaagatctgatgcagagtcttgctaagctgcaggagcggtttcatttggatcagaacattggcagatctgagccagatttgagatgtagtcctgtgaactctcatttatgtctctccagacagacccttgatgctgggtcacaaacaagcatttccggagatattggagtaagaagtagatcaaatttagctgaaaaggtcaggctaagcctacagtatgaagaagccaaaagaagtatggccaacttaaaaattgaactgtcaaaattggacagtgaggcctggcctggggcactggatattgagaaggaaaaactgatgctgattaatgaaaaagaagaacttttgaaagagcttcagttcgtcaccccacagaaacgtacccaagatgaattagaacgcctagaagctgaaaggcagcggctggaagaagagttgctgtctgtgaggggaacaccaagcagagctctggccgagagattgagattggaagagagaagaaaagagctgctacagaaacttgaagaaactactaaattaactacttatttgcattcacaacttaaaagcctctctgccagcaccctgtccatgtcatctgggagcagcctgggttccctggcatcgagtcggggctctctgaacacctccagcagagggtcactcaactccctcagttccaccgaactctattacagcagtcaaagtgatcagatagatgtggattatcagtataaactggacttccttctgcaagagaaaagcggttacattccttctggacccatcaccaccatccatgaaaacgaggtggtcaagtcccctagccagcctggccagagtggactctgtggagtggcagctgcagcaacaggccacactcctccactggctgaggccccgaagtctgtggcctccctgtcctcgaggtcctccctttcctccttgtctcctccaggctctcccttggttttggaaggcacgtttcccatgtcttcttctcatgatgcctctctccatcagttcactgctgactttgaagactgtgagttgagtagccattttgcagatatcagcctcatcgaaaatcagattttgctggattctgattcaggaggagcctcccagtctctttcagaggataaagaccttaatgaatgtgctagggagccattatatgaaggaactgcagatgtggaaaaatcattaccaaaaagaagagtgatccacttgcttggggagaaaaccacttgtgtgtcggctgctgtgtctgatgagtctgtggctggagacagtggggtctatgaagctttcgtgaaacaacctagtgaaatggaagatgtcacatacagtgaagaggatgtagccattgtagagaccgcccaggttcagataggactcagatacaatgcaaaaagttcaagtttcatggtgattatagcacagctccgaaaccttcatgccttcttgatacctcatacttcaaaagtatattttagggttgccgttcttccttcctcaactgatgtcagctgtctgtttcgcacaaaagttcatccgcccacagaatccattttattcaatgatgtgttcagagtcgccatttcccaaacagccttacaacagaagacactgagggtagacctttgctctgtcagtaaacaccgaagggaagaatgcctggctggaactcagatcagcctggcagatttaccattttccagtgaggttttcactctatggtataacttgcttccttccaagcaaatgccttgcaaaaagaatgaagaaaatgaggactctgtatttcaaccaaaccagccgttagtagattctatagacttggatgcagtgtcagccttacttgcaagaacatcagctgagttgttagctgtggaacaagaattagcacaagaagaagaagaagaatcaggacaagaagagccaaggggcccagatggagactggctaacaatgctaagagaggcctctgatgaaattgtggctgaaaaagaggctgaagttaaattgccagaggacagtagctgtacagaagatttaagttcatgcactagtgtgcctgagatgaatgaagacgggaacaggaaagaaagcaactgtgccaaagacctcagaagtcagccacctactagaataccaacactggttgacaaagagacaaacactgatgaagccgctaatgacaatatggcagttcgccccaaagagcgcagcagcctgagctctagacagcatccgtttgtgaggagcagtgtgatagtgcgctcacagaccttttctccaggagagcggaaccagtacatctgcaggttaaatcggagtgacagtgacagttcaaccctggctaaaaaatcactgtttgtgagaaactccaccgaacgccgcagtttgagggtcaaaaggacggtttgccagtcagtccttagaagaacaacacaggaatgcccagtgcggacatctctagacttagaactggaccttcaggcatctctgacccggcagagccgcctcaatgatgagctgcaggcgctgagggacttgcggcagaagctggaggaactgaaagctcagggagagactgaccttccaccaggcgtgctggaggatgagaggttccagaggcttctgaagcaagctgagaagcaggctgaacagtccaaagaagagcagaagcaaggtctgaatgcagagaagttgatgaggcaagtctccaaggacgtgtgtcggctccgggagcagagccagaaggtgcctcggcaggtgcagtccttcagggagaagattgcctacttcaccagagcaaagataagcatcccatccctgccagctgatgatgtgtgattacatgacttaagaaattattttttcatctgttcactttcttagggagggtaaaagactgaagatttgtgtttttgttttggtgtttggttttttttggtaacgtaactgtcaactcttgaagaacttttatttcacatcagattttcaacacattaatttgtaaagtaccttgagtgtaatttttatatgcttaaaaaagaaaaaatcatataagaaagatgggataacctggtacacaaatgttgcccagtatgtgcgcattgccagtggacttcattttgtaaaaatggaatagaggcagtaccccacatgtgtactgttgagccggctgttgagaaacaacttggttcagccggtggttttgcttctcctttgtgttcctgtgagtaggctgtgccgatggcagcagcgccacgtggtatctgtgcgctggcgaggagaggagcgctttccatttggaggcagtgtgagcacacgctggagtgcagcgttccaaagtccgcccgaaatggatgctgcgtccacggccatcacctgtgcgggaacacctggtttccttaagacaatttcctttttgtccttttatatttttctaaagaaaactaagatataaactaccaagtgctcttaagaataaaaataagaataagaatacaaaggagcactactcttggctacacgaaagatcttgggattcatgacactgagggcagggagaagaaagaacaccagccacgcagagatacaaataagctcatcaaatgagcagctggtttgtctcactcagcctgaatttgcattaagtgttcaaaagtgagtttctggcttgcactagtgttttgccctaaatctaaggatggtgcctagtggtggccctgtgttctgaggacagagagagctggaggggtggagggaaatgcatcggcactcatttggtgtaaccaagaagagggggaaagatgtcttgatagaatcaaagttgccaaaaacaaagaagagtttatcaagcagatttctaacatttagtagaaactacttcatagctctcatttttagggggttctatctataatttatggtaaatagttgggaggcaaagggaagaatgtgtgtggggggattattaatttgaagtataagctaaattgtttattaaaaagcctattttggatgaacaagtttagagagataaactgactaatgtgtcctccagtttagaatttcaccttacccgacccaggcacttcttaaaaacacagatcctcagtgcagctctgccagcatcaaggcttttaaaatatgtagtatttaggccatttaaaccatacttattactcaataacccaagaaacaattttgggttagccatctaatatagcaaataaaatagattttttaaagaaatccaaaattgtcttaaaggaatggaccccttgaagaaaaaaaaaaaaagttttgttcctcagttagaatgctcactagctcactagcaagaatttttattttcttgaaagcaattatatatattttggaaagttcatgttattggaattgaagttcaaattaagcaacttctgagcctagaactttaattactttttcctaaatgtcccaacacttacatacaaatttctttgaagacataactggacatggcagacactgctttgaacaaaaaccagcctagtgaattgactgagtacagtcctttaaggctgcccagttcattctattagatgactaaggaaaactagaaaaagaatacagttcacccttgtcaaggtcaaatgtgaaagacagaagtttatttaatgtagaggtaaatgaaggtgagctgttttcagcatcttagtttgaccatgaaaatgtctatagaattatgtgtagttgttccgtacgattttattttcttcatttatttatttacagtcttatttatgttctgtttaatatatagtttgattctggccattttaaatatttgacacagaagagactatattggaatatttacagctttataagtctttcatcagattagctgttgactttttgtaatacaaaaagtttcagacaagtattaaagaataaaatctgtctcaggctggtagttagcagttgtgaccaagatgcttttggttgttgtatttcacaaaatttcctcatttctaacatgagagatgaacttattttaatataatcctttttctacactttaaaagtcagcaatagtgttatgtatttataggcagcttttaataatcttgtcatatttgtactaacccaaatgattcacagtgacaaaacattttaataacttgatcacaaaaccatatggacaaatatgaattttaatattataaatactatttttaaaaggtagaatttattcgcacagggtaaaaagaatgtaatatttagttctcaagtttgaattatcagtatattattacaattttgtatatcagaatcttaagtgttacaggtacaaaaagaatattgctagccaaatgaacaaagtttagctaaatctctgtagcatgcaaatcaaataaattaaaattttttgctattgctttatctatattgtcttaaatatcaaaagctcaggactgaacttaatatttaatcaggttaaattctgaacatgtttctgttttaatttgtcttgtttgtaaacgtatgcaaatacatcacatagattaactggtttctgcactttccatgtgtttgtgggtggaaaaaaattcagtggttttttttaaaaaaaaaagcaaaaacaaagctacatattgcctaatactctatttcagtgtcgtttattgttcagtttatttccctgattggcacaaacacaagagtttccttgaaccatgtaccaagcaaatacaaaatatttcatgaagaaatccccaggctggcagtttgtgatgaatagttcttgttggaactatatgtattgctgataaaaaaggacgaagtattttcattgagcaaataaaatgaagggctccagaatatgtgctctgtggtcgctgcgcctgggctggcagtgtgctccacagagaggcagccgtcccaggaggttatctacccacacaccccagtcctgccctgccgtgccccccacaggctgctcagtgcctgggaagccagaaacgctgcccgtgaaatacagaacacaggatgcagaagcacgtttgtgtggcagagtctacttgaatcatccaaaacccaagatcgccctcctgcctctgacagtatagaaggcgtgactgaatgtggctgccttttgaaaaaggttccatagagacactgaggtctctgattcagaaggagatgatgtgtctacacctttcacctctgaagcttctaaagagctagtaattattttatataataagacgtcatgcattttaaataaatatgcaacaagacctcaggcttattatactaggttatcttaaacacctgaaataagtaaatgatttgccaaatgattccgctccatatgaataataccttcaaagatacatagagattaatgttttatttaccacttctgtgcaatcgctattttaaaattgagaaaactcatccacagtaatgggtgtcattactattcagtcttgattgattttggtctcagactagaagataaaaatggtttaccagtcttggaaagaaactatagtttaatagccacaggaaaagatgcattttcaaaaatcaaaagcacagtgagatgactagagcgggacatcctaccaaatccagtgttgagcaagcgtctcctgaacagcagacgcttgtcctttctggcttagtgtttcaggttggtgtttctcgtctccagttcttgatgatgatcttgtgtttgtgccactgcgtagtggcccgaagctaggggagcgtggctggagcaggctgcacagtggagcagacaccctcctagcagaagagaaagtccagcaaaccagcccagaaacagggcctccccaaactcccacctggggacaaagtctgggacgttctcatcccagaactcctgaaccgtcttgtgggcaacccaagagacgggaaccagggctgtgactcccgaggcccaggacagaattcctcccaggatcagcagtcgcctcttgagatctctctgactctctccaattctcaaacagtccaggccaaacccagagaccagcaggcccagaaatcccagcccatttgacagaaacattaagatcctggagaccctgagttcagcaggcaaagccaggaaggagtcaaagtccttgcattgcatccccacttcctcttggatgacacaggtttgccagagtcccatggtccagttttccatttcatttaagtccaggttgaggttcttccagtgtggcaggtagtttgtaagacaggataaaacccatcccagcaaagataatgaaactccagctagttgagctacagttctaaatactaaagccattataatgtcctgagagctttagccaaactaactcctgcccttcggttgctgtgaaaagaagtgtgacacttgtgttataacttatgaaactcagaaatatttcttcattgtgtatataggaggattcttgccagagttgctattgtttgattccatgttgaatgggtttcacaaaaggatagggaaataatgccgccaaccagtaatgccaaggtgtggccaagattgtgtttgtgtcctgtgggctggatttgacagaaagcagtttgtcactgaaatataattaagtgataatctcctttcattgtcaaggttaaaatggctttcatgttattcccaacctttctaacaaagaattaagtctaaatgcaaaatgtttaactgatggttttggttcaactcctcctgctttgtgtttcactaactgcacctgtcagattttcatctcttatagttctcacatttcaaatgtgcatgttatggtaatactgagtgttattttttaaaaataggtttaagaaaagtatttcttaaccaaataaatcaatcttatcagaaa

SEQ ID NO: 200315 - DNA, 6373 bp, Homo sapiens
  Payload ID: 19518
  Gene Name: WW and C2 domain containing 2
  ENST ID: ENST00000427431
  CDS Start-End: 148-381
tcatttgctgattgtgttggggatgagctgccgtggggatgggaagcagggtttgaccctcagattggtgtctactacatcgatcacatcaacaaaaccacgcagatagaagatccaagaaaacaatggaggggggaacaggagaagatgctcaaggactacctctctgtggcacaggatgccctccggacacagaaggaactgtaccatgtgaaggagcagaggctggcgctggccctggatgaatacgtgcgattaaatgatgcctataaggaaaagtcaagttctcacacaagcttattctcaggatcttcatccagtactaaatatgatcccgatattttaaaagctgagatctccactacaagattaaggaattgataaaaaaatgtctggaggccagagcgggtatgaactcagtgaagccaaagccattctaacagaactaaaatctatcagaaaggcaattagctcaggagaaaaagaaaaacaagatctgatgcagagtcttgctaagctgcaggagcggtttcatttggatcagaacattggcagatctgagccagatttgagatgtagtcctgtgaactctcatttatgtctctccagacagacccttgatgctgggtcacaaacaagcatttccggagatattggagtaagaagtagatcaaatttagctgaaaaggtcaggctaagcctacagtatgaagaagccaaaagaagtatggccaacttaaaaattgaactgtcaaaattggacagtgaggcctggcctggggcactggatattgagaaggaaaaactgatgctgattaatgaaaaagaagaacttttgaaagagcttcagttcgtcaccccacagaaacgtacccaagatgaattagaacgcctagaagctgaaaggcagcggctggaagaagagttgctgtctgtgaggggaacaccaagcagagctctggccgagagattgagattggaagagagaagaaaagagctgctacagaaacttgaagaaactactaaattaactacttatttgcattcacaacttaaaagcctctctgccagcaccctgtccatgtcatctgggagcagcctgggttccctggcatcgagtcggggctctctgaacacctccagcagagggtcactcaactccctcagttccaccgaactctattacagcagtcaaagtgatcagatagatgtggattatcagtataaactggacttccttctgcaagagaaaagcggttacattccttctggacccatcaccaccatccatgaaaacgaggtggtcaagtcccctagccagcctggccagagtggactctgtggagtggcagctgcagcaacaggccacactcctccactggctgaggccccgaagtctgtggcctccctgtcctcgaggtcctccctttcctccttgtctcctccaggctctcccttggttttggaaggcacgtttcccatgtcttcttctcatgatgcctctctccatcagttcactgctgactttgaagactgtgagttgagtagccattttgcagatatcagcctcatcgaaaatcagattttgctggattctgattcaggaggagcctcccagtctctttcagaggataaagaccttaatgaatgtgctagggagccattatatgaaggaactgcagatgtggaaaaatcattaccaaaaagaagagtgatccacttgcttggggagaaaaccacttgtgtgtcggctgctgtgtctgatgagtctgtggctggagacagtggggtctatgaagctttcgtgaaacaacctagtgaaatggaagatgtcacatacagtgaagaggatgtagccattgtagagaccgcccaggttcagataggactcagatacaatgcaaaaagttcaagtttcatggtgattatagcacagctccgaaaccttcatgccttcttgatacctcatacttcaaaagtatattttagggttgccgttcttccttcctcaactgatgtcagctgtctgtttcgcacaaaagttcatccgcccacagaatccattttattcaatgatgtgttcagagtcgccatttcccaaacagccttacaacagaagacactgagggtagacctttgctctgtcagtaaacaccgaagggaagaatgcctggctggaactcagatcagcctggcagatttaccattttccagtgaggttttcactctatggtataacttgcttccttccaagcaaatgccttgcaaaaagaatgaagaaaatgaggactctgtatttcaaccaaaccagccgttagtagattctatagacttggatgcagtgtcagccttacttgcaagaacatcagctgagttgttagctgtggaacaagaattagcacaagaagaagaagaagaatcaggacaagaagagccaaggggcccagatggagactggctaacaatgctaagagaggcctctgatgaaattgtggctgaaaaagaggctgaagttaaattgccagaggacagtagctgtacagaagatttaagttcatgcactagtgtgcctgagatgaatgaagacgggaacaggaaagaaagcaactgtgccaaagacctcagaagtcagccacctactagaataccaacactggttgacaaagagacaaacactgatgaagccgctaatgacaatatggcagttcgccccaaagagcgcagcagcctgagctctagacagcatccgtttgtgaggagcagtgtgatagtgcgctcacagaccttttctccaggagagcggaaccagtacatctgcaggttaaatcggagtgacagtgacagttcaaccctggctaaaaaatcactgtttgtgagaaactccaccgaacgccgcagtttgagggtcaaaaggacggtttgccagtcagtccttagaagaacaacacaggaatgcccagtgcggacatctctagacttagaactggaccttcaggcatctctgacccggcagagccgcctcaatgatgagctgcaggcgctgagggacttgcggcagaagctggaggaactgaaagctcagggagagactgaccttccaccaggcgtgctggaggatgagaggttccagaggcttctgaagcaagctgagaagcaggctgaacagtccaaagaagagcagaagcaaggtctgaatgcagagaagttgatgaggcaagtctccaaggacgtgtgtcggctccgggagcagagccagaaggtgcctcggcaggtgcagtccttcagggagaagattgcctacttcaccagagcaaagataagcatcccatccctgccagctgatgatgtgtgattacatgacttaagaaattattttttcatctgttcactttcttagggagggtaaaagactgaagatttgtgtttttgttttggtgtttggttttttttggtaacgtaactgtcaactcttgaagaacttttatttcacatcagattttcaacacattaatttgtaaagtaccttgagtgtaatttttatatgcttaaaaaagaaaaaatcatataagaaagatgggataacctggtacacaaatgttgcccagtatgtgcgcattgccagtggacttcattttgtaaaaatggaatagaggcagtaccccacatgtgtactgttgagccggctgttgagaaacaacttggttcagccggtggttttgcttctcctttgtgttcctgtgagtaggctgtgccgatggcagcagcgccacgtggtatctgtgcgctggcgaggagaggagcgctttccatttggaggcagtgtgagcacacgctggagtgcagcgttccaaagtccgcccgaaatggatgctgcgtccacggccatcacctgtgcgggaacacctggtttccttaagacaatttcctttttgtccttttatatttttctaaagaaaactaagatataaactaccaagtgctcttaagaataaaaataagaataagaatacaaaggagcactactcttggctacacgaaagatcttgggattcatgacactgagggcagggagaagaaagaacaccagccacgcagagatacaaataagctcatcaaatgagcagctggtttgtctcactcagcctgaatttgcattaagtgttcaaaagtgagtttctggcttgcactagtgttttgccctaaatctaaggatggtgcctagtggtggccctgtgttctgaggacagagagagctggaggggtggagggaaatgcatcggcactcatttggtgtaaccaagaagagggggaaagatgtcttgatagaatcaaagttgccaaaaacaaagaagagtttatcaagcagatttctaacatttagtagaaactacttcatagctctcatttttagggggttctatctataatttatggtaaatagttgggaggcaaagggaagaatgtgtgtggggggattattaatttgaagtataagctaaattgtttattaaaaagcctattttggatgaacaagtttagagagataaactgactaatgtgtcctccagtttagaatttcaccttacccgacccaggcacttcttaaaaacacagatcctcagtgcagctctgccagcatcaaggcttttaaaatatgtagtatttaggccatttaaaccatacttattactcaataacccaagaaacaattttgggttagccatctaatatagcaaataaaatagattttttaaagaaatccaaaattgtcttaaaggaatggaccccttgaagaaaaaaaaaaaaagttttgttcctcagttagaatgctcactagctcactagcaagaatttttattttcttgaaagcaattatatatattttggaaagttcatgttattggaattgaagttcaaattaagcaacttctgagcctagaactttaattactttttcctaaatgtcccaacacttacatacaaatttctttgaagacataactggacatggcagacactgctttgaacaaaaaccagcctagtgaattgactgagtacagtcctttaaggctgcccagttcattctattagatgactaaggaaaactagaaaaagaatacagttcacccttgtcaaggtcaaatgtgaaagacagaagtttatttaatgtagaggtaaatgaaggtgagctgttttcagcatcttagtttgaccatgaaaatgtctatagaattatgtgtagttgttccgtacgattttattttcttcatttatttatttacagtcttatttatgttctgtttaatatatagtttgattctggccattttaaatatttgacacagaagagactatattggaatatttacagctttataagtctttcatcagattagctgttgactttttgtaatacaaaaagtttcagacaagtattaaagaataaaatctgtctcaggctggtagttagcagttgtgaccaagatgcttttggttgttgtatttcacaaaatttcctcatttctaacatgagagatgaacttattttaatataatcctttttctacactttaaaagtcagcaatagtgttatgtatttataggcagcttttaataatcttgtcatatttgtactaacccaaatgattcacagtgacaaaacattttaataacttgatcacaaaaccatatggacaaatatgaattttaatattataaatactatttttaaaaggtagaatttattcgcacagggtaaaaagaatgtaatatttagttctcaagtttgaattatcagtatattattacaattttgtatatcagaatcttaagtgttacaggtacaaaaagaatattgctagccaaatgaacaaagtttagctaaatctctgtagcatgcaaatcaaataaattaaaattttttgctattgctttatctatattgtcttaaatatcaaaagctcaggactgaacttaatatttaatcaggttaaattctgaacatgtttctgttttaatttgtcttgtttgtaaacgtatgcaaatacatcacatagattaactggtttctgcactttccatgtgtttgtgggtggaaaaaaattcagtggttttttttaaaaaaaaaagcaaaaacaaagctacatattgcctaatactctatttcagtgtcgtttattgttcagtttatttccctgattggcacaaacacaagagtttccttgaaccatgtaccaagcaaatacaaaatatttcatgaagaaatccccaggctggcagtttgtgatgaatagttcttgttggaactatatgtattgctgataaaaaaggacgaagtattttcattgagcaaataaaatgaagggctccagaa

SEQ ID NO: 200316 - DNA, 6356 bp, Homo sapiens
  Payload ID: 19518
  Gene Name: WW and C2 domain containing 2
  Uniprot ID: Q6AWC2
  ENST ID: ENST00000448232
  CDS Start-End: 1-3651
atgcctaggagggccgggagcggtcagctgccgctgccccggggctgggaggaggccagggactacgacggcaaggtcttctacattgaccacaacaccaggaggaccagctggatcgacccccgggacaggttaacgaagcccttgtcatttgctgattgtgttggggatgagctgccgtggggatgggaagcagggtttgaccctcagattggtgtctactacatcgatcacatcaacaaaaccacgcagatagaagatccaagaaaacaatggaggggggaacaggagaagatgctcaaggactacctctctgtggcacaggatgccctccggacacagaaggaactgtaccatgtgaaggagcagaggctggcgctggccctggatgaatacgtgcgattaaatgatgcctataaggaaaagtcaagttctcacacaagcttattctcaggatcttcatccagtactaaatatgatcccgatattttaaaagctgagatctccactacaagattaagggttaaaaagctaaagagagagctctcacagatgaagcaggaactgctctataaagaacaaggctttgaaacattgcagcaaattgataaaaaaatgtctggaggccagagcgggtatgaactcagtgaagccaaagccattctaacagaactaaaatctatcagaaaggcaattagctcaggagaaaaagaaaaacaagatctgatgcagagtcttgctaagctgcaggagcggtttcatttggatcagaacattggcagatctgagccagatttgagatgtagtcctgtgaactctcatttatgtctctccagacagacccttgatgctgggtcacaaacaagcatttccggagatattggagtaagaagtagatcaaatttagctgaaaaggtcaggctaagcctacagtatgaagaagccaaaagaagtatggccaacttaaaaattgaactgtcaaaattggacagtgaggcctggcctggggcactggatattgagaaggaaaaactgatgctgattaatgaaaaagaagaacttttgaaagagcttcagttcgtcaccccacagaaacgtacccaagatgaattagaacgcctagaagctgaaaggcagcggctggaagaagagttgctgtctgtgaggggaacaccaagcagagctctggccgagagattgagattggaagagagaagaaaagagctgctacagaaacttgaagaaactactaaattaactacttatttgcattcacaacttaaaagcctctctgccagcaccctgtccatgtcatctgggagcagcctgggttccctggcatcgagtcggggctctctgaacacctccagcagagggtcactcaactccctcagttccaccgaactctattacagcagtcaaagtgatcagatagatgtggattatcagtataaactggacttccttctgcaagagaaaagcggttacattccttctggacccatcaccaccatccatgaaaacgaggtggtcaagtcccctagccagcctggccagagtggactctgtggagtggcagctgcagcaacaggccacactcctccactggctgaggccccgaagtctgtggcctccctgtcctcgaggtcctccctttcctccttgtctcctccaggctctcccttggttttggaaggcacgtttcccatgtcttcttctcatgatgcctctctccatcagttcactgctgactttgaagactgtgagttgagtagccattttgcagatatcagcctcatcgaaaatcagattttgctggattctgattcaggaggagcctcccagtctctttcagaggataaagaccttaatgaatgtgctagggagccattatatgaaggaactgcagatgtggaaaaatcattaccaaaaagaagagtgatccacttgcttggggagaaaaccacttgtgtgtcggctgctgtgtctgatgagtctgtggctggagacagtggggtctatgaagctttcgtgaaacaacctagtgaaatggaagatgtcacatacagtgaagaggatgtagccattgtagagaccgcccaggttcagataggactcagatacaatgcaaaaagttcaagtttcatggtgattatagcacagctccgaaaccttcatgccttcttgatacctcatacttcaaaagtatattttagggttgccgttcttccttcctcaactgatgtcagctgtctgtttcgcacaaaagttcatccgcccacagaatccattttattcaatgatgtgttcagagtcgccatttcccaaacagccttacaacagaagacactgagggtagacctttgctctgtcagtaaacaccgaagggaagaatgcctggctggaactcagatcagcctggcagatttaccattttccagtgaggttttcactctatggtataacttgcttccttccaagcaaatgccttgcaaaaagaatgaagaaaatgaggactctgtatttcaaccaaaccagccgttagtagattctatagacttggatgcagtgtcagccttacttgcaagaacatcagctgagttgttagctgtggaacaagaattagcacaagaagaagaagaagaatcaggacaagaagagccaaggggcccagatggagactggttaaacacttatttcctttgctgttgggagctcaaagatgatgtgtttacacggcttacagtgaaacctttgctaacaatgctaagagaggcctctgatgaaattgtggctgaaaaagaggctgaagttaaattgccagaggacagtagctgtacagaagatttaagttcatgcactagtgtgcctgagatgaatgaagacgggaacaggaaagaaagcaactgtgccaaagacctcagaagtcagccacctactagaataccaacactggttgacaaagagacaaacactgatgaagccgctaatgacaatatggcagttcgccccaaagagcgcagcagcctgagctctagacagcatccgtttgtgaggagcagtgtgatagtgcgctcacagaccttttctccaggagagcggaaccagtacatctgcaggttaaatcggagtgacagtgacagttcaaccctggctaaaaaatcactgtttgtgagaaactccaccgaacgccgcagtttgagggtcaaaaggacggtttgccagtcagtccttagaagaacaacacaggaatgcccagtgcggacatctctagacttagaactggaccttcaggcatctctgacccggcagagccgcctcaatgatgagctgcaggcgctgagggacttgcggcagaagctggaggaactgaaagctcagggagagactgaccttccaccaggcgtgctggaggatgagaggttccagaggcttctgaagcaagctgagaagcaggctgaacagtccaaagaagagcagaagcaaggtctgaatgcagagaagttgatgaggcaagtctccaaggacgtgtgtcggctccgggagcagagccagaaggtgcctcggcaggtgcagtccttcagggagaagattgcctacttcaccagagcaaagataagcatcccatccctgccagctgatgatgtgtgattacatgacttaagaaattattttttcatctgttcactttcttagggagggtaaaagactgaagatttgtgtttttgttttggtgtttggttttttttggtaacgtaactgtcaactcttgaagaacttttatttcacatcagattttcaacacattaatttgtaaagtaccttgagtgtaatttttatatgcttaaaaaagaaaaaatcatataagaaagatgggataacctggtacacaaatgttgcccagtatgtgcgcattgccagtggacttcattttgtaaaaatggaatagaggcagtaccccacatgtgtactgttgagccggctgttgagaaacaacttggttcagccggtggttttgcttctcctttgtgttcctgtgagtaggctgtgccgatggcagcagcgccacgtggtatctgtgcgctggcgaggagaggagcgctttccatttggaggcagtgtgagcacacgctggagtgcagcgttccaaagtccgcccgaaatggatgctgcgtccacggccatcacctgtgcgggaacacctggtttccttaagacaatttcctttttgtccttttatatttttctaaagaaaactaagatataaactaccaagtgctcttaagaataaaaataagaataagaatacaaaggagcactactcttggctacacgaaagatcttgggattcatgacactgagggcagggagaagaaagaacaccagccacgcagagatacaaataagctcatcaaatgagcagctggtttgtctcactcagcctgaatttgcattaagtgttcaaaagtgagtttctggcttgcactagtgttttgccctaaatctaaggatggtgcctagtggtggccctgtgttctgaggacagagagagctggaggggtggagggaaatgcatcggcactcatttggtgtaaccaagaagagggggaaagatgtcttgatagaatcaaagttgccaaaaacaaagaagagtttatcaagcagatttctaacatttagtagaaactacttcatagctctcatttttagggggttctatctataatttatggtaaatagttgggaggcaaagggaagaatgtgtgtggggggattattaatttgaagtataagctaaattgtttattaaaaagcctattttggatgaacaagtttagagagataaactgactaatgtgtcctccagtttagaatttcaccttacccgacccaggcacttcttaaaaacacagatcctcagtgcagctctgccagcatcaaggcttttaaaatatgtagtatttaggccatttaaaccatacttattactcaataacccaagaaacaattttgggttagccatctaatatagcaaataaaatagattttttaaagaaatccaaaattgtcttaaaggaatggaccccttgaagaaaaaaaaaaaaagttttgttcctcagttagaatgctcactagctcactagcaagaatttttattttcttgaaagcaattatatatattttggaaagttcatgttattggaattgaagttcaaattaagcaacttctgagcctagaactttaattactttttcctaaatgtcccaacacttacatacaaatttctttgaagacataactggacatggcagacactgctttgaacaaaaaccagcctagtgaattgactgagtacagtcctttaaggctgcccagttcattctattagatgactaaggaaaactagaaaaagaatacagttcacccttgtcaaggtcaaatgtgaaagacagaagtttatttaatgtagaggtaaatgaaggtgagctgttttcagcatcttagtttgaccatgaaaatgtctatagaattatgtgtagttgttccgtacgattttattttcttcatttatttatttacagtcttatttatgttctgtttaatatatagtttgattctggccattttaaatatttgacacagaagagactatattggaatatttacagctttataagtctttcatcagattagctgttgactttttgtaatacaaaaagtttcagacaagtattaaagaataaaatctgtctcaggctggtagttagcagttgtgaccaagatgcttttggttgttgtatttcacaaaatttcctcatttctaacatgagagatgaacttattttaatataatcctttttctacactttaaaagtcagcaatagtgttatgtatttataggcagcttttaataatcttgtcatatttgtactaacccaaatgattcacagtgacaaaacattttaataacttgatcacaaaaccatatggacaaatatgaattttaatattataaatactatttttaaaaggtagaatttattcgcacagggtaaaaagaatgtaatatttagttctcaagtttgaattatcagtatattattacaattttgtatatcagaatcttaagtgttacaggtacaaaaagaatattgctagccaaatgaacaaagtttagctaaatctctgtagcatgcaaatcaaataaattaaaattttttgctattgctttatctatattgtcttaaatatcaaaagctcaggactgaacttaatatttaatcaggttaaattctgaacatgtttctgttttaatttgtcttgtttgtaaacgtatgcaaatacatcacataga

SEQ ID NO: 200317 - DNA, 3824 bp, Homo sapiens
  Payload ID: 19518
  Gene Name: WW and C2 domain containing 2
  Uniprot ID: Q6AWC2
  ENST ID: ENST00000438543
  CDS Start-End: 142-2280
agtgtggcctgggctgactaatgtacactctctacacccctaagaaaggggttgtggaactctgagtgggctgtggaagtattttcagaaaccacgcagatagaagatccaagaaaacaatggaggggggaacaggagaagatgctcaaggactacctctctgtggcacaggatgccctccggacacagaaggaactgtaccatgtgaaggagcagaggctggcgctggccctggatgaatacgtgcgattaaatgatgcctataaggaaaagtcaagttctcacacaagcttattctcaggatcttcatccagtactaaatatgatcccgatattttaaaagctgagatctccactacaagattaagggttaaaaagctaaagagagagctctcacagatgaagcaggaactgctctataaagaacaaggctttgaaacattgcagcaaattgataaaaaaatgtctggaggccagagcgggtatgaactcagtgaagccaaagccattctaacagaactaaaatctatcagaaaggcaattagctcaggagaaaaagaaaaacaagatctgatgcagagtcttgctaagctgcaggagcggtttcatttggatcagaacattggcagatctgagccagatttgagatgtagtcctgtgaactctcatttatgtctctccagacagacccttgatgctgggtcacaaacaagcatttccggagatattggagtaagaagtagatcaaatttagctgaaaaggtcaggctaagcctacagtatgaagaagccaaaagaagtatggccaacttaaaaattgaactgtcaaaattggacagtgaggcctggcctggggcactggatattgagaaggaaaaactgatgctgattaatgaaaaagaagaacttttgaaagagcttcagttcgtcaccccacagaaacgtacccaagatgaattagaacgcctagaagctgaaaggcagcggctggaagaagagttgctgtctgtgaggggaacaccaagcagagctctggccgagagattgagattggaagagagaagaaaagagctgctacagaaacttgaagaaactactaaattaactacttatttgcattcacaacttaaaagcctctctgccagcaccctgtccatgtcatctgggagcagcctgggttccctggcatcgagtcggggctctctgaacacctccagcagagggtcactcaactccctcagttccaccgaactctattacagcagtcaaagtgatcagatagatgtggattatcagtataaactggacttccttctgcaagagaaaagcggttacattccttctggacccatcaccaccatccatgaaaacgaggtggtcaagtcccctagccagcctggccagagtggactctgtggagtggcagctgcagcaacaggccacactcctccactggctgaggccccgaagtctgtggcctccctgtcctcgaggtcctccctttcctccttgtctcctccaggctctcccttggttttggaaggcacgtttcccatgtcttcttctcatgatgcctctctccatcagttcactgctgactttgaagactgtgagttgagtagccattttgcagatatcagcctcatcgaaaatcagattttgctggattctgattcaggaggagcctcccagtctctttcagaggataaagaccttaatgaatgtgctagggagccattatatgaaggaactgcagatgtggaaaaatcattaccaaaaagaagagtgatccacttgcttggggagaaaaccacttgtgtgtcggctgctgtgtctgatgagtctgtggctggagacagtggggtctatgaagctttcgtgaaacaacctagtgaaatggaagatgtcacatacagtgaagaggatgtagccattgtagagaccgcccaggttcagataggactcagatacaatgcaaaaagttcaagtttcatggtgattatagcacagctccgaaaccttcatgccttcttgatacctcatacttcaaaagtatattttagggttgccgttcttccttcctcaactgatgtcagctgtctgtttcgcacaaaagttcatccgcccacagaatccattttattcaatgatgtgttcagagtcgccatttcccaaacagccttacaacagaagacactgaggaagaactttacctttgtgacagctatcactcatggagtgtgcttaccactcccagtaccaatgccaagctttgcgtgactgctgtgtatatattatctcatttaatcctcatgacaacctgatgaaagattggttatgaaatggatgattatccactattttcagataaggagctgcttagagagtattggagctttcgggaagatgtgatgttactgtttaaagcaatatgacatttaaatgctacagcagaagacttcacagttaactaattgctggaactcagatcagcctggcagatttaccattttccagtgaggttttcactctatggtataacttgcttccttccaagcaaatgccttgcaaaaagaatgaagaaaatgaggactctgtatttcaaccaaaccagccgttagtagattctatagacttggatgcagtgtcagccttacttgcaagaacatcagctgagttgttagctgtggaacaagaattagcacaagaagaagaagaagaatcaggacaagaagagccaaggggcccagatggagactggctaacaatgctaagagaggcctctgatgaaattgtggctgaaaaagaggctgaagttaaattgccagaggacagtagctgtacagaagatttaagttcatgcactagtgtgcctgagatgaatgaagacgggaacaggaaagaaagcaactgtgccaaagacctcagaagtcagccacctactagaataccaacactggttgacaaagagacaaacactgatgaagccgctaatgacaatatggcagttcgccccaaagagcgcagcagcctgagctctagacagcatccgtttgtgaggagcagtgtgatagtgcgctcacagaccttttctccaggagagcggaaccagtacatctgcaggttaaatcggagtgacagtgacagttcaaccctggctaaaaaatcactgtttgtgagaaactccaccgaacgccgcagtttgagggtcaaaaggacggtttgccagtcagtccttagaagaacaacacaggaatgcccagtgcggacatctctagacttagaactggaccttcaggcatctctgacccggcagagccgcctcaatgatgagctgcaggcgctgagggacttgcggcagaagctggaggaactgaaagctcagggagagactgaccttccaccaggcgtgctggaggatgagaggttccagaggcttctgaagcaagctgagaagcaggctgaacagtccaaagaagagcagaagcaaggtctgaatgcagagaagttgatgaggcaagtctccaaggacgtgtgtcggctccgggagcagagccagaaggtgcctcggcaggtgcagtccttcagggagaagattgcctacttcaccagagcaaagataagcatcccatccctgccagctgatgatgtgtgattacatgacttaagaaattattttttcatctgttcactttcttagggagggtaaaagactgaagatttgtgtttttgttttggtgtttggttttttttggtaacgtaactgtcaactcttgaagaacttttatttcacatcagattttcaacacattaatttgtaaagt

SEQ ID NO: 200318 - DNA, 1216 bp, Homo sapiens
  Payload ID: 19518
  Gene Name: WW and C2 domain containing 2
  Uniprot ID: Q6AWC2
  ENST ID: ENST00000508747
  CDS Start-End: 34-996
tgagtctgtttatttcccagataacaacttagcatgcccaggttgcgtgttcatggagcatgcctgcctaccaaaagtgttttgtttttgttttaccataggctaacaatgctaagagaggcctctgatgaaattgtggctgaaaaagaggctgaagttaaattgccagaggacagtagctgtacagaagatttaagttcatgcactagtgtgcctgagatgaatgaagacgggaacaggaaagaaagcaactgtgccaaagacctcagaagtcagccacctactagaataccaacactggttgacaaagagacaaacactgatgaagccgctaatgacaatatggcagttcgccccaaagagcgcagcagcctgagctctagacagcatccgtttgtgaggagcagtgtgatagtgcgctcacagaccttttctccaggagagcggaaccagtacatctgcaggttaaatcggagtgacagtgacagttcaaccctggctaaaaaatcactgtttgtgagaaactccaccgaacgccgcagtttgagggtcaaaaggacggtttgccagtcagtccttagaagaacaacacaggaatgcccagtgcggacatctctagacttagaactggaccttcaggcatctctgacccggcagagccgcctcaatgatgagctgcaggcgctgagggacttgcggcagaagctggaggaactgaaagctcagggagagactgaccttccaccaggcgtgctggaggatgagaggttccagaggcttctgaagcaagctgagaagcaggctgaacagtccaaagaagagcagaagcaaggtctgaatgcagagaagttgatgaggcaagtctccaaggacgtgtgtcggctccgggagcagagccagaaggtgcctcggcaggtgcagtccttcagggagaagattgcctacttcaccagagcaaagataagcatcccatccctgccagctgatgatgtgtgattacatgacttaagaaattattttttcatctgttcactttcttagggagggtaaaagactgaagatttgtgtttttgttttggtgtttggttttttttggtaacgtaactgtcaactcttgaagaacttttatttcacatcagattttcaacacattaatttgtaaagtaccttgagtgtaatttttatatgcttaaaaaagaaaaaatcatataagaaa

SEQ ID NO: 200319 - DNA, 604 bp, Homo sapiens
  Payload ID: 19518
  Gene Name: WW and C2 domain containing 2
  ENST ID: ENST00000508614
  CDS Start-End: 154-399
gcgcgtggttccgccgcgccccgcgccctgcgcccctcagcccctcgccggcgcccgcgtcgcgggttggcagcctagcccggcagccgcgttcccgccgcgtcccgcgcccggtacctatggaggcgccgctcgccggcgaggccgccgaccatgcctaggagggccgggagcggtcagctgccgctgccccggggctgggaggaggccagggactacgacggcaaggtcttctacattgaccacaacaccaggaggaccagctggatcgacccccgggacaggttaacgaagcccttgtcatttgctgattgtgttggggatgagctgccgtggggatgggaagcagggtttgaccctcagattggtgtctactacatcgatcacatcaacagttaaaaagctaaagagagagctctcacagatgaagcaggaactgctctataaagaacaaggctttgaaacattgcagcaaattgataaaaaaatgtctggaggccagagcgggtatgaactcagtgaagccaaagccattctaacagaactaaaatctatcagaaaggcaattagctcaggagaaaaagaaaaacaagatctgatgcag

SEQ ID NO: 200320 - DNA, 4887 bp, Homo sapiens
  Payload ID: 19518
  Gene Name: WW and C2 domain containing 2
  Uniprot ID: Q6AWC2
  ENST ID: ENST00000513834
  CDS Start-End: 1-3432
atgcctaggagggccgggagcggtcagctgccgctgccccggggctgggaggaggccagggactacgacggcaaggtcttctacattgaccacaacaccaggaggaccagctggatcgacccccgggacaggttaacgaagcccttgtcatttgctgattgtgttggggatgagctgccgtggggatgggaagcagggtttgaccctcagattggtgtctactacatcgatcacatcaacaaaaccacgcagatagaagatccaagaaaacaatggaggggggaacaggagaagatgctcaaggactacctctctgtggcacaggatgccctccggacacagaaggaactgtaccatgtgaaggagcagaggctggcgctggccctggatgaatacgtgcgattaaatgatgcctataaggaaaagtcaagttctcacacaagcttattctcaggatcttcatccagtactaaatatgatcccgatattttaaaagctgagatctccactacaagattaagggttaaaaagctaaagagagagctctcacagatgaagcaggaactgctctataaagaacaaggctttgaaacattgcagcaaattgataaaaaaatgtctggaggccagagcgggtatgaactcagtgaagccaaagccattctaacagaactaaaatctatcagaaaggcaattagctcaggagaaaaagaaaaacaagatctgatgcagagtcttgctaagctgcaggagcggtttcatttggatcagaacattggcagatctgagccagatttgagatgtagtcctgtgaactctcatttatgtctctccagacagacccttgatgctgggtcacaaacaagcatttccggagatattggagtaagaagtagatcaaatttagctgaaaaggtcaggctaagcctacagtatgaagaagccaaaagaagtatggccaacttaaaaattgaactgtcaaaattggacagtgaggcctggcctggggcactggatattgagaaggaaaaactgatgctgattaatgaaaaagaagaacttttgaaagagcttcagttcgtcaccccacagaaacgtacccaagatgaattagaacgcctagaagctgaaaggcagcggctggaagaagagttgctgtctgtgaggggaacaccaagcagagctctggccgagagattgagattggaagagagaagaaaagagctgctacagaaacttgaagaaactactaaattaactacttatttgcattcacaacttaaaagcctctctgccagcaccctgtccatgtcatctgggagcagcctgggttccctggcatcgagtcggggctctctgaacacctccagcagagggtcactcaactccctcagttccaccgaactctattacagcagtcaaagtgatcagatagatgtggattatcagtataaactggacttccttctgcaagagaaaagcggttacattccttctggacccatcaccaccatccatgaaaacgaggtggtcaagtcccctagccagcctggccagagtggactctgtggagtggcagctgcagcaacaggccacactcctccactggctgaggccccgaagtctgtggcctccctgtcctcgaggtcctccctttcctccttgtctcctccaggctctcccttggttttggaaggcacgtttcccatgtcttcttctcatgatgcctctctccatcagttcactgctgactttgaagactatgtggaaaaatcattaccaaaaagaagagtgatccacttgcttggggagaaaaccacttgtgtgtcggctgctgtgtctgatgagtctgtggctggagacagtggggtctatgaagctttcgtgaaacaacctagtgaaatggaagatgtcacatacagtgaagaggatgtagccattgtagagaccgcccaggttcagataggactcagatacaatgcaaaaagttcaagtttcatggtgattatagcacagctccgaaaccttcatgccttcttgatacctcatacttcaaaagtatattttagggttgccgttcttccttcctcaactgatgtcagctgtctgtttcgcacaaaagttcatccgcccacagaatccattttattcaatgatgtgttcagagtcgccatttcccaaacagccttacaacagaagacactgagggtagacctttgctctgtcagtaaacaccgaagggaagaatgcctggctggaactcagatcagcctggcagatttaccattttccagtgaggttttcactctatggtataacttgcttccttccaagcaaatgccttgcaaaaagaatgaagaaaatgaggactctgtatttcaaccaaaccagccgttagtagattctatagacttggatgcagtgtcagccttacttgcaagaacatcagctgagttgttagctgtggaacaagaattagcacaagaagaagaagaagaatcaggacaagaagagccaaggggcccagatggagactggctaacaatgctaagagaggcctctgatgaaattgtggctgaaaaagaggctgaagttaaattgccagaggacagtagctgtacagaagatttaagttcatgcactagtgtgcctgagatgaatgaagacgggaacaggaaagaaagcaactgtgccaaagacctcagaagtcagccacctactagaataccaacactggttgacaaagagacaaacactgatgaagccgctaatgacaatatggcagttcgccccaaagagcgcagcagcctgagctctagacagcatccgtttgtgaggagcagtgtgatagtgcgctcacagaccttttctccaggagagcggaaccagtacatctgcaggttaaatcggagtgacagtgacagttcaaccctggctaaaaaatcactgtttgtgagaaactccaccgaacgccgcagtttgagggtcaaaaggacggtttgccagtcagtccttagaagaacaacacaggaatgcccagtgcggacatctctagacttagaactggaccttcaggcatctctgacccggcagagccgcctcaatgatgagctgcaggcgctgagggacttgcggcagaagctggaggaactgaaagctcagggagagactgaccttccaccaggcgtgctggaggatgagaggttccagaggcttctgaagcaagctgagaagcaggctgaacagtccaaagaagagcagaagcaaggtctgaatgcagagaagttgatgaggcaagtctccaaggacgtgtgtcggctccgggagcagagccagaaggtgcctcggcaggtgcagtccttcagggagaagattgcctacttcaccagagcaaagataagcatcccatccctgccagctgatgatgtgtgattacatgacttaagaaattattttttcatctgttcactttcttagggagggtaaaagactgaagatttgtgtttttgttttggtgtttggttttttttggtaacgtaactgtcaactcttgaagaacttttatttcacatcagattttcaacacattaatttgtaaagtaccttgagtgtaatttttatatgcttaaaaaagaaaaaatcatataagaaagatgggataacctggtacacaaatgttgcccagtatgtgcgcattgccagtggacttcattttgtaaaaatggaatagaggcagtaccccacatgtgtactgttgagccggctgttgagaaacaacttggttcagccggtggttttgcttctcctttgtgttcctgtgagtaggctgtgccgatggcagcagcgccacgtggtatctgtgcgctggcgaggagaggagcgctttccatttggaggcagtgtgagcacacgctggagtgcagcgttccaaagtccgcccgaaatggatgctgcgtccacggccatcacctgtgcgggaacacctggtttccttaagacaatttcctttttgtccttttatatttttctaaagaaaactaagatataaactaccaagtgctcttaagaataaaaataagaataagaatacaaaggagcactactcttggctacacgaaagatcttgggattcatgacactgagggcagggagaagaaagaacaccagccacgcagagatacaaataagctcatcaaatgagcagctggtttgtctcactcagcctgaatttgcattaagtgttcaaaagtgagtttctggcttgcactagtgttttgccctaaatctaaggatggtgcctagtggtggccctgtgttctgaggacagagagagctggaggggtggagggaaatgcatcggcactcatttggtgtaaccaagaagagggggaaagatgtcttgatagaatcaaagttgccaaaaacaaagaagagtttatcaagcagatttctaacatttagtagaaactacttcatagctctcatttttagggggttctatctataatttatggtaaatagttgggaggcaaagggaagaatgtgtgtggggggattattaatttgaagtataagctaaattgtttattaaaaagcctattttggatgaacaagtttagagagataaactgactaatgtgtcctccagtttagaatttcaccttacccgacccaggcacttcttaaaaacacagatcctcagtgcagctctgccagcatcaaggcttttaaaatatgtagtatttaggccatttaaaccatacttattactcaataacccaagaaacaattttgggttagccatctaatatagcaaataaaatagattttttaaagaaatccaaaattgtcttaaaggaatggaccccttgaagaaaaaaaaaaaaa

SEQ ID NO: 200321 - DNA, 5247 bp, Homo sapiens
  Payload ID: 19518
  Gene Name: WW and C2 domain containing 2
  Uniprot ID: Q6AWC2
  ENST ID: ENST00000504005
  CDS Start-End: 49-2673
atgatcccgatattttaaaagctgagatctccactacaagattaaggtatggccaacttaaaaattgaactgtcaaaattggacagtgaggcctggcctggggcactggatattgagaaggaaaaactgatgctgattaatgaaaaagaagaacttttgaaagagcttcagttcgtcaccccacagaaacgtacccaagatgaattagaacgcctagaagctgaaaggcagcggctggaagaagagttgctgtctgtgaggggaacaccaagcagagctctggccgagagattgagattggaagagagaagaaaagagctgctacagaaacttgaagaaactactaaattaactacttatttgcattcacaacttaaaagcctctctgccagcaccctgtccatgtcatctgggagcagcctgggttccctggcatcgagtcggggctctctgaacacctccagcagagggtcactcaactccctcagttccaccgaactctattacagcagtcaaagtgatcagatagatgtggattatcagtataaactggacttccttctgcaagagaaaagcggttacattccttctggacccatcaccaccatccatgaaaacgaggtggtcaagtcccctagccagcctggccagagtggactctgtggagtggcagctgcagcaacaggccacactcctccactggctgaggccccgaagtctgtggcctccctgtcctcgaggtcctccctttcctccttgtctcctccaggctctcccttggttttggaaggcacgtttcccatgtcttcttctcatgatgcctctctccatcagttcactgctgactttgaagactgtgagttgagtagccattttgcagatatcagcctcatcgaaaatcagattttgctggattctgattcaggaggagcctcccagtctctttcagaggataaagaccttaatgaatgtgctagggagccattatatgaaggaactgcagatgtggaaaaatcattaccaaaaagaagagtgatccacttgcttggggagaaaaccacttgtgtgtcggctgctgtgtctgatgagtctgtggctggagacagtggggtctatgaagctttcgtgaaacaacctagtgaaatggaagatgtcacatacagtgaagaggatgtagccattgtagagaccgcccaggttcagataggactcagatacaatgcaaaaagttcaagtttcatggtgattatagcacagctccgaaaccttcatgccttcttgatacctcatacttcaaaagtatattttagggttgccgttcttccttcctcaactgatgtcagctgtctgtttcgcacaaaagttcatccgcccacagaatccattttattcaatgatgtgttcagagtcgccatttcccaaacagccttacaacagaagacactgagggtagacctttgctctgtcagtaaacaccgaagggaagaatgcctggctggaactcagatcagcctggcagatttaccattttccagtgaggttttcactctatggtataacttgcttccttccaagcaaatgccttgcaaaaagaatgaagaaaatgaggactctgtatttcaaccaaaccagccgttagtagattctatagacttggatgcagtgtcagccttacttgcaagaacatcagctgagttgttagctgtggaacaagaattagcacaagaagaagaagaagaatcaggacaagaagagccaaggggcccagatggagactggctaacaatgctaagagaggcctctgatgaaattgtggctgaaaaagaggctgaagttaaattgccagaggacagtagctgtacagaagatttaagttcatgcactagtgtgcctgagatgaatgaagacgggaacaggaaagaaagcaactgtgccaaagacctcagaagtcagccacctactagaataccaacactggttgacaaagagacaaacactgatgaagccgctaatgacaatatggcagttcgccccaaagagcgcagcagcctgagctctagacagcatccgtttgtgaggagcagtgtgatagtgcgctcacagaccttttctccaggagagcggaaccagtacatctgcaggttaaatcggagtgacagtgacagttcaaccctggctaaaaaatcactgtttgtgagaaactccaccgaacgccgcagtttgagggtcaaaaggacggtttgccagtcagtccttagaagaacaacacaggaatgcccagtgcggacatctctagacttagaactggaccttcaggcatctctgacccggcagagccgcctcaatgatgagctgcaggcgctgagggacttgcggcagaagctggaggaactgaaagctcagggagagactgaccttccaccaggcgtgctggaggatgagaggttccagaggcttctgaagcaagctgagaagcaggctgaacagtccaaagaagagcagaagcaaggtctgaatgcagagaagttgatgaggcaagtctccaaggacgtgtgtcggctccgggagcagagccagaaggtgcctcggcaggtgcagtccttcagggagaagattgcctacttcaccagagcaaagataagcatcccatccctgccagctgatgatgtgtgattacatgacttaagaaattattttttcatctgttcactttcttagggagggtaaaagactgaagatttgtgtttttgttttggtgtttggttttttttggtaacgtaactgtcaactcttgaagaacttttatttcacatcagattttcaacacattaatttgtaaagtaccttgagtgtaatttttatatgcttaaaaaagaaaaaatcatataagaaagatgggataacctggtacacaaatgttgcccagtatgtgcgcattgccagtggacttcattttgtaaaaatggaatagaggcagtaccccacatgtgtactgttgagccggctgttgagaaacaacttggttcagccggtggttttgcttctcctttgtgttcctgtgagtaggctgtgccgatggcagcagcgccacgtggtatctgtgcgctggcgaggagaggagcgctttccatttggaggcagtgtgagcacacgctggagtgcagcgttccaaagtccgcccgaaatggatgctgcgtccacggccatcacctgtgcgggaacacctggtttccttaagacaatttcctttttgtccttttatatttttctaaagaaaactaagatataaactaccaagtgctcttaagaataaaaataagaataagaatacaaaggagcactactcttggctacacgaaagatcttgggattcatgacactgagggcagggagaagaaagaacaccagccacgcagagatacaaataagctcatcaaatgagcagctggtttgtctcactcagcctgaatttgcattaagtgttcaaaagtgagtttctggcttgcactagtgttttgccctaaatctaaggatggtgcctagtggtggccctgtgttctgaggacagagagagctggaggggtggagggaaatgcatcggcactcatttggtgtaaccaagaagagggggaaagatgtcttgatagaatcaaagttgccaaaaacaaagaagagtttatcaagcagatttctaacatttagtagaaactacttcatagctctcatttttagggggttctatctataatttatggtaaatagttgggaggcaaagggaagaatgtgtgtggggggattattaatttgaagtataagctaaattgtttattaaaaagcctattttggatgaacaagtttagagagataaactgactaatgtgtcctccagtttagaatttcaccttacccgacccaggcacttcttaaaaacacagatcctcagtgcagctctgccagcatcaaggcttttaaaatatgtagtatttaggccatttaaaccatacttattactcaataacccaagaaacaattttgggttagccatctaatatagcaaataaaatagattttttaaagaaatccaaaattgtcttaaaggaatggaccccttgaagaaaaaaaaaaaaagttttgttcctcagttagaatgctcactagctcactagcaagaatttttattttcttgaaagcaattatatatattttggaaagttcatgttattggaattgaagttcaaattaagcaacttctgagcctagaactttaattactttttcctaaatgtcccaacacttacatacaaatttctttgaagacataactggacatggcagacactgctttgaacaaaaaccagcctagtgaattgactgagtacagtcctttaaggctgcccagttcattctattagatgactaaggaaaactagaaaaagaatacagttcacccttgtcaaggtcaaatgtgaaagacagaagtttatttaatgtagaggtaaatgaaggtgagctgttttcagcatcttagtttgaccatgaaaatgtctatagaattatgtgtagttgttccgtacgattttattttcttcatttatttatttacagtcttatttatgttctgtttaatatatagtttgattctggccattttaaatatttgacacagaagagactatattggaatatttacagctttataagtctttcatcagattagctgttgactttttgtaatacaaaaagtttcagacaagtattaaagaataaaatctgtctcaggctggtagttagcagttgtgaccaagatgcttttggttgttgtatttcacaaaatttcctcatttctaacatgagagatgaacttattttaatataatcctttttctacactttaaaagtcagcaatagtgttatgtatttataggcagcttttaataatcttgtcatatttgtactaacccaaatgattcacagtgacaaaacattttaataacttgatcacaaaaccatatggacaaatatgaattttaatattataaatactatttttaaaaggtagaatttattcgcacagggtaaaaagaatgtaatatttagttctcaagtttgaattatcagtatattattacaattttgtatatcagaatcttaagtgttacaggtacaaaaagaatattgctagccaaatgaacaaagtttagctaaatctctgtagcatgcaaatcaaataaattaaaattttttgct

SEQ ID NO: 200322 - DNA, 1294 bp, Homo sapiens
  Payload ID: 19519
  Gene Name: WW domain binding protein 1
  Uniprot ID: Q96G27
  ENST ID: ENST00000233615
  CDS Start-End: 275-1084
cggcggaggcgctgctgtggattggtcacagggagaaacctctgatctgttcctattggcccgtccgtcaagggacgatgatgattggtagggcagagcaatctgagtcctagttggtggagttctgcccggatggaagctccggccgcggagtgatggtggcctcagcgaagatgggccgggcagggaccatggcggtggcagcagaggtggcaggggcggggcggctggcggtagaggaggctgtggtcctcagggggctgtaggtggaggtatggctcgggccagcagcgggaacggcagcgaggaggcctggggggcacttcgggcgccgcaacagcagcttcgagagctgtgcccaggagtgaacaaccagccctacctctgtgagagtggtcactgctgcggggagactggctgctgcacctactactatgagctctggtggttctggctgctctggactgtcctcatcctctttagctgctgttgcgccttccgccaccgacgagctaaactcaggctgcaacaacagcagcggcagcgtgaaatcaacttgttggcctatcatggggcatgccatggggctggtcctttccctaccggttcactgcttgaccttcgcttcctcagcaccttcaagcccccagcctacgaggatgtggttcaccgcccaggcacaccaccccccccttatactgtggccccaggccgccccttgactgcttccagtgaacaaacctgctgttcctcctcatccagctgccctgcccactttgaaggaacaaatgtggaaggtgtttcctcccaccagagtgccccccctcatcaggagggtgagcccggggcaggggtgacccctgcctccacacccccctcctgccgctatcgccgtttaactggcgactccggtattgagctctgcccttgtcctgcctccggtgagggtgagccagtcaaggaggtgagggttagtgccaccctgccagatctggaggactactccccgtgtgcactacccccagagtctgtaccgcagatctttcccatggggctgtcttccagtgaaggggacatcccataagtagttttgagagggtggatgggttacttgcccaccagaaacagccctagtcccaactccttgcgttcctttggcccctccctgcctacctagaatctgcctgaaagggctggagaggggcagtattgggggactgtgctagctttacccccgcaggacatacacaggagcctttgatctcattaaagagatgtgaaccagctacttgtg

SEQ ID NO: 200323 - DNA, 1325 bp, Homo sapiens
  Payload ID: 19519
  Gene Name: WW domain binding protein 1
  ENST ID: ENST00000393972
  CDS Start-End: 204-1115
gggacgatgatgattggtagggcagagcaatctgagtcctagttggtggagttctgcccggatggaagctccggccgcggagtgatggtggcctcagcgaagatgggccgggcagggaccatggcggtggcagcagaggtggcaggggcggggcggctggcggtagaggaggctgtggtcctcagggggctgtaggtggaggtatggctcgggccagcagcgggaacggcagcgaggaggcctggggggcacttcgggcgccgcaacagcagagtccggcagcgtcttctcttgagggagcaatttggagaagagctggaacccagactcgcgccctggatgccatcctttatcatccacagcaatcccatctgcttcgagagctgtgcccaggagtgaacaaccagccctacctctgtgagagtggtcactgctgcggggagactggctgctgcacctactactatgagctctggtggttctggctgctctggactgtcctcatcctctttagctgctgttgcgccttccgccaccgacgagctaaactcaggctgcaacaacagcagcggcagcgtgaaatcaacttgttggcctatcatggggcatgccatggggctggtcctttccctaccggttcactgcttgaccttcgcttcctcagcaccttcaagcccccagcctacgaggatgtggttcaccgcccaggcacaccaccccccccttatactgtggccccaggccgccccttgactgcttccagtgaacaaacctgctgttcctcctcatccagctgccctgcccactttgaaggaacaaatgtggaaggtgtttcctcccaccagagtgccccccctcatcaggagggtgagcccggggcaggggtgacccctgcctccacacccccctcctgccgctatcgccgtttaactggcgactccggtattgagctctgcccttgtcctgcctccggtgagggtgagccagtcaaggaggtgagggttagtgccaccctgccagatctggaggactactccccgtgtgcactacccccagagtctgtaccgcagatctttcccatggggctgtcttccagtgaaggggacatcccataagtagttttgagagggtggatgggttacttgcccaccagaaacagccctagtcccaactccttgcgttcctttggcccctccctgcctacctagaatctgcctgaaagggctggagaggggcagtattgggggactgtgctagctttacccccgcaggacatacacaggagcctttgatctcattaaagagatgtgaaccagctacttgtg

SEQ ID NO: 200324 - DNA, 1110 bp, Homo sapiens
  Payload ID: 19519
  Gene Name: WW domain binding protein 1
  ENST ID: ENST00000409737
  CDS Start-End: 135-935
tccggccgcggagtgatggtggcctcagcgaagatgggccgggcagggaccatggcggtggcagcagaggtggcaggggcggggcggctggcggtagaggaggctgtggtcctcagggggctgtaggtggaggtatggctcgggccagcagcgggaacggcagcgaggaggcctggggggcacttcgggcgccgcaacagcagctgtgcccaggagtgaacaaccagccctacctctgtgagagtggtcactgctgcggggagactggctgctgcacctactactatgagctctggtggttctggctgctctggactgtcctcatcctctttagctgctgttgcgccttccgccaccgacgagctaaactcaggctgcaacaacagcagcggcagcgtgaaatcaacttgttggcctatcatggggcatgccatggggctggtcctttccctaccggttcactgcttgaccttcgcttcctcagcaccttcaagcccccagcctacgaggatgtggttcaccgcccaggcacaccaccccccccttatactgtggccccaggccgccccttgactgcttccagtgaacaaacctgctgttcctcctcatccagctgccctgcccactttgaaggaacaaatgtggaaggtgtttcctcccaccagagtgccccccctcatcaggagggtgagcccggggcaggggtgacccctgcctccacacccccctcctgccgctatcgccgtttaactggcgactccggtattgagctctgcccttgtcctgcctccggtgagggtgagccagtcaaggaggtgagggttagtgccaccctgccagatctggaggactactccccgtgtgcactacccccagagtctgtaccgcagatctttcccatggggctgtcttccagtgaaggggacatcccataagtagttttgagagggtggatgggttacttgcccaccagaaacagccctagtcccaactccttgcgttcctttggcccctccctgcctacctagaatctgcctgaaagggctggagaggggcagtattgggggactgtgctagctttacccccgcaggacatacacaggagccttt

SEQ ID NO: 200325 - DNA, 989 bp, Homo sapiens
  Payload ID: 19519
  Gene Name: WW domain binding protein 1
  ENST ID: ENST00000428943
  CDS Start-End: 241-989
ggccgcggagtgatggtggcctcagcgaagatgggccgggcagggaccatggcggtggcagcagaggtggcaggggcggggcggctggcggtagaggaggctgtggtcctcagggggctgtaggtggaggtatggctcgggccagcagcgggaacggcagcgaggaggcctggggggcacttcgggcgccgcaacagcagatgcagctgactttgcctgtagcctcatagaacccatcccatggctgcagtggaagcttgcggtggctctccagtgaccagaggcatagtgaggtcccagggaggctccctctgtcttgcaacagttatttgtgatctttttctatgtgcctattgtcacaacagagtccggcagcgtcttctcttgagggagcaatttggagaagagctggaacccagactcgcgccctggatgccatcctttatcatccacagcaatcccatctggttgggagcactgctctggcttcgagagctgtgcccaggagtgaacaaccagccctacctctgtgagagtggtcactgctgcggggagactggctgctgcacctactactatgagctctggtggttctggctgctctggactgtcctcatcctctttagctgctgttgcgccttccgccaccgacgagctaaactcaggctgcaacaacagcagcggcagcgtgaaatcaacttgttggcctatcatggggcatgccatggggctggtcctttccctaccggttcactgcttgaccttcgcttcctcagcaccttcaagcccccagcctacgaggatgtggttcaccgcccaggcacaccaccccccccttatactgtggccccaggccgccccttgactgcttccagtgaacaaacctgctgttcctcctcatccagctgccctgcccactttgaaggaacaaatgtggaaggtgtttcctcccaccagagtgccccccctcatcaggagggtgagcccgg

SEQ ID NO: 200326 - DNA, 4646 bp, Homo sapiens
  Payload ID: 19520
  Gene Name: WW domain binding protein 11
  Uniprot ID: Q9Y2W2
  ENST ID: ENST00000261167
  CDS Start-End: 235-2160
aagcggcgctaagagaaggcgggacagaggaatgggaaatgacgtgaggagtgcggaggggcgcgaggtttcaagatggcggtagctgaggggttgaccgagagacccagttgaaggcctttacgaagtgaaagaggccgggagtcgccccctacccgcttctcgtagtcctgggagcacagcagaagtgtttttctttttttaatgaacaagtaaaccatacaaattgtcaacatgggacggagatctacatcatccaccaagagtggaaaatttatgaaccccacagaccaagcccgaaaggaagcccggaagagagaattaaagaagaacaaaaaacagcgcatgatggttcgagctgcagttttaaagatgaaggatccaaaacagataatccgagacatggagaaattggatgaaatggagtttaacccagtgcaacagccacaattaaatgagaaagtactgaaagacaagcgtaaaaagctgcgtgaaacctttgaacgtattctacgactctatgaaaaagagaatccagatatttacaaagaattgagaaagctagaagtagaatatgaacagaagagggctcaacttagccaatattttgatgctgtcaagaatgctcagcatgtggaagtggagagtattcctttgccagatatgccacatgctccttccaacattttgatccaggacattccacttcctggtgcccagccaccctctatcctaaagaaaacctcagcctatggacctccaactcgggcagtttctatccttcctcttcttggacatggtgttccacgtttgccccctggcagaaaacctcctggccctccccctggtccacctcctcctcaagtcgtgcagatgtatggccgtaaagtgggttttgccctagatcttccccctcgtaggcgagatgaagacatgttatatagtcctgaacttgcccagcgaggtcatgatgatgatgtttctagcaccagtgaagatgatggctatcctgaggacatggatcaagataagcatgatgacagtactgatgacagtgacaccgacaaatcagatggagaaagtgacggggatgaatttgtgcaccgtgataatggtgagagagacaacaatgaagaaaagaagtcaggtctgagtgtacggtttgcagatatgcctggaaaatcaaggaagaaaaagaagaacatgaaggaactgactcctcttcaagccatgatgcttcgtatggcaggtcaagaaatccctgaggagggacgggaagtagaggaattttcagaggacgatgatgaagatgattctgatgactctgaagcagaaaagcaatcacaaaagcagcataaagaggaatcccattctgatggcacatccactgcttcttcacagcagcaggctccgccgcagtctgttcctccttctcagatacaagcacctcccatgccaggaccaccacctcttggaccaccacctgctccaccattacggcctcctgggccacctacaggccttcctcctggtccacctccaggagctcctccattcctgagaccacctggaatgccaggactccgagggcccttaccccgacttttacctccaggaccaccaccaggccgaccccctggccctcccccaggtccacctccaggtctgcctcctggtccccctcctcgtggacccccaccaaggctacctccccctgcacctccaggtattcctccacctcgtcctggcatgatgcgcccacctttggtgcctccccttggacctgccccccctgggctgttcccaccagctcccttgccaaaccctggggttttaagtgccccacccaacttgattcagcgacccaaggcggatgatacaagtgcagccaccattgagaagaaagccacagcaaccatcagtgccaagccacagatcactaatcccaaggcagagattactcgatttgtgcccactgcactgagagtacgtcgggagaataaaggggctactgctgctccccaaagaaagtcagaggatgattctgctgtgcctcttgccaaagcagcacccaaatctggtccttctgttcctgtctcagtacaaactaaggatgatgtctatgaggctttcatgaaagagatggaagggctactgtgacagcttttgatgccagaaaaggcttctgttcacaacagtggcccatggagaaagaggctcttattaaacttagatgaaagagctgcttccattgtcagggtattttctaatttcagttcaaggaatatcctaaaatttagccttgttcagaatttactgcacataaaaaagggtatttcatccagaatagatcagttattgaagcagtgctgctaacatccattccctttcataccaccattttcaccctgtttcttcccctcctccagttctttggaaatttgtgatcgggggatcttagttgcttatttgttttgactcttgtgtgctgtgggcactggagtagagatttctggagaaaaaaaaacagtttatttcatcttgccttttgtgtttgagttatttttaatattttcctgtaaatattttgtaatattttacttgtaatgaaatggatcacaatgtcatttcctaatacaaggcaggatatgtgggaagaatatgtacaattatttgattaaaattatttcccactgacctaaactttcagtgatttgtgggaaaaataaataaatgttctacaccaagatactctgtgttactgataatatgtaaacataatacctattttatggacagaaaaagttaaatatttaaaacttgggtctttaaggaactgcctttctggtacagaatgagaatcttactgaaaacatggtaaaaactacattttaaattttaagggataaaaaggagtaattatttcccttttttaagattgtcatactggctttagagaaactgagaggtgttaagaatagtatggtttggcttttattatttaaaagatgtcttaccttcagtggttacttattccagagcttcttgaactgatacgagttgaatggcaaaagtcattttaaaccatttttaagctataaaagaatcagaagaggttagctttttttcctttctgaattggtgggtttggtgtgcttttatattaaaatatgaatgaataagagtgcttaacattaatttgcatttataccattttctttacaaagtgctttaatgtaaactcatctaccaatttagactaactcttagtaagtttaatgttaatttaatgactaactcatctaccaattaaccctatagataacttttctgggtattttccccattttacattagagagtattgaaacttaaaaaggactcgtgatttatccagtgatccaaagtgtgtatttcataaacacatacacacagtgcgtgcattgtttaggcatacgttactttccacagtatctcaaatgccttttacatgaatcccatactatcaaaaattggtgataacctaaaatgtagtgcaataatacaataaggcatttattttcttagagttgagttgatggatttttagatttttattcaagatcttttgtttgtttggctttgcttggaagatactgatttattctttcatattaaagcaaatcctgccaaagcactaaatagaccgttttgggttggttttttagtgtaatattaatacgggtccacaggtgaattgagtctgttcagatgtaaggattgaaccttatgttatcaatccttgacaccatccttgataacttacggatatcaaggatcaaaccatatggtatcaatattgttagttattcagcataaacagaattatttcccaatacttgatctgaaatatttttaatggtcttacttgaaacttatattctttctgggagtgatgtttttatcatttttccatggagacaggttctaactctgttgcccaggctgcagtgcagtgatgtgatcatagctcactgcagcctgaaactcctgggttcaagtgatctctggcctcagcctcccaagtagttggaacttcagatacgtgccaccacaaccagctaatttattttttagagatgaggtctcgctatgttgcccagtctggtctcctagcctcaagtgatcttcccatctcagccttcagttggagatttctgatttatgttaatataagaaagctgttgatagtttatcataaaggcatttccttatattgctagtataattttctgaaaattagtggtgtgacaatacatcagctgcatccacaggaaaggggaattaattagcagttctgattctgggtacacttgttatgatcataatttacataatattttcatgaaaatggtcagctcacagctatgaaatgtaaatgatagaaatctttaatcatgtatatggatagacttgttactatttccttatcaaagtgtcactttagggacagcagttgcccctttaaattaaggatcaccacaataatactctgccatgtcatggaatcagcatgaagccctggatgctatccaagattctgtttcagttctcattttgtatattcttgtttgtgctcttgattaaaatatctccttatatatagct

SEQ ID NO: 200327 - DNA, 494 bp, Homo sapiens
  Payload ID: 19520
  Gene Name: WW domain binding protein 11
  ENST ID: ENST00000535328
  CDS Start-End: 336-494
ggaggggcgcgaggtttcaagatggcggtagctgaggggttgaccgagagacccagttgaaggcctttacgaagtgaaagaggccgggagtcgccccctacccgcttctcgtagtcctgggagcacagcagaagtttgtgttttgaactcttgagagtcaagcattatatctgaactagaactgaatctgaattaaatatgcttaaattaatgagtttttagtgtcttagaagtattgagaatgtacagcatacatgccaagaaaaaccatggagagaggcaaaggtgaggtttttctttttttaatgaacaagtaaaccatacaaattgtcaacatgggacggagatctacatcatccaccaagagtggaaaatttatgaaccccacagaccaagcccgaaaggaagcccggaagagagaattaaagaagaacaaaaaacagcgcatgatggttcgagctgcagttttaaagatgaaggatccaaaacagata

SEQ ID NO: 200328 - DNA, 787 bp, Homo sapiens
  Payload ID: 19520
  Gene Name: WW domain binding protein 11
  ENST ID: ENST00000535638
  CDS Start-End: 46-630
gtttttctttttttaatgaacaagtaaaccatacaaattgtcaacatgggacggagatctacatcatccaccaagagtggaaaatttatgaaccccacagaccaagcccgaaaggaagcccggaagagagaattaaagaagaacaaaaaacagcgcatgatggttcgagctgcagttttaaagatgaaggatccaaaacagataatccgagacatggagaaattggatgaaatggagtttaacccagtgcaacagccacaattaaatgagaaagtactgaaagacaagcgtaaaaagctgcgtgaaacctttgaacgtattctacgactctatgaaaaagagaatccagatatttacaaagaattgagaaagctagaagtagaatatgaacagaagagggctcaacttagccaatattttgatgctgtcaagcccagcgaggtcatgatgatgatgtttctagcaccagtgaagatgatggctatcctgaggacatggatcaagataagcatgatgacagtactgatgacagtgacaccgacaaatcagatggagaaagtgacggggatgaatttgtgcaccgtgataatggtgagagagacaacaatgaagaaaagaagtcaggtctgagtgtacggtttgcagatatgcctggaaaatcaaggaagaaaaagaagaacatgaaggaactgactcctcttcaagccatgatgcttcgtatggcaggtcaagaaatccctgaggagggacgggaagtagaggaattttcagaggacgatgatgaaga

SEQ ID NO: 200329 - DNA, 4107 bp, Homo sapiens
  Payload ID: 19521
  Gene Name: WW domain binding protein 1-like
  Uniprot ID: Q9NX94
  ENST ID: ENST00000369889
  CDS Start-End: 143-1171
tttactttgtctgctttgctaaagaaggccggtgaaccaggaccaccgcacacacaggcccaccaggggcaatgctcattccaagaccttaacttttaagagccctttgttccaacgttagtgtggacgatgctcttgcaggatgcctttccttttgggtcttagacaggataaggaagcctgtgtgggtaccaacaatcaaagctacatctgtgacacaggacactgctgtggacagtctcagtgctgcaactactactatgaactctggtggttctggctggtgtggaccatcatcatcatcctgagctgctgctgtgtttgccaccaccgccgagccaagcaccgccttcaggcccagcagcggcaacatgaaatcaacctgatcgcttaccgagaagcccacaattactcagcgctgccattttatttcaggtttttgccaaactatttactacctccttatgaggaagtggtgaaccgacctccaactcctcccccaccatacagtgccttccagctacagcagcagcagctgctgcctccacagtgtggccctgcaggtggcagtcccccgggcatcgatcccaccaggggatcccagggggcacagagcagccccttgtctgagcccagcagaagcagcacaagacccccaagcatcgctgaccctgatccctctgacctaccagttgaccgagcagccaccaaagccccagggatggagcccagtggctctgtggctggcctgggggagctggacccgggggccttcctggacaaagatgcagaatgtagggaggagctgctgaaagatgacagctctgaacacggcgcacccgacagcaaagagaagacgcctgggagacatcgccgcttcacaggtgactcgggcattgaagtgtgtgtgtgcaaccggggccaccatgacgatgacctcaaagagttcaacacactcatcgatgatgctctggatgggcccctggacttctgcgacagctgccatgtgcggccccctggtgatgaggaggaaggcctctgtcagtcctctgaggagcaggctcgagagcctgggcacccgcacctgccacggccgcccgcatgcctgctgctgaacaccatcaacgagcaggactctcccaactcccagagcagcagctcccccagctagagcaggtcctgccagcacccagcaacttggcaaagcaaccagggtaggggagaaccacgagagaagcattaagtgactttcaaagactttcagagtacagccacttggttcctttttgtttgttttccttctcctctcctgcattttcctccatctccaggtacagttcggggtgtggatgcctcttcctccacaagggcacagtgttgtggagggctaagttggttctgtgactcattcctcataccctaactccatctcctttctttaaagtcaaatctcacctacctgtttgggtcagagagatgtgttttaaaagcccccaaggaaggaggctgggactgtgccctgacatgattcttggtgatggaataggtttgtgctctgattctagtttaagagaacgttgctgtatctcagtccaggagaggcagcccatcttggccctggatgaagaaggaaacccacagaggcccagggcttgtcattgggctgccagtgtctgccaagccagcattgagctaatcctgtgggaggatgagagctactgggccgttgtatgataggttggtaggggcttgttgatctgtcaaattccaggtgacaagatctatgcaccccatgcgtccttgaggggcctcttccccgcaggctctggctggccgcaggctggttctggtgtgaaaggttatactgccttttctttgtttgtttgtttttttctctaaaaacaaacagcaaaagacagctgaaaacaagaacttcaccggtgggcaggcaagaattctcttctggaaaatgacgtttgtggctctttcccaagttggccttcaaagagcctgcctgctgttgagccagaagatgtctcgtgtgaaggctggggtggcggctgtcttggaacctctgtgagcaggaggccctaagccgcagcagtggatagaggtgcagctctctgcctctctgccctttggtctgtgttcacaggtgacccgtgtcagcctgcatcgcaagcacacaccctgcgggccttcaagtctcactgttccgtatgaggaaacagacagcggactgaggaagcgatggccccagagaaagggcccctgtagcctggctctcacacagtattttatctttgattctgaataaatattttttgtggggttttttttttttttttggtggcagttgtttgttttaaactgaccacttggaagaaacaccttggttatctgtggttttcatgccttgtccctgcctctacccccaccccttttgagtcgggtgactcatttttctgtgtagagactcggtggcccaggcaggaggtgaaagcagccatccggaaggccctggggacccttgtgcctgttgctcgccttcaggtcaccagctgagctgcgataggaaaatctgaatggaggcagcaaacagccaaaacaaacattccccacccggccctgtgcatatgaagtctttcttcccccaactcttgaacgatgatgatattcagacgaagcattgatgttatggaagaaagaaagaaacaaacaaaatatatatatatatgtccaaaaacagacaaatccaagggtgtgaggtaaacgagtgtctgcatttagattccacaaaaccaaaatccatgttgaacaaagttaagtccgtacacagtgactttttgggtgagccgtgtgtgtctgtctgttgtgtgtgtgcctcaagccctgttttcctgtgaagatactttgagtggcagccattctctccacgtgaaccacacgtctggagcacagacaggcctctcaaggtcattgatcttacgcatttactgtttaccgaacaaatgtctgactgtgtactcgggtgtactccgcagcattgtcgactgcagtcccctgtgtttgccagagatactgtgctcgaagtagaggttttactctactcatcactgcgatttgcacattgctccgtggacactcggaggcctgcgttctgttccctataaatggaagcgtgctctgagcctgtctgcctccctcggctgctgctggtcctcagtaccagcgcccgggggtgtccacaaccacttgggacagaagaaggtggaatttcagacagaagcttgactgggtcttcaatgacaggcttggactagctgtggcccagacatcggccctgcccagaattgccaggaggaggctttgcaggctctagaggagccgcagggcctgcctgcctctggtgagtccaacaggcacaagcaagctggcgtgtggccagaggtagccggagtgtgtcacagcccctcagatgcctttccttccacctttttttattttttaagaatcccaaataactcactgaagtgtctcaaaggcgaacaagttttaccaaaatgaatcctttttcagttaacagatcaaatggatgagttctgagcctctcaagttcctttccccagttagagtggggaactgggcaagtgttaactgtgggactcactgcagcgtcctatcctaaaggcacgagaagacggaaatgcaacctgcggagctgggcttggttcccaggtcacagtttggcccccgctacaggatgctgccctgctcagagagagatttaatagggagctgaaggaatcgttagggggccagggagatgtgactgaggctggctttccacgtgaatgagacggggtcggtggagggtttggtgctacagccagtcagaagatttgcaaatgcgaacacattcctgtgtgaggcacgttaccctttgtcagttattgtgaatatgtgtattttaagcaataagattcagctggtcagacttttctgggcagtctcagtgacgcatttcctgtgctgtgattgttctgaagacagagtggctctaaccactgtgagaagcccaaataaaaattgatcccaaaaatgcta

SEQ ID NO: 200330 - DNA, 4085 bp, Homo sapiens
  Payload ID: 19521
  Gene Name: WW domain binding protein 1-like
  Uniprot ID: Q9NX94
  ENST ID: ENST00000448841
  CDS Start-End: 85-1176
gaaggaagaagagggtagaggaggagagggaggaggaggagggaggtggcggcgccgtggcggaggagcaggagcaggagggggatggagaggagaaggctcctgggtggcatggcgctcctgctcctccaggcgctgcccagccccttgtcagccagggctgaacccccgcaggataaggaagcctgtgtgggtaccaacaatcaaagctacatctgtgacacaggacactgctgtggacagtctcagtgctgcaactactactatgaactctggtggttctggctggtgtggaccatcatcatcatcctgagctgctgctgtgtttgccaccaccgccgagccaagcaccgccttcaggcccagcagcggcaacatgaaatcaacctgatcgcttaccgagaagcccacaattactcagcgctgccattttatttcaggtttttgccaaactatttactacctccttatgaggaagtggtgaaccgacctccaactcctcccccaccatacagtgccttccagctacagcagcagcagctgctgcctccacagtgtggccctgcaggtggcagtcccccgggcatcgatcccaccaggggatcccagggggcacagagcagccccttgtctgagcccagcagaagcagcacaagacccccaagcatcgctgaccctgatccctctgacctaccagttgaccgagcagccaccaaagccccagggatggagcccagtggctctgtggctggcctgggggagctggacccgggggccttcctggacaaagatgcagaatgtagggaggagctgctgaaagatgacagctctgaacacggcgcacccgacagcaaagagaagacgcctgggagacatcgccgcttcacaggtgactcgggcattgaagtgtgtgtgtgcaaccggggccaccatgacgatgacctcaaagagttcaacacactcatcgatgatgctctggatgggcccctggacttctgcgacagctgccatgtgcggccccctggtgatgaggaggaaggcctctgtcagtcctctgaggagcaggctcgagagcctgggcacccgcacctgccacggccgcccgcatgcctgctgctgaacaccatcaacgagcaggactctcccaactcccagagcagcagctcccccagctagagcaggtcctgccagcacccagcaacttggcaaagcaaccagggtaggggagaaccacgagagaagcattaagtgactttcaaagactttcagagtacagccacttggttcctttttgtttgttttccttctcctctcctgcattttcctccatctccaggtacagttcggggtgtggatgcctcttcctccacaagggcacagtgttgtggagggctaagttggttctgtgactcattcctcataccctaactccatctcctttctttaaagtcaaatctcacctacctgtttgggtcagagagatgtgttttaaaagcccccaaggaaggaggctgggactgtgccctgacatgattcttggtgatggaataggtttgtgctctgattctagtttaagagaacgttgctgtatctcagtccaggagaggcagcccatcttggccctggatgaagaaggaaacccacagaggcccagggcttgtcattgggctgccagtgtctgccaagccagcattgagctaatcctgtgggaggatgagagctactgggccgttgtatgataggttggtaggggcttgttgatctgtcaaattccaggtgacaagatctatgcaccccatgcgtccttgaggggcctcttccccgcaggctctggctggccgcaggctggttctggtgtgaaaggttatactgccttttctttgtttgtttgtttttttctctaaaaacaaacagcaaaagacagctgaaaacaagaacttcaccggtgggcaggcaagaattctcttctggaaaatgacgtttgtggctctttcccaagttggccttcaaagagcctgcctgctgttgagccagaagatgtctcgtgtgaaggctggggtggcggctgtcttggaacctctgtgagcaggaggccctaagccgcagcagtggatagaggtgcagctctctgcctctctgccctttggtctgtgttcacaggtgacccgtgtcagcctgcatcgcaagcacacaccctgcgggccttcaagtctcactgttccgtatgaggaaacagacagcggactgaggaagcgatggccccagagaaagggcccctgtagcctggctctcacacagtattttatctttgattctgaataaatattttttgtggggttttttttttttttttggtggcagttgtttgttttaaactgaccacttggaagaaacaccttggttatctgtggttttcatgccttgtccctgcctctacccccaccccttttgagtcgggtgactcatttttctgtgtagagactcggtggcccaggcaggaggtgaaagcagccatccggaaggccctggggacccttgtgcctgttgctcgccttcaggtcaccagctgagctgcgataggaaaatctgaatggaggcagcaaacagccaaaacaaacattccccacccggccctgtgcatatgaagtctttcttcccccaactcttgaacgatgatgatattcagacgaagcattgatgttatggaagaaagaaagaaacaaacaaaatatatatatatatgtccaaaaacagacaaatccaagggtgtgaggtaaacgagtgtctgcatttagattccacaaaaccaaaatccatgttgaacaaagttaagtccgtacacagtgactttttgggtgagccgtgtgtgtctgtctgttgtgtgtgtgcctcaagccctgttttcctgtgaagatactttgagtggcagccattctctccacgtgaaccacacgtctggagcacagacaggcctctcaaggtcattgatcttacgcatttactgtttaccgaacaaatgtctgactgtgtactcgggtgtactccgcagcattgtcgactgcagtcccctgtgtttgccagagatactgtgctcgaagtagaggttttactctactcatcactgcgatttgcacattgctccgtggacactcggaggcctgcgttctgttccctataaatggaagcgtgctctgagcctgtctgcctccctcggctgctgctggtcctcagtaccagcgcccgggggtgtccacaaccacttgggacagaagaaggtggaatttcagacagaagcttgactgggtcttcaatgacaggcttggactagctgtggcccagacatcggccctgcccagaattgccaggaggaggctttgcaggctctagaggagccgcagggcctgcctgcctctggtgagtccaacaggcacaagcaagctggcgtgtggccagaggtagccggagtgtgtcacagcccctcagatgcctttccttccacctttttttattttttaagaatcccaaataactcactgaagtgtctcaaaggcgaacaagttttaccaaaatgaatcctttttcagttaacagatcaaatggatgagttctgagcctctcaagttcctttccccagttagagtggggaactgggcaagtgttaactgtgggactcactgcagcgtcctatcctaaaggcacgagaagacggaaatgcaacctgcggagctgggcttggttcccaggtcacagtttggcccccgctacaggatgctgccctgctcagagagagatttaatagggagctgaaggaatcgttagggggccagggagatgtgactgaggctggctttccacgtgaatgagacggggtcggtggagggtttggtgctacagccagtcagaagatttgcaaatgcgaacacattcctgtgtgaggcacgttaccctttgtcagttattgtgaatatgtgtattttaagcaataagattcagctggtcagacttttctgggcagtctcagtgacgcatttcctgtgctgtgattgttctgaagacagagtggctctaaccactgtgagaagccc

SEQ ID NO: 200331 - DNA, 1944 bp, Homo sapiens
  Payload ID: 19522
  Gene Name: WW domain binding protein 2
  Uniprot ID: Q969T9
  ENST ID: ENST00000254806
  CDS Start-End: 124-909
gggccagcctccgcactcgagctttgattggctgactctaataagaagacgccactaggggcggggcgaagaggggcgcaagctcattgcgttttgagtctcgggacccctgttggagagactatggcgctcaacaagaatcactcggagggcggcggagtgatcgtcaataacaccgagagcatcctaatgtcctatgatcacgtggaactcacattcaatgacatgaagaacgtgccagaagccttcaaagggaccaagaaaggcactgtctaccttaccccttaccgggtcatctttctgtccaagggcaaggatgccatgcagtccttcatgatgccattttatctcatgaaagactgtgagatcaagcagcccgtatttggtgcaaactacatcaagggaacagtgaaggcggaagcgggaggtggctgggaaggctctgcttcctacaagttgactttcacggcagggggcgccattgagttcggacagcggatgctccaggtggcatctcaagcctccagaggtgaagtccccagtggagcctatggctactcttacatgcccagcggggcctatgtctatcccccgccagtcgccaatggaatgtacccctgccctcctggctacccctatccaccgcccccacctgagttctatccaggaccccccatgatggacggggccatgggatacgtgcagcccccaccaccgccctaccctgggcccatggaacctccggtcagcggccccgatgtcccctccactcctgcagccgaagccaaggccgcagaagcagccgccagcgcctattacaacccaggcaatcctcacaacgtctacatgcccacgagccagccgccgccacctccctactacccaccggaagataagaagacccagtaggccctcctgcctccctgcctcccaccctcatctctctaccctacccctcccatcggggctgtgctggggcttggggaggggagggggcgccttgttctccctccaggtctgatcataaacaattaccaggaactagcattgtgggacattagggcccccggcctcgggagaggtgccgcccagcttcccatgccagcccggagcccacagtgctgcccagcgtacctccctcaccgtctggggctcttctgggagcacggagcatcccctgttcctgtttcactctcagcttctcccctcgaagggactctctggccacctcctccaccgcagtccagctccctcagtctggcacccactgctacactcagcctcatgagccacttcagaccagccaggtgtcttcccgggccctgccagaccctgctcacattccctctgctggtctgtgctggtctcagaaggccaccgcgcccgcattccactcagccagggtccagctgcagcccccgccacccttccttcccttccctgtcctgggtcatgttgttgccaccctgtgtgacttttgaagctgtaaaatgagcttccagggcttgggtggcgtcggggcagggccgccgaggctgggaggaagcccttctgccttttgctggtgtttctggaatttgctttccctcacctctcacttccttctagaaggagcttcctgactggaaccagagaatgcatgtctgtccacttggtggctgctgggtggggccgggaacaagggcccctgaccctgtgtgctggccgggacctgccaccagccccccagcctgcttcttccccttaagctttgtgcccctggatgcgctaacattcactcttgtttgtccctggactggccatgaagtgaggagatggttatttaaagagaattccctatttatttgacaaaaaatccagttaatatattaatgtgaaataaaccctgtttgcacctcgatttgtttgctgaaaatgtgaaatagtaaaaatgaaataactgga

SEQ ID NO: 200332 - DNA, 928 bp, Homo sapiens
  Payload ID: 19522
  Gene Name: WW domain binding protein 2
  ENST ID: ENST00000433525
  CDS Start-End: 39-689
attgcgttttgagtctcgggacccctgttggagagactatggcgctcaacaagaatcactcggagggcggcggagtgatcgtcaataacaccgagagcatcctaatgtcctatgatcacgtggaactcacattcaatgacatgaagaacgtgccagaagccttcaaagggaccaagaaaggcactgtctaccttaccccttaccgggtcatctttctgtccaagggcaaggatgccatgcagtccttcatgatgccattttatctcatgaaagactgtgagatcaagcagcccgtatttggtgcaaactacatcaagggaacagtgaaggcggaagcgggaggtggctgggaaggctctgcttcctacaagttgactttcacggcagggggcgccattgagttcggacagcggatgctccaggtggcatctcaagagttctatccaggaccccccatgatggacggggccatgggatacgtgcagcccccaccaccgccctaccctgggcccatggaacctccggtcagcggccccgatgtcccctccactcctgcagccgaagccaaggccgcagaagcagccgccagcgcctattacaacccaggcaatcctcacaacgtctacatgcccacgagccagccgccgccacctccctactacccaccggaagataagaagacccagtaggccctcctgcctccctgcctcccaccctcatctctctaccctacccctcccatcggggctgtgctggggcttggggaggggagggggcgccttgttctccctccaggtctgatcataaacaattaccaggaactagcattgtgggacattagggcccccggcctcgggagaggtgccgcccagcttcccatgccagcccggagcccacagtgctgcccagcgtacctccctcaccgtct

SEQ ID NO: 200333 - DNA, 610 bp, Homo sapiens
  Payload ID: 19522
  Gene Name: WW domain binding protein 2
  ENST ID: ENST00000593002
  CDS Start-End: 110-610
ggaaggatcctggaggaccaaagttcgggtgtcgaggaagtgggcggtgggtggtgggtggtggggaataagcccctgaagagggagcactgatggagtgagcatcctaatgtcctatgatcacgtggaactcacattcaatgacatgaagaacgtgccagaagccttcaaagggaccaagaaaggcactgtctaccttaccccttaccgggtcatctttctgtccaagggcaaggatgccatgcagtccttcatgatgccattttatctcatgaaagactgtgagatcaagcagcccgtatttggtgcaaactacatcaagggaacagtgaaggcggaagcgggaggtggctgggaaggctctgcttcctacaagttgactttcacggcagggggcgccattgagttcggacagcggatgctccaggtggcatctcaagcctccagaggtgaagtccccagtggagcctatggctactcttacatgcccagcggggcctatgtctatcccccgccagtcgccaatggaatgtacccctgccctcctggctacccctatccaccgcccccacctgagttctatccaggaccccccatgatggacggggcc

SEQ ID NO: 200334 - DNA, 676 bp, Homo sapiens
  Payload ID: 19522
  Gene Name: WW domain binding protein 2
  ENST ID: ENST00000586257
  CDS Start-End: 1-617
gtggctgggaaggctctgcttcctacaagttgactttcacggcagggggcgccattgagttcggacagcggatgctccaggtggcatctcaagcctccagaggtgaagtccccagtggagcctatggctactcttacatgcccagcggggcctatgtctatcccccgccagtcgccaatggaatgtacccctgccctcctggctacccctatccaccgcccccacctgagttctatccaggaccccccatgatggacggggccatgggatacgtgcagcccccaccaccgccctaccctgggcccatggaacctccggtcagcggccccgatgtcccctccactcctgcagccgaagccaaggccgcagaagcagccgccagcgcctattacaacccaggcaatcctcacaacgtctacatgcccacgagccagccgccgccacctccctactacccaccggaagataagaagacccaaaggagcttcctgactggaaccagagaatgcatgtctgtccacttggtggctgctgggtggggccgggaacaagggcccctgaccctgtgtgctggccgggacctgccaccagccccccagcctgcttcttccccttaagctttgtgcccctggatgcgctaacattcactcttgtttgtccctggactggccatgaa

SEQ ID NO: 200335 - DNA, 480 bp, Homo sapiens
  Payload ID: 19522
  Gene Name: WW domain binding protein 2
  ENST ID: ENST00000587374
  CDS Start-End: 139-480
gacccctgttggagagactatggcgctcaacaagaatcactcggagggcggcggagtgatcgtcaataacaccgagaggtcatctttctgtccaagggcaaggatgccatgcagtccttcatgatgccattttatctcatgaaagactgtgagatcaagcagcccgtatttggtgcaaactacatcaagggaacagtgaaggcggaagcgggaggtggctgggaaggctctgcttcctacaagttgactttcacggcagggggcgccattgagttcggacagcggatgctccaggtggcatctcaagcctccagaggtgaagtccccagtggagcctatggctactcttacatgcccagcggggcctatgtctatcccccgccagtcgccaatggaatgtacccctgccctcctggctacccctatccaccgcccccacctggaccccccatgatggacggggccatgggatacgtgcag

SEQ ID NO: 200336 - DNA, 1374 bp, Homo sapiens
  Payload ID: 19522
  Gene Name: WW domain binding protein 2
  ENST ID: ENST00000588373
  CDS Start-End: 13-120
gttggagagactatggcgctcaacaagaatcactcggagggcggcggagtgatcgtcaataacaccgagaggcttgaaaaacaaaccagcaaaaacagaacatctatcacaaggacttaaaagaaaatagaagagttggccgggcgcagtggctcacgcctgtaatccctgcactttgggaggccgaggcaggtggatcacgaagtcaggagatcgagaccatcctggctaacacgcatcctaatgtcctatgatcacgtggaactcacattcaatgacatgaagaacgtgccagaagccttcaaagggaccaagaaaggcactgtctaccttaccccttaccgggtcatctttctgtccaagggcaaggatgccatgcagtccttcatgatgccattttatctcatgaaagactgtgagatcaagcagcccgtatttggtgcaaactacatcaagggaacagtgaaggcggaagcgggaggtggctgggaaggctctgcttcctacaagttgactttcacggcagggggcgccattgagttcggacagcggatgctccaggtggcatctcaagcctccagaggtgaagtccccagtggagcctatggctactcttacatgcccagcggggcctatgtctatcccccgccagtcgccaatggaatgtacccctgccctcctggctacccctatccaccgcccccacctgagttctatccaggaccccccatgatggacggggccatgggatacgtgcagcccccaccaccgccctaccctgggcccatggaacctccggtcagcggccccgatgtcccctccactcctgcagccgaagccaaggccgcagaagcagccgccagcgcctattacaacccaggcaatcctcacaacgtctacatgcccacgagccagccgccgccacctccctactacccaccggaagataagaagacccagtaggccctcctgcctccctgcctcccaccctcatctctctaccctacccctcccatcggggctgtgctggggcttggggaggggagggggcgccttgttctccctccaggtctgatcataaacaattaccaggaactagcattgtgggacattagggcccccggcctcgggagaggtgccgcccagcttcccatgccagcccggagcccacagtgctgcccagcgtacctccctcaccgtctggggctcttctgggagcacggagcatcccctgttcctgtttcactctcagcttctcccctcgaagggactctctggccacctcctccaccgcagtccagctccctcagtctggcacccactgctacactcagcctcatgagccacttcagaccagccaggtgtcttcccggg

SEQ ID NO: 200337 - DNA, 1745 bp, Homo sapiens
  Payload ID: 19522
  Gene Name: WW domain binding protein 2
  ENST ID: ENST00000590221
  CDS Start-End: 10-783
ggagagactatggcgctcaacaagaatcactcggagggcggcggagtgatcgtcaataacaccgagagcatcctaatgtcctatgatcacgtggaactcacattcaatgacatgaagaacgtgccagaagccttcaaagggaccaagaaaggcactgtctaccttaccccttaccgggtcatctttctgtccaagggcaaggatgccatgcagtccttcatgatgccattttatctcatgaaagactgtgagatcaagcagcccgtatttggtgcaaactacatcaagggaacagtgaaggcggaagcgggaggtggctgggaaggctctgcttcctacaagttgactttcacggcagggggcgccattgagttcggacagcggatgctccaggtggcatctcaagcctccagaggtgaagtccccagtggagcctatggctactcttacatgcccagcggggcctatgtctatcccccgccagtcgccaatggaatgtacccctgccctcctggctacccctatccaccgcccccacctggaccccccatgatggacggggccatgggatacgtgcagcccccaccaccgccctaccctgggcccatggaacctccggtcagcggccccgatgtcccctccactcctgcagccgaagccaaggccgcagaagcagccgccagcgcctattacaacccaggcaatcctcacaacgtctacatgcccacgagccagccgccgccacctccctactacccaccggaagataagaagacccagtaggccctcctgcctccctgcctcccaccctcatctctctaccctacccctcccatcggggctgtgctggggcttggggaggggagggggcgccttgttctccctccaggtctgatcataaacaattaccaggaactagcattgtgggacattagggcccccggcctcgggagaggtgccgcccagcttcccatgccagcccggagcccacagtgctgcccagcgtacctccctcaccgtctggggctcttctgggagcacggagcatcccctgttcctgtttcactctcagcttctcccctcgaagggactctctggccacctcctccaccgcagtccagctccctcagtctggcacccactgctacactcagcctcatgagccacttcagaccagccaggtgtcttcccgggccctgccagaccctgctcacattccctctgctggtctgtgctggtctcagaaggccaccgcgcccgcattccactcagccagggtccagctgcagcccccgccacccttccttcccttccctgtcctgggtcatgttgttgccaccctgtgtgacttttgaagctgtaaaatgagcttccagggcttgggtggcgtcggggcagggccgccgaggctgggaggaagcccttctgccttttgctggtgtttctggaatttgctttccctcacctctcacttccttctagaaggagcttcctgactggaaccagagaatgcatgtctgtccacttggtggctgctgggtggggccgggaacaagggcccctgaccctgtgtgctggccgggacctgccaccagccccccagcctgcttcttccccttaagctttgtgcccctggatgcgctaacattcactcttgtttgtccctggactggccatgaagtgaggagatggttatttaaagagaattccctatttatttgacaaaaaatccagttaatatatta

SEQ ID NO: 200338 - DNA, 1406 bp, Homo sapiens
  Payload ID: 19522
  Gene Name: WW domain binding protein 2
  ENST ID: ENST00000591831
  CDS Start-End: 12-707
ttggagagactatggcgctcaacaagaatcactcggagggcggcggagtgatcgtcaataacaccgagagcatcctaatgtcctatgatcacgtggaactcacattcaatgacatgaagaacgtgccagaagccttcaaagggaccaagaaaggcactgtctaccttaccccttaccgggtcatctttctgtccaagggcaaggatgccatgcagtccttcatgatgccattttatctcatgaaagactgtgagatcaagcagcccgtatttggtgcaaactacatcaagggaacagtgaaggcggaagcgggaggtggctgggaaggctctgcttcctacaagttgactttcacggcagggggcgccattgagttcggacagcggatgctccaggtggcatctcaagcctccagaggtgaagtccccagtggagcctatggctactcttacatgcccagcggggcctatgtctatcccccgccagtcgccaatggaatgtacccctgccctcctggctacccctatccaccgcccccacctgagttctatccaggaccccccatgatggacggggccatgggatacgtgcagcccccaccaccgccctaccctgggcccatggaacctccggtcagcggccccgatgtcccctccactcctgcagagccagccgccgccacctccctactacccaccggaagataagaagacccagtaggccctcctgcctccctgcctcccaccctcatctctctaccctacccctcccatcggggctgtgctggggcttggggaggggagggggcgccttgttctccctccaggtctgatcataaacaattaccaggaactagcattgtgggacattagggcccccggcctcgggagaggtgccgcccagcttcccatgccagcccggagcccacagtgctgcccagcgtacctccctcaccgtctggggctcttctgggagcacggagcatcccctgttcctgtttcactctcagcttctcccctcgaagggactctctggccacctcctccaccgcagtccagctccctcagtctggcacccactgctacactcagcctcatgagccacttcagaccagccagaaggagcttcctgactggaaccagagaatgcatgtctgtccacttggtggctgctgggtggggccgggaacaagggcccctgaccctgtgtgctggccgggacctgccaccagccccccagcctgcttcttccccttaagctttgtgcccctggatgcgctaacattcactcttgtttgtccctggactggccatgaagtgaggagatggttatttaaagagaattccctatttatttgacaaaaaatccagttaatatattaatgtgaaataaaccctgtttgcacc

SEQ ID NO: 200339 - DNA, 2225 bp, Homo sapiens
  Payload ID: 19522
  Gene Name: WW domain binding protein 2
  Uniprot ID: Q969T9
  ENST ID: ENST00000591399
  CDS Start-End: 426-1211
attgcacaggacctcacagaacgctgctgtttcctgatcttttctagtgaggcagctttgtttcttcacataggagacctccctggaaagcgaagtcaagcaggtggatctagaggttggccaccacagtcaggaaagcagctgtctactgaaaagcaaactctaattccttaacattaacgagtaccggaactaccacgtgggaagtgcagccccctctctccgcctcacggattcagctcggaggaggaactggaaggagggagtaaactattaccacgtgacgttcgggtcaggtgtttgggccagcctccgcactcgagctttgattggctgactctaataagaagacgccactaggggcggggcgaagaggggcgcaagctcattgcgttttgagtctcgggacccctgttggagagactatggcgctcaacaagaatcactcggagggcggcggagtgatcgtcaataacaccgagagcatcctaatgtcctatgatcacgtggaactcacattcaatgacatgaagaacgtgccagaagccttcaaagggaccaagaaaggcactgtctaccttaccccttaccgggtcatctttctgtccaagggcaaggatgccatgcagtccttcatgatgccattttatctcatgaaagactgtgagatcaagcagcccgtatttggtgcaaactacatcaagggaacagtgaaggcggaagcgggaggtggctgggaaggctctgcttcctacaagttgactttcacggcagggggcgccattgagttcggacagcggatgctccaggtggcatctcaagcctccagaggtgaagtccccagtggagcctatggctactcttacatgcccagcggggcctatgtctatcccccgccagtcgccaatggaatgtacccctgccctcctggctacccctatccaccgcccccacctgagttctatccaggaccccccatgatggacggggccatgggatacgtgcagcccccaccaccgccctaccctgggcccatggaacctccggtcagcggccccgatgtcccctccactcctgcagccgaagccaaggccgcagaagcagccgccagcgcctattacaacccaggcaatcctcacaacgtctacatgcccacgagccagccgccgccacctccctactacccaccggaagataagaagacccagtaggccctcctgcctccctgcctcccaccctcatctctctaccctacccctcccatcggggctgtgctggggcttggggaggggagggggcgccttgttctccctccaggtctgatcataaacaattaccaggaactagcattgtgggacattagggcccccggcctcgggagaggtgccgcccagcttcccatgccagcccggagcccacagtgctgcccagcgtacctccctcaccgtctggggctcttctgggagcacggagcatcccctgttcctgtttcactctcagcttctcccctcgaagggactctctggccacctcctccaccgcagtccagctccctcagtctggcacccactgctacactcagcctcatgagccacttcagaccagccaggtgtcttcccgggccctgccagaccctgctcacattccctctgctggtctgtgctggtctcagaaggccaccgcgcccgcattccactcagccagggtccagctgcagcccccgccacccttccttcccttccctgtcctgggtcatgttgttgccaccctgtgtgacttttgaagctgtaaaatgagcttccagggcttgggtggcgtcggggcagggccgccgaggctgggaggaagcccttctgccttttgctggtgtttctggaatttgctttccctcacctctcacttccttctagaaggagcttcctgactggaaccagagaatgcatgtctgtccacttggtggctgctgggtggggccgggaacaagggcccctgaccctgtgtgctggccgggacctgccaccagccccccagcctgcttcttccccttaagctttgtgcccctggatgcgctaacattcactcttgtttgtccctggactggccatgaagtgaggagatggttatttaaagagaattccctatttatttgacaaaaaatccagttaatatattaatgtgaaataaaccctgtttgcacctcgatttgtttgctgaaaatgtgaaat

SEQ ID NO: 200340 - DNA, 1895 bp, Homo sapiens
  Payload ID: 19522
  Gene Name: WW domain binding protein 2
  ENST ID: ENST00000585462
  CDS Start-End: 151-870
tctcgggacccctgttggagagactatggcgctcaacaagaatcactcggagggcggcggagtgatcgtcaataacaccgagaggtgaaaacactgcggaaggatcctggaggaccaaagttcgggtgtcgaggaagtgggcgcatcctaatgtcctatgatcacgtggaactcacattcaatgacatgaagaacgtgccagaagccttcaaagggaccaagaaaggcactgtctaccttaccccttaccgggtcatctttctgtccaagggcaaggatgccatgcagtccttcatgatgccattttatctcatgaaagactgtgagatcaagcagcccgtatttggtgcaaactacatcaagggaacagtgaaggcggaagcgggaggtggctgggaaggctctgcttcctacaagttgactttcacggcagggggcgccattgagttcggacagcggatgctccaggtggcatctcaagcctccagaggtgaagtccccagtggagcctatggctactcttacatgcccagcggggcctatgtctatcccccgccagtcgccaatggaatgtacccctgccctcctggctacccctatccaccgcccccacctgagttctatccaggaccccccatgatggacggggccatgggatacgtgcagcccccaccaccgccctaccctgggcccatggaacctccggtcagcggccccgatgtcccctccactcctgcagccgaagccaaggccgcagaagcagccgccagcgcctattacaacccaggcaatcctcacaacgtctacatgcccacgagccagccgccgccacctccctactacccaccggaagataagaagacccagtaggccctcctgcctccctgcctcccaccctcatctctctaccctacccctcccatcggggctgtgctggggcttggggaggggagggggcgccttgttctccctccaggtctgatcataaacaattaccaggaactagcattgtgggacattagggcccccggcctcgggagaggtgccgcccagcttcccatgccagcccggagcccacagtgctgcccagcgtacctccctcaccgtctggggctcttctgggagcacggagcatcccctgttcctgtttcactctcagcttctcccctcgaagggactctctggccacctcctccaccgcagtccagctccctcagtctggcacccactgctacactcagcctcatgagccacttcagaccagccaggtgtcttcccgggccctgccagaccctgctcacattccctctgctggtctgtgctggtctcagaaggccaccgcgcccgcattccactcagccagggtccagctgcagcccccgccacccttccttcccttccctgtcctgggtcatgttgttgccaccctgtgtgacttttgaagctgtaaaatgagcttccagggcttgggtggcgtcggggcagggccgccgaggctgggaggaagcccttctgccttttgctggtgtttctggaatttgctttccctcacctctcacttccttctagaaggagcttcctgactggaaccagagaatgcatgtctgtccacttggtggctgctgggtggggccgggaacaagggcccctgaccctgtgtgctggccgggacctgccaccagccccccagcctgcttcttccccttaagctttgtgcccctggatgcgctaacattcactcttgtttgtccctggactggccatgaagtgaggagatggttatttaaagagaattccctatttatttgacaaaaaatccagttaatatattaatgtgaaataaaccctgtttgcacctcgatttgtttgctgaaaatgtgaaatagtaaaaatga

SEQ ID NO: 200341 - DNA, 568 bp, Homo sapiens
  Payload ID: 19522
  Gene Name: WW domain binding protein 2
  ENST ID: ENST00000589642
  CDS Start-End: 112-568
agttcgggtgtcgaggaagtgggcggtgggtggtgggtggtggggaataagcccctgaagagggagcactgatggagtgaggtcatctttctgtccaagggcaaggatgccatgcagtccttcatgatgccattttatctcatgaaagactgtgagatcaagcagcccgtatttggtgcaaactacatcaagggaacagtgaaggcggaagcgggaggtggctgggaaggctctgcttcctacaagttgactttcacggcagggggcgccattgagttcggacagcggatgctccaggtggcatctcaagcctccagaggtgaagtccccagtggagcctatggctactcttacatgcccagcggggcctatgtctatcccccgccagtcgccaatggaatgtacccctgccctcctggctacccctatccaccgcccccacctgagttctatccaggaccccccatgatggacggggccatgggatacgtgcagcccccaccaccgccctaccctgggcccatggaacctccggtcagcggccccgatgtcccctccactcctgcag

SEQ ID NO: 200342 - DNA, 1867 bp, Homo sapiens
  Payload ID: 19522
  Gene Name: WW domain binding protein 2
  ENST ID: ENST00000626827
  CDS Start-End: 124-819
gggccagcctccgcactcgagctttgattggctgactctaataagaagacgccactaggggcggggcgaagaggggcgcaagctcattgcgttttgagtctcgggacccctgttggagagactatggcgctcaacaagaatcactcggagggcggcggagtgatcgtcaataacaccgagagcatcctaatgtcctatgatcacgtggaactcacattcaatgacatgaagaacgtgccagaagccttcaaagggaccaagaaaggcactgtctaccttaccccttaccgggtcatctttctgtccaagggcaaggatgccatgcagtccttcatgatgccattttatctcatgaaagactgtgagatcaagcagcccgtatttggtgcaaactacatcaagggaacagtgaaggcggaagcgggaggtggctgggaaggctctgcttcctacaagttgactttcacggcagggggcgccattgagttcggacagcggatgctccaggtggcatctcaagcctccagaggtgaagtccccagtggagcctatggctactcttacatgcccagcggggcctatgtctatcccccgccagtcgccaatggaatgtacccctgccctcctggctacccctatccaccgcccccacctgagttctatccaggaccccccatgatggacggggccatgggatacgtgcagcccccaccaccgccctaccctgggcccatggaacctccggtcagcggccccgatgtcccctccactcctgcagagccagccgccgccacctccctactacccaccggaagataagaagacccagtaggccctcctgcctccctgcctcccaccctcatctctctaccctacccctcccatcggggctgtgctggggcttggggaggggagggggcgccttgttctccctccaggtctgatcataaacaattaccaggaactagcattgtgggacattagggcccccggcctcgggagaggtgccgcccagcttcccatgccagcccggagcccacagtgctgcccagcgtacctccctcaccgtctggggctcttctgggagcacggagcatcccctgttcctgtttcactctcagcttctcccctcgaagggactctctggccacctcctccaccgcagtccagctccctcagtctggcacccactgctacactcagcctcatgagccacttcagaccagccaggtgtcttcccgggccctgccagaccctgctcacattccctctgctggtctgtgctggtctcagaaggccaccgcgcccgcattccactcagccagggtccagctgcagcccccgccacccttccttcccttccctgtcctgggtcatgttgttgccaccctgtgtgacttttgaagctgtaaaatgagcttccagggcttgggtggcgtcggggcagggccgccgaggctgggaggaagcccttctgccttttgctggtgtttctggaatttgctttccctcacctctcacttccttctagaaggagcttcctgactggaaccagagaatgcatgtctgtccacttggtggctgctgggtggggccgggaacaagggcccctgaccctgtgtgctggccgggacctgccaccagccccccagcctgcttcttccccttaagctttgtgcccctggatgcgctaacattcactcttgtttgtccctggactggccatgaagtgaggagatggttatttaaagagaattccctatttatttgacaaaaaatccagttaatatattaatgtgaaataaaccctgtttgcacctcgatttgtttgctgaaaatgtgaaatagtaaaaatgaaataactgga

SEQ ID NO: 200343 - DNA, 2623 bp, Homo sapiens
  Payload ID: 19523
  Gene Name: WW domain binding protein 4
  Uniprot ID: O75554
  ENST ID: ENST00000379487
  CDS Start-End: 401-1531
agaaggaggatggaggttttgggccccaggggaggacacagagacggcgggatggcgcagggacttgaggcttgagatcccgtccttcagctcaggtcccgtcgcgcttttaccccttcccggtgacctcaacccctttataccgaccccacctctttggagccgggagtaccgcccctgtagggggaggggagaggaggcgatttcgaacgcggattggatcgtctgggcacccgtagttgggaacagcggaacgctggtcccggggactgagtaaggtgtctggatcggagggaggttcgggtgggcatcgggcggctggaagagctcgactcgtcccgctgggaaagcgcgagtctgagtggaaccctggacgacttgcagagcggctggcgcagtcatggcggactactggaagtcacagccaaagaaattctgtgattactgcaagtgctggatagcagacaataggcctagtgttgaatttcatgaaagaggaaagaatcataaggaaaatgtggcaaaaaggatcagtgagattaaacagaaaagcctggataaggcaaaggaagaagaaaaggcatcaaaggagtttgctgcaatggaggcagctgccctgaaagcataccaagaggatttgaaaagacttggcttagagtcagaaattttggagccaagcataacaccagtaaccagcactatcccacctacctcgacatcaaatcaacagaaagaaaagaaagaaaagaagaaaagaaaaaaagatccttcaaagggcagatgggtagaaggcataacctctgagggttaccattactattatgatcttatctcaggagcatctcagtgggagaaacctgaaggatttcaaggagacttaaaaaagacagcagtgaagaccgtttgggtagaaggtttaagtgaagatggttttacctattactataatacagaaacaggagaatccagatgggagaaacctgatgatttcattccacacactagtgatctgccttctagtaaggtcaatgaaaattcacttggcaccctagatgaatccaaatcatcagattcgcatagtgattctgatggggaacaggaagcagaagaaggaggggtctctacagagacagaaaagccaaaaataaagtttaaggaaaaaaataaaaatagtgatggaggaagtgacccagaaacacagaaagaaaaaagtattcagaaacagaattcattaggttcaaatgaagaaaaatcgaaaactcttaagaaatcaaacccatatggagaatggcaagaaattaaacaagaggttgagtctcatgaggaggtagatttggaacttccaagcactgaaaatgagtatgtatcaacttcagaagctgatggtggcggagaacccaaagtggtatttaaagaaaaaacagtcacttctcttggagttatggcagatggagtggccccagtcttcaaaaagagaagaactgaaaatggaaaatctagaaatttaaggcaacgaggtgatgatcaatagttgcaggagagctttttgtacatgcttttaggacagaatggagacttatacacccaaagtttatctgtgtttgtttgtaagtattatgatgctaaaaatttagatttattctaaatgtatttgatgtgaattaaaataaatattttttcatgtgaaatttattttggttcctaaaatggaagcctaccacattgcattgtaatacagtgtattatgttcagtgtctaaaaactgctaattaagtcataatttaagatgctatgtatctgttatttaaaacatggagaaacagggcctttattccattcatattcataagagcatatttatcctgcattgaaaatgcattacttttgcacattgatattaactgttgtccaacaaataagtatcggagtacgtgagaatattcccagcccagtgatgatttggttctgaggctgatgtgagaaagctgatgtaaaaaatgtatgcatattggcttaccttactcaatttaaagtcaaaagccaacagccaggagcagctcaggtacttcagatgtgcttaatatggagtgaaaactggaccagaggtggaaagatgtatttgccccagttcacttcaaagcagcaaacgttgtttaagcattttagtttgaaccaggcattgtgttaggaatccagggataaagatgaatgaaatgtatttctgttcttcaggagttcacattctagcatatgccttttttcccccagtcatgcactctttttagcagtcttatatgtactagaaaagattttttaaagtttatttaaagctgtgtagatgaaggcttgatctaaaatagtataaggtctccagcttcagtaaaagtttttagtgtttacttaaattagtaatttctcactttctgtctggttaaaatgtcttaaaaagtagaattttcttctttaatccgtttagtagttacctcccttttacttttcaaattcacaaaattacatttctcataaattgtatagtatttaacttataatagttaatatttgtctttttaagatgactgtacatgtaagaaaaaagcttattaaaaacttgatcaaagaataa

SEQ ID NO: 200344 - DNA, 921 bp, Homo sapiens
  Payload ID: 19524
  Gene Name: WW domain binding protein 5
  Uniprot ID: Q9UHQ7
  ENST ID: ENST00000372656
  CDS Start-End: 226-540
actggtgacgtagatctcatgtgaccaggagtcgacgtgtgcagaagtcctggtaatctggtccttgttcccgtctggataccagcttccttcagcagcgcaggcggtggtccctgaggcccgtggaaggagtcaaacttgcgggaattttgcagaagtcattgtattcaaagaagaataagcaagaaagaaaagaaggaaggaagagaggtagacagatacaagatgaaatcctgtcaaaaaatggaaggaaaaccagaaaatgagagtgaaccaaagcatgaggaagagccaaagcctgaggaaaagccagaagaggaggagaagctagaggaggaggccaaagcaaaaggaacttttagagaaaggctgattcaatctctccaggagtttaaagaagatatacacaacaggcatttaagcaatgaagatatgtttagagaagtggatgaaatagatgagataaggagagtcagaaacaaacttatagtgatgcgttggaaggttaatcgaaaccatccttacccctatttaatgtagtttaccttgatttttatctgatattaacaataccatatagcttgctttttattagcatttcctgatattcctttgtccatatttctacttataacctgttgctattaatggttttagatgtatctcttgttatctgcatctcattgtttattgtattttgaaccaatctacaagtctctgtcttttaataaaagaactttacacatttgtaaaaaagaggttcttggtaagatataaaatggaaaaaggctaagtaatatgtgaatatcatatttttgaaaggtaaaaagtacatttgtatattacatatatggacataacttgtgaaggatgaaagaaagtacagcctctcggtggtgggattatgaatgatttttctcc

SEQ ID NO: 200345 - DNA, 1096 bp, Homo sapiens
  Payload ID: 19524
  Gene Name: WW domain binding protein 5
  Uniprot ID: Q9UHQ7
  ENST ID: ENST00000372661
  CDS Start-End: 312-626
cgagctcactggtgacgtagatctcatgtgaccaggagtcgacgtgtgcagaagtcctggtaatctggtccttgttcccgtctggataccagcttccttcagcagcgcaggcggtggtccctgaggcccgtggaaggagtcaaacttgcgggaattttgcagtttatctgcagggctgttgtttccagcaagacccaaagctagaaaaggaggaggaagaaactgacccgatcagtgccagaagtcattgtattcaaagaagaataagcaagaaagaaaagaaggaaggaagagaggtagacagatacaagatgaaatcctgtcaaaaaatggaaggaaaaccagaaaatgagagtgaaccaaagcatgaggaagagccaaagcctgaggaaaagccagaagaggaggagaagctagaggaggaggccaaagcaaaaggaacttttagagaaaggctgattcaatctctccaggagtttaaagaagatatacacaacaggcatttaagcaatgaagatatgtttagagaagtggatgaaatagatgagataaggagagtcagaaacaaacttatagtgatgcgttggaaggttaatcgaaaccatccttacccctatttaatgtagtttaccttgatttttatctgatattaacaataccatatagcttgctttttattagcatttcctgatattcctttgtccatatttctacttataacctgttgctattaatggttttagatgtatctcttgttatctgcatctcattgtttattgtattttgaaccaatctacaagtctctgtcttttaataaaagaactttacacatttgtaaaaaagaggttcttggtaagatataaaatggaaaaaggctaagtaatatgtgaatatcatatttttgaaaggtaaaaagtacatttgtatattacatatatggacataacttgtgaaggatgaaagaaagtacagcctctcggtggtgggattatgaatgatttttctccttttgcttgtttgtattttctatattcctaaaattaacacacattattattgctagaataataaaagttttataaaaaagaagcaacaa

SEQ ID NO: 200346 - DNA, 2839 bp, Homo sapiens
  Payload ID: 19525
  Gene Name: WW domain containing adaptor with coiled-coil
  Uniprot ID: Q9BTA9
  ENST ID: ENST00000347934
  CDS Start-End: 268-1902
cgtcgtcttgcccccctccccccggttcgcggtgccgccgtgtagttggcgccgctgccccggctgagagtgagcgtggtgtcgacggagggagatggcccgggagcgccggcgccagtaactgggagctgatgagagtcgccgagggcgcgccgggcccaggtgccggggctgcccgccgcccgccgccgccgccgcctgcgcgcccgcccgcctttcgcggccgctctcccccctccccgacacacactcacaggccgggcattgatggtaatgtatgcgaggaaacagcagagactcagtgatggctgtcacgaccggaggggggactcgcagccttaccaggcacttaagtattcatcgaagagtcaccccagtagcggtgatcacagacatgaaaagatgcgagacgccggagatccttcaccaccaaataaaatgttgcggagatctgatagtcctgaaaacaaatacagtgacagcacaggtcacagtaaggccaaaaatgtgcatactcacagagttagagagagggatggtgggaccagttactctccacaagaaaattcacacaaccacagtgctcttcatagttcaaattcacattcttctaatccaagcaataacccaagcaaaacttcagatgcaccttatgattctgcagatgactggtctgagcatattagctcttctgggaaaaagtactactacaattgtcgaacagaagtttcacaatgggaaaaaccaaaagagtggcttgaaagagaacagagacaaaaagaagcaaacaagatggcagtcaacagcttcccaaaagatagggattacagaagagaggtgatgcaagcaacagccactagtgggtttgccagtggaaaatctacatcaggagacaaacccgtatcacattcttgcacaactccttccacgtcttctgcctctggactgaaccccacatctgcacctccaacatctgcttcagcggtccctgtttctcctgttccacagtcgccaatacctcccttacttcaggacccaaatcttcttagacaattgcttcctgctttgcaagccacgctgcagcttaataattctaatgtggacatatctaaaataaatgaagttcttacagcagctgtgacacaagcctcactgcagtctataattcataagtttcttactgctggaccatctgctttcaacataacgtctctgatttctcaagctgctcagctctctacacaagcccagccatctaatcagtctccgatgtctttaacatctgatgcgtcatccccaagatcatatgtttctccaagaataagcacacctcaaactaacacagtccctatcaaacctttgatcagtactcctcctgtttcatcacagccaaaggttagtactccagtagttaagcaaggaccagtgtcacagtcagccacacagcagcctgtaactgctgacaagcagcaaggtcatgaacctgtctctcctcgaagtcttcagcgctcaagtagccagagaagtccatcacctggtcccaatcatacttctaatagtagtaatgcatcaaatgcaacagttgtaccacagaattcttctgcccgatccacgtgttcattaacgcctgcactagcagcacacttcagtgaaaatctcataaaacacgttcaaggatggcctgcagatcatgcagagaagcaggcatcaagattacgcgaagaagcgcataacatgggaactattcacatgtccgaaatttgtactgaattaaaaaatttaagatctttagtccgagtatgtgaaattcaagcaactttgcgagagcaaaggatactatttttgagacaacaaattaaggaacttgaaaagctaaaaaatcagaattccttcatggtgtgaagatgtgaataattgcacatggttttgagaacaggaactgtaaatctgttgcccaatcttaacatttttgagctgcatttaagtagactttggaccgttaagctgggcaaaggaaatgacaaggggacggggtctgtgagagtcaattcaggggaaagatacaagattgatttgtaaaacccttgaaatgtagatttcttgtagatgtatccttcacgttgtaaatatgttttgtagagtgaagccatgggaagccatgtgtaacagagcttagacatccaaaactaatcaatgctgaggtggctaaatacctagccttttacatgtaaacctgtctgcaaaattagcttttttaaaaaaaaaaaaaaaaaaattgggggggttaatttatcattcagaaatcttgcattttcaaaaattcagtgcaagcgccaggcgatttgtgtctaaggatacgattttgaaccatatgggcagtgtacaaaatatgaaacaactgtttccacacttgcacctgatcaagagcagtgcttctccatttgttttgcagagaaatgtttttcatttcccgtgtgtttccatttccttctgaaattctgattttatccatttttttaaggctcctctttatctcctttcttaaggcactgttgctatggcacttttctataaccttttcattcctgtgtacagtagcttaaaattgcagtgattgagcataacctacttgtttgtataaattattgaaatccatttgcaccctgttaagaatggacttaaaagtactgctggacaggcatgtgtgctcaaagtacattgattgctcaaatataaggaaatggcccaatgaacgtggttgtgggaggggaaagaggaaacagagctagtcagatgtgaattgtatctgttgtaataaacatgttaaaacaaacaaaaa

SEQ ID NO: 200347 - DNA, 3042 bp, Homo sapiens
  Payload ID: 19525
  Gene Name: WW domain containing adaptor with coiled-coil
  Uniprot ID: Q9BTA9
  ENST ID: ENST00000354911
  CDS Start-End: 162-2105
cgccggcgccagtaactgggagctgatgagagtcgccgagggcgcgccgggcccaggtgccggggctgcccgccgcccgccgccgccgccgcctgcgcgcccgcccgcctttcgcggccgctctcccccctccccgacacacactcacaggccgggcattgatggtaatgtatgcgaggaaacagcagagactcagtgatggctgtcacgaccggaggggggactcgcagccttaccaggcacttaagtattcatcgaagagtcaccccagtagcggtgatcacagacatgaaaagatgcgagacgccggagatccttcaccaccaaataaaatgttgcggagatctgatagtcctgaaaacaaatacagtgacagcacaggtcacagtaaggccaaaaatgtgcatactcacagagttagagagagggatggtgggaccagttactctccacaagaaaattcacacaaccacagtgctcttcatagttcaaattcacattcttctaatccaagcaataacccaagcaaaacttcagatgcaccttatgattctgcagatgactggtctgagcatattagctcttctgggaaaaagtactactacaattgtcgaacagaagtttcacaatgggaaaaaccaaaagagtggcttgaaagagaacagagacaaaaagaagcaaacaagatggcagtcaacagcttcccaaaagatagggattacagaagagaggtgatgcaagcaacagccactagtgggtttgccagtggaatggaagacaagcattccagtgatgccagtagtttgctcccacagaatattttgtctcaaacaagcagacacaatgacagagactacagactgccaagagcagagactcacagtagttctacgccagtacagcaccccatcaaaccagtggttcatccaactgctaccccaagcactgttccttctagtccatttacgctacagtctgatcaccagccaaagaaatcatttgatgctaatggagcatctactttatcaaaactgcctacacccacatcttctgtccctgcacagaaaacagaaagaaaagaatctacatcaggagacaaacccgtatcacattcttgcacaactccttccacgtcttctgcctctggactgaaccccacatctgcacctccaacatctgcttcagcggtccctgtttctcctgttccacagtcgccaatacctcccttacttcaggacccaaatcttcttagacaattgcttcctgctttgcaagccacgctgcagcttaataattctaatgtggacatatctaaaataaatgaagttcttacagcagctgtgacacaagcctcactgcagtctataattcataagtttcttactgctggaccatctgctttcaacataacgtctctgatttctcaagctgctcagctctctacacaagcccagccatctaatcagtctccgatgtctttaacatctgatgcgtcatccccaagatcatatgtttctccaagaataagcacacctcaaactaacacagtccctatcaaacctttgatcagtactcctcctgtttcatcacagccaaaggttagtactccagtagttaagcaaggaccagtgtcacagtcagccacacagcagcctgtaactgctgacaagcagcaaggtcatgaacctgtctctcctcgaagtcttcagcgctcaagtagccagagaagtccatcacctggtcccaatcatacttctaatagtagtaatgcatcaaatgcaacagttgtaccacagaattcttctgcccgatccacgtgttcattaacgcctgcactagcagcacacttcagtgaaaatctcataaaacacgttcaaggatggcctgcagatcatgcagagaagcaggcatcaagattacgcgaagaagcgcataacatgggaactattcacatgtccgaaatttgtactgaattaaaaaatttaagatctttagtccgagtatgtgaaattcaagcaactttgcgagagcaaaggatactatttttgagacaacaaattaaggaacttgaaaagctaaaaaatcagaattccttcatggtgtgaagatgtgaataattgcacatggttttgagaacaggaactgtaaatctgttgcccaatcttaacatttttgagctgcatttaagtagactttggaccgttaagctgggcaaaggaaatgacaaggggacggggtctgtgagagtcaattcaggggaaagatacaagattgatttgtaaaacccttgaaatgtagatttcttgtagatgtatccttcacgttgtaaatatgttttgtagagtgaagccatgggaagccatgtgtaacagagcttagacatccaaaactaatcaatgctgaggtggctaaatacctagccttttacatgtaaacctgtctgcaaaattagcttttttaaaaaaaaaaaaaaaaaaattgggggggttaatttatcattcagaaatcttgcattttcaaaaattcagtgcaagcgccaggcgatttgtgtctaaggatacgattttgaaccatatgggcagtgtacaaaatatgaaacaactgtttccacacttgcacctgatcaagagcagtgcttctccatttgttttgcagagaaatgtttttcatttcccgtgtgtttccatttccttctgaaattctgattttatccatttttttaaggctcctctttatctcctttcttaaggcactgttgctatggcacttttctataaccttttcattcctgtgtacagtagcttaaaattgcagtgattgagcataacctacttgtttgtataaattattgaaatccatttgcaccctgttaagaatggacttaaaagtactgctggacaggcatgtgtgctcaaagtacattgattgctcaaatataaggaaatggcccaatgaacgtggttgtgggaggggaaagaggaaacagagctagtcagatgtgaattgtatctgttgtaataaacatgttaaaacaaacaaaaa

SEQ ID NO: 200348 - DNA, 2176 bp, Homo sapiens
  Payload ID: 19525
  Gene Name: WW domain containing adaptor with coiled-coil
  ENST ID: ENST00000375646
  CDS Start-End: 319-1806
gcgatggcttccctcgcgccccaccgtcctcttccggaaggcggctccctccctgcgcagcccggagcccctgagatcagcctcgagcaggcgcccgagcgagactatccctaaacgggaacggcggtggccgactcgcgagtgaggaaaagaaggaaagggcagactggtcgcgaagagaagatccaggcctcagaggaggagaaaggccggagccagccgagctgtcacgaccggaggggggactcgcagccttaccaggcacttaagtattcatcgaagagtcaccccagtagcggtgatcacagacatgaaaagatgcgagacgccggagatccttcaccaccaaataaaatgttgcggagatctgatagtcctgaaaacaaatacagtgacagcacaggtcacagtaaggccaaaaatgtgcatactcacagagttagagagagggatggtgggaccagttactctccacaagaaaattcacacaaccacagtgctcttcatagttcaaattcacattcttctaatccaagcaataacccaagcaaaacttcagatgcaccttatgattctgcagatgactggtctgagcatattagctcttctgggaaaaagtactactacaattgtcgaacagaagtttcacaatgggaaaaaccaaaagagtggcttgaaagagaacagagacaaaaagaagcaaacaagatggcagtcaacagcttcccaaaagatagggattacagaagagaggtgatgcaagcaacagccactagtgggtttgccagtggaaaatctacatcaggagacaaacccgtatcacattcttgcacaactccttccacgtcttctgcctctggactgaaccccacatctgcacctccaacatctgcttcagcggtccctgtttctcctgttccacagtcgccaatacctcccttacttcaggacccaaatcttcttagacaattgcttcctgctttgcaagccacgctgcagcttaataattctaatgtggacatatctaaaataaatgaagctgtgacacaagcctcactgcagtctataattcataagtttcttactgctggaccatctgctttcaacataacgtctctgatttctcaagctgctcagctctctacacaagcccagccatctaatcagtctccgatgtctttaacatctgatgcgtcatccccaagatcatatgtttctccaagaataagcacacctcaaactaacacagtccctatcaaacctttgatcagtactcctcctgtttcatcacagccaaaggttagtactccagtagttaagcaaggaccagtgtcacagtcagccacacagcagcctgtaactgctgacaagcagcaaggtcatgaacctgtctctcctcgaagtcttcagcgctcaagtagccagagaagtccatcacctggtcccaatcatacttctaatagtagtaatgcatcaaatgcaacagttgtaccacagaattcttctgcccgatccacgtgttcattaacgcctgcactagcagcacacttcagtgaaaatctcataaaacacgttcaaggatggcctgcagatcatgcagagaagcaggcatcaagattacgcgaagaagcgcataacatgggaactattcacatgtccgaaatttgtactgaattaaaaaatttaagatctttagtccgagtatgtgaaattcaagcaactttgcgagagcaaaggatactatttttgagacaacaaattaaggaacttgaaaagctaaaaaatcagaattccttcatggtgtgaagatgtgaataattgcacatggttttgagaacaggaactgtaaatctgttgcccaatcttaacatttttgagctgcatttaagtagactttggaccgttaagctgggcaaaggaaatgacaaggggacggggtctgtgagagtcaattcaggggaaagatacaagattgatttgtaaaacccttgaaatgtagatttcttgtagatgtatccttcacgttgtaaatatgttttgtagagtgaagccatgggaagccatgtgtaacagagcttagacatccaaaactaatcaatgctgaggtggctaaatacctagccttttacatgtaaacctgtctgcaaaattagcttttttaaaaaaaaaaaaaaaa

SEQ ID NO: 200349 - DNA, 5924 bp, Homo sapiens
  Payload ID: 19525
  Gene Name: WW domain containing adaptor with coiled-coil
  Uniprot ID: Q9BTA9
  ENST ID: ENST00000375664
  CDS Start-End: 610-2418
ggtggcgcgcggcgtccggtgaggggcagcggcccgggctcggttccggcttccagcagcggcccgaaggcgccggagcacgctccccgctccccagaacgcagcttccgcggctgcagcccaggcagctcttcgggaagcgtccgcccgtggtctcgccagggggtttccgacctccccgcccgacagcgcaggggcgggggccgcggccggagagctcgcccgagagcaccccctcccgctgcgcctctgggcgcacgcgcagccgctgcagcctcccttatttagtccgcgatggcttccctcgcgccccaccgtcctcttccggaaggcggctccctccctgcgcagcccggagcccctgagatcagcctcgagcaggcgcccgagcgagactatccctaaacgggaacggcggtggccgactcgcgagtgaggaaaagaaggaaagggcagactggtcgcgaagagaagatccaggcctcagaggaggagaaaggccggagccagccgagctgtcacgaccggaggggggactcgcagccttaccaggcacttaagtattcatcgaagagtcaccccagtagcggtgatcacagacatgaaaagatgcgagacgccggagatccttcaccaccaaataaaatgttgcggagatctgatagtcctgaaaacaaatacagtgacagcacaggtcacagtaaggccaaaaatgtgcatactcacagagttagagagagggatggtgggaccagttactctccacaagaaaattcacacaaccacagtgctcttcatagttcaaattcacattcttctaatccaagcaataacccaagcaaaacttcagatgcaccttatgattctgcagatgactggtctgagcatattagctcttctgggaaaaagtactactacaattgtcgaacagaagtttcacaatgggaaaaaccaaaagagtggcttgaaagagaacagagacaaaaagaagcaaacaagatggcagtcaacagcttcccaaaagatagggattacagaagagaggtgatgcaagcaacagccactagtgggtttgccagtggaatggaagacaagcattccagtgatgccagtagtttgctcccacagaatattttgtctcaaacaagcagacacaatgacagagactacagactgccaagagcagagactcacagtagttctacgccagtacagcaccccatcaaaccagtggttcatccaactgctaccccaagcactgttccttctagtccatttacgctacagtctgatcaccagccaaagaaatcatttgatgctaatggagcatctactttatcaaaactgcctacacccacatcttctgtccctgcacagaaaacagaaagaaaagaatctacatcaggagacaaacccgtatcacattcttgcacaactccttccacgtcttctgcctctggactgaaccccacatctgcacctccaacatctgcttcagcggtccctgtttctcctgttccacagtcgccaatacctcccttacttcaggacccaaatcttcttagacaattgcttcctgctttgcaagccacgctgcagcttaataattctaatgtggacatatctaaaataaatgaagttcttacagcagctgtgacacaagcctcactgcagtctataattcataagtttcttactgctggaccatctgctttcaacataacgtctctgatttctcaagctgctcagctctctacacaagcccagccatctaatcagtctccgatgtctttaacatctgatgcgtcatccccaagatcatatgtttctccaagaataagcacacctcaaactaacacagtccctatcaaacctttgatcagtactcctcctgtttcatcacagccaaaggttagtactccagtagttaagcaaggaccagtgtcacagtcagccacacagcagcctgtaactgctgacaagcagcaaggtcatgaacctgtctctcctcgaagtcttcagcgctcaagtagccagagaagtccatcacctggtcccaatcatacttctaatagtagtaatgcatcaaatgcaacagttgtaccacagaattcttctgcccgatccacgtgttcattaacgcctgcactagcagcacacttcagtgaaaatctcataaaacacgttcaaggatggcctgcagatcatgcagagaagcaggcatcaagattacgcgaagaagcgcataacatgggaactattcacatgtccgaaatttgtactgaattaaaaaatttaagatctttagtccgagtatgtgaaattcaagcaactttgcgagagcaaaggatactatttttgagacaacaaattaaggaacttgaaaagctaaaaaatcagaattccttcatggtgtgaagatgtgaataattgcacatggttttgagaacaggaactgtaaatctgttgcccaatcttaacatttttgagctgcatttaagtagactttggaccgttaagctgggcaaaggaaatgacaaggggacggggtctgtgagagtcaattcaggggaaagatacaagattgatttgtaaaacccttgaaatgtagatttcttgtagatgtatccttcacgttgtaaatatgttttgtagagtgaagccatgggaagccatgtgtaacagagcttagacatccaaaactaatcaatgctgaggtggctaaatacctagccttttacatgtaaacctgtctgcaaaattagcttttttaaaaaaaaaaaaaaaaaaattgggggggttaatttatcattcagaaatcttgcattttcaaaaattcagtgcaagcgccaggcgatttgtgtctaaggatacgattttgaaccatatgggcagtgtacaaaatatgaaacaactgtttccacacttgcacctgatcaagagcagtgcttctccatttgttttgcagagaaatgtttttcatttcccgtgtgtttccatttccttctgaaattctgattttatccatttttttaaggctcctctttatctcctttcttaaggcactgttgctatggcacttttctataaccttttcattcctgtgtacagtagcttaaaattgcagtgattgagcataacctacttgtttgtataaattattgaaatccatttgcaccctgttaagaatggacttaaaagtactgctggacaggcatgtgtgctcaaagtacattgattgctcaaatataaggaaatggcccaatgaacgtggttgtgggaggggaaagaggaaacagagctagtcagatgtgaattgtatctgttgtaataaacatgttaaaacaaacaaaaattgttatttttcttttccttcggtcagtgcacattagcatttgaactacctggggattctttatcagaactgttcttgttgaatatttatacttaattgaaataattccttaagggaggttttgtttaaaacgtattaacaggaaattgtgtatgagatatttaatgaaataagaaattcaacaagaatgattaagtcacttcccaagtggttgtcatttgttaaaccctggtttacctgtcttgctattatgacatttcatttggaaggatgtttgtgttgtagctaactgttcaagtctggtgctgactgctgttcttagccatcacaaaacgctaaatttgtgtaattggagcttcctgctgttatctggaaatagcaggaaagcgcagctttgtatattgtttcctaaagtatattaaaataaaaaaagaaactattgctactataaaattaccttgactttttttttcctttgctgaaatattagtcacatagccttagcttcacactgccagtaatgtatcaaatcacaagggtttccgcatgaaaaaaatcttttcttcccccacaaaaaaacctttaccatcaaaatcttgccatctgatttagaaaggtgtttcttcttcttcttcttttttttctttaaattggtttagggttttttggtgattttttttttttttttttttctgttggggcagataagtgcttccaaaactggcagcaccaagggcttattttttatgttagacatcaatgtcaatgttactacattctcggatgctaacataaattttgaaattgctcttgtgctttaagcatatattgaaagtatggaagttaaatgttcaggcttttcagtaagctcaaaaagttaactgtaagcgatagtgttggtgttttctaaaatacaaaaatgttccagtgtaattaaaaggaattaaaatcttgaagatattttcctgtaatttaaggatactttttaaatgtaagaaaagacatgtcattaatttattgtcatgtttatacctctgtgagattgttaacatctgctgaatttaactagtgcatgtaaatgaaaccccaaagagctgtgtgttcagctagaaaccttactgtatctttcctggaaagaagtgagcaatttgttgtaataggcaaatgtttcctgatcagatggcaatttgtgatttaggtaaatttgaatttgatttgcttatagtctactggtctgtgtacctatgttttgtttttcaaaaaagtttacatccctaaatgaattagtcacatatatttaggagaagatgcctaatttggtatttcttaatagtgaatttttttttttcttgagacagagtttcactcttgttgcccaggctggagtgcaatggcacgatctcggctcaccgcaacctctgcctcctgggttcaagcgattctcctgcctcggcgttccgagtagctgggattacaggcatgcaccaccacgcctggctaattttgtatttttagtagagatggggtttctccatgttggtcaggctggtcttgaactgccaacttcaggtgatctgcctgccttggcctcccaaagtgctgggattacaggcgtgagccaccgctcctggccagtagtgaatttttaaacacagaaaatctaaaattttgtggaaatattttaaatattgcaccttaatacaaggtatccagctcctaaccttaactagggaatatctattaaaataagcataatgttctggactagagtattccttatctagttggttatggatttgaacatgtaccttggtttagatactttgaaaatagaagtactgaatagcctctagggaacttgagtggcctttccctccccctgcccccccccccccccccccgttttaaaagatcagtagtctctattcaaacttttaaaatgtcgtggtattgtaacaatatatttgatgaaagaaggttacagactcccctgaagaaccagctttcctacgctttttatttttctaacttgtctaacctgattttaaaatgactgcaattccagactaaaaacatgcttcagccctgtttcaagacattatgcttcttttaacagtccaaattagtagttttatttttcttctaaatctttgtttcacacttgtaaaatcttgggaaggaggttcttaaaactttgccaggaattgttacccatttccaaaaacagtttattatgttcaaaaaccaccatatctttgagggactgtttgaaaggggagagggcaacgcgggaaataattcactctgcgcaccggaactattgtagttcaggacttccagctactgtatttagatgttgggtttgaatatacagatttcttttcaatacctgtaaatatggctatattcttgtatttgtacgggagtgtacaaaatgacactgaaaagtaataaatatgttttgactatattgtgcagttatttcagaactgtgttttgaaagtcttagaatgcataatttgcatttgagtaaggaaatttaaaatacagattactgctgagattttaa

SEQ ID NO: 200350 - DNA, 506 bp, Homo sapiens
  Payload ID: 19525
  Gene Name: WW domain containing adaptor with coiled-coil
  ENST ID: ENST00000448193
  CDS Start-End: 330-506
cgggcgggcgggcgggaacgcagtgtggcggggagcgggggcccggcttcgcggcatttcgccctctccggcccttccggaggctccgggtttgtgccgtgtgcgtgcggggctcggcgctggggcgctcggtaggtctcccgcggggaggggcggcgggggccccgttttcttcctccccggccccccacccgcgccgtgtcttatgtcgctgccttctcttcctgtttttcagctgtcacgaccggaggggggactcgcagccttaccaggcacttaagtattcatcgaagagtcaccccagtagcggtgatcacagacatgaaaagatgcgagacgccggagatccttcaccaccaaataaaatgttgcggagatctgatagtcctgaaaacaaatacagtgacagcacaggtcacagtaaggccaaaaatgtgcatactcacagagttagagagagggatggtgggaccagttactctccacaagaaaattcacacaaccac

SEQ ID NO: 200351 - DNA, 1320 bp, Homo sapiens
  Payload ID: 19525
  Gene Name: WW domain containing adaptor with coiled-coil
  ENST ID: ENST00000428935
  CDS Start-End: 281-727
tctcccccctccccgacacacactcacaggccgggcattgatggtaatgtatgcgaggaaacagcagagactcagtgatggctgtcacgaccggaggggggactcgcagccttaccaggtgactggagggagttcgctgatttaggaaaaaagaatcatttgcagccagaaagacctgactcgattatttgattatttgcgagtgaaggaatcgatgggatgagatgataggcacttaagtattcatcgaagagtcaccccagtagcggtgatcacagacatgaaaagatgcgagacgccggagatccttcaccaccaaataaaatgttgcggagatctgatagtcctgaaaacaaatacagtgacagcacaggtcacagtaaggccaaaaatgtgcatactcacagagttagagagagggatggtgggaccagttactctccacaagaaaattcacacaaccacagtgctcttcatagttcaaattcacattcttctaatccaagcaataacccaagcaaaacttcagatgcaccttatgattctgcagatgactggtctgagcatattagctcttctgggaaaaagtactactacaattgtcgaacagaagtttcacaatgggaaaaaccaaaagagtggcttgaaagagaacagagacaaaaagaagcaaacaagatggcagtcaacagcttcccaaaagatagggattacagaagagaggtgatgcaagcaacagccactagtgggtttgccagtggaatggaagacaagcattccagtgatgccagtagtttgctcccacagaatattttgtctcaaacaagcagacacaatgacagagactacagactgccaagagcagagactcacagtagttctacgccagtacagcaccccatcaaaccagtggttcatccaactgctaccccaagcactgttccttctagtccatttacgctacagtctgatcaccagccaaagaaatcatttgatgctaatggagcatctactttatcaaaactgcctacacccacatcttctgtccctgcacagaaaacagaaagaaaagaatctacatcaggagacaaacccgtatcacattcttgcacaactccttccacgtcttctgcctctggactgaaccccacatctgcacctccaacatctgcttcagcggtccctgtttctcctgttccacagtcgccaatacctcccttacttcaggacccaaatcttcttagacaattgcttcctgctttgcaagccacgctgcagcttaataattctaatgtggacatatctaaaataaatgaaggt

SEQ ID NO: 200352 - DNA, 759 bp, Homo sapiens
  Payload ID: 19525
  Gene Name: WW domain containing adaptor with coiled-coil
  ENST ID: ENST00000442148
  CDS Start-End: 240-759
gaggagcggccgcgcgggcgggcgggcgggaacgcagtgtggcggggagcgggggcccggcttcgcggcatttcgccctctccggcccttccggaggctccgggtttgtgccgtgtgcgtgcggggctcggcgctggggcgctcgctgtcacgaccggaggggggactcgcagccttaccaggcacttaagtattcatcgaagagtcaccccagtagcggtgatcacagacatgaaaagatgcgagacgccggagatccttcaccaccaaataaaatgttgcggagatctgatagtcctgaaaacaaatacagtgacagcacaggtcacagtaaggccaaaaatgtgcatactcacagagttagagagagggatggtgggaccagttactctccacaagaaaattcacacaaccacagtgctcttcatagttcaaattcacattcttctaatccaagcaataacccaagcaaaacttcagatgcaccttatgattctgcagatgactggtctgagcatattagctcttctgggaaaaagtactactacaattgtcgaacagaagtttcacaatgggaaaaaccaaaagagtggcttgaaagagaacagagacaaaaagaagcaaacaagatggcagtcaacagcttcccaaaagatagggattacagaagagaggtgatgcaagcaacagccactagtgggtttgccagtggaatggaagacaagcattccagtgatgccagtagtttgctcccacaga

SEQ ID NO: 200353 - DNA, 1330 bp, Homo sapiens
  Payload ID: 19525
  Gene Name: WW domain containing adaptor with coiled-coil
  ENST ID: ENST00000424454
  CDS Start-End: 41-145
tctcccccctccccgacacacactcacaggccgggcattgatggtaatgtatgcgaggaaacagcagagactcagtgatggctgtcacgaccggaggggggactcgcagccttaccaggtgactggagggagttcgctgatttaggaaaaaagaatcatttgcagccagaaagacctgactcgattatttgattatttgcgagtgaaggaatcgatgggatgagatgataggcacttaagtattcatcgaagagtcaccccagtagcggtgatcacagacatgaaaagatgcgagacgccggagatccttcaccaccaaataaaatgttgcggagatctgatagtcctgaaaacaaatacagtgacagcacaggtcacagtaaggccaaaaatgtgcatactcacagagttagagagagggatggtgggaccagttactctccacaagaaaattcacacaaccacagtgctcttcatagttcaaattcacattcttctaatccaagcaataacccaagcaaaacttcagatgcaccttatgattctgcagatgactggtctgagcatattagctcttctgggaaaaagtactactacaattgtcgaacagaagtttcacaatgggaaaaaccaaaagagtggcttgaaagagaacagagacaaaaagaagcaaacaagatggcagtcaacagcttcccaaaagatagggattacagaagagaggtgatgcaagcaacagccactagtgggtttgccagtggaatggaagacaagcattccagtgatgccagtagtttgctcccacagaatattttgtctcaaacaagcagacacaatgacagagactacagactgccaagagcagagactcacagtagttctacgccagtacagcaccccatcaaaccagtggttcatccaactgctaccccaagcactgttccttctagtccatttacgctacagtctgatcaccagccaaagaaatcatttgatgctaatggagcatctactttatcaaaactgcctacacccacatcttctgtccctgcacagaaaacagaaagaaaagaatctacatcaggagacaaacccgtatcacattcttgcacaactccttccacgtcttctgcctctggactgaaccccacatctgcacctccaacatctgcttcagcggtccctgtttctcctgttccacagtcgccaatacctcccttacttcaggacccaaatcttcttagacaattgcttcctgctttgcaagccacgctgcagcttaataattctaatgtggacatatctaaaataaatgaagttcttacagcag

SEQ ID NO: 200354 - DNA, 784 bp, Homo sapiens
  Payload ID: 19525
  Gene Name: WW domain containing adaptor with coiled-coil
  ENST ID: ENST00000420266
  CDS Start-End: 172-784
gccgcctgcgcgcccgcccgcctttcgcggccgctctcccccctccccgacacacactcacaggccgggcattgatgctgtcacgaccggaggggggactcgcagccttaccaggcacttaagtattcatcgaagagtcaccccagtagcggtgatcacagacatgaaaagatgcgagacgccggagatccttcaccaccaaataaaatgttgcggagatctgatagtcctgaaaacaaatacagtgacagcacaggtcacagtaaggccaaaaatgtgcatactcacagagttagagagagggatggtgggaccagttactctccacaagaaaattcacacaaccacagtgctcttcatagttcaaattcacattcttctaatccaagcaataacccaagcaaaacttcagatgcaccttatgattctgcagatgactggtctgagcatattagctcttctgggaaaaagtactactacaattgtcgaacagaagtttcacaatgggaaaaaccaaaagagtggcttgaaagagaacagagacaaaaagaagcaaacaagatggcagtcaacagcttcccaaaagatagggattacagaagagaggtgatgcaagcaacagccactagtgggtttgccagtggaatggaagacaagcattccagtgatgccagtagtttgctcccacagaatattttgtctcaaacaagcagacacaatgacagagactacagactgccaagagcagagactcacagtagttctacgccagtacagcacccca

SEQ ID NO: 200355 - DNA, 816 bp, Homo sapiens
  Payload ID: 19525
  Gene Name: WW domain containing adaptor with coiled-coil
  ENST ID: ENST00000414108
  CDS Start-End: 118-816
tacaggcccttcggtgcaacacatctgaaactagcaccgcggatccccttaaaattccaggcacttaagtattcatcgaagagtcaccccagtagcggtgatcacagacatgaaaagatgcgagacgccggagatccttcaccaccaaataaaatgttgcggagatctgatagtcctgaaaacaaatacagtgacagcacaggtcacagtaaggccaaaaatgtgcatactcacagagttagagagagggatggtgggaccagttactctccacaagaaaattcacacaaccacagtgctcttcatagttcaaattcacattcttctaatccaagcaataacccaagcaaaacttcagatgcaccttatgattctgcagatgactggtctgagcatattagctcttctgggaaaaagtactactacaattgtcgaacagaagtttcacaatgggaaaaaccaaaagagtggcttgaaagagaacagagacaaaaagaagcaaacaagatggcagtcaacagcttcccaaaagatagggattacagaagagaggtgatgcaagcaacagccactagtgggtttgccagtggaatggaagacaagcattccagtgatgccagtagtttgctcccacagaatattttgtctcaaacaagcagacacaatgacagagactacagactgccaagagcagagactcacagtagttctacgccagtacagcaccccatcaaaccagtggttcatccaactgctaccccaagcactgttccttctagtccatttacgctacagtctgatcaccagccaaagaaa

SEQ ID NO: 200356 - DNA, 2762 bp, Homo sapiens
  Payload ID: 19525
  Gene Name: WW domain containing adaptor with coiled-coil
  Uniprot ID: Q9BTA9
  ENST ID: ENST00000439676
  CDS Start-End: 354-1664
attctcagccaaatttttttattttttgcagaatcagtgtgcaaggtggtttataagataatggagtgggttttttttgtgtttagtgtgatttgttatcaggagtcttattgtaacgcttaagcattaggttttttgtctgagaaactttaaagagtaaagcagaattgaaagtggaaattttaattttgtaagttcataaaatttaatgataatacaccaaagtttatgtttaaattagggagtttaaggtttcaattctttctctctttttttgggggggtgatgttttacaggcacttaagtattcatcgaagagtcaccccagtagcggtgatcacagacatgaaaagatgcgagacgccggagatccttcaccaccaaataaaatgttgcggagatctgatagtcctgaaaacaaatacagtgacagcacaggtcacagtaaggccaaaaatgtgcatactcacagagttagagagagggatggtgggaccagttactctccacaagaaaattcacacaaccacagtgctcttcatagttcaaattcacattcttctaatccaagcaataacccaagcaaaacttcagatgcaccttatgattctgcagatgactggtctgagcatattagctcttctgggaaaaagtactactacaattgtcgaacagaagtttcacaatgggaaaaaccaaaagagtggcttgaaagagaacagagacaaaaagaagcaaacaagatggcagtcaacagcttcccaaaagatagggattacagaagagaggtgatgcaagcaacagccactagtgggtttgccagtggaatggaagacaagcattccagtgatgccagtagtttgctcccacagaatattttgtctcaaacaagcagacacaatgacagagactacagactgccaagagcagagactcacagtagttctacgccagtacagcaccccatcaaaccagtggttcatccaactgctaccccaagcactgttccttctagtccatttacgctacagtctgatcaccagccaaagaaatcatttgatgctaatggagcatctactttatcaaaactgcctacacccacatcttctgtccctgcacagaaaacagaaagaaaagaatctacatcaggagacaaacccgtatcacattcttgcacaactccttccacgtcttctgcctctggactgaaccccacatctgcacctccaacatctgcttcagcggtccctgtttctcctgttccacagtcgccaatacctcccttacttcaggacccaaatcttcttagacaattgcttcctgctttgcaagccacgctgcagcttaataattctaatgtggacatatctaaaataaatgaagttcttacagcagctgtgacacaagcctcactgcagtctataattcataagtttcttactgctggaccatctgctttcaacataacgtctctgatttctcaagctgctcagctctctacacaagatatccctcttcatgaaggtatccaaatggagagagatacacataggagcaaatgggaagtgaaagggtcactttgtcagaaagctgataaacagcaggaatgccttgtctggaatggaagtataatggtgcaaagactcttgcaaccctctggctagcctcatgagcaggagactgcgtgggatacctgggcctaaatgtagaataagaaagaagaaataaggatgcccagccatctaatcagtctccgatgtctttaacatctgatgcgtcatccccaagatcatatgtttctccaagaataagcacacctcaaactaacacagtccctatcaaacctttgatcagtactcctcctgtttcatcacagccaaaggttagtactccagtagttaagcaaggaccagtgtcacagtcagccacacagcagcctgtaactgctgacaagcagcaaggtcatgaacctgtctctcctcgaagtcttcagcgctcaagtagccagagaagtccatcacctggtcccaatcatacttctaatagtagtaatgcatcaaatgcaacagttgtaccacagaattcttctgcccgatccacgtgttcattaacgcctgcactagcagcacacttcagtgaaaatctcataaaacacgttcaaggatggcctgcagatcatgcagagaagcaggcatcaagattacgcgaagaagcgcataacatgggaactattcacatgtccgaaatttgtactgaattaaaaaatttaagatctttagtccgagtatgtgaaattcaagcaactttgcgagagcaaaggatactatttttgagacaacaaattaaggaacttgaaaagctaaaaaatcagaattccttcatggtgtgaagatgtgaataattgcacatggttttgagaacaggaactgtaaatctgttgcccaatcttaacatttttgagctgcatttaagtagactttggaccgttaagctgggcaaaggaaatgacaaggggacggggtctgtgagagtcaattcaggggaaagatacaagattgatttgtaaaacccttgaaatgtagatttcttgtagatgtatccttcacgttgtaaatatgttttgtagagtgaagccatgggaagccatgtgtaacagagcttagacatccaaaactaatcaatgctgaggtggctaaatacctagccttttacatgtaaacctgtctgcaaaattagcttttttaaaaaaaaaaaaaaaaaaa

SEQ ID NO: 200357 - DNA, 585 bp, Homo sapiens
  Payload ID: 19525
  Gene Name: WW domain containing adaptor with coiled-coil
  ENST ID: ENST00000526722
  CDS Start-End: 478-585
ttatttagtccgcgatggcttccctcgcgccccaccgtcctcttccggaaggcggctccctccctgcgcagcccggagcccctgagatcagcctcgagcaggcgcccgagcgagactatccctaaacgggaacggcggtggccgactcgcgagtgaggaaaagaaggaaagggcagactggtcgcgaagagaagatccaggcctcagaggaggagaaaggccggagccagccgagctgtcacgaccggaggggggactcgcagccttaccaggtaccagccgaggccggggtggagggattggaaggggccggagggggaagggagggactgctactcgagcgcaggcctcagaagtcgatacaggcccttcggtgcaacacatctgaaactagcaccgcggatccccttaaaattccaggcacttaagtattcatcgaagagtcaccccagtagcggtgatcacagacatgaaaagatgcgagacgccggagatccttcaccaccaaataaaatgttgcggagatctgatagtcctgaaaacaaatacagtgacagcacaggtcacagtaaggccaaaaatgtg

SEQ ID NO: 200358 - DNA, 2740 bp, Homo sapiens
  Payload ID: 19525
  Gene Name: WW domain containing adaptor with coiled-coil
  ENST ID: ENST00000628285
  CDS Start-End: 346-792
attctcagccaaatttttttattttttgcagaatcagtgtgcaaggtggtttataagataatggagtgggttttttttgtgtttagtgtgatttgttatcaggagtcttattgtaacgcttaagcattaggttttttgtctgagaaactttaaagagtaaagcagaattgaaagtggaaattttaattttgtaagttcataaaatttaatgataatacaccaaagtttatgtttaaattagggagtttaaggtttcaattctttctctctttttttgggggggtgatgttttacaggcacttaagtattcatcgaagagtcaccccagtagcggtgatcacagacatgaaaagatgcgagacgccggagatccttcaccaccaaataaaatgttgcggagatctgatagtcctgaaaacaaatacagtgacagcacaggtcacagtaaggccaaaaatgtgcatactcacagagttagagagagggatggtgggaccagttactctccacaagaaaattcacacaaccacagtgctcttcatagttcaaattcacattcttctaatccaagcaataacccaagcaaaacttcagatgcaccttatgattctgcagatgactggtctgagcatattagctcttctgggaaaaagtactactacaattgtcgaacagaagtttcacaatgggaaaaaccaaaagagtggcttgaaagagaacagagacaaaaagaagcaaacaagatggcagtcaacagcttcccaaaagatagggattacagaagagaggtgatgcaagcaacagccactagtgggtttgccagtggaatggaagacaagcattccagtgatgccagtagtttgctcccacagaatattttgtctcaaacaagcagacacaatgacagagactacagactgccaagagcagagactcacagtagttctacgccagtacagcaccccatcaaaccagtggttcatccaactgctaccccaagcactgttccttctagtccatttacgctacagtctgatcaccagccaaagaaatcatttgatgctaatggagcatctactttatcaaaactgcctacacccacatcttctgtccctgcacagaaaacagaaagaaaagaatctacatcaggagacaaacccgtatcacattcttgcacaactccttccacgtcttctgcctctggactgaaccccacatctgcacctccaacatctgcttcagcggtccctgtttctcctgttccacagtcgccaatacctcccttacttcaggacccaaatcttcttagacaattgcttcctgctttgcaagccacgctgcagcttaataattctaatgtggacatatctaaaataaatgaagttcttacagcagctgtgacacaagcctcactgcagtctataattcataagtttcttactgctggaccatctgctttcaacataacgtctctgatttctcaagctgctcagctctctacacaagatatccctcttcatgaaggtatccaaatggagagagatacacataggagcaaatgggaagtgaaagggtcactttgtcagaaagctgataaacagcaggaatgccttgtctggaatggaagtataatggtgcaaagactcttgcaaccctctggctagcctcatgagcaggagactgcgtgggatacctgggcctaaatgtagaataagaaagaagaaataaggatgcccagccatctaatcagtctccgatgtctttaacatctgatgcgtcatccccaagatcatatgtttctccaagaataagcacacctcaaactaacacagtccctatcaaacctttgatcagtactcctcctgtttcatcacagccaaaggttagtactccagtagttaagcaaggaccagtgtcacagtcagccacacagcagcctgtaactgctgacaagcagcaaggtcatgaacctgtctctcctcgaagtcttcagcgctcaagccagagaagtccatcacctggtcccaatcatacttctaatagtagtaatgcatcaaatgcaacagttgtaccacagaattcttctgcccgatccacgtgttcattaacgcctgcactagcagcacacttcagtgaaaatctcataaaacacgttcaaggatggcctgcagatcatgcagagaagcaggcatcaagattacgcgaagaagcgcataacatgggaactattcacatgtccgaaatttgtactgaattaaaaaatttaagatctttagtccgagtatgtgaaattcaagcaactttgcgagagcaaaggatactatttttgagacaacaaattaaggaacttgaaaagctaaaaaatcagaattccttcatggtgtgaagatgtgaataattgcacatggttttgagaacaggaactgtaaatctgttgcccaatcttaacatttttgagctgcatttaagtagactttggaccgttaagctgggcaaaggaaatgacaaggggacggggtctgtgagagtcaattcaggggaaagatacaagattgatttgtaaaacccttgaaatgtagatttcttgtagatgtatccttcacgttgtaaatatgttttgtagagtgaagccatgggaagccatgtgtaacagagcttagacatccaaaactaatcaatgctgaggtggctaaatacctagccttttacatgtaaacctgtctgcaaaattagctttttt

SEQ ID NO: 200359 - DNA, 3362 bp, Homo sapiens
  Payload ID: 19526
  Gene Name: WW domain containing E3 ubiquitin protein ligase 1
  Uniprot ID: Q9H0M0
  ENST ID: ENST00000265428
  CDS Start-End: 11-2779
attttgggacatggccactgcttcaccaaggtctgatactagtaataaccacagtggaaggttgcagttacaggtaactgtttctagtgccaaacttaaaagaaaaaagaactggttcggaacagcaatatatacagaagtagttgtagatggagaaattacgaaaacagcaaaatccagtagttcttctaatccaaaatgggatgaacagctaactgtaaatgttacgccacagactacattggaatttcaagtttggagccatcgcactttaaaagcagatgctttattaggaaaagcaacgatagatttgaaacaagctctgttgatacacaatagaaaattggaaagagtgaaagaacaattaaaactttccttggaaaacaagaatggcatagcacaaactggtgaattgacagttgtgcttgatggattggtgattgagcaagaaaatataacaaactgcagctcatctccaaccatagaaatacaggaaaatggtgatgccttacatgaaaatggagagccttcagcaaggacaactgccaggttggctgttgaaggcacgaatggaatagataatcatgtacctacaagcactctagtccaaaactcatgctgctcgtatgtagttaatggagacaacacaccttcatctccgtctcaggttgctgccagacccaaaaatacaccagctccaaaaccactcgcatctgagcctgccgatgacactgttaatggagaatcatcctcatttgcaccaactgataatgcgtctgtcacgggtactccagtagtgtctgaagaaaatgccttgtctccaaattgcactagtactactgttgaagatcctccagttcaagaaatactgacttcctcagaaaacaatgaatgtattccttctaccagtgcagaattggaatctgaagctagaagtatattagagcctgacacctctaattctagaagtagttctgcttttgaagcagccaaatcaagacagccagatgggtgtatggatcctgtacggcagcagtctgggaatgccaacacagaaaccttgccatcagggtgggaacaaagaaaagatcctcatggtagaacctattatgtggatcataatactcgaactaccacatgggagagaccacaacctttacctccaggttgggaaagaagagttgatgatcgtagaagagtttattatgtggatcataacaccagaacaacaacgtggcagcggcctaccatggaatctgtccgaaattttgaacagtggcaatctcagcggaaccaattgcagggagctatgcaacagtttaaccaacgatacctctattcggcttcaatgttagctgcagaaaatgacccttatggacctttgccaccaggctgggaaaaaagagtggattcaacagacagggtttactttgtgaatcataacacaaaaacaacccagtgggaagatccaagaactcaaggcttacagaatgaagaacccctgccagaaggctgggaaattagatatactcgtgaaggtgtaaggtactttgttgatcataacacaagaacaacaacattcaaagatcctcgcaatgggaagtcatctgtaactaaaggtggtccacaaattgcttatgaacgcggctttaggtggaagcttgctcacttccgttatttgtgccagtctaatgcactacctagtcatgtaaagatcaatgtgtcccggcagacattgtttgaagattccttccaacagattatggcattaaaaccctatgacttgaggaggcgcttatatgtaatatttagaggagaagaaggacttgattatggtggcctagcgagagaatggtttttcttgctttcacatgaagttttgaacccaatgtattgcttatttgagtatgcgggcaagaacaactattgtctgcagataaatccagcatcaaccattaatccagaccatctttcatacttctgtttcattggtcgttttattgccatggcactatttcatggaaagtttatcgatactggtttctctttaccattctacaagcgtatgttaagtaaaaaacttactattaaggatttggaatctattgatactgaattttataactcccttatctggataagagataacaacattgaagaatgtggcttagaaatgtacttttctgttgacatggagattttgggaaaagttacttcacatgacctgaagttgggaggttccaatattctggtgactgaggagaacaaagatgaatatattggtttaatgacagaatggcgtttttctcgaggagtacaagaacagaccaaagctttccttgatggttttaatgaagttgttcctcttcagtggctacagtacttcgatgaaaaagaattagaggttatgttgtgtggcatgcaggaggttgacttggcagattggcagagaaatactgtttatcgacattatacaagaaacagcaagcaaatcatttggttttggcagtttgtgaaagagacagacaatgaagtaagaatgcgactattgcagttcgtcactggaacctgccgtttacctctaggaggatttgctgagctcatgggaagtaatgggcctcaaaagttttgcattgaaaaagttggcaaagacacttggttaccaagaagccatacatgttttaatcgcttggatctaccaccatataagagttatgaacaactaaaggaaaaacttctttttgcaatagaagagacagagggatttggacaagaatgaatgtggcttcttattttggaggagctcttgcatttaaataccccagccaagaaaaattgcacagatagtgtatataagctgttcattctgtacagtgaattttccgaacctctcaaagtatgttttccgttcttccacagaaatatgcaaaacagttcatccttttctactttatttattgttcccttgaaatgactgaccaggaaaaagatcatccttaaattttgaagcaagtgagagactttattaaaaatacatatatatctatataaacatatatgatagtggctctagttttatagagctccaagtgtattaaacatgacagccattcattcataaagatctggatttgctttaccttgttaatattatctaggggaaaaagtgcaaattgctccatgttcttctctcccttatgtaacatctcctgagggtgtttagttgcatggctgttcagaaaggtattaagggcttaggccaaatcttactttgagtatgttaaaaaaaaaaaaatgctgctggcttttctgaagacaggtgcttgaacttgtcagtttgttttaaataaatacaatagttg

SEQ ID NO: 200360 - DNA, 4686 bp, Homo sapiens
  Payload ID: 19526
  Gene Name: WW domain containing E3 ubiquitin protein ligase 1
  Uniprot ID: Q9H0M0
  ENST ID: ENST00000517970
  CDS Start-End: 308-3076
ggcgagctccgcgtgcgggttccgagtggctgctggcggcctgggctgccggggccgacgcctgggtggctgctgccgccgcgcctgctgcgagatggcgatcttgggcgcggaagggtgagggcgcccgccgcaggaggaggtgccgctgccgtggccgcccggctgccgggagccgacagcttcgcgccggggttgtctcctcacagactatgagctccttgaaagagggaatcgtgtcttactcatctttgtatccccagtgtctagcagttcctgatacatagttttagctgaattttgggacatggccactgcttcaccaaggtctgatactagtaataaccacagtggaaggttgcagttacaggtaactgtttctagtgccaaacttaaaagaaaaaagaactggttcggaacagcaatatatacagaagtagttgtagatggagaaattacgaaaacagcaaaatccagtagttcttctaatccaaaatgggatgaacagctaactgtaaatgttacgccacagactacattggaatttcaagtttggagccatcgcactttaaaagcagatgctttattaggaaaagcaacgatagatttgaaacaagctctgttgatacacaatagaaaattggaaagagtgaaagaacaattaaaactttccttggaaaacaagaatggcatagcacaaactggtgaattgacagttgtgcttgatggattggtgattgagcaagaaaatataacaaactgcagctcatctccaaccatagaaatacaggaaaatggtgatgccttacatgaaaatggagagccttcagcaaggacaactgccaggttggctgttgaaggcacgaatggaatagataatcatgtacctacaagcactctagtccaaaactcatgctgctcgtatgtagttaatggagacaacacaccttcatctccgtctcaggttgctgccagacccaaaaatacaccagctccaaaaccactcgcatctgagcctgccgatgacactgttaatggagaatcatcctcatttgcaccaactgataatgcgtctgtcacgggtactccagtagtgtctgaagaaaatgccttgtctccaaattgcactagtactactgttgaagatcctccagttcaagaaatactgacttcctcagaaaacaatgaatgtattccttctaccagtgcagaattggaatctgaagctagaagtatattagagcctgacacctctaattctagaagtagttctgcttttgaagcagccaaatcaagacagccagatgggtgtatggatcctgtacggcagcagtctgggaatgccaacacagaaaccttgccatcagggtgggaacaaagaaaagatcctcatggtagaacctattatgtggatcataatactcgaactaccacatgggagagaccacaacctttacctccaggttgggaaagaagagttgatgatcgtagaagagtttattatgtggatcataacaccagaacaacaacgtggcagcggcctaccatggaatctgtccgaaattttgaacagtggcaatctcagcggaaccaattgcagggagctatgcaacagtttaaccaacgatacctctattcggcttcaatgttagctgcagaaaatgacccttatggacctttgccaccaggctgggaaaaaagagtggattcaacagacagggtttactttgtgaatcataacacaaaaacaacccagtgggaagatccaagaactcaaggcttacagaatgaagaacccctgccagaaggctgggaaattagatatactcgtgaaggtgtaaggtactttgttgatcataacacaagaacaacaacattcaaagatcctcgcaatgggaagtcatctgtaactaaaggtggtccacaaattgcttatgaacgcggctttaggtggaagcttgctcacttccgttatttgtgccagtctaatgcactacctagtcatgtaaagatcaatgtgtcccggcagacattgtttgaagattccttccaacagattatggcattaaaaccctatgacttgaggaggcgcttatatgtaatatttagaggagaagaaggacttgattatggtggcctagcgagagaatggtttttcttgctttcacatgaagttttgaacccaatgtattgcttatttgagtatgcgggcaagaacaactattgtctgcagataaatccagcatcaaccattaatccagaccatctttcatacttctgtttcattggtcgttttattgccatggcactatttcatggaaagtttatcgatactggtttctctttaccattctacaagcgtatgttaagtaaaaaacttactattaaggatttggaatctattgatactgaattttataactcccttatctggataagagataacaacattgaagaatgtggcttagaaatgtacttttctgttgacatggagattttgggaaaagttacttcacatgacctgaagttgggaggttccaatattctggtgactgaggagaacaaagatgaatatattggtttaatgacagaatggcgtttttctcgaggagtacaagaacagaccaaagctttccttgatggttttaatgaagttgttcctcttcagtggctacagtacttcgatgaaaaagaattagaggttatgttgtgtggcatgcaggaggttgacttggcagattggcagagaaatactgtttatcgacattatacaagaaacagcaagcaaatcatttggttttggcagtttgtgaaagagacagacaatgaagtaagaatgcgactattgcagttcgtcactggaacctgccgtttacctctaggaggatttgctgagctcatgggaagtaatgggcctcaaaagttttgcattgaaaaagttggcaaagacacttggttaccaagaagccatacatgttttaatcgcttggatctaccaccatataagagttatgaacaactaaaggaaaaacttctttttgcaatagaagagacagagggatttggacaagaatgaatgtggcttcttattttggaggagctcttgcatttaaataccccagccaagaaaaattgcacagatagtgtatataagctgttcattctgtacagtgaattttccgaacctctcaaagtatgttttccgttcttccacagaaatatgcaaaacagttcatccttttctactttatttattgttcccttgaaatgactgaccaggaaaaagatcatccttaaattttgaagcaagtgagagactttattaaaaatacatatatatctatataaacatatatgatagtggctctagttttatagagctccaagtgtattaaacatgacagccattcattcataaagatctggatttgctttaccttgttaatattatctaggggaaaaagtgcaaattgctccatgttcttctctcccttatgtaacatctcctgagggtgtttagttgcatggctgttcagaaaggtattaagggcttaggccaaatcttactttgagtatgttaaaaaaaaaaaaatgctgctggcttttctgaagacaggtgcttgaacttgtcagtttgttttaaataaatacaatagttgaaaatttttctctgttacatcagtaatattgttaaagtaatggatagaaccataacttacacatgaaagtcatatactagatccaatactatttagtttattatcgaaattggaaggattcattgagcagcatagaagtttgtttacatgttactttgagatgctaggtatttgtggaattaaaaagaatcaggctcttttgtactttgtttttaaatctgtgatgcttttcaaatttaattcataataaattgatgcaatttcatacttaggaacatacaaaaggtaatgtaaactctgccacttttttgtgttcaaaattttggtttttatgaagccagatggattgaagagttacataagcatttgaatgctctaatataaggctaatgattttctgttagtgtttgaatatcttcattcctctcaaattcataacagttctatttaactgaattaaataaccatatgaaaaatcttttgggtctccccctttttacacagataattatttttgtcataacactttttaattgtttttcatcataggggcctttgctgaactacaaaaatgtgtaacaaattaaaatctgatgtgaatgatattaatgctacttttagcaaactgggcttcctaatacaaaattttaaatttccatttgtatcatgcttttaatatgcactgtaaatttcattaacttaaacattttttaatagccatggaactgacttcttaaaatctgttgcctataaatatttcactgctaagtacatacagaaaaacagtaattattgttttgccaaaattttatttttctacatattgagagtgtgttctccattttattcagaattcatagtaaagacgaaagaaaggcagagatctgcttggttgaatagactccttttccaaatccttattatgaacactctggtaattttcaagcctaaagaattaaaaaaaaaattctaatgtatgtgacaggttatgtgatagagggaaactggccttcaaaaaggactgcgt

SEQ ID NO: 200361 - DNA, 696 bp, Homo sapiens
  Payload ID: 19526
  Gene Name: WW domain containing E3 ubiquitin protein ligase 1
  ENST ID: ENST00000520453
  CDS Start-End: 1-696
aggtggtccacaaattgcttatgaacgcggctttaggtggaagcttgctcacttccgttatttgtgccagtctaatgcactacctagtcatgtaaagatcaatgtgtcccggcagacattgtttgaagattccttccaacagattatggcattaaaaccctatgacttgaggaggcgcttatatgtaatatttagaggagaagaaggacttgattatggtggcctagcgaggaatatattaagatcttccttaatgtcagggaagttttcttctattatgtctttgaatattttttctgttccatttgttccatttttcttcaggaacatcagtcatggagaatggtttttcttgctttcacatgaagttttgaacccaatgtattgcttatttgagtatgcgggcaagaacaactattgtctgcagataaatccagcatcaaccattaatccagaccatctttcatacttctgtttcattggtcgttttattgccatggcactatttcatggaaagtttatcgatactggtttctctttaccattctacaagcgtatgttaagtaaaaaacttactattaaggatttggaatctattgatactgaattttataactcccttatctggataagagataacaacattgaagaatgtggcttagaaatgtacttttctgttgacatggagattttggg

SEQ ID NO: 200362 - DNA, 513 bp, Homo sapiens
  Payload ID: 19526
  Gene Name: WW domain containing E3 ubiquitin protein ligase 1
  ENST ID: ENST00000520798
  CDS Start-End: 1-168
gtgaaagagacagacaatgaagtaagaatgcgactattgcagttcgtcactggaacctgccgtttacctctaggaggatttgctgagctcatgggaagtaatgggcctcaaaagttttgcattgaaaaagttggcaaagacacttggttaccaagaagccatacatgaggttttgccacgttgcccaggctggtctcaaactcccaggctcaactgatccaccaaccttggccttccaaaatgctggcattacaggcatgagccaccgtgtccagcaaatgggcattattttaataataccattataaaatattggtgcattattttaataatatttctcaactgtgtgtaaagaatacaactaagtattttttacatcaatttctacactatagcttcccagaaagaaaaaaaagctccttgttataatgtaaataatacaagtacagctttttcgattgcctgttttcttactctgaaaagcttgtgatgagtaaacccaaagtttaacca

SEQ ID NO: 200363 - DNA, 4227 bp, Homo sapiens
  Payload ID: 19527
  Gene Name: WW domain containing E3 ubiquitin protein ligase 2
  Uniprot ID: O00308
  ENST ID: ENST00000356003
  CDS Start-End: 162-2426
attttatagaaacgtttagtactcaccaaggccctcagtggaactggctgaaaatagcagcagactcactcagaaaagaattggagagatccatggcagggaagagagattaagggaaggtagagcgcttaggagagcttgaaaacccaaaggtggagaacatgcagctgaccctgaacctgcagacggagaacaaaggcagcgttgtctcaggcggagagctgacaattttcctggacgggccaactgttgatctgggaaatgtgcctaatggcagtgccctgacagatggatcacagctgccttcgagagactccagtggaacagcagtagctccagagaaccggcaccagccccccagcacaaactgctttggtggaagatcccggacgcacagacattcgggtgcttcagccagaacaaccccagcaaccggcgagcaaagccccggtgctcggagccggcaccgccagcccgtcaagaactcaggccacagtggcttggccaatggcacagtgaatgatgaacccacaacagccactgatcccgaagaaccttccgttgttggtgtgacgtccccacctgctgcacccttgagtgtgaccccgaatcccaacacgacttctctccctgccccagccacaccggctgaaggagaggaacccagcacttcgggtacacagcagctcccagcggctgcccaggcccccgacgctctgcctgctggatgggaacagcgagagctgcccaacggacgtgtctattatgttgaccacaataccaagaccaccacctgggagcggccccttcctccaggctgggaaaaacgcacagatccccgaggcaggttttactatgtggatcacaatactcggaccaccacctggcagcgtccgaccgcggagtacgtgcgcaactatgagcagtggcagtcgcagcggaatcagctccagggggccatgcagcacttcagccaaagattcctctaccagtcttcgagtgcttcgactgaccatgatcccctgggccccctccctcctggctgggagaagagacaggacaatggacgggtgtattacgtgaaccataacactcgcacgacccagtgggaggatccccggacccaggggatgatccaggaaccagctctgcccccaggatgggagatgaaatacaccagcgagggggtgcgatactttgtggaccacaatacccgcaccaccacctttaaggatcctcgcccggggtttgagtcggggacgaagcaaggttcccctggtgcttatgaccgcagttttcggtggaagtatcaccagttccgtttcctctgccattcaaatgccctacctagccacgtgaagatcagcgtttccaggcagacgcttttcgaagattccttccaacagatcatgaacatgaaaccctatgacctgcgccgccggctctacatcatcatgcgtggcgaggagggcctggactatgggggcatcgccagagagtggtttttcctcctgtctcatgaggtgctcaaccctatgtattgtttatttgaatatgccggaaagaacaattactgcctgcagatcaaccccgcctcctccatcaacccggaccacctcacctactttcgctttataggcagattcatcgccatggcgctgtaccatggaaagttcatcgacacgggcttcaccctccctttctacaagcggatgctcaataagagaccaaccctgaaagacctggagtccattgaccctgagttctacaactccattgtctggatcaaagagaacaacctggaagaatgtggcctggagctgtacttcatccaggacatggagatactgggcaaggtgacgacccacgagctgaaggagggcggcgagagcatccgggtcacagaggagaacaaggaagagtacatcatgctgctgactgactggcgtttcacccgaggcgtggaagagcagaccaaagccttcctggatggcttcaacgaggtggccccgctggagtggctgcgctactttgacgagaaagagctggagctgatgctgtgcggcatgcaggagatagacatgagcgactggcagaagagcaccatctaccggcactacaccaagaacagcaagcagatccagtggttctggcaggtggtgaaggagatggacaacgagaagaggatccggctgctgcagtttgtcaccggtacctgccgcctgcccgtcgggggatttgccgaactcatcggtagcaacggaccacagaagttttgcattgacaaagttggcaaggaaacctggctgcccagaagccacacctgcttcaaccgtctggatcttccaccctacaagagctacgaacagctgagagagaagctgctgtatgccattgaggagaccgagggctttggacaggagtaaccgaggccgcccctcccacgccccccagcgcacatgtagtcctgagtcctccctgcctgagaggccactggccccgcagcccttgggaggcccccgtggatgtggccctgtgtgggaccacactgtcatctcgctgctggcagaaaagcctgatcccaggaggccctgcagttcccccgacccgcggatggcagtctggaataaagccccctagttgcctttggccccacctttgcaaagttccagagggctgaccctctctgcaaaactctcccctgtcctctagaccccaccctgggtgtatgtgagtgtgcaagggaaggtgttgcatccccaggggctgccgcagaggccggagacctcctggactagttcggcgaggagactggccactgggggtggctgttcgggactgagagcgccaagggtctttgccagcaaaggaggttctgcctgtaattgagcctctctgatgatggagatgaagtgaaggtctgagggagcgggccctggggcgaggccatctctgcctgcctccctagcaggcgccagcggtggaggctgagtcgcaggacacatgccggccagttaattcattctcagccaatgaaggtttgtctaagctgcctgggtatccacgggacaaaaacagcaaactccctcagactttgtccatgtataaacttgaagtggttgtgttgtagggttgcaggttttttgttacgctgctgtcactttctgtccaggagctggcaccccaggtgttctgagaccttgagggacccagacctttgggtccaagagtttcccaaacagccacgcctctcaggaacccacctggcggttccgtgagctcaggcaggcctgacccggcggcacagcctggcagggacctcgtccccaagcctggcagaatgagaggggttgaggtcccgagcgccactcctagccttgccgccttcaatagagaagaaatccctttgctagatagggtcccccaggcagtccccagtggcgggacacaggggtccggctgtggagctcccctgccagcccctggagctccaggagggcctgttggtcccctgttcagaatggagtgcagcccgccagcggaaagtgttcattctgcataggtgtgaggctttatctgcacacaggacatgaaaaccagcagaaaggccctgagctgctgcatagccccatctgatttctgcagttcccgccagcctccaacacggggactctgccgtaactggaatcttcataggtcatattgaaatcttcaaggtgaccatgccccaccggggtgctggggcagtagtcatggcagactcccggcctgggcccccaggattctaggacccccaggcagccccttggactggtcccgggtgccttccaagcacagtctccatgctcccagattctcgaccttcccccggcccgggaggtgcagcctgcgtctgcctctgtcgtgtgtgctgatttgagtggcttagcttgccacagcgcagcctcttctgtccctttcagtcatttgctgtacttccctgtggcacgttaccatggaagccgctccagggtgggtcagggtgcaagctgctggtgaggtttggaagcatcaggctcacgggtgttcatgtgtgttcgtgcgtgtgtgtgcgtacgtgtatataactgaagtgtctgtacggaatgccctttgctagccatgggctggtcaccagattgttttgtaatgcccgccccttgcctcgatattgccagtttcttgtgcaataaacaatcagcagctgtg

SEQ ID NO: 200364 - DNA, 4515 bp, Homo sapiens
  Payload ID: 19527
  Gene Name: WW domain containing E3 ubiquitin protein ligase 2
  Uniprot ID: O00308
  ENST ID: ENST00000359154
  CDS Start-End: 102-2714
gcgcggtcacgtgacccggcccgagtgcgggcggtggaaggcggaagtaggagaggagttcggcgccgcttctgtggccacggcagcttcacggtgatgatatggcatctgccagctctagccgggcaggagtggccctgccttttgagaagtctcagctcactttgaaagtggtgtccgcaaagcccaaggtgcataatcgtcaacctcgaattaactcctacgtggaggtggcggtggatggactccccagtgagaccaagaagactgggaagcgcattgggagctctgagcttctctggaatgagatcatcattttgaatgtcacggcacagagtcatttagatttaaaggtctggagctgccataccttgagaaatgaactgctaggcaccgcatctgtcaacctctccaacgtcttgaagaacaatgggggcaaaatggagaacatgcagctgaccctgaacctgcagacggagaacaaaggcagcgttgtctcaggcggagagctgacaattttcctggacgggccaactgttgatctgggaaatgtgcctaatggcagtgccctgacagatggatcacagctgccttcgagagactccagtggaacagcagtagctccagagaaccggcaccagccccccagcacaaactgctttggtggaagatcccggacgcacagacattcgggtgcttcagccagaacaaccccagcaaccggcgagcaaagccccggtgctcggagccggcaccgccagcccgtcaagaactcaggccacagtggcttggccaatggcacagtgaatgatgaacccacaacagccactgatcccgaagaaccttccgttgttggtgtgacgtccccacctgctgcacccttgagtgtgaccccgaatcccaacacgacttctctccctgccccagccacaccggctgaaggagaggaacccagcacttcgggtacacagcagctcccagcggctgcccaggcccccgacgctctgcctgctggatgggaacagcgagagctgcccaacggacgtgtctattatgttgaccacaataccaagaccaccacctgggagcggccccttcctccaggctgggaaaaacgcacagatccccgaggcaggttttactatgtggatcacaatactcggaccaccacctggcagcgtccgaccgcggagtacgtgcgcaactatgagcagtggcagtcgcagcggaatcagctccagggggccatgcagcacttcagccaaagattcctctaccagtcttcgagtgcttcgactgaccatgatcccctgggccccctccctcctggctgggagaagagacaggacaatggacgggtgtattacgtgaaccataacactcgcacgacccagtgggaggatccccggacccaggggatgatccaggaaccagctctgcccccaggatgggagatgaaatacaccagcgagggggtgcgatactttgtggaccacaatacccgcaccaccacctttaaggatcctcgcccggggtttgagtcggggacgaagcaaggttcccctggtgcttatgaccgcagttttcggtggaagtatcaccagttccgtttcctctgccattcaaatgccctacctagccacgtgaagatcagcgtttccaggcagacgcttttcgaagattccttccaacagatcatgaacatgaaaccctatgacctgcgccgccggctctacatcatcatgcgtggcgaggagggcctggactatgggggcatcgccagagagtggtttttcctcctgtctcatgaggtgctcaaccctatgtattgtttatttgaatatgccggaaagaacaattactgcctgcagatcaaccccgcctcctccatcaacccggaccacctcacctactttcgctttataggcagattcatcgccatggcgctgtaccatggaaagttcatcgacacgggcttcaccctccctttctacaagcggatgctcaataagagaccaaccctgaaagacctggagtccattgaccctgagttctacaactccattgtctggatcaaagagaacaacctggaagaatgtggcctggagctgtacttcatccaggacatggagatactgggcaaggtgacgacccacgagctgaaggagggcggcgagagcatccgggtcacagaggagaacaaggaagagtacatcatgctgctgactgactggcgtttcacccgaggcgtggaagagcagaccaaagccttcctggatggcttcaacgaggtggccccgctggagtggctgcgctactttgacgagaaagagctggagctgatgctgtgcggcatgcaggagatagacatgagcgactggcagaagagcaccatctaccggcactacaccaagaacagcaagcagatccagtggttctggcaggtggtgaaggagatggacaacgagaagaggatccggctgctgcagtttgtcaccggtacctgccgcctgcccgtcgggggatttgccgaactcatcggtagcaacggaccacagaagttttgcattgacaaagttggcaaggaaacctggctgcccagaagccacacctgcttcaaccgtctggatcttccaccctacaagagctacgaacagctgagagagaagctgctgtatgccattgaggagaccgagggctttggacaggagtaaccgaggccgcccctcccacgccccccagcgcacatgtagtcctgagtcctccctgcctgagaggccactggccccgcagcccttgggaggcccccgtggatgtggccctgtgtgggaccacactgtcatctcgctgctggcagaaaagcctgatcccaggaggccctgcagttcccccgacccgcggatggcagtctggaataaagccccctagttgcctttggccccacctttgcaaagttccagagggctgaccctctctgcaaaactctcccctgtcctctagaccccaccctgggtgtatgtgagtgtgcaagggaaggtgttgcatccccaggggctgccgcagaggccggagacctcctggactagttcggcgaggagactggccactgggggtggctgttcgggactgagagcgccaagggtctttgccagcaaaggaggttctgcctgtaattgagcctctctgatgatggagatgaagtgaaggtctgagggagcgggccctggggcgaggccatctctgcctgcctccctagcaggcgccagcggtggaggctgagtcgcaggacacatgccggccagttaattcattctcagccaatgaaggtttgtctaagctgcctgggtatccacgggacaaaaacagcaaactccctcagactttgtccatgtataaacttgaagtggttgtgttgtagggttgcaggttttttgttacgctgctgtcactttctgtccaggagctggcaccccaggtgttctgagaccttgagggacccagacctttgggtccaagagtttcccaaacagccacgcctctcaggaacccacctggcggttccgtgagctcaggcaggcctgacccggcggcacagcctggcagggacctcgtccccaagcctggcagaatgagaggggttgaggtcccgagcgccactcctagccttgccgccttcaatagagaagaaatccctttgctagatagggtcccccaggcagtccccagtggcgggacacaggggtccggctgtggagctcccctgccagcccctggagctccaggagggcctgttggtcccctgttcagaatggagtgcagcccgccagcggaaagtgttcattctgcataggtgtgaggctttatctgcacacaggacatgaaaaccagcagaaaggccctgagctgctgcatagccccatctgatttctgcagttcccgccagcctccaacacggggactctgccgtaactggaatcttcataggtcatattgaaatcttcaaggtgaccatgccccaccggggtgctggggcagtagtcatggcagactcccggcctgggcccccaggattctaggacccccaggcagccccttggactggtcccgggtgccttccaagcacagtctccatgctcccagattctcgaccttcccccggcccgggaggtgcagcctgcgtctgcctctgtcgtgtgtgctgatttgagtggcttagcttgccacagcgcagcctcttctgtccctttcagtcatttgctgtacttccctgtggcacgttaccatggaagccgctccagggtgggtcagggtgcaagctgctggtgaggtttggaagcatcaggctcacgggtgttcatgtgtgttcgtgcgtgtgtgtgcgtacgtgtatataactgaagtgtctgtacggaatgccctttgctagccatgggctggtcaccagattgttttgtaatgcccgccccttgcctcgatattgccagtttcttgtgcaataaacaatcagcagctgtg

SEQ ID NO: 200365 - DNA, 2474 bp, Homo sapiens
  Payload ID: 19527
  Gene Name: WW domain containing E3 ubiquitin protein ligase 2
  Uniprot ID: O00308
  ENST ID: ENST00000569174
  CDS Start-End: 71-1078
agatgaaacagaaaggctaaagagggctggagtcaggggacttctcttccaccagcttcacggtgatgatatggcatctgccagctctagccgggcaggagtggccctgccttttgagaagtctcagctcactttgaaagtggtgtccgcaaagcccaaggtgcataatcgtcaacctcgaattaactcctacgtggaggtggcggtggatggactccccagtgagaccaagaagactgggaagcgcattgggagctctgagcttctctggaatgagatcatcattttgaatgtcacggcacagagtcatttagatttaaaggtctggagctgccataccttgagaaatgaactgctaggcaccgcatctgtcaacctctccaacgtcttgaagaacaatgggggcaaaatggagaacatgcagctgaccctgaacctgcagacggagaacaaaggcagcgttgtctcaggcggagagctgacaattttcctggacgggccaactgttgatctgggaaatgtgcctaatggcagtgccctgacagatggatcacagctgccttcgagagactccagtggaacagcagtagctccagagaaccggcaccagccccccagcacaaactgctttggtggaagatcccggacgcacagacattcgggtgcttcagccagaacaaccccagcaaccggcgagcaaagccccggtgctcggagccggcaccgccagcccgtcaagaactcaggccacagtggcttggccaatggcacagtgaatgatgaacccacaacagccactgatcccgaagaaccttccgttgttggtgtgacgtccccacctgctgcacccttgagtgtgaccccgaatcccaacacgacttctctccctgccccagccacaccggctgaaggagaggaacccagcacttcgggtacacagcagctcccagcggctgcccaggcccccgacgctctgcctgctggatgggaacagcgagagctgcccaacggacgtgtctattatgttgaccacaataccaagaccaccacctgggagcggccccttcctccagggtaggtcatcaactgagaagacctgagactctggaactgacaccatgagtcacccaatggcttcttgaaacggtccctttctgcggaggtagcatagcacagtgacgtttattccgggtcacttgattgcttttcctatccacttaccttaatattgctcccatgtcttaggacatattagaattattagaagatctctgggaaacaaaaggcgcatgggaggccaagatttagagtgttgatgcattccgccgtaccctatgcccagcctgtccctaaaggcagagtgcttcttattcggcagggcttcgtgagaatgccgccaagttatccaaaaccaaaggatgagagaggcttccaagagagggaagactgtccaagttcaaggagaaggggtttggttccctgtctgccagggacagaaagttctttccacatgtgtctcctggtcccgagagctttcaaaaggggatgtattctgctccaagaaagaatcacctcccagtaaagtagccatgaagggctcctgtataaaatatgcacacttcccctgccctgagtttgtggagggaaaggctgtcggaagtagggactcttaggagagcccgtgtgccctgtttggttcagctgtcaggcgtgtgccacacacatcccacctcatcttctggtcccataattctccatggatgggctgcttttagctccagttttccagtagaatgcttgagttttccttttttccgtacctcctggaggatgaaactcataacctgtcatcatcagtactcactgtgttttccactttgacttgaagtcaaatgaagttaccaaagttaaacatggacttctcaaattagaaaaaaacaaacaacaaaaaaacaggttaagtgttttgttatgaaaattatgaaaatgttcttattattatggaaaatttcaaatagatatagagagaataatgttacaaacccccacatactcaacatttagcttcaaaaattatcaactcatggcgggttttgtttcatctgtacaaactagtcggcacactatgatggcctgtggacaaaatccggccctctgactgtttttgtaaataaggttttattggaacacagccacacatatttgttgacttattgtttttggctgtttttgtacttcattggcagagttgagtaattgcagcagactctatggcttgcaaaacctaaaataattactttgtgtagcgctttatagaaaaaatttgctaactcccgatctgtaacccccaacctatccgccgcaccctgatctaggtaattttgaagcaaatcccaaatgtcacatcatctatccatatttcactatgtatttctaaaacatattcttttattcaaaataaaactctaatatca

SEQ ID NO: 200366 - DNA, 561 bp, Homo sapiens
  Payload ID: 19527
  Gene Name: WW domain containing E3 ubiquitin protein ligase 2
  ENST ID: ENST00000563659
  CDS Start-End: 377-561
agttcggcgccgcttctgtggccacggcaggtgctgtggcttacgtttataatcccatcactttgggaggccaaggcaggaggatggcttgagcctaggagttcaagaccagtctggacaacttggtttgatgaagagtggacaatcgtggagaaatacgattggacaaaaggggtatgattgactgatgaaacagaaaggctaaagagggctggagtcaggggacttctcttccaccagatggagtctcactctctcccccaggctggggtgcagcggcgtgatctcagctcactccaacctctgcttcccaggttcaagcgattcttctgcctcagcctccggatacctgggattacagcttcacggtgatgatatggcatctgccagctctagccgggcaggagtggccctgccttttgagaagtctcagctcactttgaaagtggtgtccgcaaagcccaaggtgcataatcgtcaacctcgaattaactcctacgtggaggtggcggtggatggactccccagtgagaccaagaagactgggaagcgcattgggag

SEQ ID NO: 200367 - DNA, 3672 bp, Homo sapiens
  Payload ID: 19527
  Gene Name: WW domain containing E3 ubiquitin protein ligase 2
  Uniprot ID: O00308
  ENST ID: ENST00000568684
  CDS Start-End: 579-1874
cccctcctgcgtgtggttcttggagaaagttggaggtggtggtgatttcagtcgccttggccgccttgagccggagctgagcggaggcactgggccgagcctgcttcccgggccttcctaccatgccagggctgctccctgcctccgccaccctggcacaccttcacccgcgtaccgcctcctccccgtcgctctgccttttccaaaactcacttgggccctccgtgcgcagggttcttttttggtttttctgtaaaaatcaaaacaaaaaacagagacttttgagaggagcagatgccacctaaagtcccactgcattccctgcaaagcgctcaaatgtggaagccagtcattggcatttttattttttattgattgattgattttttcaccagtggctttttgtaacctctgtgttctgctgtgtttcttgtgtttagtcttcgagtgcttcgactgaccatgatcccctgggccccctccctcctggctgggagaagagacaggacaatggacgggtgtattacgtgaaccataacactcgcacgacccagtgggaggatccccggacccaggggatgatccaggaaccagctctgcccccaggatgggagatgaaatacaccagcgagggggtgcgatactttgtggaccacaatacccgcaccaccacctttaaggatcctcgcccggggtttgagtcggggacgaagcaaggttcccctggtgcttatgaccgcagttttcggtggaagtatcaccagttccgtttcctctgccattcaaatgccctacctagccacgtgaagatcagcgtttccaggcagacgcttttcgaagattccttccaacagatcatgaacatgaaaccctatgacctgcgccgccggctctacatcatcatgcgtggcgaggagggcctggactatgggggcatcgccagagagtggtttttcctcctgtctcatgaggtgctcaaccctatgtattgtttatttgaatatgccggaaagaacaattactgcctgcagatcaaccccgcctcctccatcaacccggaccacctcacctactttcgctttataggcagattcatcgccatggcgctgtaccatggaaagttcatcgacacgggcttcaccctccctttctacaagcggatgctcaataagagaccaaccctgaaagacctggagtccattgaccctgagttctacaactccattgtctggatcaaagagaacaacctggaagaatgtggcctggagctgtacttcatccaggacatggagatactgggcaaggtgacgacccacgagctgaaggagggcggcgagagcatccgggtcacagaggagaacaaggaagagtacatcatgctgctgactgactggcgtttcacccgaggcgtggaagagcagaccaaagccttcctggatggcttcaacgaggtggccccgctggagtggctgcgctactttgacgagaaagagctggagctgatgctgtgcggcatgcaggagatagacatgagcgactggcagaagagcaccatctaccggcactacaccaagaacagcaagcagatccagtggttctggcaggtggtgaaggagatggacaacgagaagaggatccggctgctgcagtttgtcaccggtacctgccgcctgcccgtcgggggatttgccgaactcatcggtagcaacggaccacagaagttttgcattgacaaagttggcaaggaaacctggctgcccagaagccacacctgcttcaaccgtctggatcttccaccctacaagagctacgaacagctgagagagaagctgctgtatgccattgaggagaccgagggctttggacaggagtaaccgaggccgcccctcccacgccccccagcgcacatgtagtcctgagtcctccctgcctgagaggccactggccccgcagcccttgggaggcccccgtggatgtggccctgtgtgggaccacactgtcatctcgctgctggcagaaaagcctgatcccaggaggccctgcagttcccccgacccgcggatggcagtctggaataaagccccctagttgcctttggccccacctttgcaaagttccagagggctgaccctctctgcaaaactctcccctgtcctctagaccccaccctgggtgtatgtgagtgtgcaagggaaggtgttgcatccccaggggctgccgcagaggccggagacctcctggactagttcggcgaggagactggccactgggggtggctgttcgggactgagagcgccaagggtctttgccagcaaaggaggttctgcctgtaattgagcctctctgatgatggagatgaagtgaaggtctgagggagcgggccctggggcgaggccatctctgcctgcctccctagcaggcgccagcggtggaggctgagtcgcaggacacatgccggccagttaattcattctcagccaatgaaggtttgtctaagctgcctgggtatccacgggacaaaaacagcaaactccctcagactttgtccatgtataaacttgaagtggttgtgttgtagggttgcaggttttttgttacgctgctgtcactttctgtccaggagctggcaccccaggtgttctgagaccttgagggacccagacctttgggtccaagagtttcccaaacagccacgcctctcaggaacccacctggcggttccgtgagctcaggcaggcctgacccggcggcacagcctggcagggacctcgtccccaagcctggcagaatgagaggggttgaggtcccgagcgccactcctagccttgccgccttcaatagagaagaaatccctttgctagatagggtcccccaggcagtccccagtggcgggacacaggggtccggctgtggagctcccctgccagcccctggagctccaggagggcctgttggtcccctgttcagaatggagtgcagcccgccagcggaaagtgttcattctgcataggtgtgaggctttatctgcacacaggacatgaaaaccagcagaaaggccctgagctgctgcatagccccatctgatttctgcagttcccgccagcctccaacacggggactctgccgtaactggaatcttcataggtcatattgaaatcttcaaggtgaccatgccccaccggggtgctggggcagtagtcatggcagactcccggcctgggcccccaggattctaggacccccaggcagccccttggactggtcccgggtgccttccaagcacagtctccatgctcccagattctcgaccttcccccggcccgggaggtgcagcctgcgtctgcctctgtcgtgtgtgctgatttgagtggcttagcttgccacagcgcagcctcttctgtccctttcagtcatttgctgtacttccctgtggcacgttaccatggaagccgctccagggtgggtcagggtgcaagctgctggtgaggtttggaagcatcaggctcacgggtgttcatgtgtgttcgtgcgtgtgtgtgcgtacgtgtatataactgaagtgtctgtacggaatgccctttgctagccatgggctggtcaccagattgttttgtaatgcccgccccttgcctcgatattgccagtttcttgtgcaataaacaatcagcagct

SEQ ID NO: 200368 - DNA, 574 bp, Homo sapiens
  Payload ID: 19527
  Gene Name: WW domain containing E3 ubiquitin protein ligase 2
  ENST ID: ENST00000561780
  CDS Start-End: 254-574
gagtgcgggcggtggaaggcggaagtaggagaggagttcggcgccgcttctgtggccacggcagatgaaacagaaaggctaaagagggctggagtcaggggacttctcttccaccagatggagtctcactctctcccccaggctggggtgcagcggcgtgatctcagctcactccaacctctgcttcccaggttcaagcgattcttctgcctcagcctccggatacctgggattacagcttcacggtgatgatatggcatctgccagctctagccgggcaggagtggccctgccttttgagaagtctcagctcactttgaaagtggtgtccgcaaagcccaaggtgcataatcgtcaacctcgaattaactcctacgtggaggtggcggtggatggactccccagtgagaccaagaagactgggaagcgcattgggagctctgagcttctctggaatgagatcatcattttgaatgtcacggcacagagtcatttagatttaaaggtctggagctgccataccttgagaaatgaactgctaggcaccgcatctgtcaacctctccaacgtcttg

SEQ ID NO: 200369 - DNA, 738 bp, Homo sapiens
  Payload ID: 19527
  Gene Name: WW domain containing E3 ubiquitin protein ligase 2
  ENST ID: ENST00000569620
  CDS Start-End: 254-604
gagtgcgggcggtggaaggcggaagtaggagaggagttcggcgccgcttctgtggccacggcagatgaaacagaaaggctaaagagggctggagtcaggggacttctcttccaccagatggagtctcactctctcccccaggctggggtgcagcggcgtgatctcagctcactccaacctctgcttcccaggttcaagcgattcttctgcctcagcctccggatacctgggattacagcttcacggtgatgatatggcatctgccagctctagccgggcaggagtggccctgccttttgagaagtctcagctcactttgaaagtggtgtccgcaaagcccaaggtgcataatcgtcaacctcgaattaactcctacgtggaggtggcggtggatggactccccagtgagaccaagaagactgggaagcgcattgggagctctgagcttctctggaatgagatcatcattttgaatgtcacggcacagagtcatttagatttaaaggtctggagctgccataccttgagaaatgaactgctaggcaccgcatctgtcaacctctccaacgtcttgaagaacaatgggggcaaaagtaccttttaaaaaattaaaatatgctacggcttgagagatttaccaagacggatgaaatctttgtatcttgttttaagaggatccacagctggttcccgagactccttctggggtaccttgttactggagaacatgcagctgac

SEQ ID NO: 200370 - DNA, 710 bp, Homo sapiens
  Payload ID: 19528
  Gene Name: WW domain containing oxidoreductase
  Uniprot ID: Q9NZC7
  ENST ID: ENST00000355860
  CDS Start-End: 101-670
gccccgacgcgcgcgggtctcgtttggagcgggagtgagttcctgagcgagtggacccggcagcgggcgataggggggccaggtgcctccacagtcagccatggcagcgctgcgctacgcggggctggacgacacggacagtgaggacgagctgcctccgggctgggaggagagaaccaccaaggacggctgggtttactacgccaatcacaccgaggagaagactcagtgggaacatccaaaaactggaaaaagaaaacgagtggcaggagatttgccatacggatgggaacaagaaactgatgagaacggacaagtgttttttgttgaccatataaataaaagaaccacctacttggacccaagactggcgtttactgtggatgataatccgaccaagccaaccacccggcaaagatacgacggcagcaccactgccatggaaattctccagggccgggatttcactggcaaagtggttgtggtcactggagctaattcaggaatagggttcgaaaccgccaagtcttttgccctccatggtgcacatgtgatcttggcctgcaggaacatggcaagggcgagtgaagcagtgtcacgcattttagaagaatggaaaacaaaataccaccctccgccagaaaagtgcagaataaaaattttccactagcaaaagaaggaaaaaataaaagatcttgaatagtctcatc

SEQ ID NO: 200371 - DNA, 1594 bp, Homo sapiens
  Payload ID: 19528
  Gene Name: WW domain containing oxidoreductase
  Uniprot ID: Q9NZC7
  ENST ID: ENST00000402655
  CDS Start-End: 126-1061
gcagtgcgcaggcgtgagcggtcgggccccgacgcgcgcgggtctcgtttggagcgggagtgagttcctgagcgagtggacccggcagcgggcgataggggggccaggtgcctccacagtcagccatggcagcgctgcgctacgcggggctggacgacacggacagtgaggacgagctgcctccgggctgggaggagagaaccaccaaggacggctgggtttactacgccaatcacaccgaggagaagactcagtgggaacatccaaaaactggaaaaagaaaacgagtggcaggagatttgccatacggatgggaacaagaaactgatgagaacggacaagtgttttttgttgaccatataaataaaagaaccacctacttggacccaagactggcgtttactgtggatgataatccgaccaagccaaccacccggcaaagatacgacggcagcaccactgccatggaaattctccagggccgggatttcactggcaaagtggttgtggtcactggagctaattcaggaatagcaacagggagctgccaccaccgtgtactgtgctgctgtcccagaactggagggtctgggagggatgtacttcaacaactgctgccgctgcatgccctcaccagaagctcagagcgaagagacggcccggaccctgtgggcgctcagcgagaggctgatccaagaacggcttggcagccagtccggctaagtggagctcagagcggatgggcacacacacccgccctgtgtgtgtcccctcacgcaagtgccagggctgggccccttccaaatgtccctccaacacagatccgcaagagtaaaggaaataagagcagtcacaacagagtgaaaaatcttaagtaccaatgggaagcagggaattcctggggtaaagtatcacttttctggggctgggctaggcataggtctctttgctttctggtggtggcctgtttgaaagtaaaaacctgcttggtgtgtaggttccgtatctccctggagaagcaccagcaattctctttcttttactgttatagaatagcctgaggtcccctcgtcccatccagctaccaccacggccaccactgcagccgggggctggccttctcctacttagggaagaaaaagcaagtgttcactgctccttgctgcattgatccaggagataattgtttcattcatcctgaccaagactgagccagcttagcaactgctggggagacaaatctcagaaccttgtcccagccagtgaggatgacagtgacacccagagggagtagaatacgcagaactaccaggtggcaaagtacttgtcatagactcctttgctaatgctatgcaaaaaattctttagagattataacaaatttttcaaatcattccttagataccttgaaaggcaggaagggaagcgtatatacttaagaatacacaggatattttggggggcagagaataaaacgttagttaatccctttgtctgtcaatcacagtctcagttctcttgctttcacattgtacttaaacctcctgctgtgcctcgcatcctatgcttaataaaagaacatgcttgaatatca

SEQ ID NO: 200372 - DNA, 1701 bp, Homo sapiens
  Payload ID: 19528
  Gene Name: WW domain containing oxidoreductase
  Uniprot ID: Q9NZC7
  ENST ID: ENST00000406884
  CDS Start-End: 126-830
gcagtgcgcaggcgtgagcggtcgggccccgacgcgcgcgggtctcgtttggagcgggagtgagttcctgagcgagtggacccggcagcgggcgataggggggccaggtgcctccacagtcagccatggcagcgctgcgctacgcggggctggacgacacggacagtgaggacgagctgcctccgggctgggaggagagaaccaccaaggacggctgggtttactacgccaatcacaccgaggagaagactcagtgggaacatccaaaaactggaaaaagaaaacgagtggcaggagatttgccatacggatgggaacaagaaactgatgagaacggacaagtgttttttgttgaccatataaataaaagaaccacctacttggacccaagactggcgtttactgtggatgataatccgaccaagccaaccacccggcaaagatacgacggcagcaccactgccatggaaattctccagggccgggatttcactggcaaagtggttgtggtcactggagctaattcaggaatagggttcgaaaccgccaagtcttttgccctccatggtgcacatgtgatcttggcctgcaggaacatggcaagggcgagtgaagcagtgtcacgcattttagaagaatggcaacagggagctgccaccaccgtgtactgtgctgctgtcccagaactggagggtctgggagggatgtacttcaacaactgctgccgctgcatgccctcaccagaagctcagagcgaagagacggcccggaccctgtgggcgctcagcgagaggctgatccaagaacggcttggcagccagtccggctaagtggagctcagagcggatgggcacacacacccgccctgtgtgtgtcccctcacgcaagtgccagggctgggccccttccaaatgtccctccaacacagatccgcaagagtaaaggaaataagagcagtcacaacagagtgaaaaatcttaagtaccaatgggaagcagggaattcctggggtaaagtatcacttttctggggctgggctaggcataggtctctttgctttctggtggtggcctgtttgaaagtaaaaacctgcttggtgtgtaggttccgtatctccctggagaagcaccagcaattctctttcttttactgttatagaatagcctgaggtcccctcgtcccatccagctaccaccacggccaccactgcagccgggggctggccttctcctacttagggaagaaaaagcaagtgttcactgctccttgctgcattgatccaggagataattgtttcattcatcctgaccaagactgagccagcttagcaactgctggggagacaaatctcagaaccttgtcccagccagtgaggatgacagtgacacccagagggagtagaatacgcagaactaccaggtggcaaagtacttgtcatagactcctttgctaatgctatgcaaaaaattctttagagattataacaaatttttcaaatcattccttagataccttgaaaggcaggaagggaagcgtatatacttaagaatacacaggatattttggggggcagagaataaaacgttagttaatccctttgtctgtcaatcacagtctcagttctcttgctttcacattgtacttaaacctcctgctgtgcctcgcatcctatgcttaataaaagaacatgcttgaatatca

SEQ ID NO: 200373 - DNA, 1227 bp, Homo sapiens
  Payload ID: 19528
  Gene Name: WW domain containing oxidoreductase
  Uniprot ID: Q9NZC7
  ENST ID: ENST00000408984
  CDS Start-End: 86-1177
ggtctcgtttggagcgggagtgagttcctgagcgagtggacccggcagcgggcgataggggggccaggtgcctccacagtcagccatggcagcgctgcgctacgcggggctggacgacacggacagtgaggacgagctgcctccgggctgggaggagagaaccaccaaggacggctgggtttactacgccaatcacaccgaggagaagactcagtgggaacatccaaaaactggaaaaagaaaacgagtggcaggagatttgccatacggatgggaacaagaaactgatgagaacggacaagtgttttttgttgaccatataaataaaagaaccacctacttggacccaagactggcgtttactgtggatgataatccgaccaagccaaccacccggcaaagatacgacggcagcaccactgccatggaaattctccagggccgggatttcactggcaaagtggttgtggtcactggagctaattcaggaatagggttcgaaaccgccaagtcttttgccctccatggtgcacatgtgatcttggcctgcaggaacatggcaagggcgagtgaagcagtgtcacgcattttagaagaatggcataaagccaaggtagaagcaatgaccctggacctcgctctgctccgtagcgtgcagcattttgctgaagcattcaaggccaagaatgtgcctcttcatgtgcttgtgtgcaacgcagcaacttttgctctaccctggagtctcaccaaagatggcctggagaccacctttcaagtgaatcatctggggcacttctaccttgtccagctcctccaggatgttttgtgccgctcagctcctgcccgtgtcattgtggtctcctcagagtcccatcgatttacagatattaacgactccttgggaaaactggacttcagtcgcctctctccaacaaaaaacgactattgggcgatgctggcttataacaggtccaagctctgcaacatcctcttctccaacgagctgcaccgtcgcctctccccacgcggggtcacgtcgaacgcagtgcatcctggaaatatgatgtactccaacattcatcgcagctggtgggtgtacacactgctgtttaccttggcgaggcctttcaccaagtccatggtttcagactgcctggtagaaggaggtcacttctgattgtcagtgactttgagctgagtgctgaaataaaatgataaacaagtcaa

SEQ ID NO: 200374 - DNA, 1670 bp, Homo sapiens
  Payload ID: 19528
  Gene Name: WW domain containing oxidoreductase
  ENST ID: ENST00000539474
  CDS Start-End: 126-767
gcagtgcgcaggcgtgagcggtcgggccccgacgcgcgcgggtctcgtttggagcgggagtgagttcctgagcgagtggacccggcagcgggcgataggggggccaggtgcctccacagtcagccatggcagcgctgcgctacgcggggctggacgacacggacagtgaggacgagctgcctccgggctgggaggagagaaccaccaaggacggctgggtttactacgccaatcacaccgaggagaagactcagtgggaacatccaaaaactggaaaaagaaaacgagtggcaggagatttgccatacggatgggaacaagaaactgatgagaacggacaagtgttttttgttgaccatataaataaaagaaccacctacttggacccaagactggcgtttactgtggatgataatccgaccaagccaaccacccggcaaagatacgacggcagcaccactgccatggaaattctccagggccgggatttcactggcaaagtggttgtggtcactggagctaattcaggaataggaaaagccagctgccatgttgggaggatactcaagcatacccgtgtagaagaactgagcctcctgccaacagccatcaacagggagctgccaccaccgtgtactgtgctgctgtcccagaactggagggtctgggagggatgtacttcaacaactgctgccgctgcatgccctcaccagaagctcagagcgaagagacggcccggaccctgtgggcgctcagcgagaggctgatccaagaacggcttggcagccagtccggctaagtggagctcagagcggatgggcacacacacccgccctgtgtgtgtcccctcacgcaagtgccagggctgggccccttccaaatgtccctccaacacagatccgcaagagtaaaggaaataagagcagtcacaacagagtgaaaaatcttaagtaccaatgggaagcagggaattcctggggtaaagtatcacttttctggggctgggctaggcataggtctctttgctttctggtggtggcctgtttgaaagtaaaaacctgcttggtgtgtaggttccgtatctccctggagaagcaccagcaattctctttcttttactgttatagaatagcctgaggtcccctcgtcccatccagctaccaccacggccaccactgcagccgggggctggccttctcctacttagggaagaaaaagcaagtgttcactgctccttgctgcattgatccaggagataattgtttcattcatcctgaccaagactgagccagcttagcaactgctggggagacaaatctcagaaccttgtcccagccagtgaggatgacagtgacacccagagggagtagaatacgcagaactaccaggtggcaaagtacttgtcatagactcctttgctaatgctatgcaaaaaattctttagagattataacaaatttttcaaatcattccttagataccttgaaaggcaggaagggaagcgtatatacttaagaatacacaggatattttggggggcagagaataaaacgttagttaatccctttgtctgtcaatcacagtctcagttctcttgctttcacattgtacttaaacctcctgctgtgcctcgcatcctatgcttaataaaagaacatgcttgaatatca

SEQ ID NO: 200375 - DNA, 571 bp, Homo sapiens
  Payload ID: 19528
  Gene Name: WW domain containing oxidoreductase
  ENST ID: ENST00000566662
  CDS Start-End: 124-261
agtgcgcaggcgtgagcggtcgggccccgacgcgcgcgggtctcgtttggagcgggagtgagttcctgagcgagtggacccggcagcgggcgataggggggccaggtgcctccacagtcagccatggcagcgctgcgctacgcggggctggacgacacggacagtgaggacgagctgcctccgggctgggaggagagaaccaccaaggacggctgggtttactacgccaaatttgccatacggatgggaacaagaaactgatgagaacggacaagtgttttttgttgaggttcgaaaccgccaagtcttttgccctccatggtgcacatgtgatcttggcctgcaggaacatggcaagggcgagtgaagcagtgtcacgcattttagaagaatggcataaagccaaggtagaagcaatgaccctggacctcgctctgctccgtagcgtgcagcattttgctgaagcattcaaggccaagaatgtgcctcttcatgtgcttgtgtgcaacgcagcaacttttgctctaccctggagtctcaccaaagatggcctggagaccacctttcaagt

SEQ ID NO: 200376 - DNA, 525 bp, Homo sapiens
  Payload ID: 19528
  Gene Name: WW domain containing oxidoreductase
  Uniprot ID: Q9NZC7
  ENST ID: ENST00000569818
  CDS Start-End: 105-215
tcgggccccgacgcgcgcgggtctcgtttggagcgggagtgagttcctgagcgagtggacccggcagcgggcgataggggggccaggtgcctccacagtcagccatggcagcgctgcgctacgcggggctggacgacacggacagtgaggacgagctgcctccgggctgggaggagagaaccaccaaggacggctgggtttactacgccaagtaagggggccgcagtggggccgcggacgcacctgggaccctgcacagcccacggacgccacctgcgcggggaggacgcgcactccagcgcagcgcgtgcggtgcaaagtgaaagtaactgttaaggagcttcagggaaaagggtccagggttcccagtaggggccggcccccttggtgggcctcgggtccagcgggggtcacctggtggcttcccggcgcgccctctgctgttcaggatgcagcactgcgcggcgcggcgagggcaaagcggcctcatccccgccaaaaaataaagatgttttaaaaagcgca

SEQ ID NO: 200377 - DNA, 1856 bp, Homo sapiens
  Payload ID: 19528
  Gene Name: WW domain containing oxidoreductase
  ENST ID: ENST00000569332
  CDS Start-End: 154-291
gtggtcggcggagcggcccctggagggcgcagtgcgcaggcgtgagcggtcgggccccgacgcgcgcgggtctcgtttggagcgggagtgagttcctgagcgagtggacccggcagcgggcgataggggggccaggtgcctccacagtcagccatggcagcgctgcgctacgcggggctggacgacacggacagtgaggacgagctgcctccgggctgggaggagagaaccaccaaggacggctgggtttactacgccaaatttgccatacggatgggaacaagaaactgatgagaacggacaagtgttttttgttgaccatataaataaaagaaccacctacttggacccaagactggcgtttactgtggatgataatccgaccaagccaaccacccggcaaagatacgacggcagcaccactgccatggaaattctccagggccgggatttcactggcaaagtggttgtggtcactggagctaattcaggaatagggttcgaaaccgccaagtcttttgccctccatggtgcacatgtgatcttggcctgcaggaacatggcaagggcgagtgaagcagtgtcacgcattttagaagaatggcataaagccaaggtagaagcaatgaccctggacctcgctctgctccgtagcgtgcagcattttgctgaagcattcaaggccaagaatgtgcctcttcatgtgcttgtgtgcaacgcagcaacttttgctctaccctggagtctcaccaaagatggcctggagaccacctttcaagtgaatcatctggggcacttctaccttgtccagctcctccaggatgttttgtgccgctcagctcctgcccgtgtcattgtggtctcctcagagtcccatcgatttacagatattaacgactccttgggaaaactggacttcagtcgcctctctccaacaaaaaacgactattgggcgatgctggcttataacaggtccaagctctgcaacatcctcttctccaacgagctgcaccgtcgcctctccccacgcggggtcacgtcgaacgcagtgcatcctggaaatatgatgtactccaacattcatcgcagctggtgggtgtacacactgctgtttaccttggcgaggcctttcaccaagtccatgcaacagggagctgccaccaccgtgtactgtgctgctgtcccagaactggagggtctgggagggatgtacttcaacaactgctgccgctgcatgccctcaccagaagctcagagcgaagagacggcccggaccctgtgggcgctcagcgagaggctgatccaagaacggcttggcagccagtccggctaagtggagctcagagcggatgggcacacacacccgccctgtgtgtgtcccctcacgcaagtgccagggctgggccccttccaaatgtccctccaacacagatccgcaagagtaaaggaaataagagcagtcacaacagagtgaaaaatcttaagtaccaatgggaagcagggaattcctggggtaaagtatcacttttctggggctgggctaggcataggtctctttgctttctggtggtggcctgtttgaaagtaaaaacctgcttggtgtgtaggttccgtatctccctggagaagcaccagcaattctctttcttttactgttatagaatagcctgaggtcccctcgtcccatccagctaccaccacggccaccactgcagccgggggctggccttctcctacttagggaagaaaaagcaagtgttcactgctccttgctgcattgatccaggagataattgtttcattcatcctgaccaagactgagccagcttagcaactgctggggagacaaatctcag

SEQ ID NO: 200378 - DNA, 2482 bp, Homo sapiens
  Payload ID: 19528
  Gene Name: WW domain containing oxidoreductase
  Uniprot ID: Q9NZC7
  ENST ID: ENST00000566780
  CDS Start-End: 367-1611
gtcctggcccgaaactggatgcgcacgccccttccctgcggcggggaggctgacaaggctccgctctatctctagcgcctcggagcgctctccggctttgctgtctagcccggcggcagcgcgatctcttaggcactttcaccgccttcctctccaggccctgcccctttgacgccggccgtcgcgatattgcggagactggatttcagcttcgtggtcggcggagcggcccctggagggcgcagtgcgcaggcgtgagcggtcgggccccgacgcgcgcgggtctcgtttggagcgggagtgagttcctgagcgagtggacccggcagcgggcgataggggggccaggtgcctccacagtcagccatggcagcgctgcgctacgcggggctggacgacacggacagtgaggacgagctgcctccgggctgggaggagagaaccaccaaggacggctgggtttactacgccaatcacaccgaggagaagactcagtgggaacatccaaaaactggaaaaagaaaacgagtggcaggagatttgccatacggatgggaacaagaaactgatgagaacggacaagtgttttttgttgaccatataaataaaagaaccacctacttggacccaagactggcgtttactgtggatgataatccgaccaagccaaccacccggcaaagatacgacggcagcaccactgccatggaaattctccagggccgggatttcactggcaaagtggttgtggtcactggagctaattcaggaatagggttcgaaaccgccaagtcttttgccctccatggtgcacatgtgatcttggcctgcaggaacatggcaagggcgagtgaagcagtgtcacgcattttagaagaatggcataaagccaaggtagaagcaatgaccctggacctcgctctgctccgtagcgtgcagcattttgctgaagcattcaaggccaagaatgtgcctcttcatgtgcttgtgtgcaacgcagcaacttttgctctaccctggagtctcaccaaagatggcctggagaccacctttcaagtgaatcatctggggcacttctaccttgtccagctcctccaggatgttttgtgccgctcagctcctgcccgtgtcattgtggtctcctcagagtcccatcgatttacagatattaacgactccttgggaaaactggacttcagtcgcctctctccaacaaaaaacgactattgggcgatgctggcttataacaggtccaagctctgcaacatcctcttctccaacgagctgcaccgtcgcctctccccacgcggggtcacgtcgaacgcagtgcatcctggaaatatgatgtactccaacattcatcgcagctggtgggtgtacacactgctgtttaccttggcgaggcctttcaccaagtccatgcaacagggagctgccaccaccgtgtactgtgctgctgtcccagaactggagggtctgggagggatgtacttcaacaactgctgccgctgcatgccctcaccagaagctcagagcgaagagacggcccggaccctgtgggcgctcagcgagaggctgatccaagaacggcttggcagccagtccggctaagtggagctcagagcggatgggcacacacacccgccctgtgtgtgtcccctcacgcaagtgccagggctgggccccttccaaatgtccctccaacacagatccgcaagagtaaaggaaataagagcagtcacaacagagtgaaaaatcttaagtaccaatgggaagcagggaattcctggggtaaagtatcacttttctggggctgggctaggcataggtctctttgctttctggtggtggcctgtttgaaagtaaaaacctgcttggtgtgtaggttccgtatctccctggagaagcaccagcaattctctttcttttactgttatagaatagcctgaggtcccctcgtcccatccagctaccaccacggccaccactgcagccgggggctggccttctcctacttagggaagaaaaagcaagtgttcactgctccttgctgcattgatccaggagataattgtttcattcatcctgaccaagactgagccagcttagcaactgctggggagacaaatctcagaaccttgtcccagccagtgaggatgacagtgacacccagagggagtagaatacgcagaactaccaggtggcaaagtacttgtcatagactcctttgctaatgctatgcaaaaaattctttagagattataacaaatttttcaaatcattccttagataccttgaaaggcaggaagggaagcgtatatacttaagaatacacaggatattttggggggcagagaataaaacgttagttaatccctttgtctgtcaatcacagtctcagttctcttgctttcacattgtacttaaacctcctgctgtgcctcgcatcctatgcttaataaaagaacatgcttgaatatca

SEQ ID NO: 200379 - DNA, 450 bp, Homo sapiens
  Payload ID: 19528
  Gene Name: WW domain containing oxidoreductase
  ENST ID: ENST00000620008
  CDS Start-End: 1-450
cctcttcatgtgcttgtgtgcaacgcagcaacttttgctctaccctggagtctcaccaaagatggcctggagaccacctttcaagtgaatcatctggggcacttctaccttgtccagctcctccaggatgttttgtgccgctcagctcctgcccgtgtcattgtggtctcctcagagtcccatcgatttacagatattaacgactccttgggaaaactggacttcagtcgcctctctccaacaaaaaacgactattgggcgatgctggcttataacaggtccaagctctgcaacatcctcttctccaacgagctgcaccgtcgcctctccccacgcggggtcacgtcgaacgcagtgcatcctggaaatatgatgtactccaacattcatcgcagctggtgggtgtacacactgctgtttaccttggcgaggcctttcaccaagtccatg

SEQ ID NO: 200380 - DNA, 894 bp, Homo sapiens
  Payload ID: 19528
  Gene Name: WW domain containing oxidoreductase
  ENST ID: ENST00000627394
  CDS Start-End: 350-487
gatgcgcacgccccttccctgcggcggggaggctgacaaggctccgctctatctctagcgcctcggagcgctctccggctttgctgtctagcccggcggcagcgcgatctcttaggcactttcaccgccttcctctccaggccctgcccctttgacgccggccgtcgcgatattgcggagactggatttcagcttcgtggtcggcggagcggcccctggagggcgcagtgcgcaggcgtgagcggtcgggccccgacgcgcgcgggtctcgtttggagcgggagtgagttcctgagcgagtggacccggcagcgggcgataggggggccaggtgcctccacagtcagccatggcagcgctgcgctacgcggggctggacgacacggacagtgaggacgagctgcctccgggctgggaggagagaaccaccaaggacggctgggtttactacgccaaatttgccatacggatgggaacaagaaactgatgagaacggacaagtgttttttgttgaccatataaataaaagaaccacctacttggacccaagactggcgtttactgtggatgataatccgaccaagccaaccacccggcaaagatacgacggcagcaccactgccatggaaattctccagggccgggatttcactggcaaagtggttgtggtcactggagctaattcaggaatagggttcgaaaccgccaagtcttttgccctccatggtgcacatgtgatcttggcctgcaggaacatggcaagggcgagtgaagcagtgtcacgcattttagaagaatggaaaacaaaataccaccctccgccagaaaagtgcagaataaaaattttccactagcaaaagaaggaaaaaataaaagatcttgaatagtctcatc

SEQ ID NO: 200381 - DNA, 2103 bp, Homo sapiens
  Payload ID: 19529
  Gene Name: WW domain containing transcription regulator 1
  Uniprot ID: Q9GZV5
  ENST ID: ENST00000360632
  CDS Start-End: 341-1543
ataattcaacagctcaactttcgggcccgcctctttcctgggggtgggagtttgctccaaactttgtttatgggacagtccgggagctgctgcggccgcgctgtctgcttctcctgcgcctccttttcgcccagcactagcgccttaggccagctcgggggatgtgagagccgaagcccttagactgccaggcacagagtcgggtcgggatttgtcagccaagcctcggctccagctccgcaatctcgggactcacccgagcgacccaggcccgacggcaagttcgggcgggacggcggccgccgcgcgctcaggctcagcttcgctgcccgcccagaagatgaatccggcctcggcgccccctccgctcccgccgcctgggcagcaagtgatccacgtcacgcaggacctagacacagacctcgaagccctcttcaactctgtcatgaatccgaagcctagctcgtggcggaagaagatcctgccggagtctttctttaaggagcctgattcgggctcgcactcgcgccagtccagcaccgactcgtcgggcggccacccggggcctcgactggctgggggtgcccagcatgtccgctcgcactcgtcgcccgcgtccctgcagctgggcaccggcgcgggtgctgcgggtagccccgcgcagcagcacgcgcacctccgccagcagtcctacgacgtgaccgacgagctgccactgcccccgggctgggagatgaccttcacggccactggccagaggtacttcctcaatcacatagaaaaaatcaccacatggcaagaccctaggaaggcgatgaatcagcctctgaatcatatgaacctccaccctgccgtcagttccacaccagtgcctcagaggtccatggcagtatcccagccaaatctcgtgatgaatcaccaacaccagcagcagatggcccccagtaccctgagccagcagaaccaccccactcagaacccacccgcagggctcatgagtatgcccaatgcgctgaccactcagcagcagcagcagcagaaactgcggcttcagagaatccagatggagagagaaaggattcgaatgcgccaagaggagctcatgaggcaggaagctgccctctgtcgacagctccccatggaagctgagactcttgccccagttcaggctgctgtcaacccacccacgatgaccccagacatgagatccatcactaataatagctcagatcctttcctcaatggagggccatatcattcgagggagcagagcactgacagtggcctggggttagggtgctacagtgtccccacaactccggaggacttcctcagcaatgtggatgagatggatacaggagaaaacgcaggacaaacacccatgaacatcaatccccaacagacccgtttccctgatttccttgactgtcttccaggaacaaacgttgacttaggaactttggaatctgaagacctgatccccctcttcaatgatgtagagtctgctctgaacaaaagtgagccctttctaacctggctgtaatcactaccattgtaacttggatgtagccatgaccttacatttcctgggcctcttggaaaaagtgatggagcagagcaagtctgcaggtgcaccacttcccgcctccatgactcgtgctccctcctttttatgttgccagtttaatcattgcctggttttgattgagagtaacttaagttaaacataaataaatattctattttcattttctgcaagcctgcgttcttgtgacagattatacagaattgtgtctgcaggattgattatgcagaatacttttctctttcttctctgctgccccatggctaagctttatgggtgttaattgaaatttatacaccaattgattttaaaccataaaaagctgaccacaggcagttacttctgagggcatcttggtccaggaaatgtgcacaaaattcgacctgatttacagtttcaaaaactgtattgatgacagtagtaccaaatgctttaaaaactatttaacttgagctttaaaaatcattgtatggatagtaaaattctactgtatggaatacaatgtaattttgaatcca

SEQ ID NO: 200382 - DNA, 955 bp, Homo sapiens
  Payload ID: 19529
  Gene Name: WW domain containing transcription regulator 1
  ENST ID: ENST00000472417
  CDS Start-End: 215-955
gtattaagtgcctcttgtgagcaatagctcactcttacttgttgcattcagcctgggagccactcttgacaccatgttagcgcagccttacagctgatgtcaggtcgactggtctgcagagccaggaatttgggctttcttctcagagttgttttggagcaatgagaactgctcacttaagaaaggctccctcttgtactccagcctttggggaatgcttcacatagaaaaaatcaccacatggcaagaccctaggaaggcgatgaatcagcctctgaatcatatgaacctccaccctgccgtcagttccacaccagtgcctcagaggtccatggcagtatcccagccaaatctcgtgatgaatcaccaacaccagcagcagatggcccccagtaccctgagccagcagaaccaccccactcagaacccacccgcagggctcatgagtatgcccaatgcgctgaccactcagcagcagcagcagcagaaactgcggcttcagagaatccagatggagagagaaaggattcgaatgcgccaagaggagctcatgaggcaggaagctgccctctgtcgacagctccccatggaagctgagactcttgccccagttcaggctgctgtcaacccacccacgatgaccccagacatgagatccatcactaataatagctcagatcctttcctcaatggagggccatatcattcgagggagcagagcactgacagtggcctggggttagggtgctacagtgtccccacaactccggaggacttcctcagcaatgtggatgagatggatacaggagaaaacgcaggacaaacacccatgaacatcaatccccaacagacccgtttccctgatttccttgactgtcttccaggaacaaacgttgacttaggaactttggaatctgaagacctgatccccctcttcaatgatgtagagtctgct

SEQ ID NO: 200383 - DNA, 566 bp, Homo sapiens
  Payload ID: 19529
  Gene Name: WW domain containing transcription regulator 1
  ENST ID: ENST00000494754
  CDS Start-End: 1-89
aaatgctgatccttggaggctgtggaacgtggggcgttgtgctgcatcatagaagctgccctctgtcgacagctccccatggaagctgagactcttgccccagttcaggctgctgtcaacccacccacgatgaccccagacatgagatccatcactaataatagctcagatcctttcctcaatggagggccatatcattcgagggagcagagcactgacagtggcctggggttagggtgctacagtgtccccacaactccggaggacttcctcagcaatgtggatgagatggatacaggagaaaacgcaggacaaacacccatgaacatcaatccccaacagacccgtttccctgatttccttgactgtcttccaggaacaaacgttgacttaggaactttggaatctgaagacctgatccccctcttcaatgatgtagagtctgctctgaacaaaagtgagccctttctaacctggctgtaatcactaccattgtaacttggatgtagccatgaccttacatttcctgggcctcttggaaaaagtgatggagcagagcaagtctg

SEQ ID NO: 200384 - DNA, 604 bp, Homo sapiens
  Payload ID: 19529
  Gene Name: WW domain containing transcription regulator 1
  ENST ID: ENST00000460517
  CDS Start-End: 542-604
actttgtttatgggacagtccgggagctgctgcggccgcgctgtctgcttctcctgcgcctccttttcgcccagcactagcgccttaggccagctcgggggatgtgagagccgaagcccttagactgccaggcacagagtcgggtcgggatttgtcagccaagcctcggctccagctccgcaatctcgggactcacccgagcgacccaggcccgacggcaagttcgggcgggacggcggccgccgcgcgctcaggctcagcttcgctgcccgcccaggtagtgcccgctggagctcgcgcgctcatccggcaccactccagggctccaggctcctcgggcttccggagtcgagacgtggtggagttggctcgggctgaacttctttcggggggctgcctgtcctggaatcgtgcgacctttcctttgccatcctgcggttcagcaagccccgagtgcagttattccctccacccctcgccctatcttctcctcctccaggcaacttctttgcttcaagaaagttgcataattctcgagaagatgaatccggcctcggcgccccctccgctcccgccgcctgggcagcaagtgatccacgtcacg

SEQ ID NO: 200385 - DNA, 697 bp, Homo sapiens
  Payload ID: 19529
  Gene Name: WW domain containing transcription regulator 1
  ENST ID: ENST00000479238
  CDS Start-End: 130-697
ttatctgtctcctcgtttccttttccctctattctttctcccaccatctcgccctctcaccctgtaaccctcttacccacttcctccgactttaaataaaaggctgatctgaccttctttttgcagaagatgaatccggcctcggcgccccctccgctcccgccgcctgggcagcaagtgatccacgtcacgcaggacctagacacagacctcgaagccctcttcaactctgtcatgaatccgaagcctagctcgtggcggaagaagatcctgccggagtctttctttaaggagcctgattcgggctcgcactcgcgccagtccagcaccgactcgtcgggcggccacccggggcctcgactggctgggggtgcccagcatgtccgctcgcactcgtcgcccgcgtccctgcagctgggcaccggcgcgggtgctgcgggtagccccgcgcagcagcacgcgcacctccgccagcagtcctacgacgtgaccgacgagctgccactgcccccgggctgggagatgaccttcacggccactggccagaggtacttcctcaatcacatagaaaaaatcaccacatggcaagaccctaggaaggcgatgaatcagcctctgaatcatatgaacctccaccctgccgtcagttccacaccagtgcctcagaggtccatggcagtatcccagccaaatctcg

SEQ ID NO: 200386 - DNA, 584 bp, Homo sapiens
  Payload ID: 19529
  Gene Name: WW domain containing transcription regulator 1
  ENST ID: ENST00000471586
  CDS Start-End: 1-128
aacattccagagaactttcttggaggaaaggaccgagcatgttagggaagctgccctctgtcgacagctccccatggaagctgagactcttgccccagttcaggctgctgtcaacccacccacgatgaccccagacatgagatccatcactaataatagctcagatcctttcctcaatggagggccatatcattcgagggagcagagcactgacagtggcctggggttagggtgctacagtgtccccacaactccggaggacttcctcagcaatgtggatgagatggatacaggagaaaacgcaggacaaacacccatgaacatcaatccccaacagacccgtttccctgatttccttgactgtcttccaggaacaaacgttgacttaggaactttggaatctgaagacctgatccccctcttcaatgatgtagagtctgctctgaacaaaagtgagccctttctaacctggctgtaatcactaccattgtaacttggatgtagccatgaccttacatttcctgggcctcttggaaaaagtgatggagcagagcaagtctgcaggtgcaccacttcccgcctcc

SEQ ID NO: 200387 - DNA, 1603 bp, Homo sapiens
  Payload ID: 19529
  Gene Name: WW domain containing transcription regulator 1
  Uniprot ID: Q9GZV5
  ENST ID: ENST00000467467
  CDS Start-End: 206-1408
agtccgggagctgctgcggccgcgctgtctgcttctcctgcgcctccttttcgcccagcactagcgccttaggccagctcgggggatgtgagagccgaagcccttagactgccaggcacagagtcgggtcgggatttgtcagccaagcctcggctccagctccgcaatctcgggactcacccgagcgacccaggcccgacggcaaatgaatccggcctcggcgccccctccgctcccgccgcctgggcagcaagtgatccacgtcacgcaggacctagacacagacctcgaagccctcttcaactctgtcatgaatccgaagcctagctcgtggcggaagaagatcctgccggagtctttctttaaggagcctgattcgggctcgcactcgcgccagtccagcaccgactcgtcgggcggccacccggggcctcgactggctgggggtgcccagcatgtccgctcgcactcgtcgcccgcgtccctgcagctgggcaccggcgcgggtgctgcgggtagccccgcgcagcagcacgcgcacctccgccagcagtcctacgacgtgaccgacgagctgccactgcccccgggctgggagatgaccttcacggccactggccagaggtacttcctcaatcacatagaaaaaatcaccacatggcaagaccctaggaaggcgatgaatcagcctctgaatcatatgaacctccaccctgccgtcagttccacaccagtgcctcagaggtccatggcagtatcccagccaaatctcgtgatgaatcaccaacaccagcagcagatggcccccagtaccctgagccagcagaaccaccccactcagaacccacccgcagggctcatgagtatgcccaatgcgctgaccactcagcagcagcagcagcagaaactgcggcttcagagaatccagatggagagagaaaggattcgaatgcgccaagaggagctcatgaggcaggaagctgccctctgtcgacagctccccatggaagctgagactcttgccccagttcaggctgctgtcaacccacccacgatgaccccagacatgagatccatcactaataatagctcagatcctttcctcaatggagggccatatcattcgagggagcagagcactgacagtggcctggggttagggtgctacagtgtccccacaactccggaggacttcctcagcaatgtggatgagatggatacaggagaaaacgcaggacaaacacccatgaacatcaatccccaacagacccgtttccctgatttccttgactgtcttccaggaacaaacgttgacttaggaactttggaatctgaagacctgatccccctcttcaatgatgtagagtctgctctgaacaaaagtgagccctttctaacctggctgtaatcactaccattgtaacttggatgtagccatgaccttacatttcctgggcctcttggaaaaagtgatggagcagagcaagtctgcaggtgcaccacttcccgcctccatgactcgtgctccctcctttttatgttgccagtttaatcattgcctggttttgattgagagtaacttaagttaaacataaataaatat

SEQ ID NO: 200388 - DNA, 5030 bp, Homo sapiens
  Payload ID: 19529
  Gene Name: WW domain containing transcription regulator 1
  Uniprot ID: Q9GZV5
  ENST ID: ENST00000465804
  CDS Start-End: 258-1460
gacacactcctctacaacaccagagactcccaaacacaaggccttatattgactcatttcagctcacatcctggcgactctcaagagagaaacctcagagtgactaaaatctccataatgagaagacatgtacattcagtatctattttggcattttccccaatacatctctgctcatctgactcttatcttggcatctgcttcctggtggatctgaactgacccataagccacgcttactagtgattttccagaagatgaatccggcctcggcgccccctccgctcccgccgcctgggcagcaagtgatccacgtcacgcaggacctagacacagacctcgaagccctcttcaactctgtcatgaatccgaagcctagctcgtggcggaagaagatcctgccggagtctttctttaaggagcctgattcgggctcgcactcgcgccagtccagcaccgactcgtcgggcggccacccggggcctcgactggctgggggtgcccagcatgtccgctcgcactcgtcgcccgcgtccctgcagctgggcaccggcgcgggtgctgcgggtagccccgcgcagcagcacgcgcacctccgccagcagtcctacgacgtgaccgacgagctgccactgcccccgggctgggagatgaccttcacggccactggccagaggtacttcctcaatcacatagaaaaaatcaccacatggcaagaccctaggaaggcgatgaatcagcctctgaatcatatgaacctccaccctgccgtcagttccacaccagtgcctcagaggtccatggcagtatcccagccaaatctcgtgatgaatcaccaacaccagcagcagatggcccccagtaccctgagccagcagaaccaccccactcagaacccacccgcagggctcatgagtatgcccaatgcgctgaccactcagcagcagcagcagcagaaactgcggcttcagagaatccagatggagagagaaaggattcgaatgcgccaagaggagctcatgaggcaggaagctgccctctgtcgacagctccccatggaagctgagactcttgccccagttcaggctgctgtcaacccacccacgatgaccccagacatgagatccatcactaataatagctcagatcctttcctcaatggagggccatatcattcgagggagcagagcactgacagtggcctggggttagggtgctacagtgtccccacaactccggaggacttcctcagcaatgtggatgagatggatacaggagaaaacgcaggacaaacacccatgaacatcaatccccaacagacccgtttccctgatttccttgactgtcttccaggaacaaacgttgacttaggaactttggaatctgaagacctgatccccctcttcaatgatgtagagtctgctctgaacaaaagtgagccctttctaacctggctgtaatcactaccattgtaacttggatgtagccatgaccttacatttcctgggcctcttggaaaaagtgatggagcagagcaagtctgcaggtgcaccacttcccgcctccatgactcgtgctccctcctttttatgttgccagtttaatcattgcctggttttgattgagagtaacttaagttaaacataaataaatattctattttcattttctgcaagcctgcgttcttgtgacagattatacagaattgtgtctgcaggattgattatgcagaatacttttctctttcttctctgctgccccatggctaagctttatgggtgttaattgaaatttatacaccaattgattttaaaccataaaaagctgaccacaggcagttacttctgagggcatcttggtccaggaaatgtgcacaaaattcgacctgatttacagtttcaaaaactgtattgatgacagtagtaccaaatgctttaaaaactatttaacttgagctttaaaaatcattgtatggatagtaaaattctactgtatggaatacaatgtaattttgaatccatgctggctctgatggctcttattagtctgtatttataaaggcacacagtcctattgtagcttatctttcgttattttactgcagagcatctagacaacttagtccctccagcgggaaagtagcagcagcagcattagtcacaggtcttacactacagatcttgtgaaagagaccagtttggtactaattatgagcattttattcaaacaaaagtttttgaaatattacaactggggatttaaaaaattgcagcttagaatctgatggtttttttttttcttgatgttgtttgtttgtttttgagatcgagttttgctcttgttgtccaggctggaatgcaatggcacaatctcggctcactgcaacctctgccttctgggttcaagcgattctcctgccttagcctcccgagtagctgggattacaggcacctgccaccacgtccggctaattttttgtattttgagtagagacggggtttcaccataatggtcaggctgttctcaaactcctgatctcaggtgatccacccatctcggcctcccaaagtgctgggattactggcgtgagccaccgcacccggccttgatgtttattttataaagcactgtaattttgtagctgatgacaaaaggcagccaaatgtttttgataaatcagtggcaactgtatttttgtcttttgaaataactctgaaaacatcaggacaacatagatttcaacctgatagcacaccacacacagtgagctgttgctttttaaattctgaagccttgtcaggtttgcttcctagatttcaagtgtttaaaataattctatctatgaaactgaaggatgaagcagatctctgactgacatgtaaaaaaaaatgccctttgagggtgtatggtggagataaatgtttctgaattcagtaaaattgattcctaagtatattatcctaatcctgtttgctacagttggtataaaaaggcatgaaatatgtattcaatacctcttatgtaaccaaaaccatttttaattagcttttaaggactgagagagcatcatgttcaactggcatgcagtctgcctgcattgccaatgaagtcctcaactgtttaatattttgaactaatattatttataatctatgaatttaatcttttttgaaagactttaataatttgagtctctgagaggatactttcaatttccatgggggacttatttgttggggatcttaaataagattccttttgatctaccggaatatacatgtacagagtacattggatcatgttggaaagaaggcaagtgaaaaggtcagagatgaagtagcaaagttatggaatatcgtggaaaggatactagttgtgaaatggaaagagacaagttatagtaccccaaaagcaaaacaagcaggagatgcaagagatgccccaaaaggacaaagcaacaattttctgttgccacctttataccggaagactctgttgtagaagaaaagaaggctttggtgcaccttatgtgggaggaggaggggcagggcatgctgatgctgagcgtacaggcagacaagagcgtagcctgctgttgcctccatcactatgaaatgacttattttacctgaaggacccatggtttatgttcctctaattcctttcactctccctaagccctctgagagagatgaagatagatgattttattgctactaaattgaagggagcactatttctttttgtcttttgttagcaaaaaattgcaaaaagaattgtacattcttgctaaaaataaataaataaataaaaaattaaaaaaacaagggacctaacaaaactcagcagtgttactgtatttttaaaaaatatttttatagactcattttcaggttattaaatgtaagagaaacagatacccctcttttttaaagtaggtaaatcattgatgatttatattaccaatttttagaagtaattttctagtaagcttgtggcatcagaaaatactagaagatttttttagttaaattagttagaacatttatgaatgaatataataaatattttttcagaataaaatatggaccctttgtgtttactaatagataaagccagatataattttttgtttttaaggccacaaaatatggcctttgttaaagaacactaaagttagaaatctaaagttagagcaactttttaatggctatttcctattattgtaagtgttaaaacccctgcagaattcttgataaggtgctatttatactatatttcttattataagataactgtctttagtcttcttagtactagtctttttagtactaaatcaatcagtaaacatcatcatttcaccccaaaattttgtcacagaaaaggcgtatcaaatgaaaaataatttcagagatctttctttcaagatattttttcctgataaaatacattgtcttgaagtaaatacattgtcaaaacctaattgcaattctgttaaatctaagtaatttttagacagtgtttcaccgtattatttaggatgtgaaatgccatttctttcactgattacaccatatacaggaaacaggtaaaacagtgaaaactttattgtgctggttgatgccaacttggttgaaaagctctctgcagaagaagtgatctagactgacagaagtgttgctaattacaagttgtgttctcatgacgtaattagaaagtaacttctcaaagtacaacttttatgaaaaaaataagctgttaaaaaaaggaaatcgtaggttaatttaattgggaaaatgggcaattgacagagaccattttcctaacacatatatgtgctagtactttaactttttaaaattttacttctacgttttgtaatataaaaatttctattttaagtttagaatgttatacgtaccgaaagtatgcagccaaatcgatcagatcaaaccattttacctggagtttggtactggtttttacttctctgaatctgtataagaaaaataaagacaattgaacttcca

SEQ ID NO: 200389 - DNA, 503 bp, Homo sapiens
  Payload ID: 19529
  Gene Name: WW domain containing transcription regulator 1
  ENST ID: ENST00000485352
  CDS Start-End: 88-503
caggtagtgcccgctggagctcgcgcgctcatccggcaccactccagggctccaggctcctcgggcttccggagtcgagacgtgaagatgaatccggcctcggcgccccctccgctcccgccgcctgggcagcaagtgatccacgtcacgcaggacctagacacagacctcgaagccctcttcaactctgtcatgaatccgaagcctagctcgtggcggaagaagatcctgccggagtctttctttaaggagcctgattcgggctcgcactcgcgccagtccagcaccgactcgtcgggcggccacccggggcctcgactggctgggggtgcccagcatgtccgctcgcactcgtcgcccgcgtccctgcagctgggcaccggcgcgggtgctgcgggtagccccgcgcagcagcacgcgcacctccgccagcagtcctacgacgtgaccgacgagctgccactgcccccgggctgggagatgaccttcacggccactggcca

SEQ ID NO: 200390 - DNA, 578 bp, Homo sapiens
  Payload ID: 19529
  Gene Name: WW domain containing transcription regulator 1
  ENST ID: ENST00000475579
  CDS Start-End: 250-578
aggatttgcactttctccttttcttcagaatgtgtatctgcctaagcagtgtgataacttttttcccagactggatcgatattccttagctggtcctgttgcagcaggagtccggtgactggagagaggaagctcttgggcagcattttccccaatacatctctgctcatctgactcttatcttggcatctgcttcctggtggatctgaactgacccataagccacgcttactagtgattttccagaagatgaatccggcctcggcgccccctccgctcccgccgcctgggcagcaagtgatccacgtcacgcaggacctagacacagacctcgaagccctcttcaactctgtcatgaatccgaagcctagctcgtggcggaagaagatcctgccggagtctttctttaaggagcctgattcgggctcgcactcgcgccagtccagcaccgactcgtcgggcggccacccggggcctcgactggctgggggtgcccagcatgtccgctcgcactcgtcgcccgcgtccctgcagctgggcaccggcgcgggtgctgcgggtagccccgcgcagcagca

SEQ ID NO: 200391 - DNA, 6647 bp, Homo sapiens
  Payload ID: 19530
  Gene Name: WWC family member 3
  Uniprot ID: Q9ULE0
  ENST ID: ENST00000380861
  CDS Start-End: 392-3670
gcggggcccgcgccgtcatgccttggctgagcggcggccggcggcgacggcggggacagccgcgcgaggccccgcgggagccgccgccttctgcgcagccccagcgggaaccgcgccgccggcgccccccgccgcggtccccacgcccccagctccttccgcgccgccgccgcgggcccgggagagcgccgagctgccgctgcccgccggctgggaggaggcgcgagactacgacggtcgcgtcttttacattgaccacaacacgcgccagacgtcgtggatcgacccccgcgaccggataacaaagccattgacctttgccgattgtgttggggacgaacttcctttaggatgggaaaccgtatatgataaacaaattggagtttattacatggaccacataaataaacttacccagattgaggatccaagagaacagtggaggcgagagcaagagcgcatgttgaaggaatatttaattgtagctcaggaggctctcaatgccaagaaagaaatctaccagattaagcagcagcggttcgagctggcccaggaggaataccagcagctgcacaaaatgtgtgaggatgacagccgctcgtacgccagctcattctctggatattcaacaaatacaaagtatgacccacaccaaattaaagcagaaatagcaagtcgtcgggataggctttccagattaaaacgagagctgacccagatgaagcaggaactgcagtacaaagaaaagggggtggagaccctgcaagagattgatcggaagatgtcaagtactcacaccagctacaaactggatgaggcgcaggctatcatgagtgagctccggaccatcaagaaggccatttgcacaggcgagaaggagaggcgggacctgatgcatagcctggccaagctgaccgatagcttcaagaacagctgctccgttaccgactctctagtggacttccctcaccatgtaggcgtgcctggcgatgctggtgtaccccagcagttctgcgatgccggctcccagactgatatcatcggggagtttgtctttgatgataaaacaagacttgtagaccgagtcagacttaattggcaatatgaagaagccagaaagagagtcgccaacatccagcagcagctggcccggcttgacaatgagtcctggccaagcacggccgaggctgacagggaccggctgcagctcatcaaggagaaggaggccctgctgcaggagcttcagctcatcattgcacagcgccgctctgcgggagatgtggcccggctggaggaggagcgggagcgcctagaggaggagctgcggcgtgcacgggccacctccgcacagggcgccacggagaggattctgcttcaggaaaaaaggaattgtctacttatgcagctggaagaagccacccgcttaacatcctacctccagtcccagttaaaaagcctgtgtgccagcaccctgacggtgtcctcggggagcagccgcgggtccctagcctccagccgtgggtctctggcctccagccggggctccctgagctcggtcagcttcacggacatctacggcctcccgcagtacgagaagcccgacgctgagggcagccagcttctacgcttcgacctcattcccttcgactctctggggcgagatgctcccttttcagagcccccaggcccctcgggcttccacaagcagaggcggtccctggacacgccccagtccctggcatcgctgtcctcccgctcctcgctgtcctcgctgtcgcccccaagctcgcccctggacacgcccttcctccctgcctcacgggactcgccgctggcgcagctggcggacagctgtgaggggccaggcctgggcgccctagacagactgcgggcacacgcctcggctatgggggacgaagacttaccaggcatggcggcccttcagccacacggggtccccggggatggggaagggccgcacgagcgaggacccccaccagccagcgctcccgtgggtggaacagtgactcttcgagaagacagtgccaagaggttggagaggagggcacgccgcatctccgcatgtctgtcggattattcgctagccagcgacagtggggtgtttgaacctctaaccaaaaggaacgaagatgccgaggagcctgcctacggagacacggccagtaacggagatccccagatccacgtgggactcctgcgcgacagtggcagcgagtgtctcctcgtgcacgtgctgcagctgaagaacccggcggggctggcggtgaaggaagactgcaaagtccacatccgagtctatttgcccccactggactcgggcacgcccaacacttactgctccaaggctctggagttccaagtgccgctggtgtttaacgaagtgttcagaatccccgtgcattccagcgcgttgacactgaagtcacttcagttatacgtgtgttcagtgactccgcagctgcaggaagaactgctgggcattgctcagattaacctggctgactatgacagtttgagtgagatgcagctgcgctggcattccgtgcaggtgttcaccagctctgaaccatcaaggacgcgggaggctgggtgtgcaggagagagctccgcccgggaccctgcacacaccatctccatctccggcaagacggatgcggtgacggtgctcctggccagaaccacggcacagctgcaggcggtggagagggaactggccgaggagcgggccaagctggagtacacggaggaggaggtcctggagatggagcgcaaggaggagcaggccgaggccatatccgagcggagttggcaagcggactcggtggatagcggctgtagcaactgcacccagaccagccctccgtacccagagccctgttgcatgggtatcgactccatcctgggccacccatttgctgctcaggcagggccttacagccccgagaaatttcagccctcgcctcttaaggttgataaggaaaccaacacggaagatctctttctggaagaagcagccagcctcgtgaaggagcggcccagccgccgggcccgagggtcgccttttgttcggagtggcacgattgtccgttcccagacattctcgcctggagcacgaagccagtatgtttgcagactttatcgtagtgacagcgacagttcaacgctgccccggaagtccccctttgtccgaaatactttggaaagacgaacccttcgctataagcagtcatgcaggtcttccctggctgagctcatggcccgcacctccctggacttggagctggatctccaggcgtcgagaacacggcagaggcagctgaatgaggagctctgcgccctccgtgagctgcggcagcggttggaggacgcccagctccgtggccagactgacctcccaccctgggtgcttcgggacgagcggctccgtggcctgctgcgggaggccgagcggcagacaagacagaccaaacttgactaccgtcatgagcaggcggctgagaagatgctgaagaaggcctccaaggagatctaccagctgcgtgggcagagccacaaagagcccatccaagtgcagacctttagggagaagatagcattcttcacaaggccaaggatcaacatacctcctctcccagccgacgacgtctgatggagtgcattgtgcacatgaagtatttatccacctgttttattttcatgaagttcttagactagctgaatttgtctttaaaatatttgtgcaaagctattaatatacacattttgtaaaaaaaaaaaaaaaacacgtatatctatacatatatattttataatagtgacggcaacagggcttggtttttccttgttgtgaaatcgacatctctgaagacaggttattttataaaagatcaactatcatgttaagaatgtacagtttttatgctgttttatttgacttaaaggctggaagacagaaacgaagtgagttcaggcaaattcactgtattgtaatttatttatagtacttttttttccttgaaggaaaatactgactttaagatgtattttaagactgaaattttgttctttagtacttttcatgcagtagaacggaacttggggctggtttggtttttgacacctgaaatgcgaacgctatgtgctaaatttgtcaccgtatcatatgtgcatttaccatgtatattgtacacattcactcccttgatgtcatgttaaaatgtcccctgcagtggttcaatcgtgactcggaagcatgtgtgtgttgcagaggtcagtctctggcgtgggccgcacgccaaccgctcatttctgtgttgcctttggaagcatctttctgtgctcagcgtgagtctgaagcaggcgccagggcctctggtgtacggggcttcagcctgcttgcttgtggtggctgtctgtggggcttcagcctgactgtccgtggtggctgtccatgctgcccgcctccccccaccccgccctgtccgactgtaacagaccaggagggtggcggaggaactcctgccacgccactgtgtcatgaaggaaagtgaaagggaacgaggaagtaggaatgcccacgctcgttgactccgtgggtgaatacagcagttaggacatacacaccatcacctttgaaagtgcttgtttgggggagggaaggacatacgggtaactagaactacccagcgagtcgtccagaggagaggatcaggtttgagtcaggaggctccctgtactggagtcgtcccactattcctcaagaaatcttagaaccagcttgtgaggaaaaacattttttaatgtaataaaaatatgccattattctttgaaatgccaaatgatataaatattttgcctaatacatatttattgtagatgaaatgcactcttctcgatgaggcctcgatttgaatcaatggggtgggccacaggaaatgtcagaggaaccagaactcagaactcttcctcctggacctttcttcccttcccttggaggtatccctttgaatcaggcctctctcttctcatcagtctgtagcttccccccttgtataacctgctttcctttttacatttattaaaagtggattttgtaaaagcatttcattgacacgcgacctatcacagacaatggaattcgtcagtggtggtaagactgaaatcctgatgcttttcacacttcttgtctcttgctatgtatttctgcctctagccttgccatgttttgccttttttttttctttttggccaattcctttttatatgtgcccacaacagaggtggggagacacggagcaccctgggtccttcccagcgctgctgggcaggccccgtctccaggccccagctgttgaaactttgaagggcaacaaacaaccatccacactgccggaccctaggctgttcagggaggcagctcatttccaccccggccccaggacacccagcctgtgccccacaaggatctctctaaatgggagggattgaggctacttttctgccaagccctattaagtagtaatgtggggaaacccactgtgtcagtgcaggaagccctagacaaatgttttcaaataaatttcactgcccagcctgcacagatttccatttgaagtacttcccatccaccctgacacccaaaggggtttttttgttttgttttgtttttgagacagggtcttgctttgttgcccaggctggagtgcagtgacgtggtcatagctcactgcagcctcaacctcctgggctcaagtgaccctcctgcctcagcctcccaaagttctgagatgataggcatgagccattgtgcctagcctattttgatttttttcttagagtcaaggtcttgctctgttgcccaggctgatcttggacttgcgagccaccatgcctggctgggttttttaaaaatagaatctcactgatagcctgcaagaaacagatgcagtgcctgcttccgtatcagtccaaggagccctcgtgtttgccacctttacctttgaacctccccctgcctccctgcctgtgtccgcttttgcagctcaatgcagccatgacaaggaaagaaaagacaaaggaaggccagagagccgcgcagttctctgcaggtgcagatgcaggcagtggaggtggcctgagcaggcagaaggacaccaagcgccctatgttgcttgtcattcatgacgtggtcttggagcttctgactagttcagactgccacgccaaccccagaaaataccccacatgccagaaaagtgaagtcctaggtgtttccatctatgtttcaatctgtccatctaccaggcctcgcgataaaaacaaaacaaaaaaacgctgccaggttttagaagcagttctggtctcaaaaccatcaggatcctgccaccagggttcttttgaaatagtaccacatgtaaaagggaatttggctttcacttcatctaatcactgaattgtcaggctttgattgataattgtagaaataagtagccttctgttgtgggaataagttataatcagtattcatctctttgttttttgtcactcttttctctctaattgtgtcatttgtactgtttgaaaaatatttcttctataaaattaaactaacctgccttaagaacaga

SEQ ID NO: 200392 - DNA, 3768 bp, Homo sapiens
  Payload ID: 19530
  Gene Name: WWC family member 3
  ENST ID: ENST00000454666
  CDS Start-End: 1-3651
atgccttggctgagcggcggccggcggcgacggcggggacagccgcgcgaggccccgcgggagccgccgccttctgcgcagccccagcgggaaccgccgccggcgccccccgccgcggtccccacgcccccagctccttccgcgccgccgccgcgggcccgggagagcgccgagctgccgctgcccgccggctgggaggaggcgcgagactacgacggtcgcgtcttttacattgaccacaacacgcgccagacgtcgtggatcgacccccgcgaccggataacaaagccattgacctttgccgattgtgttggggacgaacttcctttaggatgggaaaccgtatatgataaacaaattggagtttattacatggaccacataaataaacttacccagattgaggatccaagagaacagtggaggcgagagcaagagcgcatgttgaaggaatatttaattgtagctcaggaggctctcaatgccaagaaagaaatctaccagattaagcagcagcggttcgagctggcccaggaggaataccagcagctgcacaaaatgtgtgaggatgacagccgctcgtacgccagctcattctctggatattcaacaaatacaaagtatgacccacaccaaattaaagcagaaatagcaagtcgtcgggataggctttccagattaaaacgagagctgacccagatgaagcaggaactgcagtacaaagaaaagggggtggagaccctgcaagagattgatcggaagatgtcaagtactcacaccagctacaaactggatgaggcgcaggctatcatgagtgagctccggaccatcaagaaggccatttgcacaggcgagaaggagaggcgggacctgatgcatagcctggccaagctgaccgatagcttcaagaacagctgctccgttaccgactctctagtggacttccctcaccatgtaggcgtgcctggcgatgctggtgtaccccagcagttctgcgatgccggctcccagactgatatcatcggggagtttgtctttgatgataaaacaagacttgtagaccgagtcagacttaattggcaatatgaagaagccagaaagagagtcgccaacatccagcagcagctggcccggcttgacaatgagtcctggccaagcacggccgaggctgacagggaccggctgcagctcatcaaggagaaggaggccctgctgcaggagcttcagctcatcattgcacagcgccgctctgcgggagatgtggcccggctggaggaggagcgggagcgcctagaggaggagctgcggcgtgcacgggccacctccgcacagggcgccacggagaggattctgcttcaggaaaaaaggaattgtctacttatgcagctggaagaagccacccgcttaacatcctacctccagtcccagttaaaaagcctgtgtgccagcaccctgacggtgtcctcggggagcagccgcgggtccctagcctccagccgtgggtctctggcctccagccggggctccctgagctcggtcagcttcacggacatctacggcctcccgcagtacgagaagcccgacgctgagggcagccagcttctacgcttcgacctcattcccttcgactctctggggcgagatgctcccttttcagagcccccaggcccctcgggcttccacaagcagaggcggtccctggacacgccccagtccctggcatcgctgtcctcccgctcctcgctgtcctcgctgtcgcccccaagctcgcccctggacacgcccttcctccctgcctcacgggactcgccgctggcgcagctggcggacagctgtgaggggccaggcctgggcgccctagacagactgcgggcacacgcctcggctatgggggacgaagacttaccaggcatggcggcccttcagccacacggggtccccggggatggggaagggccgcacgagcgaggacccccaccagccagcgctcccgtgggtggaacagtgactcttcgagaagacagtgccaagaggttggagaggagggcacgccgcatctccgcatgtctgtcggattattcgctagccagcgacagtggggtgtttgaacctctaaccaaaaggaacgaagatgccgaggagcctgcctacggagacacggccagtaacggagatccccagatccacgtgggactcctgcgcgacagtggcagcgagtgtctcctcgtgcacgtgctgcagctgaagaacccggcggggctggcggtgaaggaagactgcaaagtccacatccgagtctatttgcccccactggactcgggcacgcccaacacttactgctccaaggctctggagttccaagtgccgctggtgtttaacgaagtgttcagaatccccgtgcattccagcgcgttgacactgaagtcacttcagttatacgtgtgttcagtgactccgcagctgcaggaagaactgctgggcattgctcagattaacctggctgactatgacagtttgagtgagatgcagctgcgctggcattccgtgcaggtgttcaccagctctgaaccatcaaggacgcgggaggctgggtgtgcaggagagagctccgcccgggaccctgcacacaccatctccatctccggcaagacggatgcggtgacggtgctcctggccagaaccacggcacagctgcaggcggtggagagggaactggccgaggagcgggccaagctggagtacacggaggaggaggtcctggagatggagcgcaaggaggagcaggccgaggccatatccgagcggagttggcaagcggactcggtggatagcggctgtagcaactgcacccagaccagccctccgtacccagagccctgttgcatgggtatcgactccatcctgggccacccatttgctgctcaggcagggccttacagccccgagaaatttcagccctcgcctcttaaggttgataaggaaaccaacacggaagatctctttctggaagaagcagccagcctcgtgaaggagcggcccagccgccgggcccgagggtcgccttttgttcggagtggcacgattgtccgttcccagacattctcgcctggagcacgaagccagtatgtttgcagactttatcgtagtgacagcgacagttcaacgctgccccggaagtccccctttgtccgaaatactttggaaagacgaacccttcgctataagcagtcatgcaggtcttccctggctgagctcatggcccgcacctccctggacttggagctggatctccaggcgtcgagaacacggcagaggcagctgaatgaggagctctgcgccctccgtgagctgcggcagcggttggaggacgcccagctccgtggccagactgacctcccaccctgggtgcttcgggacgagcggctccgtggcctgctgcgggaggccgagcggcagacaagacagaccaaacttgactaccgtcatgagcaggcggctgagaagatgctgaagaaggcctccaaggagatctaccagctgcgtgggcagagccacaaagagcccatccaagtgcagacctttagggagaagatagcattcttcacaaggccaaggatcaacatacctcctctcccagccgacgacgtctgatggagtgcattgtgcacatgaagtatttatccacctgttttattttcatgaagttcttagactagctgaatttgtctttaaaatatttgtgcaaagctattaatatacacattttgt

SEQ ID NO: 200393 - DNA, 474 bp, Homo sapiens
  Payload ID: 19531
  Gene Name: X antigen family, member 1A
  Uniprot ID: Q9HD64
  ENST ID: ENST00000375600
  CDS Start-End: 125-334
gggaacgcggcggagctgtgagccggcgactcgggtccctgaggtctggattctttctccgctactgagacacggcggacacacacaaacacagaaccacacagccagtcccaggagcccagtaatggagagccccaaaaagaagaaccagcagctgaaagtcgggatcctacacctgggcagcagacagaagaagatcaggatacagctgagatcccaggtgctgggaagggaaatgcgcgacatggaaggtgatctgcaagagctgcatcagtcaaacaccggggataaatctggatttgggttccggcgtcaaggtgaagataatacctaaagaggaacactgtaaaatgccagaagcaggtgaagagcaaccacaagtttaaatgaagacaagctgaaacaacgcaagctggttttatattagatatttgacttaaactatctcaataaagttttgcagctttcaccaaa

SEQ ID NO: 200394 - DNA, 614 bp, Homo sapiens
  Payload ID: 19531
  Gene Name: X antigen family, member 1A
  Uniprot ID: Q9HD64
  ENST ID: ENST00000375602
  CDS Start-End: 281-526
ggacctgggaaggagcataggacagggcaaggcgggataaggaggggcaccacagcccttaaggcacgagggaacctcactgcgcatgctcctttggtgcccacctcagtgcgcatgttcactgggcgtcttcccatcggccccttcgccagtgtggggaacgcggcggagctgtgagccggcgactcgggtccctgaggtctggattctttctccgctactgagacacggcggacacacacaaacacagaaccacacagccagtcccaggagcccagtaatggagagccccaaaaagaagaaccagcagctgaaagtcgggatcctacacctgggcagcagacagaagaagatcaggatacagctgagatcccagtgcgcgacatggaaggtgatctgcaagagctgcatcagtcaaacaccggggataaatctggatttgggttccggcgtcaaggtgaagataatacctaaagaggaacactgtaaaatgccagaagcaggtgaagagcaaccacaagtttaaatgaagacaagctgaaacaacgcaagctggttttatattagatatttgacttaaactatctcaataaagttttgcagctttcaccaaa

SEQ ID NO: 200395 - DNA, 474 bp, Homo sapiens; identical to SEQ ID NO: 200393
  Payload ID: 19532
  Gene Name: X antigen family, member 1B
  Uniprot ID: Q9HD64
  ENST ID: ENST00000375613
  CDS Start-End: 125-334

SEQ ID NO: 200396 - DNA, 614 bp, Homo sapiens; identical to SEQ ID NO: 200394
  Payload ID: 19532
  Gene Name: X antigen family, member 1B
  Uniprot ID: Q9HD64
  ENST ID: ENST00000375616
  CDS Start-End: 281-526

SEQ ID NO: 200397 - DNA, 472 bp, Homo sapiens
  Payload ID: 19532
  Gene Name: X antigen family, member 1B
  Uniprot ID: Q9HD64
  ENST ID: ENST00000518075
  CDS Start-End: 142-387
cctagactaaccagtttgtgttggtcctccgctgagctgttaatccagggaagagttgcccttctgaagaatatgtggatttaatggagaccaagacacacacaaacacagaaccacacagccagtcccaggagcccagtaatggagagccccaaaaagaagaaccagcagctgaaagtcgggatcctacacctgggcagcagacagaagaagatcaggatacagctgagatcccagtgcgcgacatggaaggtgatctgcaagagctgcatcagtcaaacaccggggataaatctggatttgggttccggcgtcaaggtgaagataatacctaaagaggaacactgtaaaatgccagaagcaggtgaagagcaaccacaagtttaaatgaagacaagctgaaacaacgcaagctggttttatattagatatttgacttaaactatctcaataaagttttgcagctttcacc

SEQ ID NO: 200398 - DNA, 618 bp, Homo sapiens
  Payload ID: 19533
  Gene Name: X antigen family, member 2
  Uniprot ID: Q96GT9
  ENST ID: ENST00000286049
  CDS Start-End: 194-529
gttccttggacacctgcctcagtgtgcatgttcactgggcatcttcccttcgacccctttgcccacgtggtgaccgctggggagctgtgagagtgtgaggggcacgttccagccgtctggactctttctctcctactgagacgcagcctataggtccgcaggccagtcctcccaggaactgaaatagtgaaatatgagttggcgaggaagatcaacatataggcctaggccaagaagaagtttacagcctcctgagctgattggggctatgcttgaacccactgatgaagagcctaaagaagagaaaccacccactaaaagtcggaatcctacacctgatcagaagagagaagatgatcagggtgcagctgagattcaagtgcctgacctggaagccgatctccaggagctatgtcagacaaagactggggatggatgtgaaggtggtactgatgtcaaggggaagattctaccaaaagcagagcactttaaaatgccagaagcaggtgaagggaaatcacaggtttaaaggaagataagctgaaacaacacaaactgtttttatattagatattttactttaaaatatcttaataaagttttaagcttttctccaaa

SEQ ID NO: 200399 - DNA, 497 bp, Homo sapiens
  Payload ID: 19534
  Gene Name: X antigen family, member 3
  Uniprot ID: Q8WTP9
  ENST ID: ENST00000346279
  CDS Start-End: 72-407
gtgagggtgtgagggtcgcgttcctgctgtctggactttttctgtcccactgagacgcagctgtgtgaaatatgatttggcgaggaagatcaacatataggcctaggccgaggagaagtgtaccacctcctgagctgattgggcctatgctggagcccggtgatgaggagcctcagcaagaggaaccaccaactgaaagtcgggatcctgcacctggtcaggagagagaagaagatcagggtgcagctgagactcaagtgcctgacctggaagctgatctccaggagctgtctcagtcaaagactgggggtgaatgtggaaatggtcctgatgaccaggggaagattctgccaaaatcagaacaatttaaaatgccagaaggaggtgacaggcaaccacaggtttaaatgaagacaagctgaaacaacacaaaactgtttttatctaagatatttgacttaaaaatatcgaaataaacttttgcagctttctccaaa

SEQ ID NO: 200400 - DNA, 489 bp, Homo sapiens
  Payload ID: 19534
  Gene Name: X antigen family, member 3
  Uniprot ID: Q8WTP9
  ENST ID: ENST00000375491
  CDS Start-End: 61-396
aagcattcagaaggcacacatacttacacttgccctgagacttagttcgaaatgtgaaatatgatttggcgaggaagatcaacatataggcctaggccgaggagaagtgtaccacctcctgagctgattgggcctatgctggagcccggtgatgaggagcctcagcaagaggaaccaccaactgaaagtcgggatcctgcacctggtcaggagagagaagaagatcagggtgcagctgagactcaagtgcctgacctggaagctgatctccaggagctgtctcagtcaaagactgggggtgaatgtggaaatggtcctgatgaccaggggaagattctgccaaaatcagaacaatttaaaatgccagaaggaggtgacaggcaaccacaggtttaaatgaagacaagctgaaacaacacaaaactgtttttatctaagatatttgacttaaaaatatcgaaataaacttttgcagctttctccaaagaa

SEQ ID NO: 200401 - DNA, 478 bp, Homo sapiens
  Payload ID: 19535
  Gene Name: X antigen family, member 5
  Uniprot ID: Q8WWM1
  ENST ID: ENST00000351072
  CDS Start-End: 67-393
tggaagtgctcaagtgtggtatacactcaggtgcatttttccaatcacaatattctggactgaaatatgagttggcgaggaagaagatatagaccaagacgatgtttacgacttgctcagctggttgggcctatgcttgagcccagtgtgccagagcctcaacaagaagaaccaccaactgaaagtcaggatcatacacctggtcagaagagagaagatgatcagggtgcagctgagattcaagtgcctaacctggaagctgatctccaggagctgtctcagtcaaagactggggatgaatgcggagatagtcctgatgtccaggggaagattctgccaaaatcagagcaatttaaaatgccagaaggaggggaagggaaaccacagctttaaacgaagacaaccaaaagaatgcaaactggatttatccgagatatttgacttttaaaaatctcaataaagttttccagttttctcc

SEQ ID NO: 200402 - DNA, 415 bp, Homo sapiens
  Payload ID: 19535
  Gene Name: X antigen family, member 5
  Uniprot ID: Q8WWM1
  ENST ID: ENST00000375501
  CDS Start-End: 1-327
atgagttggcgaggaagaagatatagaccaagacgatgtttacgacttgctcagctggttgggcctatgcttgagcccagtgtgccagagcctcaacaagaagaaccaccaactgaaagtcaggatcatacacctggtcagaagagagaagatgatcagggtgcagctgagattcaagtgcctaacctggaagctgatctccaggagctgtctcagtcaaagactggggatgaatgcggagatagtcctgatgtccaggggaagattctgccaaaatcagagcaatttaaaatgccagaaggaggggaagggaaaccacagctttaaacgaagacaaccaaaagaatgcaaactggatttatccgagatatttgacttttaaaaatctcaataaagttttccagttttctccaaa

SEQ ID NO: 200403 - DNA, 870 bp, Homo sapiens
  Payload ID: 19535
  Gene Name: X antigen family, member 5
  ENST ID: ENST00000375503
  CDS Start-End: 364-591
tggaagtgctcaagtgtggtatacactcaggtgcatttttccaatcacaatattctggtttttgctttggtttggtttggcttttttgagacagagttttgctcttgttgcccaggctggagtgcaatggtgcaatctcggctggctgcaacattcgccccccggttcaagtggttctcctgcctcaacttcccgagtagctgggattacaggtgctcgctaccacacccagctacgtttttgtatttttagtagagacggggtttcaccattttggccaagctggcctcgagcttctgacctcaggtgatccatccccctcagcctcccaaagtgcacactattctgtttgcagactgaaatatgagttggcgaggaagaagatatagaccaagacgatgtttacgacttgctcagctggttgggcctatgcttgagcccagtgtgccagagcctcaacaagaagaaccaccaactgaaagtcaggatcatacacctggtcagaagagagaagatgatcagggtgcagctgagattcaaggtacttcgatattggctcaggacaaaacgcagttcagtgaaacaggatagcaactccagaaaagaggtcaatgaatgacagccactgtttcctttgatgtacatttttgacagcatgtttcgtaaaaggtggataattcaggatgttggcgtgcagtgcctaacctggaagctgatctccaggagctgtctcagtcaaagactggggatgaatgcggagatagtcctgatgtccaggggaagattctgccaaaatcagagcaatttaaaatgccagaaggaggggaagggaaaccacagctttaaacgaagacaaccaaaagaatgcaa

SEQ ID NO: 200404 - DNA, 5688 bp, Homo sapiens
  Payload ID: 19536
  Gene Name: xanthine dehydrogenase
  Uniprot ID: P47989
  ENST ID: ENST00000379416
  CDS Start-End: 50-4051
gtctcttaggagtgaggtacctggagttcggggaccccaacctgtgacaatgacagcagacaaattggttttctttgtgaatggcagaaaggtggtggagaaaaatgcagatccagagacaacccttttggcctacctgagaagaaagttggggctgagtggaaccaagctcggctgtggagaggggggctgcggggcttgcacagtgatgctctccaagtatgatcgtctgcagaacaagatcgtccacttttctgccaatgcctgcctggcccccatctgctccttgcaccatgttgcagtgacaactgtggaaggaataggaagcaccaagacgaggctgcatcctgtgcaggagagaattgccaaaagccacggctcccagtgcgggttctgcacccctggcatcgtcatgagtatgtacacactgctccggaatcagcccgagcccaccatggaggagattgagaatgccttccaaggaaatctgtgccgctgcacaggctacagacccatcctccagggcttccggacctttgccagggatggtggatgctgtggaggagatgggaataatccaaattgctgcatgaaccagaagaaagaccactcagtcagcctctcgccatctttattcaaaccagaggagttcacgcccctggatccaacccaggagcccatttttcccccagagttgctgaggctgaaagacactcctcggaagcagctgcgatttgaaggggagcgtgtgacgtggatacaggcctcaaccctcaaggagctgctggacctcaaggctcagcaccctgacgccaagctggtcgtggggaacacggagattggcattgagatgaagttcaagaatatgctgtttcctatgattgtctgcccagcctggatccctgagctgaattcggtagaacatggacccgacggtatctcctttggagctgcttgccccctgagcattgtggaaaaaaccctggtggatgctgttgctaagcttcctgcccaaaagacagaggtgttcagaggggtcctggagcagctgcgctggtttgctgggaagcaagtcaagtctgtggcgtccgttggagggaacatcatcactgccagccccatctccgacctcaaccccgtgttcatggccagtggggccaagctgacacttgtgtccagaggcaccaggagaactgtccagatggaccacaccttcttccctggctacagaaagaccctgctgagcccggaggagatactgctctccatagagatcccctacagcagggagggggagtatttctcagcattcaagcaggcctcccggagagaagatgacattgccaaggtaaccagtggcatgagagttttattcaagccaggaaccacagaggtacaggagctggccctttgctatggtggaatggccaacagaaccatctcagccctcaagaccactcagaggcagctttccaagctctggaaggaggagctgctgcaggacgtgtgtgcaggactggcagaggagctgcatctgcctcccgatgcccctggtggcatggtggacttccggtgcaccctcaccctcagcttcttcttcaagttctacctgacagtccttcagaagctgggccaagagaacctggaagacaagtgtggtaaactggaccccactttcgccagtgcaactttactgtttcagaaagaccccccagccgatgtccagctcttccaagaggtgcccaagggtcagtctgaggaggacatggtgggccggcccctgccccacctggcagcggacatgcaggcctctggtgaggccgtgtactgtgacgacattcctcgctacgagaatgagctgtctctccggctggtcaccagcacccgggcccacgccaagatcaagtccatagatacatcagaagctaagaaggttccagggtttgtttgtttcatttccgctgatgatgttcctgggagtaacataactggaatttgtaatgatgagacagtctttgcgaaggataaggttacttgtgttgggcatatcattggtgctgtggttgctgacaccccggaacacacacagagagctgcccaaggggtgaaaatcacctatgaagaactaccagccattatcacaattgaggatgctataaagaacaactccttttatggacctgagctgaagatcgagaaaggggacctaaagaaggggttttccgaagcagataatgttgtgtcaggggagatatacatcggtggccaagagcacttctacctggagactcactgcaccattgctgttccaaaaggcgaggcaggggagatggagctctttgtgtctacacagaacaccatgaagacccagagctttgttgcaaaaatgttgggggttccagcaaaccggattgtggttcgagtgaagagaatgggaggaggctttggaggcaaggagacccggagcactgtggtgtccacggcagtggccctggctgcatataagaccggccgccctgtgcgatgcatgctggaccgtgatgaggacatgctgataactggtggcagacatcccttcctggccagatacaaggttggcttcatgaagactgggacagttgtggctcttgaggtggaccacttcagcaatgtggggaacacccaggatctctctcagagtattatggaacgagctttattccacatggacaactgctataaaatccccaacatccggggcactgggcggctgtgcaaaaccaaccttccctccaacacggccttccggggctttggggggccccaggggatgctcattgccgagtgctggatgagtgaagttgcagtgacctgtgggatgcctgcagaggaggtgcggagaaaaaacctgtacaaagaaggggacctgacacacttcaaccagaagcttgagggtttcaccttgcccagatgctgggaagaatgcctagcaagctctcagtatcatgctcggaagagtgaggttgacaagttcaacaaggagaattgttggaaaaagagaggattgtgcataattcccaccaagtttggaataagctttacagttccttttctgaatcaggcaggagccctacttcatgtgtacacagatggctctgtgctgctgacccacggggggactgagatgggccaaggccttcataccaaaatggtccaggtggccagtagagctctgaaaatccccacctctaagatttatatcagcgagacaagcactaacactgtgcccaacacctctcccacggctgcctctgtcagcgctgacctcaatggacaggccgtctatgcggcttgtcagaccatcttgaaaaggctggaaccctacaagaagaagaatcccagtggctcctgggaagactgggtcacagctgcctacatggacacagtgagcttgtctgccactgggttttatagaacacccaatctgggctacagctttgagactaactcagggaaccccttccactacttcagctatggggtggcttgctctgaagtagaaatcgactgcctaacaggagatcataagaacctccgcacagatattgtcatggatgttggctccagtctaaaccctgccattgatattggacaggtggaaggggcatttgtccagggccttggcctcttcaccctagaggagctacactattcccccgaggggagcctgcacacccgtggccctagcacctacaagatcccggcatttggcagcatccccattgagttcagggtgtccctgctccgcgactgccccaacaagaaggccatctatgcatcgaaggctgttggagagccgcccctcttcctggctgcttctatcttctttgccatcaaagatgccatccgtgcagctcgagctcagcacacaggtaataacgtgaaggaactcttccggctagacagccctgccaccccggagaagatccgcaatgcctgcgtggacaagttcaccaccctgtgtgtcactggtgtcccagaaaactgcaaaccctggtctgtgagggtctaaagagagagtcctcagcagagtcttcttgtgctgcctttgggcttccatggagcaggaggaacataccacagaacatggatctattaaagtcacagaatgacagacctgtgatttgtcaagatgggatttggaagacaagtgaatgcaatggaagattttgatcaaaaatgtaatttgtaaacacaatgataagcaaattcaaaactgttatgcctaaatggtgaatatgcaattaggatcattttctgtctgttttaatcatgtatctggaatagggtcgggaagggtttgtgctattccccacttactggacagcctgtataacctcaagttctgatggtgtctgtcctttgaagaggattcccacaaacctctagaagcttaaaccgaagttactttaaatcgtgtgccttcctgtgaaagcctggccttcaaaccaatgaacagcaaagcataaccttgaatctatactcaaattttgcaatgaggcagtggggtaaggttaaatcctctaaccatctttgaatcattggaaagaataaagaatgaaacaaattcaaggttaattggatctgattttgtgaagctgcataaagcaagattactctataatacaaaaatccaaccaactcaattattgagcacgtacaatgttctagatttctttcccttcctctttgaagagaatatttgtattccaaatactctttgagtatttacaaaaaagattatgtttaatctttacatttgaagccaaagtaatttccacctagaaatgatgctatcagtcctggcatggtggctcacccctataatcccagcactttgggaggctaaggcaggagaattgcttgagcccagcagtttgagaccagcctgggcaacatagagagctcctgtctttaaaaaaaatttttttaattagttggtcttgatagtgcatgcctgtagtcccaactacttgaaaggctgaggtggagagatcatttgagctcaggaggttgaggctgcagtgagctatgattgcgccactgcactcctgcctgagcgactgagcaagatcttgtctctgaagaaaaaaaaagaaataaaaatgctgctatcaaaatcaagcccaaccagaggtagaagagccaagaagcctgggttctcatcctagctctgtctcttctgtctctatctttgtgatcttggactgtcaattccccttcctgtgatccattttactgcaaacataagggttgcagtaaagggttgtctcacgtcttctgctttaaaagcctataaatatatgacctgaaaactccagttacataaaggatctgcagctatctaaggcttggttttcttactgtcatatgatacctgggtctaatgaactctgctgagatcacctcaagtttctgcggttggtaaagagaacaagggaagaacaaacatcccttttattgctccaaatggtgatttaatccctacatggtgctgggtggacaatgtgtcactgtcacatgccttcactgtataaatccaaccttctgccagagagaatctgtggttctggccatggagggaggatagtggaaatgatatagttggactggtgcttgatgtcactaataaatgaaactgtcagctgg

SEQ ID NO: 200405 - DNA, 1850 bp, Homo sapiens
  Payload ID: 19537
  Gene Name: X-box binding protein 1
  Uniprot ID: P17861
  ENST ID: ENST00000216037
  CDS Start-End: 74-859
agaaaggccgggcgcggcgaggctgggcgctgggcggctgcggcgcgcggtgcgcggtgcgtagtctggagctatggtggtggtggcagccgcgccgaacccggccgacgggacccctaaagttctgcttctgtcggggcagcccgcctccgccgccggagccccggccggccaggccctgccgctcatggtgccagcccagagaggggccagcccggaggcagcgagcggggggctgccccaggcgcgcaagcgacagcgcctcacgcacctgagccccgaggagaaggcgctgaggaggaaactgaaaaacagagtagcagctcagactgccagagatcgaaagaaggctcgaatgagtgagctggaacagcaagtggtagatttagaagaagagaaccaaaaacttttgctagaaaatcagcttttacgagagaaaactcatggccttgtagttgagaaccaggagttaagacagcgcttggggatggatgccctggttgctgaagaggaggcggaagccaaggggaatgaagtgaggccagtggccgggtctgctgagtccgcagcactcagactacgtgcacctctgcagcaggtgcaggcccagttgtcacccctccagaacatctccccatggattctggcggtattgactcttcagattcagagtctgatatcctgttgggcattctggacaacttggacccagtcatgttcttcaaatgcccttccccagagcctgccagcctggaggagctcccagaggtctacccagaaggacccagttccttaccagcctccctttctctgtcagtggggacgtcatcagccaagctggaagccattaatgaactaattcgttttgaccacatatataccaagcccctagtcttagagataccctctgagacagagagccaagctaatgtggtagtgaaaatcgaggaagcacctctcagcccctcagagaatgatcaccctgaattcattgtctcagtgaaggaagaacctgtagaagatgacctcgttccggagctgggtatctcaaatctgctttcatccagccactgcccaaagccatcttcctgcctactggatgcttacagtgactgtggatacgggggttccctttccccattcagtgacatgtcctctctgcttggtgtaaaccattcttgggaggacacttttgccaatgaactctttccccagctgattagtgtctaaggaatgatccaatactgttgcccttttccttgactattacactgcctggaggatagcagagaagcctgtctgtacttcattcaaaaagccaaaatagagagtatacagtcctagagaattcctctatttgttcagatctcatagatgacccccaggtattgtcttttgacatccagcagtccaaggtattgagacatattactggaagtaagaaatattactataattgagaactacagcttttaagattgtacttttatcttaaaagggtggtagttttccctaaaatacttattatgtaagggtcattagacaaatgtcttgaagtagacatggaatttatgaatggttctttatcatttctcttccccctttttggcatcctggcttgcctccagttttaggtcctttagtttgcttctgtaagcaacgggaacacctgctgagggggctctttccctcatgtatacttcaagtaagatcaagaatcttttgtgaaattatagaaatttactatgtaaatgcttgatggaattttttcctgctagtgtagcttctgaaaggtgctttctccatttatttaaaactacccatgcaattaaaaggtacaatgcagcatc

SEQ ID NO: 200406 - DNA, 1131 bp, Homo sapiens
  Payload ID: 19537
  Gene Name: X-box binding protein 1
  Uniprot ID: P17861
  ENST ID: ENST00000344347
  CDS Start-End: 1-1131
atggtggtggtggcagccgcgccgaacccggccgacgggacccctaaagttctgcttctgtcggggcagcccgcctccgccgccggagccccggccggccaggccctgccgctcatggtgccagcccagagaggggccagcccggaggcagcgagcggggggctgccccaggcgcgcaagcgacagcgcctcacgcacctgagccccgaggagaaggcgctgaggaggaaactgaaaaacagagtagcagctcagactgccagagatcgaaagaaggctcgaatgagtgagctggaacagcaagtggtagatttagaagaagagaaccaaaaacttttgctagaaaatcagcttttacgagagaaaactcatggccttgtagttgagaaccaggagttaagacagcgcttggggatggatgccctggttgctgaagaggaggcggaagccaaggggaatgaagtgaggccagtggccgggtctgctgagtccgcagcaggtgcaggcccagttgtcacccctccagaacatctccccatggattctggcggtattgactcttcagattcagagtctgatatcctgttgggcattctggacaacttggacccagtcatgttcttcaaatgcccttccccagagcctgccagcctggaggagctcccagaggtctacccagaaggacccagttccttaccagcctccctttctctgtcagtggggacgtcatcagccaagctggaagccattaatgaactaattcgttttgaccacatatataccaagcccctagtcttagagataccctctgagacagagagccaagctaatgtggtagtgaaaatcgaggaagcacctctcagcccctcagagaatgatcaccctgaattcattgtctcagtgaaggaagaacctgtagaagatgacctcgttccggagctgggtatctcaaatctgctttcatccagccactgcccaaagccatcttcctgcctactggatgcttacagtgactgtggatacgggggttccctttccccattcagtgacatgtcctctctgcttggtgtaaaccattcttgggaggacacttttgccaatgaactctttccccagctgattagtgtctaa

SEQ ID NO: 200407 - DNA, 1690 bp, Homo sapiens
  Payload ID: 19537
  Gene Name: X-box binding protein 1
  ENST ID: ENST00000405219
  CDS Start-End: 98-733
ccggactgaccggatccgccacgctgggaacctagggcggcccagggctcttttctgtactttttaactctctcgttagagatgaccagagctggggatgcgggcacctgtcttccaggccctcttgctgtgtggccgcagactggtggttcagcctcttaactcggacatgaggaaactgaaaaacagagtagcagctcagactgccagagatcgaaagaaggctcgaatgagtgagctggaacagcaagtggtagatttagaagaagagaaccaaaaacttttgctagaaaatcagcttttacgagagaaaactcatggccttgtagttgagaaccaggagttaagacagcgcttggggatggatgccctggttgctgaagaggaggcggaagccaaggggaatgaagtgaggccagtggccgggtctgctgagtccgcagcactcagactacgtgcacctctgcagcaggtgcaggcccagttgtcacccctccagaacatctccccatggattctggcggtattgactcttcagattcagagtctgatatcctgttgggcattctggacaacttggacccagtcatgttcttcaaatgcccttccccagagcctgccagcctggaggagctcccagaggtctacccagaaggacccagttccttaccagcctccctttctctgtcagtggggacgtcatcagccaagctggaagccattaatgaactaattcgttttgaccacatatataccaagcccctagtcttagagataccctctgagacagagagccaagctaatgtggtagtgaaaatcgaggaagcacctctcagcccctcagagaatgatcaccctgaattcattgtctcagtgaaggaagaacctgtagaagatgacctcgttccggagctgggtatctcaaatctgctttcatccagccactgcccaaagccatcttcctgcctactggatgcttacagtgactgtggatacgggggttccctttccccattcagtgacatgtcctctctgcttggtgtaaaccattcttgggaggacacttttgccaatgaactctttccccagctgattagtgtctaaggaatgatccaatactgttgcccttttccttgactattacactgcctggaggatagcagagaagcctgtctgtacttcattcaaaaagccaaaatagagagtatacagtcctagagaattcctctatttgttcagatctcatagatgacccccaggtattgtcttttgacatccagcagtccaaggtattgagacatattactggaagtaagaaatattactataattgagaactacagcttttaagattgtacttttatcttaaaagggtggtagttttccctaaaatacttattatgtaagggtcattagacaaatgtcttgaagtagacatggaatttatgaatggttctttatcatttctcttccccctttttggcatcctggcttgcctccagttttaggtcctttagtttgcttctgtaagcaacgggaacacctgctgagggggctctttccctcatgtatacttcaagtaagatcaagaatcttttgtgaaattatagaaatttactatgtaaatgcttgatggaattttttcctgctagtgtagcttctgaaaggtgctttctccatttatttaaaa

SEQ ID NO: 200408 - DNA, 1824 bp, Homo sapiens
  Payload ID: 19537
  Gene Name: X-box binding protein 1
  ENST ID: ENST00000403532
  CDS Start-End: 35-835
gcggcgcgcggtgcgcggtgcgtagtctggagctatggtggtggtggcagccgcgccgaacccggccgacgggacccctaaagttctgcttctgtcggggcagcccgcctccgccgccggagccccggccggccaggccctgccgctcatggtgccagcccagagaggggccagcccggaggcagcgagcggggggctgccccaggcgcgcaagcgacagcgcctcacgcacctgagccccgaggagaaggcgctgaggaggaaactgaaaaacagagtagcagctcagactgccagagatcgaaagaaggctcgaatgagtgagctggaacagcaagtggtagatttagaagaagaggtaaaactacttaagaaccaaaaacttttgctagaaaatcagcttttacgagagaaaactcatggccttgtagttgagaaccaggagttaagacagcgcttggggatggatgccctggttgctgaagaggaggcggaagccaaggggaatgaagtgaggccagtggccgggtctgctgagtccgcagcactcagactacgtgcacctctgcagcaggtgcaggcccagttgtcacccctccagaacatctccccatggattctggcggtattgactcttcagattcagagtctgatatcctgttgggcattctggacaacttggacccagtcatgttcttcaaatgcccttccccagagcctgccagcctggaggagctcccagaggtctacccagaaggacccagttccttaccagcctccctttctctgtcagtggggacgtcatcagccaagctggaagccattaatgaactaattcgttttgaccacatatataccaagcccctagtcttagagataccctctgagacagagagccaagctaatgtggtagtgaaaatcgaggaagcacctctcagcccctcagagaatgatcaccctgaattcattgtctcagtgaaggaagaacctgtagaagatgacctcgttccggagctgggtatctcaaatctgctttcatccagccactgcccaaagccatcttcctgcctactggatgcttacagtgactgtggatacgggggttccctttccccattcagtgacatgtcctctctgcttggtgtaaaccattcttgggaggacacttttgccaatgaactctttccccagctgattagtgtctaaggaatgatccaatactgttgcccttttccttgactattacactgcctggaggatagcagagaagcctgtctgtacttcattcaaaaagccaaaatagagagtatacagtcctagagaattcctctatttgttcagatctcatagatgacccccaggtattgtcttttgacatccagcagtccaaggtattgagacatattactggaagtaagaaatattactataattgagaactacagcttttaagattgtacttttatcttaaaagggtggtagttttccctaaaatacttattatgtaagggtcattagacaaatgtcttgaagtagacatggaatttatgaatggttctttatcatttctcttccccctttttggcatcctggcttgcctccagttttaggtcctttagtttgcttctgtaagcaacgggaacacctgctgagggggctctttccctcatgtatacttcaagtaagatcaagaatcttttgtgaaattatagaaatttactatgtaaatgcttgatggaattttttcctgctagtgtagcttctgaaaggtgctttctccatttatttaaaactacccatgcaattaaaaggtacaatgcagca

SEQ ID NO: 200409 - DNA, 1794 bp, Homo sapiens
  Payload ID: 19537
  Gene Name: X-box binding protein 1
  Uniprot ID: P17861
  ENST ID: ENST00000611155
  CDS Start-End: 49-1179
ggcgctgggcggctgcggcgcgcggtgcgcggtgcgtagtctggagctatggtggtggtggcagccgcgccgaacccggccgacgggacccctaaagttctgcttctgtcggggcagcccgcctccgccgccggagccccggccggccaggccctgccgctcatggtgccagcccagagaggggccagcccggaggcagcgagcggggggctgccccaggcgcgcaagcgacagcgcctcacgcacctgagccccgaggagaaggcgctgaggaggaaactgaaaaacagagtagcagctcagactgccagagatcgaaagaaggctcgaatgagtgagctggaacagcaagtggtagatttagaagaagagaaccaaaaacttttgctagaaaatcagcttttacgagagaaaactcatggccttgtagttgagaaccaggagttaagacagcgcttggggatggatgccctggttgctgaagaggaggcggaagccaaggggaatgaagtgaggccagtggccgggtctgctgagtccgcagcaggtgcaggcccagttgtcacccctccagaacatctccccatggattctggcggtattgactcttcagattcagagtctgatatcctgttgggcattctggacaacttggacccagtcatgttcttcaaatgcccttccccagagcctgccagcctggaggagctcccagaggtctacccagaaggacccagttccttaccagcctccctttctctgtcagtggggacgtcatcagccaagctggaagccattaatgaactaattcgttttgaccacatatataccaagcccctagtcttagagataccctctgagacagagagccaagctaatgtggtagtgaaaatcgaggaagcacctctcagcccctcagagaatgatcaccctgaattcattgtctcagtgaaggaagaacctgtagaagatgacctcgttccggagctgggtatctcaaatctgctttcatccagccactgcccaaagccatcttcctgcctactggatgcttacagtgactgtggatacgggggttccctttccccattcagtgacatgtcctctctgcttggtgtaaaccattcttgggaggacacttttgccaatgaactctttccccagctgattagtgtctaaggaatgatccaatactgttgcccttttccttgactattacactgcctggaggatagcagagaagcctgtctgtacttcattcaaaaagccaaaatagagagtatacagtcctagagaattcctctatttgttcagatctcatagatgacccccaggtattgtcttttgacatccagcagtccaaggtattgagacatattactggaagtaagaaatattactataattgagaactacagcttttaagattgtacttttatcttaaaagggtggtagttttccctaaaatacttattatgtaagggtcattagacaaatgtcttgaagtagacatggaatttatgaatggttctttatcatttctcttccccctttttggcatcctggcttgcctccagttttaggtcctttagtttgcttctgtaagcaacgggaacacctgctgagggggctctttccctcatgtatacttcaagtaagatcaagaatcttttgtgaaattatagaaatttactatgtaaatgcttgatggaattttttcctgctagtgtagcttctgaaaggtgctttctccatttatttaaaactacccatgcaattaaaaggtacaatgca

SEQ ID NO: 200410 - DNA, 4126 bp, Homo sapiens
  Payload ID: 19538
  Gene Name: xenotropic and polytropic retrovirus receptor 1
  Uniprot ID: Q9UBH6
  ENST ID: ENST00000367589
  CDS Start-End: 171-2066
ggaggaagatggcgggcgggctgctctgaagagacctcggcggcggcggaggaggagagaagcgcagcgccgcgccgcgccggggcccatgtggggaggagtcggagtcgctgttgccgccgccgcctgtagctgctggacccgagtgggagtgagggggaaacggcaggatgaagttcgccgagcacctctccgcgcacatcactcccgagtggaggaagcaatacatccagtatgaggctttcaaggatatgctgtattcagctcaggaccaggcaccttctgtggaagttacagatgaggacacagtaaagaggtattttgccaagtttgaagagaagtttttccaaacctgtgaaaaagaacttgccaaaatcaacacattttattcagagaagctcgcagaggctcagcgcaggtttgctacacttcagaatgagcttcagtcatcactggatgcacagaaagaaagcactggtgttactacgctgcgacaacgcagaaagccagtcttccacttgtcccatgaggaacgtgtccaacatagaaatattaaagaccttaaactggccttcagtgagttctacctcagtctaatcctgctgcagaactatcagaatctgaattttacagggtttcgaaaaatcctgaaaaagcatgacaagatcctggaaacatctcgtggagcagattggcgagtggctcacgtagaggtggccccattttatacatgcaagaaaatcaaccagcttatctctgaaactgaggctgtagtgaccaatgaacttgaagatggtgacagacaaaaggctatgaagcgtttacgtgtcccccctttgggagctgctcagcctgcaccagcatggactacttttagagttggcctattttgtggaatattcattgtactgaatattacccttgtgcttgccgctgtatttaaacttgaaacagatagaagtatatggcccttgataagaatctatcggggtggctttcttctgattgaattcctttttctactgggcatcaacacgtatggttggagacaggctggagtaaaccatgtactcatctttgaacttaatccgagaagcaatttgtctcatcaacatctctttgagattgctggattcctcgggatattgtggtgcctgagccttctggcatgcttctttgctccaattagtgtcatccccacatatgtgtatccacttgccctttatggatttatggttttcttccttatcaaccccaccaaaactttctactataaatcccggttttggctgcttaaactgctgtttcgagtatttacagcccccttccataaggtaggctttgctgatttctggctggcggatcagctgaacagcctgtcagtgatactgatggacctggaatatatgatctgcttctacagtttggagctcaaatgggatgaaagtaagggcctgttgccaaataattcagaagaacgaggtcactcggacactatggtgttcttttacctgtggattgtcttttatatcatcagttcctgctataccctcatctgggatctcaagatggactggggtctcttcgataagaatgctggagagaacactttcctccgggaagagattgtatacccccaaaaagcctactactactgtgccataatagaggatgtgattctgcgctttgcttggactatccaaatctcgattacctctacaactttgttgcctcattctggggacatcattgctactgtctttgccccacttgaggttttccggcgatttgtgtggaacttcttccgcctggagaatgaacatctgaataactgtggtgaattccgtgctgtgcgggacatctctgtggcccccctgaacgcagatgatcagactctcctagaacagatgatggaccaggatgatggggtacgaaaccgccagaagaatcggtcatggaagtacaaccagagcatatccctgcgccggcctcgcctcgcttctcaatccaaggctcgtgacactaaggtattgatagaagacacagatgatgaagctaacacttgaattttctgaagtctagcttaacatctttggttttcctactctacaatcctttcctcgaccaacgcaacctctagtacctttccagccgaaaacaggagaaaacacataacacattttccgagctcttccggatcggatcctatggactccaaacaagctcactgtgtttcttttcttttcttctggtttaattttaattttctattttcaaaacaaatatttacttcatttgccaatcagaggatgttttaagaaacaaaacatagtatcttatggattgtttacaatcacaaggacatagatacctatcaggatgaagaacaggcattgcaaggaccctctgatgggacggtactgagatatctcggcttccgctcagcccggttttgactggttgaaaccggacattggtttttaaattttttgtcagtttatgtggagaatttttttctttccttcatacccagcgcaaaggcactggccgcacttgcaggaaaagtgcaacttaaagcagtaccttcattcatgaagctactttttaatttgatgtaacttttcttattttgggaagggttgctgggtgggtgggaaatatgatgtatttgttacacatagttttctcattatttatgaaacttaaccatacagaatgatataactcctgtgcaatgaaggtgataacagtaaaagaaggcaggggaaacttacgttggatgacatttatgagggtcagtcccacatacctctttcaggagacaacttgcaccagtttgaccttttcttttctttgtttttattttaagccaaagtttcattgctaacttcttaagttgctgctgctttagagtcctgagcatatctctcataacaaggaatcccacacttcacaccaccggctgaatttcatggaagaggttctgataatttttttaactttttaaggaacagatgtggaatacactggcccatatttcaaccttaacagctgaagctatgccttattatgcatccacatgtatggtccctgtagcgtgacctttactagctctgaatcagaagacagagctatttcagaggctctgtgtgccctcactagatagtttttcttctgggttcaaccactttagccagaatttgatcaaattaaaagtctgtcatggggaaactatatttttgagcacatggaacaaattatacttcctcattcatattatgttgatacaaaagaccttggcagccatttctcccagcagttttaaaggatgaacattggatttcatgccatcccatagaaaacctgttttaaaattttagggatctttacttggtcatacatgaaaagtacactgcttagaaattatagactattatgatctgtccacagtgcccattgtcacttctttgtctcatttcttccctttgttccttagtcatccaaataagcctgaaaaccataagagatattactttattgaatatggttggcattaaatttagcatttcattatctaacaaaattaatataaattccaggacatggtaaaatgtgttttaataacccccagacccaaatgaaaatttcaaagtcaataccagcagattcatgaaagtaaatttagtcctataattttcagcttaattataaacaaaggaacaaataagtggaagggcagctattaccattcgcttagtcaaaacattcggttactgccctttaatacactcctatcatcagcacttccaccatgtattacaagtcttgacccatccctgtcgtaactccagtaaaagttactgttactagaaaatttttatcaattaactgacaaatagtttctttttaaagtagtttcttccatctttattctgactagcttccaaaatgtgttccctttttgaatcgaggtttttttgttttgttttgttttctgaaaaaatcatacaactttgtgcttctattgcttttttgtgttttgttaagcatgtcccttggcccaaatggaagaggaaatgtttaattaatgctttttagtttaaataaattgaatcatttataataa

SEQ ID NO: 200411 - DNA, 8474 bp, Homo sapiens
  Payload ID: 19538
  Gene Name: xenotropic and polytropic retrovirus receptor 1
  Uniprot ID: Q9UBH6
  ENST ID: ENST00000367590
  CDS Start-End: 199-2289
gcggggaggggcggggctatggagaggaggaggaagatggcgggcgggctgctctgaagagacctcggcggcggcggaggaggagagaagcgcagcgccgcgccgcgccggggcccatgtggggaggagtcggagtcgctgttgccgccgccgcctgtagctgctggacccgagtgggagtgagggggaaacggcaggatgaagttcgccgagcacctctccgcgcacatcactcccgagtggaggaagcaatacatccagtatgaggctttcaaggatatgctgtattcagctcaggaccaggcaccttctgtggaagttacagatgaggacacagtaaagaggtattttgccaagtttgaagagaagtttttccaaacctgtgaaaaagaacttgccaaaatcaacacattttattcagagaagctcgcagaggctcagcgcaggtttgctacacttcagaatgagcttcagtcatcactggatgcacagaaagaaagcactggtgttactacgctgcgacaacgcagaaagccagtcttccacttgtcccatgaggaacgtgtccaacatagaaatattaaagaccttaaactggccttcagtgagttctacctcagtctaatcctgctgcagaactatcagaatctgaattttacagggtttcgaaaaatcctgaaaaagcatgacaagatcctggaaacatctcgtggagcagattggcgagtggctcacgtagaggtggccccattttatacatgcaagaaaatcaaccagcttatctctgaaactgaggctgtagtgaccaatgaacttgaagatggtgacagacaaaaggctatgaagcgtttacgtgtcccccctttgggagctgctcagcctgcaccagcatggactacttttagagttggcctattttgtggaatattcattgtactgaatattacccttgtgcttgccgctgtatttaaacttgaaacagatagaagtatatggcccttgataagaatctatcggggtggctttcttctgattgaattcctttttctactgggcatcaacacgtatggttggagacaggctggagtaaaccatgtactcatctttgaacttaatccgagaagcaatttgtctcatcaacatctctttgagattgctggattcctcgggatattgtggtgcctgagccttctggcatgcttctttgctccaattagtgtcatccccacatatgtgtatccacttgccctttatggatttatggttttcttccttatcaaccccaccaaaactttctactataaatcccggttttggctgcttaaactgctgtttcgagtatttacagcccccttccataaggtaggctttgctgatttctggctggcggatcagctgaacagcctgtcagtgatactgatggacctggaatatatgatctgcttctacagtttggagctcaaatgggatgaaagtaagggcctgttgccaaataattcagaagaatcaggaatttgccacaaatatacatatggtgtgcgggccattgttcagtgcattcctgcttggcttcgcttcatccagtgcctgcgccgatatcgagacacaaaaagggcctttcctcatttagttaatgctggcaaatactccacaactttcttcatggtgacgtttgcagccctttacagcactcacaaagaacgaggtcactcggacactatggtgttcttttacctgtggattgtcttttatatcatcagttcctgctataccctcatctgggatctcaagatggactggggtctcttcgataagaatgctggagagaacactttcctccgggaagagattgtatacccccaaaaagcctactactactgtgccataatagaggatgtgattctgcgctttgcttggactatccaaatctcgattacctctacaactttgttgcctcattctggggacatcattgctactgtctttgccccacttgaggttttccggcgatttgtgtggaacttcttccgcctggagaatgaacatctgaataactgtggtgaattccgtgctgtgcgggacatctctgtggcccccctgaacgcagatgatcagactctcctagaacagatgatggaccaggatgatggggtacgaaaccgccagaagaatcggtcatggaagtacaaccagagcatatccctgcgccggcctcgcctcgcttctcaatccaaggctcgtgacactaaggtattgatagaagacacagatgatgaagctaacacttgaattttctgaagtctagcttaacatctttggttttcctactctacaatcctttcctcgaccaacgcaacctctagtacctttccagccgaaaacaggagaaaacacataacacattttccgagctcttccggatcggatcctatggactccaaacaagctcactgtgtttcttttcttttcttctggtttaattttaattttctattttcaaaacaaatatttacttcatttgccaatcagaggatgttttaagaaacaaaacatagtatcttatggattgtttacaatcacaaggacatagatacctatcaggatgaagaacaggcattgcaaggaccctctgatgggacggtactgagatatctcggcttccgctcagcccggttttgactggttgaaaccggacattggtttttaaattttttgtcagtttatgtggagaatttttttctttccttcatacccagcgcaaaggcactggccgcacttgcaggaaaagtgcaacttaaagcagtaccttcattcatgaagctactttttaatttgatgtaacttttcttattttgggaagggttgctgggtgggtgggaaatatgatgtatttgttacacatagttttctcattatttatgaaacttaaccatacagaatgatataactcctgtgcaatgaaggtgataacagtaaaagaaggcaggggaaacttacgttggatgacatttatgagggtcagtcccacatacctctttcaggagacaacttgcaccagtttgaccttttcttttctttgtttttattttaagccaaagtttcattgctaacttcttaagttgctgctgctttagagtcctgagcatatctctcataacaaggaatcccacacttcacaccaccggctgaatttcatggaagaggttctgataatttttttaactttttaaggaacagatgtggaatacactggcccatatttcaaccttaacagctgaagctatgccttattatgcatccacatgtatggtccctgtagcgtgacctttactagctctgaatcagaagacagagctatttcagaggctctgtgtgccctcactagatagtttttcttctgggttcaaccactttagccagaatttgatcaaattaaaagtctgtcatggggaaactatatttttgagcacatggaacaaattatacttcctcattcatattatgttgatacaaaagaccttggcagccatttctcccagcagttttaaaggatgaacattggatttcatgccatcccatagaaaacctgttttaaaattttagggatctttacttggtcatacatgaaaagtacactgcttagaaattatagactattatgatctgtccacagtgcccattgtcacttctttgtctcatttcttccctttgttccttagtcatccaaataagcctgaaaaccataagagatattactttattgaatatggttggcattaaatttagcatttcattatctaacaaaattaatataaattccaggacatggtaaaatgtgttttaataacccccagacccaaatgaaaatttcaaagtcaataccagcagattcatgaaagtaaatttagtcctataattttcagcttaattataaacaaaggaacaaataagtggaagggcagctattaccattcgcttagtcaaaacattcggttactgccctttaatacactcctatcatcagcacttccaccatgtattacaagtcttgacccatccctgtcgtaactccagtaaaagttactgttactagaaaatttttatcaattaactgacaaatagtttctttttaaagtagtttcttccatctttattctgactagcttccaaaatgtgttccctttttgaatcgaggtttttttgttttgttttgttttctgaaaaaatcatacaactttgtgcttctattgcttttttgtgttttgttaagcatgtcccttggcccaaatggaagaggaaatgtttaattaatgctttttagtttaaataaattgaatcatttataataatcagtgttaacaatttagtgacccttggtaggttaaaggttgcattatttatacttgagatttttttcccctaactattctgttttttgtactttaaaactatgggggaaatatcactggtctgtcaagaaacagcagtaattattactgagttaaattgaaaagtccagtggaccaggcatttcttatataaataaaattggtggtactaatgtgtatccagagacatttgaattattaactttattctttattagtgaatctctatgatggcacacataaaatcttacagttgacttctgctgtttgaattccccagtgtttttacattaatgtatcctatggccagtttagtctttcttcaactgttacagttctaggccctaatcggtcttattctttcacatatgatgcaatgatagatgtaatccttttctgaagtgtttgtcggattggcatagtctattcaaaaataaggcttatgtaactttcagcttgctatgtgacagaagtttaaatgtgtatttaagtacacagctttatgttcctcttaaagctgtaaagagaaaagaggacttttcctcatcaagagagcttgggagacaaagcatacatttaatttttttctttcaaaaaaggcaatgtgcactttcctctcctaaattttatatgccctagcagttgcgaatgttgtgtccaccttacaatttgattggaggctcccatacactgaaactctcaatagaattcttaaaaatgaacatcagctgggcgcagtggctcacgtctgtaatcccagcactttgggaggccaaggtgggcagatcacgagctcaggagttcgagaccagcctgaccaacatggtgaaaccccgtctctactaaaaatacaaaaattagctgggcgtggtggcgcatgcctgtaatcccagctactcaggagactgaggcaggagaattgcttaaacctgggaagcagaggttgcagtgagactagatcatgccactgcactccactgccactgcctgggcaacagagcaagactccatctcaaaaacaaacaaaaaaaatcacagactcattttaaaggagcagcaacctaaccaaatacaaacttcatttgattttaggtttagaaattctagttttattttggagaatcactcagtttttaatatcaattaaaatagtcctcaaaggaatgaagaggaagtctaaataaatgaataaaactcatttttcattttatggtagtatagaaagcattgatgtgtgtagagaaattaaaagacaagagtggtttactgtctatgcacaaatgagtgcctatatttaaggctgcctataccattacagtggcgtaattggtgatttcatagcatacagagaaacaatgaaatcaaagattaaatcattaggttatgatggtcatttgtaagattggaaagtagtcaaaaacccatgtgcaactttttttcagcactctaccattaggctccttaggcaagctgcttaacttccgtcagaagcaaaggtgtgggagaacaccattcacctcagtagtaacttataaaaaccgtttaaagaaggaaaatgggccccagcccctaggatccctgacttcctgatattctaaacatgagagttctgtgactttaactgagctctttaccagaagtaacgtgttgatgtatattatctttccaccatgctttgaccaaagtacattcacagtaactagagaaagcagatcatccatttctggataggtgaactacggcaaggtaagaacagaaaaaagtaaagtagtattgagtcatgcaggtatcagattaacagacattcattgaagataagtgaaataactttggagatagcagagaagagcaagaagatgttggacgttggcagtaagccgcagcaaggcagttaggaaagtacgtgagcctgatgacgcgaaggtgatgcctccatctgtccgcttagtggttattaaattgctgggaaagacctgcctttattttcctatcatcttttccccattactttgcattattcaggaaataattatttattcccaaatgcagttttctaagcagtgaccacaaaaatttcttattctaaggaaaataattaagaaaataaccctatctgtggcattgttttaaaatgtgggatacaaatctggtaagcagatttcaggtcattattgttttcttttaatggtttacatgaaattttcctctcaaaaaacaagtacctcttactgtataacatttgagtttttaaaattgagatagcttctgagagaaaaaaagaaagttgaatttgtagctctctcaactacaaaatcaccacacttttctcaaatctaataggaattcagtgtcattacagatacggtctctagtgaccaggtgaagacaattgaagctttggtagaacttctgcaaaagttaggtaaagaagaataaatccaatttatcagctttgttcatattctttttctgagtgatctaaatttttcttgcttgtgatcattagctaagacaaggagtgttaaaggttttctaaatgcaaacacatacgtttctgcatttcagaagtcagtcttgatagtaaatcctacaaactctcaactttctgcattgtattttaagtctatacaatgttagagcacatggtaatgtgggacagagttgattatatgatagcatgagaaatttgcactggttggtgttacaaaccaatgatctaaccagcatactctccaaatatgaaaaagtaaaaacatctcattaggtttggaagagcctaaggtagtccatacaggaagtttgcctgagaacagagaggagcctgttgattggcatggctcatgatgcctttcttgtatgaattatcaaaactgatactgagttgcccctagaaaacagccttccagaatatgtttgcttatttatggtggaagaggaagtgagaacaagatgagagtttcccttaaagtgaggagaatcattatacaactttgcaactgaagtatgtttccttgtagcaaacctttggtttattttatcgtcaaatcaaagccaccctcagttttttgtatggtgccatcaacctaaggaggacaatcaaataacctattgtttgccttggattcagtatatctactaagtacacagtctcgtataccttcaaaccagttacttgactaaacttccaccatattaccttagttcttcctatgccctttcctctgtgccaccacaaatcagagggaaagactgcagtacttctagaaagttgtggacttctaagaaagagccaggcttccatctcactatcccttgatcattatctctgaagtccctacctgcacttccctgattgccctgtagcaacaccagcatggtgggaattggagggaaagattgtggaaaatccctaaagggtcattgttcatgacgttattttgaattgtaaaattgtgagccactcacatttcaattacaaaaagaacagaactcttaatcacgttgtgaagattaatttcttgccattttctggattagcacagaagcttgtatcaatgaagagtatttaggaggggaatagggggaaaattgtatttttctgttcaaactctctccttctatttgtgtttccttcacccctctccctccaccacactgtgttggtcaaatgatactattctatgaaaccctgagctatagttgtcaaaagtaactatggattgtgattagtcctctgtgggtgcttccttccctcttttttctccctcactctctttctcagtctccactctggtaaatggaaaaggtgatgtcgaagaattgatgcttgcttggactcatgttgtatctgtgactatgctattagctgtctcctttttccttcctatatgggtagaattcttatgacttatgaagttcccttcttgataagtaggttaaatgcacaatgtggtactgttttatagtttctagatggttgtataaagcaaaaagttaatgtggttatgtgtttttaaagaaaataagtgattggtcactaaactctgtccttttttcattattacaatttctctctgttttccaaca

SEQ ID NO: 200412 - DNA, 1417 bp, Homo sapiens
  Payload ID: 19539
  Gene Name: xeroderma pigmentosum, complementation group A
  Uniprot ID: P23025
  ENST ID: ENST00000375128
  CDS Start-End: 66-887
ggctcgcctcggcgtgcagtgcgcgtgcgtggagctgggagctaggtcctcggagtgggccagagatggcggcggccgacggggctttgccggaggcggcggctttagagcaacccgcggagctgcctgcctcggtgcgggcgagtatcgagcggaagcggcagcgggcactgatgctgcgccaggcccggctggctgcccggccctactcggcgacggcggctgcggctactggaggcatggctaatgtaaaagcagccccaaagataattgacacaggaggaggcttcattttagaagaggaagaagaagaagaacagaaaattggaaaagttgttcatcaaccaggacctgttatggaatttgattatgtaatatgcgaagaatgtgggaaagaatttatggattcttatcttatgaaccactttgatttgccaacttgtgataactgcagagatgctgatgataaacacaagcttataaccaaaacagaggcaaaacaagaatatcttctgaaagactgtgatttagaaaaaagagagccacctcttaaatttattgtgaagaagaatccacatcattcacaatggggtgatatgaaactctacttaaagttacagattgtgaagaggtctcttgaagtttggggtagtcaagaagcattagaagaagcaaaggaagtccgacaggaaaaccgagaaaaaatgaaacagaagaaatttgataaaaaagtaaaagaattgcggcgagcagtaagaagcagcgtgtggaaaagggagacgattgttcatcaacatgagtatggaccagaagaaaacctagaagatgacatgtaccgtaagacttgtactatgtgtggccatgaactgacatatgaaaaaatgtgattttttagttcagtgacctgttttatagaattttatatttaaataaaggaaatttagattggtccttttcaaaattcaaaaaaaaaagcaacatcttcatagatgaatgaaacccttgtataagtaatacttcagtaataattatgtatgttatggcttaaaagcaagtttcagtgaaggtcacctggcctggttgtgtgcacaatgtcatgtctgtgattgccttcttacaacagagatgggagctgagtgctagagtaggtgcagaagtggtaggtcagctacaaatttgaggacaagataccaaggcaaaccctagattggggtagagggaaaagggttcaacaaaggctgaactggattcttaaccaagaaacaaataatagcaatggtggtgcaccactgtaccccaggttctagtcatgtgttttttaggacgatttctgtctccacgatggtggaaacagtggggaactactgctggaaaaagccctaatagcagaaataaacattgagttgtacgagtctga

SEQ ID NO: 200413 - DNA, 1584 bp, Homo sapiens
  Payload ID: 19539
  Gene Name: xeroderma pigmentosum, complementation group A
  ENST ID: ENST00000462523
  CDS Start-End: 2-796
gatggcggcggccgacggggctttgccggaggcggcggctttagagcaacccgcggagctgcctgcctcggtgcgggcgagtatcgagcggaagcggcagcgggcactgatgctgcgccaggcccggctggctgcccggccctactcggcgacggcggctgcggctactggaggcatggctaatgtaaaagcagccccaaagataattgacacaggaggaggcttcattttagaagaggaagaagaagaagaacagaaaattggaaaagttgttcatcaaccaggacctgttatggaatttgattatgtaatatgcgaagaatgtgggaaagaatttatggattcttatcttatgaaccactttgatttgccaacttgtgataactgcagagatgctgatgataaacacaagcttataaccaaaacagaggcaaaacaagaatatcttctgaaagactgtgatttagaaaaaagagagccacctcttaaatttattgtgaagaagaatccacatcattcacaatggggtgatatgaaactctacttaaagttacagattgtgaagaggtctcttgaagtttggggtagtcaagaagcattagaagaagcaaaggaagtccgacaggaaaaccgagaaaaaatgaaacagaagaaatttgataaaaaagtaaaagaggttgttcccgccttcctgaataggccacaaagggctgagactggagtagacactgtagagattagacacaaggagcttactgtgcagttttctcagaaggctcagaacagagaggaataaaagcaagtctaaaagtattttagttgaaaagaaattggaacctggttcctcttggtcttctgattttgatccacaaagaagctgacacagtttacttctttatgggaagaattgcggcgagcagtaagaagcagcgtgtggaaaagggagacgattgttcatcaacatgagtatggaccagaagaaaacctagaagatgacatgtaccgtaagacttgtactatgtgtggccatgaactgacatatgaaaaaatgtgattttttagttcagtgacctgttttatagaattttatatttaaataaaggaaatttagattggtccttttcaaaattcaaaaaaaaaagcaacatcttcatagatgaatgaaacccttgtataagtaatacttcagtaataattatgtatgttatggcttaaaagcaagtttcagtgaaggtcacctggcctggttgtgtgcacaatgtcatgtctgtgattgccttcttacaacagagatgggagctgagtgctagagtaggtgcagaagtggtaggtcagctacaaatttgaggacaagataccaaggcaaaccctagattggggtagagggaaaagggttcaacaaaggctgaactggattcttaaccaagaaacaaataatagcaatggtggtgcaccactgtaccccaggttctagtcatgtgttttttaggacgatttctgtctccacgatggtggaaacagtggggaactactgctggaaaaagccctaatagcagaaataaacattgagttgtacgagtctga

SEQ ID NO: 200414 - DNA, 3832 bp, Homo sapiens
  Payload ID: 19540
  Gene Name: xeroderma pigmentosum, complementation group C
  Uniprot ID: Q01831
  ENST ID: ENST00000285021
  CDS Start-End: 216-3038
atacaccggaaatagagagaaacctgttgtgctctttcctgcttcccgcagttttttagtggccacgggtatggggtggagcttcctttaggggcgtgactaggcctccaacgaaggggcgtggccaagcgcaccgcctcggggcggggccggcgttctagcgcatcgcggccgggtgcgtcactcgcgaagtggaatttgcccagacaagcaacatggctcggaaacgcgcggccggcggggagccgcggggacgcgaactgcgcagccagaaatccaaggccaagagcaaggcccggcgtgaggaggaggaggaggatgcctttgaagatgagaaacccccaaagaagagccttctctccaaagtttcacaaggaaagaggaaaagaggctgcagtcatcctgggggttcagcagatggtccagcaaaaaagaaagtggccaaggtgactgttaaatctgaaaacctcaaggttataaaggatgaagccctcagcgatggggatgacctcagggactttccaagtgacctcaagaaggcacaccatctgaagagaggggctaccatgaatgaagacagcaatgaagaagaggaagaaagtgaaaatgattgggaagaggttgaagaacttagtgagcctgtgctgggtgacgtgagagaaagtacagccttctctcgatctcttctgcctgtgaagccagtggagatagagattgaaacgccagagcaggcgaagacaagagaaagaagtgaaaagataaaactggagtttgagacatatcttcggagggcgatgaaacgtttcaataaaggggtccatgaggacacacacaaggttcaccttctctgcctgctagcaaatggcttctatcgaaataacatctgcagccagccagatctgcatgctattggcctgtccatcatcccagcccgctttaccagagtgctgcctcgagatgtggacacctactacctctcaaacctggtgaagtggttcattggaacatttacagttaatgcagaactttcagccagtgaacaagataacctgcagactacattggaaaggagatttgctatttactctgctcgagatgatgaggaattggtccatatattcttactgattctccgggctctgcagctcttgacccggctggtattgtctctacagccaattcctctgaagtcagcaacagcaaagggaaagaaaccttccaaggaaagattgactgcggatccaggaggctcctcagaaacttccagccaagttctagaaaaccacaccaaaccaaagaccagcaaaggaaccaaacaagaggaaacctttgctaagggcacctgcaggccaagtgccaaagggaagaggaacaagggaggcagaaagaaacggagcaagccctcctccagcgaggaagatgagggcccaggagacaagcaggagaaggcaacccagcgacgtccgcatggccgggagcggcgggtggcctccagggtgtcttataaagaggagagtgggagtgatgaggctggcagcggctctgattttgagctctccagtggagaagcctctgatccctctgatgaggattccgaacctggccctccaaagcagaggaaagcccccgctcctcagaggacaaaggctgggtccaagagtgcctccaggacccatcgtgggagccatcgtaaggacccaagcttgccagcggcatcctcaagctcttcaagcagtaaaagaggcaagaaaatgtgcagcgatggtgagaaggcagaaaaaagaagcatagctggtatagaccagtggctagaggtgttctgtgagcaggaggaaaagtgggtatgtgtagactgtgtgcacggtgtggtgggccagcctctgacctgttacaagtacgccaccaagcccatgacctatgtggtgggcattgacagtgacggctgggtccgagatgtcacacagaggtacgacccagtctggatgacagtgacccgcaagtgccgggttgatgctgagtggtgggccgagaccttgagaccataccagagcccatttatggacagggagaagaaagaagacttggagtttcaggctaaacacatggaccagcctttgcccactgccattggcttatataagaaccaccctctgtatgccctgaagcggcatctcctgaaatatgaggccatctatcccgagacagctgccatccttgggtattgtcgtggagaagcggtctactccagggattgtgtgcacactctgcattccagggacacgtggctgaagaaagcaagagtggtgaggcttggagaagtaccctacaagatggtgaaaggcttttctaaccgtgctcggaaagcccgacttgctgagccccagctgcgggaagaaaatgacctgggcctgtttggctactggcagacagaggagtatcagcccccagtggccgtggacgggaaggtgccccggaacgagtttgggaatgtgtacctcttcctgcccagcatgatgcctattggctgtgtccagctgaacctgcccaatctacaccgcgtggcccgcaagctggacatcgactgtgtccaggccatcactggctttgatttccatggcggctactcccatcccgtgactgatggatacatcgtctgcgaggaattcaaagacgtgctcctgactgcctgggaaaatgagcaggcagtcattgaaaggaaggagaaggagaaaaaggagaagcgggctctagggaactggaagttgctggccaaaggtctgctcatcagggagaggctgaagcgtcgctacgggcccaagagtgaggcagcagctccccacacagatgcaggaggtggactctcttctgatgaagaggaggggaccagctctcaagcagaagcggccaggatactggctgcctcctggcctcaaaaccgagaagatgaagaaaagcagaagctgaagggtgggcccaagaagaccaaaagggaaaagaaagcagcagcttcccacctgttcccatttgagcagctgtgagctgagcgcccactagaggggcacccaccagttgctgctgccccactacaggccccacacctgccctgggcatgcccagcccctggtggtgggggcttctctgctgagaaggcaaactgaggcagcatgcacggaggcggggtcaggggagacgaggccaagctgaggaggtgctgcaggtcccgtctggctccagcccttgtcagattcacccagggtgaagccttcaaagctttttgctaccaaagcccactcaccctttgagctacagaacactttgctaggagatactcttctgcctcctagacctgttctttccatctttagaaacatcagtttttgtatggaagccaccgggagatttctggatggtggtgcatccgtgaatgcgctgatcgtttcttccagttagagtcttcatctgtccgacaagttcactcgcctcggttgcggacctaggaccatttctctgcaggccacttaccttcccctgagtcaggcttactaatgctgccctcactgcctctttgcagtaggggagagagcagagaagtacaggtcatctgctgggatctagttttccaagtaacattttgtggtgacagaagcctaaaaaaagctaaaatcaggaaagaaaaggaaaaatacgaattgaaaattaaggaaatgttagtaaaatagatgagtgttaaactagattgtattcattactagataaaatgtataaagctctctgtactaaggagaaatgacttttataacattttgagaaaataataaagcatttatctaaa

SEQ ID NO: 200415 - DNA, 557 bp, Homo sapiens
  Payload ID: 19540
  Gene Name: xeroderma pigmentosum, complementation group C
  ENST ID: ENST00000511155
  CDS Start-End: 54-557
gcatcgcggccgggtgcgtcactcgcgaagtggaatttgcccagacaagcaacatggctcggaaacgcgcggccggcggggagccgcggggacgcgaactgcgcagccagaaatccaaggccaagagcaaggcccggcatgcctttgaagatgagaaacccccaaagaagagccttctctccaaagtttcacaaggaaagaggaaaagaggctgcagtcatcctgggggttcagcagatggtccagcaaaaaagaaagtggccaaggtgactgttaaatctgaaaacctcaaggttataaaggatgaagccctcagcgatggggatgacctcagggactttccaagtgacctcaagaaggcacaccatctgaagagaggggctaccatgaatgaagacagcaatgaagaagaggaagaaagtgaaaatgattgggaagaggttgaagaacttagtgagcctgtgctgggtgacgtgagagaaagtacagccttctctcgatctcttctgcctgtgaagccagtggagatagagattgaaacgccagagcaggcgaag

SEQ ID NO: 200416 - DNA, 2944 bp, Homo sapiens
  Payload ID: 19540
  Gene Name: xeroderma pigmentosum, complementation group C
  Uniprot ID: Q01831
  ENST ID: ENST00000476581
  CDS Start-End: 34-456
actcgcgaagtggaatttgcccagacaagcaacatggctcggaaacgcgcggccggcggggagccgcggggacgcgaactgcgcagccagaaatccaaggccaagagcaaggcccggcgtgaggaggaggaggaggatgcctttgaagatgagaaacccccaaagaagagccttctctccaaagtttcacaaggaaagaggaaaagaggctgcagtcatcctgggggttcagcagatggtccagcaaaaaagaaagtggccaaggtgactgttaaatctgaaaacctcaaggttataaaggatgaagccctcagcgatggggatgacctcagggactttccaagtgacctcaagaaggcacaccatctgaagagaggggctaccatgaatgaagacagcaatgaagaagaggaagaaagtgaaaatgattgggaagaggttgaagtgaaaagataaaactggagtttgagacatatcttcggagggcgatgaaacgtttcaataaaggggtccatgaggacacacacaaggttcaccttctctgcctgctagcaaatggcttctatcgaaataacatctgcagccagccagatctgcatgctattggcctgtccatcatcccagcccgctttaccagagtgctgcctcgagatgtggacacctactacctctcaaacctggtgaagtggttcattggaacatttacagttaatgcagaactttcagccagtgaacaagataacctgcagactacattggaaaggagatttgctatttactctgctcgagatgatgaggaattggtccatatattcttactgattctccgggctctgcagctcttgacccggctggtattgtctctacagccaattcctctgaagtcagcaacagcaaagggaaagaaaccttccaaggaaagattgactgcggatccaggaggctcctcagaaacttccagccaagttctagaaaaccacaccaaaccaaagaccagcaaaggaaccaaacaagaggaaacctttgctaagggcacctgcaggccaagtgccaaagggaagaggaacaagggaggcagaaagaaacggagcaagccctcctccagcgaggaagatgagggcccaggagacaagcaggagaaggcaacccagcgacgtccgcatggccgggagcggcgggtggcctccagggtgtcttataaagaggagagtgggagtgatgaggctggcagcggctctgattttgagctctccagtggagaagcctctgatccctctgatgaggattccgaacctggccctccaaagcagaggaaagcccccgctcctcagaggacaaaggctgggtccaagagtgcctccaggacccatcgtgggagccatcgtaaggacccaagcttgccagcggcatcctcaagctcttcaagcagtaaaagaggcaagaaaatgtgcagcgatggtgagaaggcagaaaaaagaagcatagctggtatagaccagtggctagaggtgttctgtgagcaggaggaaaagtgggtatgtgtagactgtgtgcacggtgtggtgggccagcctctgacctgttacaagtacgccaccaagcccatgacctatgtggtgggcattgacagtgacggctgggtccgagatgtcacacagaggtacgacccagtctggatgacagtgacccgcaagtgccgggttgatgctgagtggtgggccgagaccttgagaccataccagagcccatttatggacagggagaagaaagaagacttggagtttcaggctaaacacatggaccagcctttgcccactgccattggcttatataagaaccaccctctgtatgccctgaagcggcatctcctgaaatatgaggccatctatcccgagacagctgccatccttgggtattgtcgtggagaagcggtctactccagggattgtgtgcacactctgcattccagggacacgtggctgaagaaagcaagagtggtgaggcttggagaagtaccctacaagatggtgaaaggcttttctaaccgtgctcggaaagcccgacttgctgagccccagctgcgggaagaaaatgacctgggcctgtttggctactggcagacagaggagtatcagcccccagtggccgtggacgggaaggtgccccggaacgagtttgggaatgtgtacctcttcctgcccagcatgatgcctattggctgtgtccagctgaacctgcccaatctacaccgcgtggcccgcaagctggacatcgactgtgtccaggccatcactggctttgatttccatggcggctactcccatcccgtgactgatggatacatcgtctgcgaggaattcaaagacgtgctcctgactgcctgggaaaatgagcaggcagtcattgaaaggaaggagaaggagaaaaaggagaagcgggctctagggaactggaagttgctggccaaaggtctgctcatcagggagaggctgaagcgtcgctacgggcccaagagtgaggcagcagctccccacacagatgcaggaggtggactctcttctgatgaagaggaggggaccagctctcaagcagaagcggccaggatactggctgcctcctggcctcaaaaccgagaagatgaagaaaagcagaagctgaagggtgggcccaagaagaccaaaagggaaaagaaagcagcagcttcccacctgttcccatttgagcagctgtgagctgagcgcccactagaggggcacccaccagttgctgctgccccactacaggccccacacctgccctgggcatgcccagcccctggtggtgggggcttctctgctgagaaggcaaactgaggcagcatgcacggaggcggggtcaggggagacgaggccaagctgaggaggtgctgcaggtcccgtctggctccagcccttgtcagattcac

SEQ ID NO: 200417 - DNA, 2315 bp, Homo sapiens
  Payload ID: 19541
  Gene Name: Xg blood group
  Uniprot ID: P55808
  ENST ID: ENST00000381174
  CDS Start-End: 226-768
gtgtgcctacactggtcccacaggttttcagctgtggagtttgggatctgagcttggagcccatttgtttctggcagttccgctcatattttccacttgaagacatcgcctcccttccttccaagctgggagaccagaagtcaacaacaggagggtggagaggccgggtctcacaatccgcttggctggggagtccactgaggttcttgcatcctgaagcaaaccatggagagctggtggggacttccctgtcttgcgttcctgtgttttctaatgcacgcccgaggtcaaagagactttgatttggcagatgcccttgatgaccctgaacccaccaagaagccaaactcagatatctacccaaagccaaaaccaccttactacccacagcccgagaatcccgacagcggtggaaatatctacccaaggccaaagccacgccctcaaccccagcctggcaattccggcaacagtggaggttacttcaatgatgtggaccgtgatgacggacgctacccgcccaggcccaggccacggccgcctgcaggaggtggcggcggtggctactccagttatggcaactccgacaacacgcacggtggagatcaccattcaacgtatggcaatccagaaggcaatatggtagcaaaaatcgtgtctcccatcgtatccgtggtggtggtgacactgctgggagcagcagccagttatttcaaactaaacaataggagaaattgtttcaggacccatgaaccagaaaatgtctgaagatgttaagatcccctgattactttgagaaaaacaactaaaacaagaaccgtgtttatcactgttgtggagatttccttttattcttgacacaatttgatgacctaaagtgtgttttcttctgtgtaaagtacatgagctgcctcactaagcattcccaactcattgaatgtgatgtggttataaagataagttaggcagctagaccctgcgttctaaaaaaggattgcttgcaatgttggtttggctattcatttgcacaaagagactgtggctctctgttgtgagatcttcagctacctcatggtgcaataacacacacacgcttaaccatgttgatggcacaaagcggtgagcagtagggaggtagaatatcttggtggggaggggatgttatcagcttctgggagatgaagaatattgttgaggttccaaagatgctggacctgtgctaaattcttcagtgatatgaaaaaatcattgagcattcattattgcgaatgaagtggggatgcattatttctgacacccacaagcagggtttgatcatcctttcagctttgagatatctgcacataaaattattattacctgaagaaaataaggctgcattttgaaatgttaagtgcaaaatgactgatgttaaaaccatctgggggaaatcttgggatgctttttcctaggaaatcatatggttgtgatatgttttggcgcataggagacagaaatagtgattatcaggcgttgagcctttttgtagtatttttagtctttgatactctgtaagtgctagttcctaaggcaccaacattgcattccttggtttatactttttctattcatcagggtaggaagtcttaaatccttaggcatccaagaagtatactagctttttgcttctcttttagaaatacttgtggggagagaaaaaaggatggtttgggcatattggtatagtttgagtaaactaaggttaatgttcatataacatttagactttgccataaatatcagaaccaaagatcaagacattcatgtacagtctggaatgtatatatggggcccataaaaattcccagtatgcatgttttatgctcaccattatgaattggggtcttcaaagagagaaggttgaaagtggaaagcacttgaaagggctccccggtttgtaaaatatctttaatcattcacattaggtacctcggagttgcgggtctcaaatgtggattcatgcatcatttgtgcagtttgaagatagtccatatttcctatttcagtattaggtcctgcaacacttttcaattcttgtagaaggtttttttcaggagtggtgatgtctgatgctcaattactattttccctataagagtttcagcatgagcttaattaaattcttgtgaaaaaacctgtgtttttagttacacacacacacacacacacacctacttaaatggaatctaaacatttttagcctttaatccattccattttctaaaactgtcataaactatttttaatcattttaaataaatgtaaaagaaaaataa

SEQ ID NO: 200418 - DNA, 979 bp, Homo sapiens
  Payload ID: 19541
  Gene Name: Xg blood group
  Uniprot ID: P55808
  ENST ID: ENST00000419513
  CDS Start-End: 224-811
gtgcctacactggtcccacaggttttcagctgtggagtttgggatctgagcttggagcccatttgtttctggcagttccgctcatattttccacttgaagacatcgcctcccttccttccaagctgggagaccagaagtcaacaacaggagggtggagaggccgggtctcacaatccgcttggctggggagtccactgaggttcttgcatcctgaagcaaaccatggagagctggtggggacttccctgtcttgcgttcctgtgttttctaatgcacgcccgaggtcaaagagactttgatttggcagatgcccttgatgaccctgaacccaccaagaagccaaactcagatatctacccaaagccaaaaccaccttactacccacagcccgagaatcccgacagcggtggaaatatctacccaaggccaaagccacgccctcaaccccagcctggcaattccggcaacagtggaggttacttcaatgatgtggaccgtgatgacggacgctacccgcccaggcccaggccacggccgcctgcaggaggtggcggcggtggctactccagttatggcaactccgacaacacgcacggaagagggggctatagactcaactctcgttatggaaatacttatggtggagatcaccattcaacgtatggcaatccagaaggcaatatggtagcaaaaatcgtgtctcccatcgtatccgtggtggtggtgacactgctgggagcagcagccagttatttcaaactaaacaataggagaaattgtttcaggacccatgaaccagaaaatgtctgaagatgttaagatcccctgattactttgagaaaaacaactaaaacaagaaccgtgtttatcactgttgtggagatttccttttattcttgacacaatttgatgacctaaagtgtgttttcttctgtgtaaagtacatgagctgcctcactaagcattcccaactcattg

SEQ ID NO: 200419 - DNA, 574 bp, Homo sapiens
  Payload ID: 19541
  Gene Name: Xg blood group
  ENST ID: ENST00000509484
  CDS Start-End: 131-574
cttgaagacatcgcctcccttccttccaagctgggagaccagaagtcaacaacaggagggtggagaggccgggtctcacaatccgcttggctggggagtccactgaggttcttgcatcctgaagcaaaccatggagagctggtggggacttccctgtcttgcgttcctgtgttttctaatgcacgcccgagatatctacccaaagccaaaaccaccttactacccacagcccgagaatcccgacagcggtggaaatatctacccaaggccaaagccacgccctcaaccccagcctggcaattccggcaacagtggaggttacttcaatgatgtggaccgtgatgacggacgctacccgcccaggcccaggccacggccgcctgcaggaggtggcggcggtggctactccagttatggcaactccgacaacacgcacggtggagatcaccattcaacgtatggcaatccagaaggcaatatggtagcaaaaatcgtgtctcccatcgtatccgtggtggtggtgacactgctgggagcagcagccagttatttcaaactaaacaataggagaaat

SEQ ID NO: 200420 - DNA, 1584 bp, Homo sapiens
  Payload ID: 19542
  Gene Name: XIAP associated factor 1
  Uniprot ID: Q6GPH4
  ENST ID: ENST00000346752
  CDS Start-End: 242-1090
gtagatgcggctgtgacagcagcaaagaatgacggccaagggcgacagcaggggctggccatgctgtaaaggggcttcttgggagggtccagcctcaggaatcaaggggaactcctgagccgagaattctgaagatctcctccctccctgaagctgtgggctgggccatcggaaaactttcagttttgtttccttgcctgcaagaaacgaaactcaaccgaaagcctgcagagagcagaacatggaaggagacttctcggtgtgcaggaactgtaaaagacatgtagtctctgccaacttcaccctccatgaggcttactgcctgcggttcctggtcctgtgtccggagtgtgaggagcctgtccccaaggaaaccatggaggagcactgcaagcttgagcaccagcaggccaatgagtgccaggagcgccctgttgagtgtaagttctgcaaactggacatgcagctcagcaagctggagctccacgagtcctactgtggcagccggacagagctctgccaaggctgtggccagttcatcatgcaccgcatgctcgcccagcacagagatgtctgtcgcagtgaacaggcccagctcgggaaaggggaaagaatttcagctcctgaaagggaaatctactgtcattattgcaaccaaatgattccagaaaataagtatttccaccatatgggtaaatgttgtccagactcagagtttaagaaacactttcctgttggaaatccagaaattcttccttcatctcttccaagtcaagctgctgaaaatcaaacttccacgatggagaaagatgttcgtccaaagacaagaagtataaacagatttcctcttcattctgaaagttcatcaaagaaagcaccaagaagcaaaaacaaaaccttggatccacttttgatgtcagagcccaagcccaggaccagctcccctagaggagataaagcagcctatgacattctgaggagatgttctcagtgtggcatcctgcttcccctgccgatcctaaatcaacatcaggagaaatgccggtggttagcttcatcaaaaggaaaacaagtgagaaatttcagctagatttggaaaaggaaaggtactacaaattcaaaagatttcacttttaacactggcattcctgcctacttgctgtggtggtcttgtgaaaggtgatgggttttattcgttgggctttaaaagaaaaggtttggcagaactaaaaacaaaactcacgtatcatctcaatagatacagaaaaggcttttgataaaattcaacttgacttcatgttaaaaaccctcaacaaaccaggcgtcgaaggaacatacctcaaaataataagagccatctatgacaaaaccacagccaacatcatactgaatgagcaaaagctggagcattactcttgagaagtagaacaaggcacttcagtcctattcaacatagtactggaagtcctcgccacagcaatcaggcaagagaaagaaataaaaggcaaccaaaaagaaaggaagtcgaagtatctctgtttgcagacgatatgattctatatctagaaaaccccatgatcttgg

SEQ ID NO: 200421 - DNA, 3623 bp, Homo sapiens
  Payload ID: 19542
  Gene Name: XIAP associated factor 1
  Uniprot ID: Q6GPH4
  ENST ID: ENST00000361842
  CDS Start-End: 240-1145
agatgcggctgtgacagcagcaaagaatgacggccaagggcgacagcaggggctggccatgctgtaaaggggcttcttgggagggtccagcctcaggaatcaaggggaactcctgagccgagaattctgaagatctcctccctccctgaagctgtgggctgggccatcggaaaactttcagttttgtttccttgcctgcaagaaacgaaactcaaccgaaagcctgcagagagcagaacatggaaggagacttctcggtgtgcaggaactgtaaaagacatgtagtctctgccaacttcaccctccatgaggcttactgcctgcggttcctggtcctgtgtccggagtgtgaggagcctgtccccaaggaaaccatggaggagcactgcaagcttgagcaccagcaggttgggtgtacgatgtgtcagcagagcatgcagaagtcctcgctggagtttcataaggccaatgagtgccaggagcgccctgttgagtgtaagttctgcaaactggacatgcagctcagcaagctggagctccacgagtcctactgtggcagccggacagagctctgccaaggctgtggccagttcatcatgcaccgcatgctcgcccagcacagagatgtctgtcgcagtgaacaggcccagctcgggaaaggggaaagaatttcagctcctgaaagggaaatctactgtcattattgcaaccaaatgattccagaaaataagtatttccaccatatgggtaaatgttgtccagactcagagtttaagaaacactttcctgttggaaatccagaaattcttccttcatctcttccaagtcaagctgctgaaaatcaaacttccacgatggagaaagatgttcgtccaaagacaagaagtataaacagatttcctcttcattctgaaagttcatcaaagaaagcaccaagaagcaaaaacaaaaccttggatccacttttgatgtcagagcccaagcccaggaccagctcccctagaggagataaagcagcctatgacattctgaggagatgttctcagtgtggcatcctgcttcccctgccgatcctaaatcaacatcaggagaaatgccggtggttagcttcatcaaaaggaaaacaagtgagaaatttcagctagatttggaaaaggaaaggtactacaaattcaaaagatttcacttttaacactggcattcctgcctacttgctgtggtggtcttgtgaaaggtgatgggttttattcgttgggctttaaaagaaaaggtttggcagaactaaaaacaaaactcacgtatcatctcaatagatacagaaaaggcttttgataaaattcaacttgacttcatgttaaaaaccctcaacaaaccaggcgtcgaaggaacatacctcaaaataataagagccatctatgacaaaaccacagccaacatcatactgaatgagcaaaagctggagcattactcttgagaagtagaacaaggcacttcagtcctattcaacatagtactggaagtcctcgccacagcaatcaggcaagagaaagaaataaaaggcaaccaaaaagaaaggaagtcgaagtatctctgtttgcagacgatatgattctatatctagaaaaccccatgatcttggcccaaaagctcctagatctgataaacaacttcagctaactttcaggagacaaaatcaatatacaaaatatggtagcatttttatacaccaacgacatccaagctgagagccaaatcaagaatgcaatcctattcacaattgccacaaaaagaataaaatacctaggaatacagctaaccagggagatgaaagatctctacaacaaaaattacaaaacactgctgaaagaaatcagagatgacacaaatggaaaaacattccatacttatggataggaagaatcaatattgttaaaatggccatactacccaaagcaatttatagattcaatgctattcctatcaaactaccaataacattcttcacagaatcagaaaaaaaaagcattaaaatttatttgaaaccaaaaaagagcccaaaaagccaaagcaatcctaagcaaaaagaacaaagctggaggcatcgcattacccaacttcaaactatactacagggctacagtaaccaaaactgcatgatactggtacaaaagcatggtgctggtacaaaagcagacacatagatcaatggaacagaatagagggcccagaaataaagctacacacctacaaccatctaatctttgacaaagttgacaaaaatacgcaatggggaaagaattccccattcagtaagtggtactgggataactagctagccatatgcagaggattgaaactgaaccacttccttacaccatatgcaaaaatcaactcaagatggattaaagacttaaatgtaaaaccccaaactataaaaactctggaagataacctaggcaataccattctggacataggaacggaaaaagatttcatgacaaagatcccaaaaataattgtaacgaaagcaaaaattgacaaatgggacatgattaaacagaattaccatttgactcagcaatcccattattggttatatacccaaaggaatctaaatcattctgtcataaagacatatatacacaaatgttcacggcagcactatacacaatcgcaaagtcagggaatcaaactaaatgtccatcagtggtagaaaggataaagaaaatgtggtggcagggagtggtggctcatgtctgtaatcccagcactttgggaggctgaggcgggtggttcacctgaggtcaggagtttgagaccagcctggccaacatggagaaactccgtctccgctaaaaatacgaaaattagccaggcgtggtggcgagcacctgtcatcccagctacttgggaggcctaggcgtgagaatcgcttgaacctggaaggtggtggttgcagtgagccgagatcctgccactgcactccagcctgggcaaccaagcgagactctgccttaaaaaaaaaaaaaagaaaatgtggcacatatacaccatggaatactatgcagccataaaaaagaatgggatcatgtcctgtgcagcaacgtggatggagctggaagccattatcctaaatgaactcactcagaaacagaaaaccaaataccacatgttctcacttataagtagaagctaaacattgagtacacatggatacaaagaagggaaccgcagacactggggcctacctgaggtcggagcatggaaggagggtgaggatcaaaaaactacctatctggtactatgctttttatctggatgatgaaataatctgtacaacaaaccctggtgacatgcaatttacctatatagcaagcctacacatgtgcccctgaacctaaaaaaaaagttaaaagaaaaacgtttggattattttccctctttcgaacaaagacattggtttgcccaaggactacaaataaaccaacgggaaaaaagaaaggttccagttttgtctgaaaattctgattaagcctctgggccctacagcctggagaacctggagaatcctacacccacagaacccggctttgtccccaaagaataaaaacacctctctaaaa

SEQ ID NO: 200422 - DNA, 820 bp, Homo sapiens
  Payload ID: 19542
  Gene Name: XIAP associated factor 1
  Uniprot ID: Q6GPH4
  ENST ID: ENST00000574962
  CDS Start-End: 1-426
atggaaggagacttctcggtgtgcaggaactgtaaaagacatgtagtctctgccaacttcaccctccatgaggcttactgcctgcggttcctggtcctgtgtccggagtgtgaggagcctgtccccaaggaaaccatggaggagcactgcaagcttgagcaccagcaggttgggtgtacgatgtgtcagcagagcatgcagaagtcctcgctggagtttcataaggccaatgagtgccaggagcgccctgttgagtgtaagttctgcaaactggacatgcagctcagcaagctggagctccacgagtcctactgtggcagccggacagagctctgccaaggctgtggccagttcatcatgcaccgcatgctcgcccagcacagagatgtctgtcgcagtgaacaggcccagctcgggaaagggtaaatgttgtccagactcagagtttaagaaacactttcctgttggaaatccagaaattcttccttcatctcttccaagtcaagctgctgaaaatcaaacttccacgatggagaaagatgttcgtccaaagacaagaagtataaacagatttcctcttcattctgaaagttcatcaaagaaagcaccaagaagcaaaaacaaaaccttggatccacttttgatgtcagagcccaagcccaggaccagctcccctagaggagataaagcagcctatgacattctgaggagatgttctcagtgtggcatcctgcttcccctgccgatcctaaatcaacatcaggagaaatgccggtggttagcttcatcaaaaggaaaacaagtgagaaatttcagctag

SEQ ID NO: 200423 - DNA, 1010 bp, Homo sapiens
  Payload ID: 19542
  Gene Name: XIAP associated factor 1
  ENST ID: ENST00000576724
  CDS Start-End: 25-519
ccgaaagcctgcagagagcagaacatggaaggagacttctcggtgtgcaggaactgtaaaagacatgtagtctctgccaacttcaccctccatgaggcttactgcctgcggttcctggtcctgtgtccggagtgtgaggagcctgtccccaaggaaaccatggaggagcactgcaagcttgagcaccagcaggttgggtgtacgatgtgtcagcagagcatgcagaagtcctcgctggagtttcataaggccaatgagtgccaggagcgccctgttgagtgtaagttctgcaaactggacatgcagctcagcaagctggagctccacgagtcctactgtggcagccggacagagctctgccaaggctgtggccagttcatcatgcaccgcatgctcgcccagcacagagatgtctgtcgcagtgaacaggcccagctcgggaaagaaaccagtcctgatccaggaaaatgtctctccattacggttgctgctgccctgagtgcacatctgtggccataaaggaaatgatgtgggtgattcggccaagagttgcctgtgtggtcaaggatgccggcagcgcaggaaagtcaagaccaggggaaagaatttcagctcctgaaagggaaatctactgtcattattgcaaccaaatgattccagaaaataagtatttccaccatatgggtaaatgttgtccagactcagagtttaagaaacactttcctgttggaaatccagaaattcttccttcatctcttccaagtcaagctgctgaaaatcaaacttccacgatggagaaagatgttcgtccaaagacaagaagtataaacagatttcctcttcattctgaaagttcatcaaagaaagcaccaagaagcaaaaacaaaaccttggatccacttttgatgtcagagcccaagcccaggaccagctcccctagaggagataaagcagcctatgacattctgaggagatgttctcagtgtggcatcctgcttcccctgccgatc

SEQ ID NO: 200424 - DNA, 1609 bp, Homo sapiens
  Payload ID: 19542
  Gene Name: XIAP associated factor 1
  ENST ID: ENST00000571217
  CDS Start-End: 18-242
cctgcagagagcagaacatggaaggagacttctcggtgtgcaggaactgtaaaagacatgtagtctctgccaacttcaccctccatgaggcttactgcctgcggttcctggtcctgtgtccggagtgtgaggagcctgtccccaaggaaaccatggaggagcactgcaagcttgagcaccagcaggggaaagaatttcagctcctgaaagggaaatctactgtcattattgcaaccaaatgattccagaaaataagtatttccaccatatgggtaaatgttgtccagactcagagtttaagaaacactttcctgttggaaatccagaaattcttccttcatctcttccaagtcaagctgctgaaaatcaaacttccacgatggagaaagatgttcgtccaaagacaagaagtataaacagatttcctcttcattctgaaagttcatcaaagaaagcaccaagaagcaaaaacaaaaccttggatccacttttgatgtcagagcccaagcccaggaccagctcccctagaggagataaagcagcctatgacattctgaggagatgttctcagtgtggcatcctgcttcccctgccgatcctaaatcaacatcaggagaaatgccggtggttagcttcatcaaaaggaaaacaagtgagaaatttcagctagatttggaaaaggaaaggtactacaaattcaaaagatttcacttttaacactggcattcctgcctacttgctgtggtggtcttgtgaaaggtgatgggttttattcgttgggctttaaaagaaaaggtttggcagaactaaaaacaaaactcacgtatcatctcaatagatacagaaaaggcttttgataaaattcaacttgacttcatgttaaaaaccctcaacaaaccaggcgtcgaaggaacatacctcaaaataataagagccatctatgacaaaaccacagccaacatcatactgaatgagcaaaagctggagcattactcttgagaagtagaacaaggcacttcagtcctattcaacatagtactggaagtcctcgccacagcaatcaggcaagagaaagaaataaaaggcaaccaaaaagaaaggaagtcgaagtatctctgtttgcagacgatatgattctatatctagaaaaccccatgatcttggcccaaaagctcctagatctgataaacaacttcagctaactttcaggagacaaaatcaatatacaaaatatggtagcatttttatacaccaacgacatccaagctgagagccaaatcaagaatgcaatcctattcacaattgccacaaaaagaataaaatacctaggaatacagctaaccagggagatgaaagatctctacaacaaaaattacaaaacactgctgaaagaaatcagagatgacacaaatggaaaaacattccatacttatggataggaagaatcaatattgttaaaatggccatactacccaaagcaatttatagattcaatgctattcctatcaaactaccaataacattcttcacagaatcagaaaaaaaaagcattaaaatttatttgaaaccaaaaaagagcccaaaaagccaaagcaatcctaagcaaaaa

SEQ ID NO: 200425 - DNA, 583 bp, Homo sapiens
  Payload ID: 19542
  Gene Name: XIAP associated factor 1
  ENST ID: ENST00000574907
  CDS Start-End: 13-583
agagagcagaacatggaaggagacttctcggtgtgcaggaactgtaaaagacatgtagtctctgccaacttcaccctccatgaggcttactgcctgcggttcctggtcctgtgtccggagtgtgaggagcctgtccccaaggaaaccatggaggagcactgcaagcttgagcaccagcaggagagatgggatctgggagtcacagagtgggtccagtcctccctgcaggagagatggggtctgagagttgggggacgagggtccagtcctccctgcaggttgggtgtacgatgtgtcagcagagcatgcagaagtcctcgctggagtttcataaggccaatgagtgccaggagcgccctgttgagtgtaagttctgcaaactggacatgcagctcagcaagctggagctccacgagtcctactgtggcagccggacagagctctgccaaggctgtggccagttcatcatgcaccgcatgctcgcccagcacagagatgtctgtcgcagtgaacaggcccagctcgggaaaggggaaagaatttcagctcctgaaagggaaatctactgtcattattgcaacca

SEQ ID NO: 200426 - DNA, 576 bp, Homo sapiens
  Payload ID: 19542
  Gene Name: XIAP associated factor 1
  ENST ID: ENST00000574394
  CDS Start-End: 176-576
agagcctccctggacgctgtttgcaaggtcctcaccgcctggaagtccaggagccatttttagggaacagcattcaagctcaacatgctgtgggctgggccatcggaaaactttcagttttgtttccttgcctgcaagaaacgaaactcaaccgaaagcctgcagagagcagaacatggaaggagacttctcggtgtgcaggaactgtaaaagacatgtagtctctgccaacttcaccctccatgaggcttactgcctgcggttcctggtcctgtgtccggagtgtgaggagcctgtccccaaggaaaccatggaggagcactgcaagcttgagcaccagcaggttgggtgtacgatgtgtcagcagagcatgcagaagtcctcgctggagtttcataaggccaatgagtgccaggagcgccctgttgagtgtaagttctgcaaactggacatgcagctcagcaagctggagctccacgagtcctactgtggcagccggacagagctctgccaaggctgtggccagttcatcatgcaccgcatgctcgcccagcacagagatgtctgtcgcagtga

SEQ ID NO: 200427 - DNA, 557 bp, Homo sapiens
  Payload ID: 19542
  Gene Name: XIAP associated factor 1
  ENST ID: ENST00000575147
  CDS Start-End: 13-204
agagagcagaacatggaaggagacttctcggtgtgcaggaactgtaaaagacatgtagtctctgccaacttcaccctccatgaggcttactgcctgcggttcctggtcctgtgtccggagtgtgaggagcctgtccccaaggaaaccatggaggagcactgcaagcttgagcaccagcaggcttggagagcagtggagaactagcccaccgcataacacaggccaatgagtgccaggagcgccctgttgagtgtaagttctgcaaactggacatgcagctcagcaagctggagctccacgagtcctactgtggcagccggacagagctctgccaaggctgtggccagttcatcatgcaccgcatgctcgcccagcacagagatgtctgtcgcagtgaacaggcccagctcgggaaagaaaccagtcctgatccaggaaaatgtctctccattacggttgctgctgccctgagtgcacatctgtggccataaaggaaatgatgtgggtgattcggccaagagttgcctgtgtggtcaaggatgccggcagcgcaggaa

SEQ ID NO: 200428 - DNA, 763 bp, Homo sapiens
  Payload ID: 19542
  Gene Name: XIAP associated factor 1
  Uniprot ID: Q6GPH4
  ENST ID: ENST00000571673
  CDS Start-End: 1-369
atggaaggagacttctcggtgtgcaggaactgtaaaagacatgtagtctctgccaacttcaccctccatgaggcttactgcctgcggttcctggtcctgtgtccggagtgtgaggagcctgtccccaaggaaaccatggaggagcactgcaagcttgagcaccagcaggccaatgagtgccaggagcgccctgttgagtgtaagttctgcaaactggacatgcagctcagcaagctggagctccacgagtcctactgtggcagccggacagagctctgccaaggctgtggccagttcatcatgcaccgcatgctcgcccagcacagagatgtctgtcgcagtgaacaggcccagctcgggaaagggtaaatgttgtccagactcagagtttaagaaacactttcctgttggaaatccagaaattcttccttcatctcttccaagtcaagctgctgaaaatcaaacttccacgatggagaaagatgttcgtccaaagacaagaagtataaacagatttcctcttcattctgaaagttcatcaaagaaagcaccaagaagcaaaaacaaaaccttggatccacttttgatgtcagagcccaagcccaggaccagctcccctagaggagataaagcagcctatgacattctgaggagatgttctcagtgtggcatcctgcttcccctgccgatcctaaatcaacatcaggagaaatgccggtggttagcttcatcaaaaggaaaacaagtgagaaatttcagctag

SEQ ID NO: 200429 - DNA, 565 bp, Homo sapiens
  Payload ID: 19542
  Gene Name: XIAP associated factor 1
  ENST ID: ENST00000571135
  CDS Start-End: 3-389
acatggaaggagacttctcggtgtgcaggaactgtaaaagacatgtagtctctgccaacttcaccctccatgaggcttactgcctgcggttcctggtcctgtgtccggagtgtgaggagcctgtccccaaggaaaccatggaggagcactgcaagcttgagcaccagcaggcttatggatctggcataggcaagaggttctggtttcaggaaagactggctgttctcttgagatctgtaaagagaggatgtgaaaaaggaaggtcctggaaggcagtcagatggagccctgtttcccgcctttccatgtccattcctcctggggcccctgatctgtctctctggagatactcaagctcaggcagccgttgccaactcagactggtctgacaaacacttcttgaacactgggcggggtgctagagagacactgaggttgggtgtacgatgtgtcagcagagcatgcagaagtcctcgctggagtttcataaggccaatgagtgccaggagcgccctgttgagtgtaagttctgcaaactggacatgcagctcagcaagctggagct

SEQ ID NO: 200430 - DNA, 588 bp, Homo sapiens
  Payload ID: 19542
  Gene Name: XIAP associated factor 1
  ENST ID: ENST00000572546
  CDS Start-End: 34-471
gaaactcaaccgaaagcctgcagagagcagaacatggaaggagacttctcggtgtgcaggaactgtaaaagacatgtagtctctgccaacttcaccctccatgaggcttactgcctgcggttcctggtcctgtgtccggagtgtgaggagcctgtccccaaggaaaccatggaggagcactgcaagcttgagcaccagcaggccaatgagtgccaggagcgccctgttgagtgtaagttctgcaaactggacatgcagctcagcaagctggagctccacgagtcctactgtggcagccggacagagctctgccaaggctgtggccagttcatcatgcaccgcatgctcgcccagcacagagatgtctgtcgcagtgaacaggcccagctcgggaaagaaaccagtcctgatccaggaaaatgtctctccattacggttgctgctgccctgagtgcacatctgtggccataaaggaaatgatgtgggtgattcggccaagagttgcctgtgtggtcaaggatgccggcagcgcaggaaagtcaagaccaggggaaagaatttcagctcctgaaagggaaatctactgtc

SEQ ID NO: 200431 - DNA, 2830 bp, Homo sapiens
  Payload ID: 19542
  Gene Name: XIAP associated factor 1
  ENST ID: ENST00000575369
  CDS Start-End: 632-1018
gatgttgtttagagttcttctgttagcacagctgtttctagggtctggaaaaactctaaggacccccaggaggatacacaccagattgggtctgggctcacaccaccctgcatccccagagcctccctggacgctgtttgcaaggtcctcaccgcctggaagtccaggagccatttttagggaacagcattcaagctcaacatggcaagttccctctttcctgcaggggaggaccagaagggagccggagatgggggagaagggtgggaggtggatggtttggaaaagggatggagacccagacggagagaagccagccagccagggtgagggaacaagctgctgtgctgcccaggagaggcctggcctcaggctgccagcctcagggaggtagatgcggctgtgacagcagcaaagaatgacggccaagggcgacagcaggggctggccatgctgtaaaggggcttcttgggagggtccagcctcaggaatcaaggggaactcctgagccgagaattctgaagatctcctccctccctgaagctgtgggctgggccatcggaaaactttcagttttgtttccttgcctgcaagaaacgaaactcaaccgaaagcctgcagagagcagaacatggaaggagacttctcggtgtgcaggaactgtaaaagacatgtagtctctgccaacttcaccctccatgaggcttactgcctgcggttcctggtcctgtgtccggagtgtgaggagcctgtccccaaggaaaccatggaggagcactgcaagcttgagcaccagcaggcttatggatctggcataggcaagaggttctggtttcaggaaagactggctgttctcttgagatctgtaaagagaggatgtgaaaaaggaaggtcctggaaggcagtcagatggagccctgtttcccgcctttccatgtccattcctcctggggcccctgatctgtctctctggagatactcaagctcaggcagccgttgccaactcagactggtctgacaaacacttcttgaacactgggcggggtgctagagagacactgaggtagccacatcggatccctgccctctgggagttcacagacccaaacccggaacactgtgagccaaagtggatgtggggcaggccctgggtgctgggtggacccacatctggtgtgtgtgtgtgtgtgtgtgtgtgtgtttaggttgggtgtacgatgtgtcagcagagcatgcagaagtcctcgctggagtttcataaggccaatgagtgccaggagcgccctgttgagtgtaagttctgcaaactggacatgcagctcagcaagctggagctccacgagtcctactgtggcagccggacagagctctgccaaggctgtggccagttcatcatgcaccgcatgctcgcccagcacagagatgtctgtcgcagtgaacaggcccagctcgggaaaggggaaagaatttcagctcctgaaagggaaatctactgtcattattgcaaccaaatgattccagaaaataagtatttccaccatatgggtaaatgttgtccagactcagagtttaagaaacactttcctgttggaaatccagaaattcttccttcatctcttccaagtcaagctgctgaaaatcaaacttccacgatggagaaagatgttcgtccaaagacaagaagtataaacagatttcctcttcattctgaaagttcatcaaagaaagcaccaagaagcaaaaacaaaaccttggatccacttttgatgtcagagcccaagcccaggaccagctcccctagaggagataaagcagcctatgacattctgaggagatgttctcagtgtggcatcctgcttcccctgccgatcctaaatcaacatcaggtactcagcctctgttctctgcttacctttctgggaaccatccgcacagtgtcttaaaaaaatccaagacctgaaagatgttcacaaatgttgtggctgaaaaggccgttttctctgactcccacttctctgggtgcccaaatgcactatctcgtagcacttaccacctggtttatttgcatcacctccgagagactgagtcacctttgactcaagccaggtctttgaaggtagagccaggtccctcttctctgtgtctccagcttctaggccagggattgatttggagcaactgcttcaaaactgttgagtaaatgaatgaatcagaggatacccagtctatctctctcatggtgtagatatggcactgaggcccagagatgagatgtcttggtcaagatcctaagccagttggtggtggcttacctccagcagatcaaggtttgcttcaagaagatcagggtttgtaggcatctccctgaatatcatgatttttatgtcctaggttattttctagtaataataataactggcattagaggttgttaaccattgtgtgccagttacaatacagagctctttataatcttcatcataaacaataggcatgcattttatctccattttacagataaggtgaagtagctttccaaggagtatacaattagaaggtggcaggatccagcctgagtccacatgtatatagctccaaagtttatgctcttaagctccagattaaatgccttacttaaaaaatttattttttttcaaaatacataagtactagattttgttggagctagttgatataatatcatataaagaagtataaaagcaaagctaaccctaattccccaaccccataccctgagataccactttggacagtcttatgggcatcttttcaaagctctacctttgcatatacaagcctaaacaagcat

SEQ ID NO: 200432 - DNA, 6460 bp, Homo sapiens
  Payload ID: 19543
  Gene Name: xin actin binding repeat containing 1
  Uniprot ID: Q702N8
  ENST ID: ENST00000340369
  CDS Start-End: 230-5761
cagagacctggagccagggcagcaagaaggtgtctgttggagccagcagaacagaaccaatttgaacaagaacctccagaggaacgacgaaccctgagaccacagctgctacagaccacaaacaccccatcagccaagagagacccttgcatccagcctctaccctgctgaacatctagatctaaggctcccaatcccatcctcatctctgccccttcttctcagaaggatggccgacacccagacacaggtggcccccacaccaaccatgaggatggcaactgcagaggacctgcccctccctccacccccagccctggaggacctgccactgccgccacccaaggaatccttctccaagttccatcagcagcggcaagctagtgagctccgccgcctctacaggcacatccaccctgagctccgcaagaatctggctgaggctgtggccgaggatctggctgaggtcctgggctctgaggaacccaccgagggtgacgttcagtgcatgcgctggatctttgagaactggagactggatgccattggagaacacgagaggccagctgccaaggagcccgtgctgtgtggtgacgtccaggccacctcccgcaagtttgaggaaggctcctttgccaacagcacagaccaggagccaaccaggccccagccaggtggaggagacgttcgtgcagcccgctggctatttgagacaaagccactggacgagctgacagggcaagccaaggaactggaggccactgtgagggagcctgcagccagcggagatgtgcagggtaccaggatgctctttgagacgcggccgctggaccgcctgggctcccgcccctccctgcaggagcagagccccttggaactgcgctcagagatccaggagctgaagggtgatgtgaaaaagacagtgaagctcttccaaacggagcccctgtgtgccatccaggatgcagagggcgccatccatgaggtcaaggccgcatgccgggaggagatccaaagcaacgcggtgaggtctgcccgctggctctttgagacccggcctctggacgccatcaaccaggaccccagccaggtgcgggtgatccgggggatttccctggaggagggggcccggcccgacgtcagtgcaactcgctggatctttgagacacagcccctggatgccatccgggagatcttggtagatgagaaggacttccagccatccccagaccttatcccacctggtccagatgttcagcagcagcagcatctgtttgagacccgagcgctggacactctgaagggggacgaagaggctggagcagaggccccacccaaggaggaagtggtccctggtgatgtccgctccaccctgtggctatttgaaacaaagcccctggatgctttcagagacaaggtccaagtgggtcacctacagcgagtggatccccaggacggtgaggggcatctatccagtgacagctcctcagcactgcccttctctcagagtgccccccagagggatgagctaaagggggatgtgaagacttttaagaacctttttgagacccttcccttggacagcattggacagggtgaggttctggcccatgggagtccaagcagagaagaaggaactgattctgctgggcaggcccagggcatagggtccccagtgtatgccatgcaggacagcaagggccgcctccatgccctgacctctgttagcagagagcagatagtcggaggtgatgtgcagggctacaggtggatgtttgagacacagcccctagaccagctcggccgaagccccagtaccatcgacgtggtgcggggcatcacccggcaggaagtggtggctggggacgttggcacagctcggtggctttttgagacccagcccctggagatgatccaccaacgggagcagcaggaacgacagaaagaagaagggaagagtcagggagacccccagcctgaggcacccccaaagggcgatgtgcagaccatccggtggttgttcgagacttgcccaatgagtgagttggccgaaaagcaggggtcagaggtcacagatcccacagccaaggctgaggcacagtcctgcacctggatgttcaagccccaacctgtggacaggccagtgggctccagggagcagcacctgcaggttagccaggtcccggctggggaaagacagacagacagacacgtctttgagaccgagcctcttcaggcctcaggccgtccctgtggaagacggcctgtgagatactgcagccgcgtggagatcccttcagggcaggtgtctcgtcagaaagaggtttttcaggccctggaggcaggcaagaaggaagaacaggagccccgggtaatcgctgggtccatccccgcgggttctgtccacaagttcacttggctttttgagaattgtcccatgggctccctggcagctgagagcatccaagggggcaacctcctggaagagcagcccatgagcccctcaggcaacaggatgcaagagagccaggagactgcagctgaggggaccctgcggactctgcatgccacacctggcatcctgcaccatggaggcatcctcatggaggcccgagggccaggggagctctgtcttgccaagtatgtgctctcgggcacagggcaggggcacccttatatacgaaaggaggagctggtgtcaggtgaacttcccaggatcatctgccaagtcctgcgccggccagatgtggaccagcaggggctgctggtgcaggaagacccaactggccagctccaactcaagccgctgaggctgccaactccaggcagcagtgggaatattgaagacatggaccctgagctccagcagctgctggcttgcggtcttgggacctccgtggcaaggactgggctggtgatgcaggagacagagcagggcctggtcgcactgactgcctactctctgcagccccggctaactagcaaggcctctgagaggagcagcgtgcagctgttggccagctgcatagataaaggagacctgagtggcctgcacagtctgcggtgggagcccccggctgacccgagtccagtgccagccagcgagggggcccagagcctgcacccaactgagagcatcatccatgttcccccactggaccccagcatggggatggggcatctgagagcctcaggggccaccccttgccctcctcaggccattggaaaggcagtccctctggctggggaagctgcagcaccagcccaattgcaaaacacagaaaagcaggaagacagtcactctggacagaaagggatggcagtcttgggaaagtcagaaggagccacgactacccctccggggcctggggccccagacctcctggccgccatgcagagtctgcggatggcaacagctgaagcccagagcctgcaccagcaagttctgaacaagcacaagcagggccccaccccaacagccacttccaaccccatccaggacggtcttcggaaagctggggctacccaaagcaacataaggcctgggggtggaagtgatccccggatcccagcagcccccagaaaggtcagtagggaagagcaagcactacccagagggctgcctggggggtgggtgacaattcaggatggcatctacaccgctcatcccgtgaggacctttgacccacctgggggtgtccagctttctcagagggaaccccagtcaaggcacagggagactgccctctcagtccaggctccccgcccactccagggaggcccaggtcagagtactgggccagggcgggaggagcctgggggctgcacacagatggcctgggggccaccagggaaggcgatggcagaagtctgcccagggggcctccaagctgcagagaccaccctgaagactgcccctctaggccgccacattctggcctctgggccccaagctgcaggtgccagcccgcacccccataatgcctttgttcctcctcctcctactctcccagctgctgtgacaggacctgactttccagctggagcccaccgtgctgaggactccatccagcaagcctctgagcccctgaaggacccccttcttcactcccacagcagccctgctggccagagaacccctggagggtcacagacaaagaccccaaaactggaccccaccatgcccccaaagaagaagccgcagctgccccctaaacctgcacacctaacccagagccaccctcctcagaggctgcccaagcccttgcctctatctcccagcttttcctcggaggtggggcaaagagaacaccaacgaggtgagagagatacagccatccctcagccagccaaggttcccactactgtagaccagggccacatacctctggccagatgtcccagtggacatagccagcccagcttacaacatggcctcagcaccacggcccccaggcccaccaagaatcaggctacaggcagcaatgcccagagctctgagccccccaagctcaatgccctcaaccatgatcccacctcaccacagtggggccccggcccctcaggagagcagcccatggaaggttcccaccaaggggcccctgagagccctgacagtctgcaaagaaaccagaaagagctccagggcctcctgaaccaggtgcaagccctggagaaggaggccgcaagcagtgtggacgtgcaggccctgcggaggctctttgaggccgtgccccagctgggaggggctgctcctcaggctcctgctgcccaccaaaagcccgaggcctcagtggagcaggcctttggggagctgacacgggtcagcacggaagttgctcaactgaaggaacagaccttggcaaggctgctggacattgaagaggctgtgcacaaggcactcagctccatgtctagcctccagcctgaggccagtgccagaggccatttccagggacctccaaaagaccacagtgcccacaagatcagtgtcacagtcagcagtagcgccaggcccagtggctcaggccaggaggtcggaggtcaaactgcagtcaagaaccaagccaaggttgaatgccacactgaggcccagagtcaagtcaagatcagaaatcacacagaggccagaggtcacacagcctcaactgccccttccaccaggaggcaggagacatcaagagagtatttgtgccctcctcgggttttaccttccagccgagattctccctcctccccaacatttatctccatccagtcggccacaaggaagcctctagagactcccagctttaagggcaaccctgatgtctcagtgaaaagcacacaactggctcaggacataggccaggccctgctccaccagaaaggtgtccaagacaaaactgggaagaaggacatcacccagtgctctgtgcaacctgaacctgcccctccctcagccagtcccctgcccagagggtggcaaaagagtgttctggagctacagacggggccagggagctcacaacactatggagccatgagaaccgtgactgaacagtatgaggaggtggaccagtttgggaacacagtcctcatgtcttccaccacagtcaccgagcaggcagagccacccaggaacccaggctcccacctcgggctccacgcctcccccttgctgaggcagttcctgcacagcccagctgggttcagcagtgacctgacagaagctgagacggtgcaggtgtcctgcagctactcccagccagctgcccagtgaggcccaccgcctcccaccacacctgccacctgttcctggcctccactgccccaggactgaagtgggtacctgcctcctgtacactggagcaaggaccaagaggaaatggcatcttcagaggattactgtgggccatttccctttcgcagttctttcaataggcccagttcttccaaatggaaaaagaaaggtctggaagaggcccacagagttgcacaggcgtgggggtaggatgggggctcccagctgcttgtggaggatgtaatatatacagacacacacatgtttttcacacaggcctggcccacgcatcgacatgtgtgaatttgcacaccactgcctgaattggagccccccagagtgtccctctacccagagtttttatttctttaattagtctgagtgttcccagccatctgctccttaatccctggagaggaacagagccaactggacacagcgttggtctctgtttggaatcactgtgaggtctccagaaggacctggccgccagccccttcatcaccatctccatcattcagctggtcatctggtggcccaaaggtcacccaaagagtcagcaatcagcatgtccctagaagccaaatgcactgcctttctctgtccccatgactgtcccccactctgcaccccaaatgggaagcatacggtctgaataaatccaagttttattctcta

SEQ ID NO: 200433 - DNA, 6040 bp, Homo sapiens
  Payload ID: 19543
  Gene Name: xin actin binding repeat containing 1
  Uniprot ID: Q702N8
  ENST ID: ENST00000396251
  CDS Start-End: 232-3597
gacagagacctggagccagggcagcaagaaggtgtctgttggagccagcagaacagaaccaatttgaacaagaacctccagaggaacgacgaaccctgagaccacagctgctacagaccacaaacaccccatcagccaagagagacccttgcatccagcctctaccctgctgaacatctagatctaaggctcccaatcccatcctcatctctgccccttcttctcagaaggatggccgacacccagacacaggtggcccccacaccaaccatgaggatggcaactgcagaggacctgcccctccctccacccccagccctggaggacctgccactgccgccacccaaggaatccttctccaagttccatcagcagcggcaagctagtgagctccgccgcctctacaggcacatccaccctgagctccgcaagaatctggctgaggctgtggccgaggatctggctgaggtcctgggctctgaggaacccaccgagggtgacgttcagtgcatgcgctggatctttgagaactggagactggatgccattggagaacacgagaggccagctgccaaggagcccgtgctgtgtggtgacgtccaggccacctcccgcaagtttgaggaaggctcctttgccaacagcacagaccaggagccaaccaggccccagccaggtggaggagacgttcgtgcagcccgctggctatttgagacaaagccactggacgagctgacagggcaagccaaggaactggaggccactgtgagggagcctgcagccagcggagatgtgcagggtaccaggatgctctttgagacgcggccgctggaccgcctgggctcccgcccctccctgcaggagcagagccccttggaactgcgctcagagatccaggagctgaagggtgatgtgaaaaagacagtgaagctcttccaaacggagcccctgtgtgccatccaggatgcagagggcgccatccatgaggtcaaggccgcatgccgggaggagatccaaagcaacgcggtgaggtctgcccgctggctctttgagacccggcctctggacgccatcaaccaggaccccagccaggtgcgggtgatccgggggatttccctggaggagggggcccggcccgacgtcagtgcaactcgctggatctttgagacacagcccctggatgccatccgggagatcttggtagatgagaaggacttccagccatccccagaccttatcccacctggtccagatgttcagcagcagcagcatctgtttgagacccgagcgctggacactctgaagggggacgaagaggctggagcagaggccccacccaaggaggaagtggtccctggtgatgtccgctccaccctgtggctatttgaaacaaagcccctggatgctttcagagacaaggtccaagtgggtcacctacagcgagtggatccccaggacggtgaggggcatctatccagtgacagctcctcagcactgcccttctctcagagtgccccccagagggatgagctaaagggggatgtgaagacttttaagaacctttttgagacccttcccttggacagcattggacagggtgaggttctggcccatgggagtccaagcagagaagaaggaactgattctgctgggcaggcccagggcatagggtccccagtgtatgccatgcaggacagcaagggccgcctccatgccctgacctctgttagcagagagcagatagtcggaggtgatgtgcagggctacaggtggatgtttgagacacagcccctagaccagctcggccgaagccccagtaccatcgacgtggtgcggggcatcacccggcaggaagtggtggctggggacgttggcacagctcggtggctttttgagacccagcccctggagatgatccaccaacgggagcagcaggaacgacagaaagaagaagggaagagtcagggagacccccagcctgaggcacccccaaagggcgatgtgcagaccatccggtggttgttcgagacttgcccaatgagtgagttggccgaaaagcaggggtcagaggtcacagatcccacagccaaggctgaggcacagtcctgcacctggatgttcaagccccaacctgtggacaggccagtgggctccagggagcagcacctgcaggttagccaggtcccggctggggaaagacagacagacagacacgtctttgagaccgagcctcttcaggcctcaggccgtccctgtggaagacggcctgtgagatactgcagccgcgtggagatcccttcagggcaggtgtctcgtcagaaagaggtttttcaggccctggaggcaggcaagaaggaagaacaggagccccgggtaatcgctgggtccatccccgcgggttctgtccacaagttcacttggctttttgagaattgtcccatgggctccctggcagctgagagcatccaagggggcaacctcctggaagagcagcccatgagcccctcaggcaacaggatgcaagagagccaggagactgcagctgaggggaccctgcggactctgcatgccacacctggcatcctgcaccatggaggcatcctcatggaggcccgagggccaggggagctctgtcttgccaagtatgtgctctcgggcacagggcaggggcacccttatatacgaaaggaggagctggtgtcaggtgaacttcccaggatcatctgccaagtcctgcgccggccagatgtggaccagcaggggctgctggtgcaggaagacccaactggccagctccaactcaagccgctgaggctgccaactccaggcagcagtgggaatattgaagacatggaccctgagctccagcagctgctggcttgcggtcttgggacctccgtggcaaggactgggctggtgatgcaggagacagagcagggcctggtcgcactgactgcctactctctgcagccccggctaactagcaaggcctctgagaggagcagcgtgcagctgttggccagctgcatagataaaggagacctgagtggcctgcacagtctgcggtgggagcccccggctgacccgagtccagtgccagccagcgagggggcccagagcctgcacccaactgagagcatcatccatgttcccccactggaccccagcatggggatggggcatctgagagcctcaggggccaccccttgccctcctcaggccattggaaaggcagtccctctggctggggaagctgcagcaccagcccaattgcaaaacacagaaaagcaggaagacagtcactctggacagaaagggatggcagtcttgggaaagtcagaaggagccacgactacccctccggggcctggggccccagacctcctggccgccatgcagagtctgcggatggcaacagctgaagcccagagcctgcaccagcaagttctgaacaagcacaagcagggccccaccccaacagccacttccaaccccatccaggacggtcttcggaaagctggggctacccaaagcaacataaggcctgggggtggaagtgatccccggatcccagcagcccccagaaagctgctgtgacaggacctgactttccagctggagcccaccgtgctgaggactccatccagcaagcctctgagcccctgaaggacccccttcttcactcccacagcagccctgctggccagagaacccctggagggtcacagacaaagaccccaaaactggaccccaccatgcccccaaagaagaagccgcagctgccccctaaacctgcacacctaacccagagccaccctcctcagaggctgcccaagcccttgcctctatctcccagcttttcctcggaggtggggcaaagagaacaccaacgaggtgagagagatacagccatccctcagccagccaaggttcccactactgtagaccagggccacatacctctggccagatgtcccagtggacatagccagcccagcttacaacatggcctcagcaccacggcccccaggcccaccaagaatcaggctacaggcagcaatgcccagagctctgagccccccaagctcaatgccctcaaccatgatcccacctcaccacagtggggccccggcccctcaggagagcagcccatggaaggttcccaccaaggggcccctgagagccctgacagtctgcaaagaaaccagaaagagctccagggcctcctgaaccaggtgcaagccctggagaaggaggccgcaagcagtgtggacgtgcaggccctgcggaggctctttgaggccgtgccccagctgggaggggctgctcctcaggctcctgctgcccaccaaaagcccgaggcctcagtggagcaggcctttggggagctgacacgggtcagcacggaagttgctcaactgaaggaacagaccttggcaaggctgctggacattgaagaggctgtgcacaaggcactcagctccatgtctagcctccagcctgaggccagtgccagaggccatttccagggacctccaaaagaccacagtgcccacaagatcagtgtcacagtcagcagtagcgccaggcccagtggctcaggccaggaggtcggaggtcaaactgcagtcaagaaccaagccaaggttgaatgccacactgaggcccagagtcaagtcaagatcagaaatcacacagaggccagaggtcacacagcctcaactgccccttccaccaggaggcaggagacatcaagagagtatttgtgccctcctcgggttttaccttccagccgagattctccctcctccccaacatttatctccatccagtcggccacaaggaagcctctagagactcccagctttaagggcaaccctgatgtctcagtgaaaagcacacaactggctcaggacataggccaggccctgctccaccagaaaggtgtccaagacaaaactgggaagaaggacatcacccagtgctctgtgcaacctgaacctgcccctccctcagccagtcccctgcccagagggtggcaaaagagtgttctggagctacagacggggccagggagctcacaacactatggagccatgagaaccgtgactgaacagtatgaggaggtggaccagtttgggaacacagtcctcatgtcttccaccacagtcaccgagcaggcagagccacccaggaacccaggctcccacctcgggctccacgcctcccccttgctgaggcagttcctgcacagcccagctgggttcagcagtgacctgacagaagctgagacggtgcaggtgtcctgcagctactcccagccagctgcccagtgaggcccaccgcctcccaccacacctgccacctgttcctggcctccactgccccaggactgaagtgggtacctgcctcctgtacactggagcaaggaccaagaggaaatggcatcttcagaggattactgtgggccatttccctttcgcagttctttcaataggcccagttcttccaaatggaaaaagaaaggtctggaagaggcccacagagttgcacaggcgtgggggtaggatgggggctcccagctgcttgtggaggatgtaatatatacagacacacacatgtttttcacacaggcctggcccacgcatcgacatgtgtgaatttgcacaccactgcctgaattggagccccccagagtgtccctctacccagagtttttatttctttaattagtctgagtgttcccagccatctgctccttaatccctggagaggaacagagccaactggacacagcgttggtctctgtttggaatcactgtgaggtctccagaaggacctggccgccagccccttcatcaccatctccatcattcagctggtcatctggtggcccaaaggtcacccaaagagtcagcaatcagcatgtccctagaagccaaatgcactgcctttctctgtccccatgactgtcccccactctgcaccccaaatgggaagcatacggtctgaataaatccaagttttattctctactctg

SEQ ID NO: 200434 - DNA, 2596 bp, Homo sapiens
  Payload ID: 19543
  Gene Name: xin actin binding repeat containing 1
  Uniprot ID: Q702N8
  ENST ID: ENST00000421646
  CDS Start-End: 318-1898
acagagacctggagccagggcagcaagaaggtgtctgttggagccagcagaacagaaccaatttgaacaagaacctccagaggaacgacgaaccctgagaccacagctgctacagaccacaaacaccccatcagccaagagagacccttgctgctgtgacaggacctgactttccagctggagcccaccgtgctgaggactccatccagcaagcctctgagcccctgaaggacccccttcttcactcccacagcagccctgctggccagagaacccctggagggtcacagacaaagaccccaaaactggaccccaccatgcccccaaagaagaagccgcagctgccccctaaacctgcacacctaacccagagccaccctcctcagaggctgcccaagcccttgcctctatctcccagcttttcctcggaggtggggcaaagagaacaccaacgaggtgagagagatacagccatccctcagccagccaaggttcccactactgtagaccagggccacatacctctggccagatgtcccagtggacatagccagcccagcttacaacatggcctcagcaccacggcccccaggcccaccaagaatcaggctacaggcagcaatgcccagagctctgagccccccaagctcaatgccctcaaccatgatcccacctcaccacagtggggccccggcccctcaggagagcagcccatggaaggttcccaccaaggggcccctgagagccctgacagtctgcaaagaaaccagaaagagctccagggcctcctgaaccaggtgcaagccctggagaaggaggccgcaagcagtgtggacgtgcaggccctgcggaggctctttgaggccgtgccccagctgggaggggctgctcctcaggctcctgctgcccaccaaaagcccgaggcctcagtggagcaggcctttggggagctgacacgggtcagcacggaagttgctcaactgaaggaacagaccttggcaaggctgctggacattgaagaggctgtgcacaaggcactcagctccatgtctagcctccagcctgaggccagtgccagaggccatttccagggacctccaaaagaccacagtgcccacaagatcagtgtcacagtcagcagtagcgccaggcccagtggctcaggccaggaggtcggaggtcaaactgcagtcaagaaccaagccaaggttgaatgccacactgaggcccagagtcaagtcaagatcagaaatcacacagaggccagaggtcacacagcctcaactgccccttccaccaggaggcaggagacatcaagagagtatttgtgccctcctcgggttttaccttccagccgagattctccctcctccccaacatttatctccatccagtcggccacaaggaagcctctagagactcccagctttaagggcaaccctgatgtctcagtgaaaagcacacaactggctcaggacataggccaggccctgctccaccagaaaggtgtccaagacaaaactgggaagaaggacatcacccagtgctctgtgcaacctgaacctgcccctccctcagccagtcccctgcccagagggtggcaaaagagtgttctggagctacagacggggccagggagctcacaacactatggagccatgagaaccgtgactgaacagtatgaggaggtggaccagtttgggaacacagtcctcatgtcttccaccacagtcaccgagcaggcagagccacccaggaacccaggctcccacctcgggctccacgcctcccccttgctgaggcagttcctgcacagcccagctgggttcagcagtgacctgacagaagctgagacggtgcaggtgtcctgcagctactcccagccagctgcccagtgaggcccaccgcctcccaccacacctgccacctgttcctggcctccactgccccaggactgaagtgggtacctgcctcctgtacactggagcaaggaccaagaggaaatggcatcttcagaggattactgtgggccatttccctttcgcagttctttcaataggcccagttcttccaaatggaaaaagaaaggtctggaagaggcccacagagttgcacaggcgtgggggtaggatgggggctcccagctgcttgtggaggatgtaatatatacagacacacacatgtttttcacacaggcctggcccacgcatcgacatgtgtgaatttgcacaccactgcctgaattggagccccccagagtgtccctctacccagagtttttatttctttaattagtctgagtgttcccagccatctgctccttaatccctggagaggaacagagccaactggacacagcgttggtctctgtttggaatcactgtgaggtctccagaaggacctggccgccagccccttcatcaccatctccatcattcagctggtcatctggtggcccaaaggtcacccaaagagtcagcaatcagcatgtccctagaagccaaatgcactgcctttctctgtccccatgactgtcccccactctgcaccccaaatgggaagcatacggtctgaataaatccaagttttattctct

SEQ ID NO: 200435 - DNA, 5246 bp, Homo sapiens
  Payload ID: 19544
  Gene Name: xin actin binding repeat containing 2
  ENST ID: ENST00000295237
  CDS Start-End: 423-3314
caagcatataaaagataataagaacgatttttcccccaaagttgaactggcaacctccctgtcagatatggaatgtaaaattactacctcaaaggatcagaaaaaagtaatggtgatgaccagcagtgaacacacggagacaaagcagaacgttattagtaagagtcttgatgaaagaaaacaattatctattgactctgcaaactgtctctcacacacagttccaggaacttcagcacccaggaaaaaacagattgcgcctcttataaaatctcattcatttccagagagttcaggacaacaaaatccaaaaccttatatgagaaaatttaagacacctttaatgattgctgaagaaaaatatagacaacaatgttaaaactcaaagccaaaatcaacacataacagaggtggaaaaggaaatgccattacaaaaaaccaatgaggaggtttccctatctggaattgattcagaatgcactgtggttcaacccagcccaggctctcaaagtaatgctcggatactaggagtgtgttctgataaccaactctccacaacatcgccagaaacagtcgctgccaagaggctccaccatgttttagcagcttcagaagacaaagataagatgaaaaaggaagttttacaaagctcaagggacattatgcaatccaaatcagcttgcgaaattaaacaaagtcaccaagaatgtagtacccaacaaacacaacagaagaagtatttggagcagttgcacttgccccaaagcaaaccaatttccccaaatttcaaagttaaaaccatcaaacttccaactctagatcatacattaaatgaaacagaccacagctatgaaagtcataaacagcaatctgagattgatgttcaaacctttaccaaaaaacaatatctgaaaaccaagaaaactgaagcaagcactgaatgtagtcataagcaatctctggctgaaagacattatcagttacctaagaaggagaaaagagtgacagtacaattgcctacagaatccatacagaagaaccaggaagataagctcaagatggttcccaggaagcaaagagaatttagcggatctgacagagggaaacttccaggaagtgaagaaaaaaatcagggaccatcaatgattggtcgaaaagaagagagattaataactgaaagaaaacacgaacatctgaagaataaatcagcaccaaaggtcgtcaagcaaaaggttatcgatgcacatcttgattcacagactcagaattttcagcaaacacaaatacagaccgctgaaagtaaagctgaacataaaaaattgccccagccatataatagtctgcaggaagaaaaatgtctcgaagtcaagggcatacaagagaaacaagtcttctctaatactaaagattcaaagcaagagattacacagaacaaatctttcttttcctctgtgaaagaatcccagcgggatgatggaaaaggtgccttaaatatagtggaattcttgagaaaacgtgaagaactgcaacagattttgtcgagagtgaaacagtttgaagcagagccaaataaaagtggccttaaaacatttcagacactattaaatactatcccaggatggctgataagtgaagataagagagaatatgcagttcacattgccatggagaataatttagaaaaagtaaaagaagaaataacacatattaaaactcaagcggaagatatgcttgtgtcctatgaaaatataattcagacagccatgatgtcctccaaaacaggaaaaccgggaaataaacccactagtcttgatgaaacatcatccaaagtatctaatgttcatgtcagcaataataaaaatagtgaacagaaagaaaataaaattgccaaagagaaaacagtacagcaccaagtagcagctcatcatgaagcaactgttcgtagtcacgtgaaaacccatcaggaaattaaacttgatgatagcaacattcctcctccctctttaaaaacacgcccaccgtcaccaacttttatcacaatagaatctactgcccgacgaacagaaaaccctactaagaacgagctttctcagtcccctaaaaaggacagttatgttgaacccccaccaagaaggcccatgtcgcaaaaatctgaaattcacagagcaaacacttccccttctccacccaggagtcgctctgaacaacttgtcagactcaaagacaccactgcaaagttatccaaaggggccatcccatgtccagcagcaaccccggttccaattgtagagaagaggtctgaaatcatcatgtctcctgcaacacttcgtcgtcaaattaagatagaaactcgtggtagggactctccacctacaatcacaataccagtaaatataaatcatgctgctagtggttccttcagagaatctgtggacgctcaagaggaaatcaggaaagtggagaagagagctacttatgttcataaagatggactaaattccactgatcacatggtgcccgacactgaaagttatgatgcagttgaaatcatccgcaaggttgcagtgcctcctcgcctgtcagagcacacacagagatatgaagcggccaaccgaactgttcaaatggctgaaaatttcgtgaatgaccctgaaaatgaaataaacagatggttcagggaatttgagcatggcccagtttctgaagcaaagtcaaatagaagagtttatgcaaagggagaaacaaaccataacatacaacaagaaagtcgtacattttgtaaggaggaatttggattaacatctttaggaaacacgagttttacagacttttcttgcaaacatcctagagaactgcgagaaaagattcctgttaagcagcccaggatctgctctgaaaccaggtctctaagtgaacatttctcaggcatggatgcatttgagagtcaaattgttgagtcgaagatgaaaacctcttcatcacatagctcagaagctggcaaatctggctgtgacttcaagcatgccccaccaacctatgaggatgtcattgctggacatattttagatatctctgattcacctaaagaagtaagaaaaaattttcaaaagacgtggcaagagagtggaagagtttttaaaggcctgggatatgcaaccgcagatgcttctgcaactgagatgagaaccaccttccaagaggaatctgcatttataagtgaagctgctgctccaagacaaggaaatatgtatactttgtcaaaagacagtttatccaatggagtgcctagtggcagacaagcagaattttcataagtcctgcttccgatgccaccattgcaacagtaaactaagtttgggaaattatgcatcacttcatggacaaatatactgtaaacctcactttaaacaacttttcaaatccaaaggaaattatgatgaaggttttggacataagcagcataaagatagatggaactgcaaaaaccaaagcagatcagtggactttattcctaatgaagaaccaaatatgtgtaaaaatattgcagaaaacacccttgtacctggagatcgtaatgaacatttagatgctggtaacagtgaagggcaaaggaatgatttgagaaaattaggggaaaggggaaaattaaaagtcatttggcctccttccaaggagatccctaagaaaaccttaccctttgaggaagagctcaaaatgagtaaacctaagtggccacctgaaatgacaaccctgctatcccctgaatttaaaagtgaatctctgctagaagatgttagaactccagaaaataaaggacaaagacaagatcactttccatttttgcagccttatctacagtccacccatgtttgtcagaaagaggatgttataggaatcaaagaaatgaaaatgcctgaaggaagaaaagatgaaaagaaggaaggaaggaagaatgtgcaagataggccgagtgaagctgaagacacaaagagtaacaggaaaagtgctatggatcttaatgacaacaataatgtgattgtgcagagtgctgaaaaggagaaaaatgaaaaaactaaccaaactaatggtgcagaagttttacaggttactaacactgatgatgagatgatgccagaaaatcataaagaaaatttgaataagaataataataacaattatgtagcagtctcatatctgaataattgcaggcagaagacatctattttagaatttcttgatctattacccttgtcgagtgaagcaaatgacactgcaaatgaatatgaaattgagaagttagaaaatacatctagaatctcagagttacttggtatatttgaatctgaaaagacttattcgaggaatgtactagcaatggctctgaagaaacagactgacagagcagctgctggcagtcctgtgcagcctgctccaaaaccaagcctcagcagaggccttatggtaaaggggggaagttcaatcatctctcctgatacaaatctcttaaacattaaaggaagccattcaaagagcaaaaatttacactttttcttttctaacaccgtgaaaatcactgcattttccaagaaaaatgagaacattttcaattgtgatttaatagattctgtagatcaaattaaaaatatgccatgcttggatttaagggaatttggaaaggatgttaaaccttggcatgttgaaacaacagaagctgcccgcaataatgaaaacacaggttttgatgctctgagccatgaatgtacagctaagcctttgtttcccagagtggaggtgcagtcagaacaactcacggtggaagagcagattaaaagaaacaggtgctacagtgacactgagtaaaatatctatggccactgacagtccacacttaggcactgagagatattgatgttctgaaataagattttatgaatttggatacccttttgaggaacttgatgtaaacatggtgttcagaaatctcgtgtctatctcaatgggatatttcttgtattacaccttgtcatttttttcacaatttatttacatctacttttgtttgaactggaatgaagagatgaaacactatggatatgttttccattcaaatggcactttagcatattgttctgttttcctgtaaaacatcatgggtgtgatttttatactgctgctgcttgtcacaattattataacttctctgtaatttcctctgaaataaaattgaatcacctgaggtgcaaacc

SEQ ID NO: 200436 - DNA, 3292 bp, Homo sapiens
  Payload ID: 19544
  Gene Name: xin actin binding repeat containing 2
  Uniprot ID: A4UGR9
  ENST ID: ENST00000409043
  CDS Start-End: 90-2906
ggagaaatctggcaggtctctaggcagacaaaagggaacatctggtagggactgggacatgtagaaaaaaggacaacctggacccatccatgttcccaatgcagaagggctccctcaacctcctgaggcagaaatgggaatcttgtgattatcagagaagtgagtgtcatcccagggacagccattgtacaattttccagcctcaggaaagcaaattgcttgcgcctgaaggagaggtagtatcagcacctcaatctttggatcccacaagtctgccctacagtacaggggaagagatgtggagttcgaagccggaagagaaggattctgtggacaagagtaacaacaccagggaatatggtcggccagaagtgctgaaggaggattccctgagcagtcggcgcaggattgaacgcttttccattgcccttgatgagctgaggagtgtgtttgaggctcctaagagtggaaacaaaccagctgagtacggtggaaaggaagtggaaattgagcgaagtttgtgctcgccagcttttaagagtcaccctgggagccagctggaggattctgtgaaagattcagacaagaaaggcaaggaaacatcttttgacaagatgtcacctgaaagtggtcacagccgcatctttgaagcgactgctggccctaataagcctgagagtggatttgcagaagacagtgctgctcggggcgagggtgtgtcagacctccacgaagtggtctccctgaaggagcggatggcgaggtaccaggcagctgtttccaggggtgactgccgcagcttctctgctaatatgatggaagaatcagaaatgtgcgcagtgcctggtggtttggccaaggtgaagaaacaatttgaggacgaaattacttcttcccgtaatacctttgctcaataccaatatcaacatcagaacagatctgagcaggaggcaattcatagcagccaggttggcacttcaagaagcagccaggaaatggcaagaaatgaacaagaagggtccaaagtacagaaaattgatgttcatggaacagaaatggtctctcatcttgaaaagcacaccgaggaagtaaaccaagcatctcagtttcatcaatatgttcaagaaactgtcattgatacacctgaggatgaagagattccaaaggtttcgactaagttgttaaaagagcagtttgaaaagtctgcccaggaaaagatcctttattctgacaaagagatgacaaccccagccaagcagattaagaagctgctgctccaagacaaggaaatatgtatactttgtcaaaagacagtttatccaatggagtgcctagtggcagacaagcagaattttcataagtcctgcttccgatgccaccattgcaacagtaaactaagtttgggaaattatgcatcacttcatggacaaatatactgtaaacctcactttaaacaacttttcaaatccaaaggaaattatgatgaaggttttggacataagcagcataaagatagatggaactgcaaaaaccaaagcagatcagtggactttattcctaatgaagaaccaaatatgtgtaaaaatattgcagaaaacacccttgtacctggagatcgtaatgaacatttagatgctggtaacagtgaagggcaaaggaatgatttgagaaaattaggggaaaggggaaaattaaaagtcatttggcctccttccaaggagatccctaagaaaaccttaccctttgaggaagagctcaaaatgagtaaacctaagtggccacctgaaatgacaaccctgctatcccctgaatttaaaagtgaatctctgctagaagatgttagaactccagaaaataaaggacaaagacaagatcactttccatttttgcagccttatctacagtccacccatgtttgtcagaaagaggatgttataggaatcaaagaaatgaaaatgcctgaaggaagaaaagatgaaaagaaggaaggaaggaagaatgtgcaagataggccgagtgaagctgaagacacaaagagtaacaggaaaagtgctatggatcttaatgacaacaataatgtgattgtgcagagtgctgaaaaggagaaaaatgaaaaaactaaccaaactaatggtgcagaagttttacaggttactaacactgatgatgagatgatgccagaaaatcataaagaaaatttgaataagaataataataacaattatgtagcagtctcatatctgaataattgcaggcagaagacatctattttagaatttcttgatctattacccttgtcgagtgaagcaaatgacactgcaaatgaatatgaaattgagaagttagaaaatacatctagaatctcagagttacttggtatatttgaatctgaaaagacttattcgaggaatgtactagcaatggctctgaagaaacagactgacagagcagctgctggcagtcctgtgcagcctgctccaaaaccaagcctcagcagaggccttatggtaaaggggggaagttcaatcatctctcctgatacaaatctcttaaacattaaaggaagccattcaaagagcaaaaatttacactttttcttttctaacaccgtgaaaatcactgcattttccaagaaaaatgagaacattttcaattgtgatttaatagattctgtagatcaaattaaaaatatgccatgcttggatttaagggaatttggaaaggatgttaaaccttggcatgttgaaacaacagaagctgcccgcaataatgaaaacacaggttttgatgctctgagccatgaatgtacagctaagcctttgtttcccagagtggaggtgcagtcagaacaactcacggtggaagagcagattaaaagaaacaggtgctacagtgacactgagtaaaatatctatggccactgacagtccacacttaggcactgagagatattgatgttctgaaataagattttatgaatttggatacccttttgaggaacttgatgtaaacatggtgttcagaaatctcgtgtctatctcaatgggatatttcttgtattacaccttgtcatttttttcacaatttatttacatctacttttgtttgaactggaatgaagagatgaaacactatggatatgttttccattcaaatggcactttagcatattgttctgttttcctgtaaaacatcatgggtgtgatttttatactgctgctgcttgtcacaattattataacttctctgtaatttcctctgaaataaaattgaatcacctgaggtgcaaacc

SEQ ID NO: 200437 - DNA, 3391 bp, Homo sapiens
  Payload ID: 19544
  Gene Name: xin actin binding repeat containing 2
  Uniprot ID: A4UGR9
  ENST ID: ENST00000409728
  CDS Start-End: 90-3005
ggagaaatctggcaggtctctaggcagacaaaagggaacatctggtagggactgggacatgtagaaaaaaggacaacctggacccatccatgttcccaatgcagaagggctccctcaacctcctgaggcagaaatgggaatcttgtgattatcagagaagtgagtgtcatcccagggacagccattgtacaattttccagcctcaggaaagcaaattgcttgcgcctgaaggagaggtagtatcagcacctcaatctttggatcccacaagtctgccctacagtacaggggaagagatgtggagttcgaagccggaagagaaggattctgtggacaagagtaacaacaccagggaatatggtcggccagaagtgctgaaggaggattccctgagcagtcggcgcaggattgaacgcttttccattgcccttgatgagctgaggagtgtgtttgaggctcctaagagtggaaacaaaccagctgagtacggtggaaaggaagtggaaattgagcgaagtttgtgctcgccagcttttaagagtcaccctgggagccagctggaggattctgtgaaagattcagacaagaaaggcaaggaaacatcttttgacaagatgtcacctgaaagtggtcacagccgcatctttgaagcagtgttctccacggaccaagcccagattctcaggctccacctgcatccaaaattgacaaagacccccaagaacagcctcaaatcctcaacttatatttcgactgctggccctaataagcctgagagtggatttgcagaagacagtgctgctcggggcgagggtgtgtcagacctccacgaagtggtctccctgaaggagcggatggcgaggtaccaggcagctgtttccaggggtgactgccgcagcttctctgctaatatgatggaagaatcagaaatgtgcgcagtgcctggtggtttggccaaggtgaagaaacaatttgaggacgaaattacttcttcccgtaatacctttgctcaataccaatatcaacatcagaacagatctgagcaggaggcaattcatagcagccaggttggcacttcaagaagcagccaggaaatggcaagaaatgaacaagaagggtccaaagtacagaaaattgatgttcatggaacagaaatggtctctcatcttgaaaagcacaccgaggaagtaaaccaagcatctcagtttcatcaatatgttcaagaaactgtcattgatacacctgaggatgaagagattccaaaggtttcgactaagttgttaaaagagcagtttgaaaagtctgcccaggaaaagatcctttattctgacaaagagatgacaaccccagccaagcagattaagaagctgctgctccaagacaaggaaatatgtatactttgtcaaaagacagtttatccaatggagtgcctagtggcagacaagcagaattttcataagtcctgcttccgatgccaccattgcaacagtaaactaagtttgggaaattatgcatcacttcatggacaaatatactgtaaacctcactttaaacaacttttcaaatccaaaggaaattatgatgaaggttttggacataagcagcataaagatagatggaactgcaaaaaccaaagcagatcagtggactttattcctaatgaagaaccaaatatgtgtaaaaatattgcagaaaacacccttgtacctggagatcgtaatgaacatttagatgctggtaacagtgaagggcaaaggaatgatttgagaaaattaggggaaaggggaaaattaaaagtcatttggcctccttccaaggagatccctaagaaaaccttaccctttgaggaagagctcaaaatgagtaaacctaagtggccacctgaaatgacaaccctgctatcccctgaatttaaaagtgaatctctgctagaagatgttagaactccagaaaataaaggacaaagacaagatcactttccatttttgcagccttatctacagtccacccatgtttgtcagaaagaggatgttataggaatcaaagaaatgaaaatgcctgaaggaagaaaagatgaaaagaaggaaggaaggaagaatgtgcaagataggccgagtgaagctgaagacacaaagagtaacaggaaaagtgctatggatcttaatgacaacaataatgtgattgtgcagagtgctgaaaaggagaaaaatgaaaaaactaaccaaactaatggtgcagaagttttacaggttactaacactgatgatgagatgatgccagaaaatcataaagaaaatttgaataagaataataataacaattatgtagcagtctcatatctgaataattgcaggcagaagacatctattttagaatttcttgatctattacccttgtcgagtgaagcaaatgacactgcaaatgaatatgaaattgagaagttagaaaatacatctagaatctcagagttacttggtatatttgaatctgaaaagacttattcgaggaatgtactagcaatggctctgaagaaacagactgacagagcagctgctggcagtcctgtgcagcctgctccaaaaccaagcctcagcagaggccttatggtaaaggggggaagttcaatcatctctcctgatacaaatctcttaaacattaaaggaagccattcaaagagcaaaaatttacactttttcttttctaacaccgtgaaaatcactgcattttccaagaaaaatgagaacattttcaattgtgatttaatagattctgtagatcaaattaaaaatatgccatgcttggatttaagggaatttggaaaggatgttaaaccttggcatgttgaaacaacagaagctgcccgcaataatgaaaacacaggttttgatgctctgagccatgaatgtacagctaagcctttgtttcccagagtggaggtgcagtcagaacaactcacggtggaagagcagattaaaagaaacaggtgctacagtgacactgagtaaaatatctatggccactgacagtccacacttaggcactgagagatattgatgttctgaaataagattttatgaatttggatacccttttgaggaacttgatgtaaacatggtgttcagaaatctcgtgtctatctcaatgggatatttcttgtattacaccttgtcatttttttcacaatttatttacatctacttttgtttgaactggaatgaagagatgaaacactatggatatgttttccattcaaatggcactttagcatattgttctgttttcctgtaaaacatcatgggtgtgatttttatactgctgctgcttgtcacaattattataacttctctgtaatttcctctgaaataaaattgaatcacctgaggtgcaaacc

SEQ ID NO: 200438 - DNA, 12675 bp, Homo sapiens
  Payload ID: 19544
  Gene Name: xin actin binding repeat containing 2
  Uniprot ID: A4UGR9
  ENST ID: ENST00000409195
  CDS Start-End: 90-10739
ggagaaatctggcaggtctctaggcagacaaaagggaacatctggtagggactgggacatgtagaaaaaaggacaacctggacccatccatgttcccaatgcagaagggctccctcaacctcctgaggcagaaatgggaatcttgtgattatcagagaagtgagtgtcatcccagggacagccattgtacaattttccagcctcaggaaagcaaattgcttgcgcctgaaggagaggtagtatcagcacctcaatctttggatcccacaagtctgccctacagtacaggggaagagatgtggagttcgaagccggaagagaaggattctgtggacaagagtaacaacaccagggaatatggtcggccagaagtgctgaaggaggattccctgagcagtcggcgcaggattgaacgcttttccattgcccttgatgagctgaggagtgtgtttgaggctcctaagagtggaaacaaaccagctgagtacggtggaaaggaagtggaaattgagcgaagtttgtgctcgccagcttttaagagtcaccctgggagccagctggaggattctgtgaaagattcagacaagaaaggcaaggaaacatcttttgacaagatgtcacctgaaagtggtcacagccgcatctttgaagcgactgctggccctaataagcctgagagtggatttgcagaagacagtgctgctcggggcgagggtgtgtcagacctccacgaagtggtctccctgaaggagcggatggcgaggtaccaggcagctgtttccaggggtgactgccgcagcttctctgctaatatgatggaagaatcagaaatgtgcgcagtgcctggtggtttggccaaggtgaagaaacaatttgaggacgaaattacttcttcccgtaatacctttgctcaataccaatatcaacatcagaacagatctgagcaggaggcaattcatagcagccaggttggcacttcaagaagcagccaggaaatggcaagaaatgaacaagaagggtccaaagtacagaaaattgatgttcatggaacagaaatggtctctcatcttgaaaagcacaccgaggaagtaaaccaagcatctcagtttcatcaatatgttcaagaaactgtcattgatacacctgaggatgaagagattccaaaggtttcgactaagttgttaaaagagcagtttgaaaagtctgcccaggaaaagatcctttattctgacaaagagatgacaaccccagccaagcagattaagactgaaagtgaatatgaagagactttcaagccatcatcagttgtgagtacctcttccacttcttgcgtttcaaccagccagaggaaggaaacatcaactacaagatatagtgatcacagtgtcacttcctcaactctggcacaaattaatgctacttcttcaggaatgacagaagaatttcctcctcccccacctgacgtacttcaaacttcagtagatgtgacagcattttcccagtcccctgaactgcccagtcctcctagaagactaccagtccccaaagatgtatattccaagcaaagaaatttgtatgaattaaaccgtttatataaacacatccatcctgagttaagaaaaaacttagaaaaagattatatcagtgaagtttctgagattgtttctagtcaaatgaactcagggagttcagtctcagcagatgtgcaacaagcccggtatgtttttgaaaacacaaatgacagttctcaaaaagatctgaactcagaaagagaatacttggaatgggatgaaattctgaagggagaggtgcagtccattagatggatctttgagaatcaaccattggattccatcaacaatggctctcctgatgaaggtgatatttccaggggcattgctgatcaagaaatcattgctggtggtgatgtgaaatataccacatggatgtttgaaacccaacccatcgacacacttggggcttattcttctgacactgtagaaaatgcagagaaaattcctgagctagccagaggagatgtctgcacagctcggtggatgtttgaaacaaggccattggactcaatgaataaaatgcatcaaagtcaagaagaatcagcggtaactatcagtaaggacataactgggggggatgtcaagactgtgagatacatgtttgaaactcaacatctagatcaacttggacagcttcattcagtggatgaggttcatttactgcagcttaggtctgagctcaaagaaattaagggaaatgttaaaagaagtataaaatgtttcgaaactcaaccattatatgttattagagatggttcgggccaaatgctggaaattaaaactgttcacagagaagacgttgaaaagggagatgtaagaacagcacggtggatgtttgaaacacagccgttggacacaattaacaaagatatcacagaaattaaagttgtccgaggaatatccatggaagaaaatgtcaaaggtggggtgagtaaggcaaagtggttatttgaaacccaacctttggagaaaatcaaagagtcagaagaggtcatcattgaaaaggaaaaaataataggtacagatgtctccagaaagtgttggatgtttgaaacccagccattagacattctaaaagaagttcctgatgcagattctctacaacgtgaggagataataggtggtgatgtacaaactactaagcatctatttgaaacacttccaattgaagcattaaaagacagtcctgatataggaaagcttcaaaaaatcactgcctctgaagaagaaaaaggggatgttaggcatcaaaaatggatttttgaaacccaacctctggaagacattagaaaagataaaaaggagtacacacgaacagtgaaacttgaagaagttgacagaggagatgtgaagaattacacacatatctttgaatcaaacaatttaattaaatttgatgcatcacataaaatagaggtggaaggagttacaagaggtgctgtagagttaaataaatctctcttcgagacaacaccactgtatgccattcaagatccccttggaaaatatcatcaagtaaagacagtccagcaagaagaaatcgtaagaggtgatgtaagaagctgtaggtggctttttgaaacaaggcccattgaccagtttgatgaaagcattcataaatttcaaataattagaggaatatctgctcaagaaatacagactggaaatgtgaaatctgccaaatggttgtttgaaacccaacctcttgattcaattaaatattttagtgatgtggaagaaacagaaagtaaaactgaacaaactagagatattgttaaaggggatgtcaaaacctgtaaatggctttttgagacccagccaatggagtctctttatgaaaaagtttcgttaatgaccagcagtgaagaaattcataagggagatgtcaaaacttgtacttggctctttgaaactcagccacttgataccataaaagatgactctgaaacagcagtcaaattgcaaactgtaaaacaggaggagatccaaggtggggatgttcgtacagcatgttttctttttgagacagaaaatttggacagcatacaaggagaagaagtgaaggaaatcaagcctgttgaaatggatatacaagctggagatgtttccagcatgaggtataaatttgaaaatcagtccttagattctataagttctagttcagaggaagttttgaaaaagatcaaaaccttaaaaactgaagatattcagaaaggcaatgttttaaattgtaggtggctttttgaaaaccaaccaattgataagataaaagaaagccaagaaggtgatgaatgtgttaagacggtgacagacatacaaggtggggatgtaagaaaggggtgctttatttttgagactttttctttagatgagattaaagaagaatctgactatatcagcaccaagaaaacaattactgaagaagtaatacagggtgatgtaaaaagctacagaatgctctttgaaacccagccactctatgcaattcaagaccgagaagggtcctatcatgaagtgaccacagttaaaaaagaagaggtaattcatggagatgtgcgaggaacaaggtggctttttgaaacaaagccattagactctattaataaatcagaaactgtgtatgttattaaatctgtcacacaagaagacattcagaagggagatgttagttctgtcagatacagatttgaaactcagccactggatcagatttctgaagaatcacataatattatgcccagtattgaccatatacaaggtggcaatgtaaagacaagtagacaattctttgagtctgaaaattttgataagaataactatatacgaacagtaagtgtcaatgaaatacaaaagggcaatgttaaaacatctacttggctatttgaaacccacactatggatgaactgagaggagaagggttagaatatgaaaatatcaagacagtcactcaggaagatgtgcagaaaggtgatgttaagcaggctgtgtggctttttgaaaatcgaactttcgattctattatggaagcacataaaggtatcacaaaaatgaccaaggaagaaatccctccttctgatgtcaaaacaaccacatggctctttgaaacaacaccacttcatgaatttaatgaaactagagtagaaaagatagaaattattggcaagagcattaaagaaaccttagaagatctctactctcaaaaagttatccaggctcctggaatcatcattgaagctgatgaaataggggatgttcgaatggcaaaatacaagctaatgaaccaagcatctcctgagatacagaaagaagaaattatcagggctgatctcagaaatataatggtgaacctactttccaaaagggactgtactgaaagagagattttgattagtgaagaagagaagggaaatgttaatttgactaaaactcaattattaaacagatcaactgaatttcatgctgaaaaagaagagatagtgaaaggtgatgtacaacaagcaataaaaaacctgttctctgaggaaagatctgtaaagaaaggcatcttaattcaggaagatgaaaaaggagatattaacatgactatctattgtcttcttcatgaaaatgatggtgacacaattgagcgtgaagaagtaataggtggtgatgtcaaacgtaccattcataatttattgtcttccacatcaaacaataaaatatctgaaagggctaaaattgatgcctctgagagaggaaatgttcagtttttcacaacctgcatagaagctggagctttggattatctgaaacaactccacacagagtcaaatgaaacactgacagctaagaaacaagaaggagagaaagaaatcattggtggtgatgttgaaggtacaaaactgttactgaagaaaaggcagtctctggttgaacgtactgttagtgaaactgacatcatccctggagatgtgcataacacagttaaggtttttatgaccgagcctcagagtacatttggtaagatacccaaagaagagattataaaaggtgatttgacatcaaccctaaattccctcagccaggctgtaaatcagaaaacagtgacgaaaacagaagaaattataaaaggtaacatgctagccacactcaagtcacttaaagaatcaagccatcgatggaaagaatctaaacagcctgatgccatccctggtgatattgaaaaagctattgaatgccttgaaaaagctacaaatacaaagacagaaattctgaaaaaggagcttctcaaagatgacctggaaacatcactaaggtctttgaaagaagcacaaagaagtttcaaagaggtacataaagaaggtgtaataaaaaaagatgctaaagctgtgatggcaggatcctcgggagagcagaaaacagatattcatcaggttgctgtccagaggaacaaaaatagtcttcttcagccaaagccaggtccatttgagccagcggccaagtggcaagggggagcagatactctcagtcaaactatggggaaatcttgccatggcaatttagtagaagaaagaactgaggttaatcttccaaaagcccccaaaggcactgtaaagattgtcatagatcgtgaacaaaacaatgatgctctggagaaaagccttagaagactatctaattcacaccataaatctaatgttttggaatcaggagacaaaacgggtgtctggactgatactacaggagaacagcatcttagagatgaatatatgagcagacaattaacttcaactgtgtcagttaagaataatctaacaactaaagaatcagacagggcagtgagagagctgaagaaggatgatgtctttaattccatccaatctgctggtaaaaccgttggaaagcaacagacatatgaactgagaaatgaccaccagaaaatggagggttttcatataaagagtcctaaaaagaccaaaaatattaaaatattaactgatacacaaagctccaagcccagtcccacccagcatccagtcagcatgccagttggaggaacttacgacctttcaggggactttcagaagcaaactttgttaaagcaagaaacaaaatattctaataaggatataaagaaaaagaatataaaccttcaaccaatgtggcagcttttgcctgtagagcaagacacatccaatgtaacagaaatgaaagtctctgaaaaaagtcacaatacatttaaggcaaccaacaaaaagcgggagactgatgttcacttgaaaagccaggactttctaatgaaaacaaatacttccacaggcttaaaaatggcaatggaaaggtccttgaatccaatcaactttaaccctgagaataatgtaaaagaaagtgagtgcccccttccacctccatctccacctcctccaccaccttctaatgcatcatctgaaattgaatttcctcttcctcctccacctcctttgatgatgtttcctgaaaaaaatgggtttcttccctcactgtccacagagaagataaaggctgaatttgaaagttttccaggcctccctcttcctccacctccagtagatgagaaatctgaaagagaaagttcatcgatgtttctgccgcctcctcctcctccaactccatctcaaaagccagcacatctcctttcctcctctgctccggaaaagcacagtggagacttcatgcaacaatattcccaaaaagaagcctcgaactctcagaattctcaggctaaaatcataacaggaaaaaccggtgtgttgccacctcccacattgcccaaacccaaacttcccaagcatataaaagataataagaacgatttttcccccaaagttgaactggcaacctccctgtcagatatggaatgtaaaattactacctcaaaggatcagaaaaaagtaatggtgatgaccagcagtgaacacacggagacaaagcagaacgttattagtaagagtcttgatgaaagaaaacaattatctattgactctgcaaactgtctctcacacacagttccaggaacttcagcacccaggaaaaaacagattgcgcctcttataaaatctcattcatttccagagagttcaggacaacaaaatccaaaaccttatatgagaaaatttaagacacctttaatgattgctgaagaaaaatatagacaacaaaaagaagaaattgaaaaacagaaacaggagagttcttactacaacattgttaaaactcaaagccaaaatcaacacataacagaggtggaaaaggaaatgccattacaaaaaaccaatgaggaggtttccctatctggaattgattcagaatgcactgtggttcaacccagcccaggctctcaaagtaatgctcggatactaggagtgtgttctgataaccaactctccacaacatcgccagaaacagtcgctgccaagaggctccaccatgttttagcagcttcagaagacaaagataagatgaaaaaggaagttttacaaagctcaagggacattatgcaatccaaatcagcttgcgaaattaaacaaagtcaccaagaatgtagtacccaacaaacacaacagaagaagtatttggagcagttgcacttgccccaaagcaaaccaatttccccaaatttcaaagttaaaaccatcaaacttccaactctagatcatacattaaatgaaacagaccacagctatgaaagtcataaacagcaatctgagattgatgttcaaacctttaccaaaaaacaatatctgaaaaccaagaaaactgaagcaagcactgaatgtagtcataagcaatctctggctgaaagacattatcagttacctaagaaggagaaaagagtgacagtacaattgcctacagaatccatacagaagaaccaggaagataagctcaagatggttcccaggaagcaaagagaatttagcggatctgacagagggaaacttccaggaagtgaagaaaaaaatcagggaccatcaatgattggtcgaaaagaagagagattaataactgaaagaaaacacgaacatctgaagaataaatcagcaccaaaggtcgtcaagcaaaaggttatcgatgcacatcttgattcacagactcagaattttcagcaaacacaaatacagaccgctgaaagtaaagctgaacataaaaaattgccccagccatataatagtctgcaggaagaaaaatgtctcgaagtcaagggcatacaagagaaacaagtcttctctaatactaaagattcaaagcaagagattacacagaacaaatctttcttttcctctgtgaaagaatcccagcgggatgatggaaaaggtgccttaaatatagtggaattcttgagaaaacgtgaagaactgcaacagattttgtcgagagtgaaacagtttgaagcagagccaaataaaagtggccttaaaacatttcagacactattaaatactatcccaggatggctgataagtgaagataagagagaatatgcagttcacattgccatggagaataatttagaaaaagtaaaagaagaaataacacatattaaaactcaagcggaagatatgcttgtgtcctatgaaaatataattcagacagccatgatgtcctccaaaacaggaaaaccgggaaataaacccactagtcttgatgaaacatcatccaaagtatctaatgttcatgtcagcaataataaaaatagtgaacagaaagaaaataaaattgccaaagagaaaacagtacagcaccaagtagcagctcatcatgaagcaactgttcgtagtcacgtgaaaacccatcaggaaattaaacttgatgatagcaacattcctcctccctctttaaaaacacgcccaccgtcaccaacttttatcacaatagaatctactgcccgacgaacagaaaaccctactaagaacgagctttctcagtcccctaaaaaggacagttatgttgaacccccaccaagaaggcccatgtcgcaaaaatctgaaattcacagagcaaacacttccccttctccacccaggagtcgctctgaacaacttgtcagactcaaagacaccactgcaaagttatccaaaggggccatcccatgtccagcagcaaccccggttccaattgtagagaagaggtctgaaatcatcatgtctcctgcaacacttcgtcgtcaaattaagatagaaactcgtggtagggactctccacctacaatcacaataccagtaaatataaatcatgctgctagtggttccttcagagaatctgtggacgctcaagaggaaatcaggaaagtggagaagagagctacttatgttcataaagatggactaaattccactgatcacatggtgcccgacactgaaagttatgatgcagttgaaatcatccgcaaggttgcagtgcctcctcgcctgtcagagcacacacagagatatgaagcggccaaccgaactgttcaaatggctgaaaatttcgtgaatgaccctgaaaatgaaataaacagatggttcagggaatttgagcatggcccagtttctgaagcaaagtcaaatagaagagtttatgcaaagggagaaacaaaccataacatacaacaagaaagtcgtacattttgtaaggaggaatttggattaacatctttaggaaacacgagttttacagacttttcttgcaaacatcctagagaactgcgagaaaagattcctgttaagcagcccaggatctgctctgaaaccaggtctctaagtgaacatttctcaggcatggatgcatttgagagtcaaattgttgagtcgaagatgaaaacctcttcatcacatagctcagaagctggcaaatctggctgtgacttcaagcatgccccaccaacctatgaggatgtcattgctggacatattttagatatctctgattcacctaaagaagtaagaaaaaattttcaaaagacgtggcaagagagtggaagagtttttaaaggcctgggatatgcaaccgcagatgcttctgcaactgagatgagaaccaccttccaagaggaatctgcatttataagtgaagctgctgctccaagacaaggaaatatgtatactttgtcaaaagacagtttatccaatggagtgcctagtggcagacaagcagaattttcataagtcctgcttccgatgccaccattgcaacagtaaactaagtttgggaaattatgcatcacttcatggacaaatatactgtaaacctcactttaaacaacttttcaaatccaaaggaaattatgatgaaggttttggacataagcagcataaagatagatggaactgcaaaaaccaaagcagatcagtggactttattcctaatgaagaaccaaatatgtgtaaaaatattgcagaaaacacccttgtacctggagatcgtaatgaacatttagatgctggtaacagtgaagggcaaaggaatgatttgagaaaattaggggaaaggggaaaattaaaagtcatttggcctccttccaaggagatccctaagaaaaccttaccctttgaggaagagctcaaaatgagtaaacctaagtggccacctgaaatgacaaccctgctatcccctgaatttaaaagtgaatctctgctagaagatgttagaactccagaaaataaaggacaaagacaagatcactttccatttttgcagccttatctacagtccacccatgtttgtcagaaagaggatgttataggaatcaaagaaatgaaaatgcctgaaggaagaaaagatgaaaagaaggaaggaaggaagaatgtgcaagataggccgagtgaagctgaagacacaaagagtaacaggaaaagtgctatggatcttaatgacaacaataatgtgattgtgcagagtgctgaaaaggagaaaaatgaaaaaactaaccaaactaatggtgcagaagttttacaggttactaacactgatgatgagatgatgccagaaaatcataaagaaaatttgaataagaataataataacaattatgtagcagtctcatatctgaataattgcaggcagaagacatctattttagaatttcttgatctattacccttgtcgagtgaagcaaatgacactgcaaatgaatatgaaattgagaagttagaaaatacatctagaatctcagagttacttggtatatttgaatctgaaaagacttattcgaggaatgtactagcaatggctctgaagaaacagactgacagagcagctgctggcagtcctgtgcagcctgctccaaaaccaagcctcagcagaggccttatggtaaaggggggaagttcaatcatctctcctgatacaaatctcttaaacattaaaggaagccattcaaagagcaaaaatttacactttttcttttctaacaccgtgaaaatcactgcattttccaagaaaaatgagaacattttcaattgtgatttaatagattctgtagatcaaattaaaaatatgccatgcttggatttaagggaatttggaaaggatgttaaaccttggcatgttgaaacaacagaagctgcccgcaataatgaaaacacaggttttgatgctctgagccatgaatgtacagctaagcctttgtttcccagagtggaggtgcagtcagaacaactcacggtggaagagcagattaaaagaaacaggtgctacagtgacactgagtaaaatatctatggccactgacagtccacacttaggcactgagagatattgatgttctgaaataagattttatgaatttggatacccttttgaggaacttgatgtaaacatggtgttcagaaatctcgtgtctatctcaatgggatatttcttgtattacaccttgtcatttttttcacaatttatttacatctacttttgtttgaactggaatgaagagatgaaacactatggatatgttttccattcaaatggcactttagcatattgttctgttttcctgtaaaacatcatgggtgtgatttttatactgctgctgcttgtcacaattattataacttctctgtaatttcctctgaaataaaattgaatcacctgaggtgcaaaccaaaa

SEQ ID NO: 200439 - DNA, 2890 bp, Homo sapiens
  Payload ID: 19544
  Gene Name: xin actin binding repeat containing 2
  Uniprot ID: A4UGR9
  ENST ID: ENST00000409605
  CDS Start-End: 354-2504
atacagagctcagttcctaaaaataggtgccaagttgcatcctttagacgctctgctaaaataaattcagccgtcccatctacttgcttgatagacccttcagtggagcgggcctccactgcacccattgctttcaggggactgggaaattggctgtacatgaaacaagggaggaagctagtctgtgaagaactataaagatatatgatatttccacaaacttggggttaaacctaaatatcataaaagcgactgctggccctaataagcctgagagtggatttgcagaagacagtgctgctcggggcgagggtgtgtcagacctccacgaagtggtctccctgaaggagcggatggcgaggtaccaggcagctgtttccaggggtgactgccgcagcttctctgctaatatgatggaagaatcagaaatgtgcgcagtgcctggtggtttggccaaggtgaagaaacaatttgaggacgaaattacttcttcccgtaatacctttgctcaataccaatatcaacatcagaacagatctgagcaggaggcaattcatagcagccaggttggcacttcaagaagcagccaggaaatggcaagaaatgaacaagaagggtccaaagtacagaaaattgatgttcatggaacagaaatggtctctcatcttgaaaagcacaccgaggaagtaaaccaagcatctcagtttcatcaatatgttcaagaaactgtcattgatacacctgaggatgaagagattccaaaggtttcgactaagttgttaaaagagcagtttgaaaagtctgcccaggaaaagatcctttattctgacaaagagatgacaaccccagccaagcagattaagaagctgctgctccaagacaaggaaatatgtatactttgtcaaaagacagtttatccaatggagtgcctagtggcagacaagcagaattttcataagtcctgcttccgatgccaccattgcaacagtaaactaagtttgggaaattatgcatcacttcatggacaaatatactgtaaacctcactttaaacaacttttcaaatccaaaggaaattatgatgaaggttttggacataagcagcataaagatagatggaactgcaaaaaccaaagcagatcagtggactttattcctaatgaagaaccaaatatgtgtaaaaatattgcagaaaacacccttgtacctggagatcgtaatgaacatttagatgctggtaacagtgaagggcaaaggaatgatttgagaaaattaggggaaaggggaaaattaaaagtcatttggcctccttccaaggagatccctaagaaaaccttaccctttgaggaagagctcaaaatgagtaaacctaagtggccacctgaaatgacaaccctgctatcccctgaatttaaaagtgaatctctgctagaagatgttagaactccagaaaataaaggacaaagacaagatcactttccatttttgcagccttatctacagtccacccatgtttgtcagaaagaggatgttataggaatcaaagaaatgaaaatgcctgaaggaagaaaagatgaaaagaaggaaggaaggaagaatgtgcaagataggccgagtgaagctgaagacacaaagagtaacaggaaaagtgctatggatcttaatgacaacaataatgtgattgtgcagagtgctgaaaaggagaaaaatgaaaaaactaaccaaactaatggtgcagaagttttacaggttactaacactgatgatgagatgatgccagaaaatcataaagaaaatttgaataagaataataataacaattatgtagcagtctcatatctgaataattgcaggcagaagacatctattttagaatttcttgatctattacccttgtcgagtgaagcaaatgacactgcaaatgaatatgaaattgagaagttagaaaatacatctagaatctcagagttacttggtatatttgaatctgaaaagacttattcgaggaatgtactagcaatggctctgaagaaacagactgacagagcagctgctggcagtcctgtgcagcctgctccaaaaccaagcctcagcagaggccttatggtaaaggggggaagttcaatcatctctcctgatacaaatctcttaaacattaaaggaagccattcaaagagcaaaaatttacactttttcttttctaacaccgtgaaaatcactgcattttccaagaaaaatgagaacattttcaattgtgatttaatagattctgtagatcaaattaaaaatatgccatgcttggatttaagggaatttggaaaggatgttaaaccttggcatgttgaaacaacagaagctgcccgcaataatgaaaacacaggttttgatgctctgagccatgaatgtacagctaagcctttgtttcccagagtggaggtgcagtcagaacaactcacggtggaagagcagattaaaagaaacaggtgctacagtgacactgagtaaaatatctatggccactgacagtccacacttaggcactgagagatattgatgttctgaaataagattttatgaatttggatacccttttgaggaacttgatgtaaacatggtgttcagaaatctcgtgtctatctcaatgggatatttcttgtattacaccttgtcatttttttcacaatttatttacatctacttttgtttgaactggaatgaagagatgaaacactatggatatgttttccattcaaatggcactttagcatattgttctgttttcctgtaaaacatcatgggtgtgatttttatactgctgctgcttgtcacaattattataacttctctgtaatttcctctgaaataaaattgaatcacctgaggtgcaaacc

SEQ ID NO: 200440 - DNA, 12269 bp, Homo sapiens
  Payload ID: 19544
  Gene Name: xin actin binding repeat containing 2
  Uniprot ID: A4UGR9
  ENST ID: ENST00000409273
  CDS Start-End: 354-10337
atacagagctcagttcctaaaaataggtgccaagttgcatcctttagacgctctgctaaaataaattcagccgtcccatctacttgcttgatagacccttcagtggagcgggcctccactgcacccattgctttcaggggactgggaaattggctgtacatgaaacaagggaggaagctagtctgtgaagaactataaagatatatgatatttccacaaacttggggttaaacctaaatatcataaaagcgactgctggccctaataagcctgagagtggatttgcagaagacagtgctgctcggggcgagggtgtgtcagacctccacgaagtggtctccctgaaggagcggatggcgaggtaccaggcagctgtttccaggggtgactgccgcagcttctctgctaatatgatggaagaatcagaaatgtgcgcagtgcctggtggtttggccaaggtgaagaaacaatttgaggacgaaattacttcttcccgtaatacctttgctcaataccaatatcaacatcagaacagatctgagcaggaggcaattcatagcagccaggttggcacttcaagaagcagccaggaaatggcaagaaatgaacaagaagggtccaaagtacagaaaattgatgttcatggaacagaaatggtctctcatcttgaaaagcacaccgaggaagtaaaccaagcatctcagtttcatcaatatgttcaagaaactgtcattgatacacctgaggatgaagagattccaaaggtttcgactaagttgttaaaagagcagtttgaaaagtctgcccaggaaaagatcctttattctgacaaagagatgacaaccccagccaagcagattaagactgaaagtgaatatgaagagactttcaagccatcatcagttgtgagtacctcttccacttcttgcgtttcaaccagccagaggaaggaaacatcaactacaagatatagtgatcacagtgtcacttcctcaactctggcacaaattaatgctacttcttcaggaatgacagaagaatttcctcctcccccacctgacgtacttcaaacttcagtagatgtgacagcattttcccagtcccctgaactgcccagtcctcctagaagactaccagtccccaaagatgtatattccaagcaaagaaatttgtatgaattaaaccgtttatataaacacatccatcctgagttaagaaaaaacttagaaaaagattatatcagtgaagtttctgagattgtttctagtcaaatgaactcagggagttcagtctcagcagatgtgcaacaagcccggtatgtttttgaaaacacaaatgacagttctcaaaaagatctgaactcagaaagagaatacttggaatgggatgaaattctgaagggagaggtgcagtccattagatggatctttgagaatcaaccattggattccatcaacaatggctctcctgatgaaggtgatatttccaggggcattgctgatcaagaaatcattgctggtggtgatgtgaaatataccacatggatgtttgaaacccaacccatcgacacacttggggcttattcttctgacactgtagaaaatgcagagaaaattcctgagctagccagaggagatgtctgcacagctcggtggatgtttgaaacaaggccattggactcaatgaataaaatgcatcaaagtcaagaagaatcagcggtaactatcagtaaggacataactgggggggatgtcaagactgtgagatacatgtttgaaactcaacatctagatcaacttggacagcttcattcagtggatgaggttcatttactgcagcttaggtctgagctcaaagaaattaagggaaatgttaaaagaagtataaaatgtttcgaaactcaaccattatatgttattagagatggttcgggccaaatgctggaaattaaaactgttcacagagaagacgttgaaaagggagatgtaagaacagcacggtggatgtttgaaacacagccgttggacacaattaacaaagatatcacagaaattaaagttgtccgaggaatatccatggaagaaaatgtcaaaggtggggtgagtaaggcaaagtggttatttgaaacccaacctttggagaaaatcaaagagtcagaagaggtcatcattgaaaaggaaaaaataataggtacagatgtctccagaaagtgttggatgtttgaaacccagccattagacattctaaaagaagttcctgatgcagattctctacaacgtgaggagataataggtggtgatgtacaaactactaagcatctatttgaaacacttccaattgaagcattaaaagacagtcctgatataggaaagcttcaaaaaatcactgcctctgaagaagaaaaaggggatgttaggcatcaaaaatggatttttgaaacccaacctctggaagacattagaaaagataaaaaggagtacacacgaacagtgaaacttgaagaagttgacagaggagatgtgaagaattacacacatatctttgaatcaaacaatttaattaaatttgatgcatcacataaaatagaggtggaaggagttacaagaggtgctgtagagttaaataaatctctcttcgagacaacaccactgtatgccattcaagatccccttggaaaatatcatcaagtaaagacagtccagcaagaagaaatcgtaagaggtgatgtaagaagctgtaggtggctttttgaaacaaggcccattgaccagtttgatgaaagcattcataaatttcaaataattagaggaatatctgctcaagaaatacagactggaaatgtgaaatctgccaaatggttgtttgaaacccaacctcttgattcaattaaatattttagtgatgtggaagaaacagaaagtaaaactgaacaaactagagatattgttaaaggggatgtcaaaacctgtaaatggctttttgagacccagccaatggagtctctttatgaaaaagtttcgttaatgaccagcagtgaagaaattcataagggagatgtcaaaacttgtacttggctctttgaaactcagccacttgataccataaaagatgactctgaaacagcagtcaaattgcaaactgtaaaacaggaggagatccaaggtggggatgttcgtacagcatgttttctttttgagacagaaaatttggacagcatacaaggagaagaagtgaaggaaatcaagcctgttgaaatggatatacaagctggagatgtttccagcatgaggtataaatttgaaaatcagtccttagattctataagttctagttcagaggaagttttgaaaaagatcaaaaccttaaaaactgaagatattcagaaaggcaatgttttaaattgtaggtggctttttgaaaaccaaccaattgataagataaaagaaagccaagaaggtgatgaatgtgttaagacggtgacagacatacaaggtggggatgtaagaaaggggtgctttatttttgagactttttctttagatgagattaaagaagaatctgactatatcagcaccaagaaaacaattactgaagaagtaatacagggtgatgtaaaaagctacagaatgctctttgaaacccagccactctatgcaattcaagaccgagaagggtcctatcatgaagtgaccacagttaaaaaagaagaggtaattcatggagatgtgcgaggaacaaggtggctttttgaaacaaagccattagactctattaataaatcagaaactgtgtatgttattaaatctgtcacacaagaagacattcagaagggagatgttagttctgtcagatacagatttgaaactcagccactggatcagatttctgaagaatcacataatattatgcccagtattgaccatatacaaggtggcaatgtaaagacaagtagacaattctttgagtctgaaaattttgataagaataactatatacgaacagtaagtgtcaatgaaatacaaaagggcaatgttaaaacatctacttggctatttgaaacccacactatggatgaactgagaggagaagggttagaatatgaaaatatcaagacagtcactcaggaagatgtgcagaaaggtgatgttaagcaggctgtgtggctttttgaaaatcgaactttcgattctattatggaagcacataaaggtatcacaaaaatgaccaaggaagaaatccctccttctgatgtcaaaacaaccacatggctctttgaaacaacaccacttcatgaatttaatgaaactagagtagaaaagatagaaattattggcaagagcattaaagaaaccttagaagatctctactctcaaaaagttatccaggctcctggaatcatcattgaagctgatgaaataggggatgttcgaatggcaaaatacaagctaatgaaccaagcatctcctgagatacagaaagaagaaattatcagggctgatctcagaaatataatggtgaacctactttccaaaagggactgtactgaaagagagattttgattagtgaagaagagaagggaaatgttaatttgactaaaactcaattattaaacagatcaactgaatttcatgctgaaaaagaagagatagtgaaaggtgatgtacaacaagcaataaaaaacctgttctctgaggaaagatctgtaaagaaaggcatcttaattcaggaagatgaaaaaggagatattaacatgactatctattgtcttcttcatgaaaatgatggtgacacaattgagcgtgaagaagtaataggtggtgatgtcaaacgtaccattcataatttattgtcttccacatcaaacaataaaatatctgaaagggctaaaattgatgcctctgagagaggaaatgttcagtttttcacaacctgcatagaagctggagctttggattatctgaaacaactccacacagagtcaaatgaaacactgacagctaagaaacaagaaggagagaaagaaatcattggtggtgatgttgaaggtacaaaactgttactgaagaaaaggcagtctctggttgaacgtactgttagtgaaactgacatcatccctggagatgtgcataacacagttaaggtttttatgaccgagcctcagagtacatttggtaagatacccaaagaagagattataaaaggtgatttgacatcaaccctaaattccctcagccaggctgtaaatcagaaaacagtgacgaaaacagaagaaattataaaaggtaacatgctagccacactcaagtcacttaaagaatcaagccatcgatggaaagaatctaaacagcctgatgccatccctggtgatattgaaaaagctattgaatgccttgaaaaagctacaaatacaaagacagaaattctgaaaaaggagcttctcaaagatgacctggaaacatcactaaggtctttgaaagaagcacaaagaagtttcaaagaggtacataaagaaggtgtaataaaaaaagatgctaaagctgtgatggcaggatcctcgggagagcagaaaacagatattcatcaggttgctgtccagaggaacaaaaatagtcttcttcagccaaagccaggtccatttgagccagcggccaagtggcaagggggagcagatactctcagtcaaactatggggaaatcttgccatggcaatttagtagaagaaagaactgaggttaatcttccaaaagcccccaaaggcactgtaaagattgtcatagatcgtgaacaaaacaatgatgctctggagaaaagccttagaagactatctaattcacaccataaatctaatgttttggaatcaggagacaaaacgggtgtctggactgatactacaggagaacagcatcttagagatgaatatatgagcagacaattaacttcaactgtgtcagttaagaataatctaacaactaaagaatcagacagggcagtgagagagctgaagaaggatgatgtctttaattccatccaatctgctggtaaaaccgttggaaagcaacagacatatgaactgagaaatgaccaccagaaaatggagggttttcatataaagagtcctaaaaagaccaaaaatattaaaatattaactgatacacaaagctccaagcccagtcccacccagcatccagtcagcatgccagttggaggaacttacgacctttcaggggactttcagaagcaaactttgttaaagcaagaaacaaaatattctaataaggatataaagaaaaagaatataaaccttcaaccaatgtggcagcttttgcctgtagagcaagacacatccaatgtaacagaaatgaaagtctctgaaaaaagtcacaatacatttaaggcaaccaacaaaaagcgggagactgatgttcacttgaaaagccaggactttctaatgaaaacaaatacttccacaggcttaaaaatggcaatggaaaggtccttgaatccaatcaactttaaccctgagaataatgtaaaagaaagtgagtgcccccttccacctccatctccacctcctccaccaccttctaatgcatcatctgaaattgaatttcctcttcctcctccacctcctttgatgatgtttcctgaaaaaaatgggtttcttccctcactgtccacagagaagataaaggctgaatttgaaagttttccaggcctccctcttcctccacctccagtagatgagaaatctgaaagagaaagttcatcgatgtttctgccgcctcctcctcctccaactccatctcaaaagccagcacatctcctttcctcctctgctccggaaaagcacagtggagacttcatgcaacaatattcccaaaaagaagcctcgaactctcagaattctcaggctaaaatcataacaggaaaaaccggtgtgttgccacctcccacattgcccaaacccaaacttcccaagcatataaaagataataagaacgatttttcccccaaagttgaactggcaacctccctgtcagatatggaatgtaaaattactacctcaaaggatcagaaaaaagtaatggtgatgaccagcagtgaacacacggagacaaagcagaacgttattagtaagagtcttgatgaaagaaaacaattatctattgactctgcaaactgtctctcacacacagttccaggaacttcagcacccaggaaaaaacagattgcgcctcttataaaatctcattcatttccagagagttcaggacaacaaaatccaaaaccttatatgagaaaatttaagacacctttaatgattgctgaagaaaaatatagacaacaaaaagaagaaattgaaaaacagaaacaggagagttcttactacaacattgttaaaactcaaagccaaaatcaacacataacagaggtggaaaaggaaatgccattacaaaaaaccaatgaggaggtttccctatctggaattgattcagaatgcactgtggttcaacccagcccaggctctcaaagtaatgctcggatactaggagtgtgttctgataaccaactctccacaacatcgccagaaacagtcgctgccaagaggctccaccatgttttagcagcttcagaagacaaagataagatgaaaaaggaagttttacaaagctcaagggacattatgcaatccaaatcagcttgcgaaattaaacaaagtcaccaagaatgtagtacccaacaaacacaacagaagaagtatttggagcagttgcacttgccccaaagcaaaccaatttccccaaatttcaaagttaaaaccatcaaacttccaactctagatcatacattaaatgaaacagaccacagctatgaaagtcataaacagcaatctgagattgatgttcaaacctttaccaaaaaacaatatctgaaaaccaagaaaactgaagcaagcactgaatgtagtcataagcaatctctggctgaaagacattatcagttacctaagaaggagaaaagagtgacagtacaattgcctacagaatccatacagaagaaccaggaagataagctcaagatggttcccaggaagcaaagagaatttagcggatctgacagagggaaacttccaggaagtgaagaaaaaaatcagggaccatcaatgattggtcgaaaagaagagagattaataactgaaagaaaacacgaacatctgaagaataaatcagcaccaaaggtcgtcaagcaaaaggttatcgatgcacatcttgattcacagactcagaattttcagcaaacacaaatacagaccgctgaaagtaaagctgaacataaaaaattgccccagccatataatagtctgcaggaagaaaaatgtctcgaagtcaagggcatacaagagaaacaagtcttctctaatactaaagattcaaagcaagagattacacagaacaaatctttcttttcctctgtgaaagaatcccagcgggatgatggaaaaggtgccttaaatatagtggaattcttgagaaaacgtgaagaactgcaacagattttgtcgagagtgaaacagtttgaagcagagccaaataaaagtggccttaaaacatttcagacactattaaatactatcccaggatggctgataagtgaagataagagagaatatgcagttcacattgccatggagaataatttagaaaaagtaaaagaagaaataacacatattaaaactcaagcggaagatatgcttgtgtcctatgaaaatataattcagacagccatgatgtcctccaaaacaggaaaaccgggaaataaacccactagtcttgatgaaacatcatccaaagtatctaatgttcatgtcagcaataataaaaatagtgaacagaaagaaaataaaattgccaaagagaaaacagtacagcaccaagtagcagctcatcatgaagcaactgttcgtagtcacgtgaaaacccatcaggaaattaaacttgatgatagcaacattcctcctccctctttaaaaacacgcccaccgtcaccaacttttatcacaatagaatctactgcccgacgaacagaaaaccctactaagaacgagctttctcagtcccctaaaaaggacagttatgttgaacccccaccaagaaggcccatgtcgcaaaaatctgaaattcacagagcaaacacttccccttctccacccaggagtcgctctgaacaacttgtcagactcaaagacaccactgcaaagttatccaaaggggccatcccatgtccagcagcaaccccggttccaattgtagagaagaggtctgaaatcatcatgtctcctgcaacacttcgtcgtcaaattaagatagaaactcgtggtagggactctccacctacaatcacaataccagtaaatataaatcatgctgctagtggttccttcagagaatctgtggacgctcaagaggaaatcaggaaagtggagaagagagctacttatgttcataaagatggactaaattccactgatcacatggtgcccgacactgaaagttatgatgcagttgaaatcatccgcaaggttgcagtgcctcctcgcctgtcagagcacacacagagatatgaagcggccaaccgaactgttcaaatggctgaaaatttcgtgaatgaccctgaaaatgaaataaacagatggttcagggaatttgagcatggcccagtttctgaagcaaagtcaaatagaagagtttatgcaaagggagaaacaaaccataacatacaacaagaaagtcgtacattttgtaaggaggaatttggattaacatctttaggaaacacgagttttacagacttttcttgcaaacatcctagagaactgcgagaaaagattcctgttaagcagcccaggatctgctctgaaaccaggtctctaagtgaacatttctcaggcatggatgcatttgagagtcaaattgttgagtcgaagatgaaaacctcttcatcacatagctcagaagctggcaaatctggctgtgacttcaagcatgccccaccaacctatgaggatgtcattgctggacatattttagatatctctgattcacctaaagaagtaagaaaaaattttcaaaagacgtggcaagagagtggaagagtttttaaaggcctgggatatgcaaccgcagatgcttctgcaactgagatgagaaccaccttccaagaggaatctgcatttataagtgaagctgctgctccaagacaaggaaatatgtatactttgtcaaaagacagtttatccaatggagtgcctagtggcagacaagcagaattttcataagtcctgcttccgatgccaccattgcaacagtaaactaagtttgggaaattatgcatcacttcatggacaaatatactgtaaacctcactttaaacaacttttcaaatccaaaggaaattatgatgaaggttttggacataagcagcataaagatagatggaactgcaaaaaccaaagcagatcagtggactttattcctaatgaagaaccaaatatgtgtaaaaatattgcagaaaacacccttgtacctggagatcgtaatgaacatttagatgctggtaacagtgaagggcaaaggaatgatttgagaaaattaggggaaaggggaaaattaaaagtcatttggcctccttccaaggagatccctaagaaaaccttaccctttgaggaagagctcaaaatgagtaaacctaagtggccacctgaaatgacaaccctgctatcccctgaatttaaaagtgaatctctgctagaagatgttagaactccagaaaataaaggacaaagacaagatcactttccatttttgcagccttatctacagtccacccatgtttgtcagaaagaggatgttataggaatcaaagaaatgaaaatgcctgaaggaagaaaagatgaaaagaaggaaggaaggaagaatgtgcaagataggccgagtgaagctgaagacacaaagagtaacaggaaaagtgctatggatcttaatgacaacaataatgtgattgtgcagagtgctgaaaaggagaaaaatgaaaaaactaaccaaactaatggtgcagaagttttacaggttactaacactgatgatgagatgatgccagaaaatcataaagaaaatttgaataagaataataataacaattatgtagcagtctcatatctgaataattgcaggcagaagacatctattttagaatttcttgatctattacccttgtcgagtgaagcaaatgacactgcaaatgaatatgaaattgagaagttagaaaatacatctagaatctcagagttacttggtatatttgaatctgaaaagacttattcgaggaatgtactagcaatggctctgaagaaacagactgacagagcagctgctggcagtcctgtgcagcctgctccaaaaccaagcctcagcagaggccttatggtaaaggggggaagttcaatcatctctcctgatacaaatctcttaaacattaaaggaagccattcaaagagcaaaaatttacactttttcttttctaacaccgtgaaaatcactgcattttccaagaaaaatgagaacattttcaattgtgatttaatagattctgtagatcaaattaaaaatatgccatgcttggatttaagggaatttggaaaggatgttaaaccttggcatgttgaaacaacagaagctgcccgcaataatgaaaacacaggttttgatgctctgagccatgaatgtacagctaagcctttgtttcccagagtggaggtgcagtcagaacaactcacggtggaagagcagattaaaagaaacaggtgctacagtgacactgagtaaaatatctatggccactgacagtccacacttaggcactgagagatattgatgttctgaaataagattttatgaatttggatacccttttgaggaacttgatgtaaacatggtgttcagaaatctcgtgtctatctcaatgggatatttcttgtattacaccttgtcatttttttcacaatttatttacatctacttttgtttgaactggaatgaagagatgaaacactatggatatgttttccattcaaatggcactttagcatattgttctgttttcctgtaaaacatcatgggtgtgatttttatactgctgctgcttgtcacaattattataacttctctgtaatttcctctgaaataaaattgaatcacctgaggtgcaaacc

SEQ ID NO: 200441 - DNA, 12182 bp, Homo sapiens
  Payload ID: 19544
  Gene Name: xin actin binding repeat containing 2
  Uniprot ID: A4UGR9
  ENST ID: ENST00000628543
  CDS Start-End: 126-10250
tgtaacaggaagtggaaattgagcgaagtttgtgctcgccagcttttaagagtcaccctgggagccagctggaggattctgtgaaagattcagacaagaaaggcaaggaaacatcttttgacaagatgtcacctgaaagtggtcacagccgcatctttgaagcgactgctggccctaataagcctgagagtggatttgcagaagacagtgctgctcggggcgagggtgtgtcagacctccacgaagtggtctccctgaaggagcggatggcgaggtaccaggcagctgtttccaggggtgactgccgcagcttctctgctaatatgatggaagaatcagaaatgtgcgcagtgcctggtggtttggccaaggtgaagaaacaatttgaggacgaaattacttcttcccgtaatacctttgctcaataccaatatcaacatcagaacagatctgagcaggaggcaattcatagcagccaggttggcacttcaagaagcagccaggaaatggcaagaaatgaacaagaagggtccaaagtacagaaaattgatgttcatggaacagaaatggtctctcatcttgaaaagcacaccgaggaagtaaaccaagcatctcagtttcatcaatatgttcaagaaactgtcattgatacacctgaggatgaagagattccaaaggtttcgactaagttgttaaaagagcagtttgaaaagtctgcccaggaaaagatcctttattctgacaaagagatgacaaccccagccaagcagattaagactgaaagtgaatatgaagagactttcaagccatcatcagttgtgagtacctcttccacttcttgcgtttcaaccagccagaggaaggaaacatcaactacaagatatagtgatcacagtgtcacttcctcaactctggcacaaattaatgctacttcttcaggaatgacagaagaatttcctcctcccccacctgacgtacttcaaacttcagtagatgtgacagcattttcccagtcccctgaactgcccagtcctcctagaagactaccagtccccaaagatgtatattccaagcaaagaaatttgtatgaattaaaccgtttatataaacacatccatcctgagttaagaaaaaacttagaaaaagattatatcagtgaagtttctgagattgtttctagtcaaatgaactcagggagttcagtctcagcagatgtgcaacaagcccggtatgtttttgaaaacacaaatgacagttctcaaaaagatctgaactcagaaagagaatacttggaatgggatgaaattctgaagggagaggtgcagtccattagatggatctttgagaatcaaccattggattccatcaacaatggctctcctgatgaaggtgatatttccaggggcattgctgatcaagaaatcattgctggtggtgatgtgaaatataccacatggatgtttgaaacccaacccatcgacacacttggggcttattcttctgacactgtagaaaatgcagagaaaattcctgagctagccagaggagatgtctgcacagctcggtggatgtttgaaacaaggccattggactcaatgaataaaatgcatcaaagtcaagaagaatcagcggtaactatcagtaaggacataactgggggggatgtcaagactgtgagatacatgtttgaaactcaacatctagatcaacttggacagcttcattcagtggatgaggttcatttactgcagcttaggtctgagctcaaagaaattaagggaaatgttaaaagaagtataaaatgtttcgaaactcaaccattatatgttattagagatggttcgggccaaatgctggaaattaaaactgttcacagagaagacgttgaaaagggagatgtaagaacagcacggtggatgtttgaaacacagccgttggacacaattaacaaagatatcacagaaattaaagttgtccgaggaatatccatggaagaaaatgtcaaaggtggggtgagtaaggcaaagtggttatttgaaacccaacctttggagaaaatcaaagagtcagaagaggtcatcattgaaaaggaaaaaataataggtacagatgtctccagaaagtgttggatgtttgaaacccagccattagacattctaaaagaagttcctgatgcagattctctacaacgtgaggagataataggtggtgatgtacaaactactaagcatctatttgaaacacttccaattgaagcattaaaagacagtcctgatataggaaagcttcaaaaaatcactgcctctgaagaagaaaaaggggatgttaggcatcaaaaatggatttttgaaacccaacctctggaagacattagaaaagataaaaaggagtacacacgaacagtgaaacttgaagaagttgacagaggagatgtgaagaattacacacatatctttgaatcaaacaatttaattaaatttgatgcatcacataaaatagaggtggaaggagttacaagaggtgctgtagagttaaataaatctctcttcgagacaacaccactgtatgccattcaagatccccttggaaaatatcatcaagtaaagacagtccagcaagaagaaatcgtaagaggtgatgtaagaagctgtaggtggctttttgaaacaaggcccattgaccagtttgatgaaagcattcataaatttcaaataattagaggaatatctgctcaagaaatacagactggaaatgtgaaatctgccaaatggttgtttgaaacccaacctcttgattcaattaaatattttagtgatgtggaagaaacagaaagtaaaactgaacaaactagagatattgttaaaggggatgtcaaaacctgtaaatggctttttgagacccagccaatggagtctctttatgaaaaagtttcgttaatgaccagcagtgaagaaattcataagggagatgtcaaaacttgtacttggctctttgaaactcagccacttgataccataaaagatgactctgaaacagcagtcaaattgcaaactgtaaaacaggaggagatccaaggtggggatgttcgtacagcatgttttctttttgagacagaaaatttggacagcatacaaggagaagaagtgaaggaaatcaagcctgttgaaatggatatacaagctggagatgtttccagcatgaggtataaatttgaaaatcagtccttagattctataagttctagttcagaggaagttttgaaaaagatcaaaaccttaaaaactgaagatattcagaaaggcaatgttttaaattgtaggtggctttttgaaaaccaaccaattgataagataaaagaaagccaagaaggtgatgaatgtgttaagacggtgacagacatacaaggtggggatgtaagaaaggggtgctttatttttgagactttttctttagatgagattaaagaagaatctgactatatcagcaccaagaaaacaattactgaagaagtaatacagggtgatgtaaaaagctacagaatgctctttgaaacccagccactctatgcaattcaagaccgagaagggtcctatcatgaagtgaccacagttaaaaaagaagaggtaattcatggagatgtgcgaggaacaaggtggctttttgaaacaaagccattagactctattaataaatcagaaactgtgtatgttattaaatctgtcacacaagaagacattcagaagggagatgttagttctgtcagatacagatttgaaactcagccactggatcagatttctgaagaatcacataatattatgcccagtattgaccatatacaaggtggcaatgtaaagacaagtagacaattctttgagtctgaaaattttgataagaataactatatacgaacagtaagtgtcaatgaaatacaaaagggcaatgttaaaacatctacttggctatttgaaacccacactatggatgaactgagaggagaagggttagaatatgaaaatatcaagacagtcactcaggaagatgtgcagaaaggtgatgttaagcaggctgtgtggctttttgaaaatcgaactttcgattctattatggaagcacataaaggtatcacaaaaatgaccaaggaagaaatccctccttctgatgtcaaaacaaccacatggctctttgaaacaacaccacttcatgaatttaatgaaactagagtagaaaagatagaaattattggcaagagcattaaagaaaccttagaagatctctactctcaaaaagttatccaggctcctggaatcatcattgaagctgatgaaataggggatgttcgaatggcaaaatacaagctaatgaaccaagcatctcctgagatacagaaagaagaaattatcagggctgatctcagaaatataatggtgaacctactttccaaaagggactgtactgaaagagagattttgattagtgaagaagagaagggaaatgttaatttgactaaaactcaattattaaacagatcaactgaatttcatgctgaaaaagaagagatagtgaaaggtgatgtacaacaagcaataaaaaacctgttctctgaggaaagatctgtaaagaaaggcatcttaattcaggaagatgaaaaaggagatattaacatgactatctattgtcttcttcatgaaaatgatggtgacacaattgagcgtgaagaagtaataggtggtgatgtcaaacgtaccattcataatttattgtcttccacatcaaacaataaaatatctgaaagggctaaaattgatgcctctgagagaggaaatgttcagtttttcacaacctgcatagaagctggagctttggattatctgaaacaactccacacagagtcaaatgaaacactgacagctaagaaacaagaaggagagaaagaaatcattggtggtgatgttgaaggtacaaaactgttactgaagaaaaggcagtctctggttgaacgtactgttagtgaaactgacatcatccctggagatgtgcataacacagttaaggtttttatgaccgagcctcagagtacatttggtaagatacccaaagaagagattataaaaggtgatttgacatcaaccctaaattccctcagccaggctgtaaatcagaaaacagtgacgaaaacagaagaaattataaaaggtaacatgctagccacactcaagtcacttaaagaatcaagccatcgatggaaagaatctaaacagcctgatgccatccctggtgatattgaaaaagctattgaatgccttgaaaaagctacaaatacaaagacagaaattctgaaaaaggagcttctcaaagatgacctggaaacatcactaaggtctttgaaagaagcacaaagaagtttcaaagaggtacataaagaaggtgtaataaaaaaagatgctaaagctgtgatggcaggatcctcgggagagcagaaaacagatattcatcaggttgctgtccagaggaacaaaaatagtcttcttcagccaaagccaggtccatttgagccagcggccaagtggcaagggggagcagatactctcagtcaaactatggggaaatcttgccatggcaatttagtagaagaaagaactgaggttaatcttccaaaagcccccaaaggcactgtaaagattgtcatagatcgtgaacaaaacaatgatgctctggagaaaagccttagaagactatctaattcacaccataaatctaatgttttggaatcaggagacaaaacgggtgtctggactgatactacaggagaacagcatcttagagatgaatatatgagcagacaattaacttcaactgtgtcagttaagaataatctaacaactaaagaatcagacagggcagtgagagagctgaagaaggatgatgtctttaattccatccaatctgctggtaaaaccgttggaaagcaacagacatatgaactgagaaatgaccaccagaaaatggagggttttcatataaagagtcctaaaaagaccaaaaatattaaaatattaactgatacacaaagctccaagcccagtcccacccagcatccagtcagcatgccagttggaggaacttacgacctttcaggggactttcagaagcaaactttgttaaagcaagaaacaaaatattctaataaggatataaagaaaaagaatataaaccttcaaccaatgtggcagcttttgcctgtagagcaagacacatccaatgtaacagaaatgaaagtctctgaaaaaagtcacaatacatttaaggcaaccaacaaaaagcgggagactgatgttcacttgaaaagccaggactttctaatgaaaacaaatacttccacaggcttaaaaatggcaatggaaaggtccttgaatccaatcaactttaaccctgagaataatgtaaaagaaagtgagtgcccccttccacctccatctccacctcctccaccaccttctaatgcatcatctgaaattgaatttcctcttcctcctccacctcctttgatgatgtttcctgaaaaaaatgggtttcttccctcactgtccacagagaagataaaggctgaatttgaaagttttccaggcctccctcttcctccacctccagtagatgagaaatctgaaagagaaagttcatcgatgtttctgccgcctcctcctcctccaactccatctcaaaagccagcacatctcctttcctcctctgctccggaaaagcacagtggagacttcatgcaacaatattcccaaaaagaagcctcgaactctcagaattctcaggctaaaatcataacaggaaaaaccggtgtgttgccacctcccacattgcccaaacccaaacttcccaagcatataaaagataataagaacgatttttcccccaaagttgaactggcaacctccctgtcagatatggaatgtaaaattactacctcaaaggatcagaaaaaagtaatggtgatgaccagcagtgaacacacggagacaaagcagaacgttattagtaagagtcttgatgaaagaaaacaattatctattgactctgcaaactgtctctcacacacagttccaggaacttcagcacccaggaaaaaacagattgcgcctcttataaaatctcattcatttccagagagttcaggacaacaaaatccaaaaccttatatgagaaaatttaagacacctttaatgattgctgaagaaaaatatagacaacaaaaagaagaaattgaaaaacagaaacaggagagttcttactacaacattgttaaaactcaaagccaaaatcaacacataacagaggtggaaaaggaaatgccattacaaaaaaccaatgaggaggtttccctatctggaattgattcagaatgcactgtggttcaacccagcccaggctctcaaagtaatgctcggatactaggagtgtgttctgataaccaactctccacaacatcgccagaaacagtcgctgccaagaggctccaccatgttttagcagcttcagaagacaaagataagatgaaaaaggaagttttacaaagctcaagggacattatgcaatccaaatcagcttgcgaaattaaacaaagtcaccaagaatgtagtacccaacaaacacaacagaagaagtatttggagcagttgcacttgccccaaagcaaaccaatttccccaaatttcaaagttaaaaccatcaaacttccaactctagatcatacattaaatgaaacagaccacagctatgaaagtcataaacagcaatctgagattgatgttcaaacctttaccaaaaaacaatatctgaaaaccaagaaaactgaagcaagcactgaatgtagtcataagcaatctctggctgaaagacattatcagttacctaagaaggagaaaagagtgacagtacaattgcctacagaatccatacagaagaaccaggaagataagctcaagatggttcccaggaagcaaagagaatttagcggatctgacagagggaaacttccaggaagtgaagaaaaaaatcagggaccatcaatgattggtcgaaaagaagagagattaataactgaaagaaaacacgaacatctgaagaataaatcagcaccaaaggtcgtcaagcaaaaggttatcgatgcacatcttgattcacagactcagaattttcagcaaacacaaatacagaccgctgaaagtaaagctgaacataaaaaattgccccagccatataatagtctgcaggaagaaaaatgtctcgaagtcaagggcatacaagagaaacaagtcttctctaatactaaagattcaaagcaagagattacacagaacaaatctttcttttcctctgtgaaagaatcccagcgggatgatggaaaaggtgccttaaatatagtggaattcttgagaaaacgtgaagaactgcaacagattttgtcgagagtgaaacagtttgaagcagagccaaataaaagtggccttaaaacatttcagacactattaaatactatcccaggatggctgataagtgaagataagagagaatatgcagttcacattgccatggagaataatttagaaaaagtaaaagaagaaataacacatattaaaactcaagcggaagatatgcttgtgtcctatgaaaatataattcagacagccatgatgtcctccaaaacaggaaaaccgggaaataaacccactagtcttgatgaaacatcatccaaagtatctaatgttcatgtcagcaataataaaaatagtgaacagaaagaaaataaaattgccaaagagaaaacagtacagcaccaagtagcagctcatcatgaagcaactgttcgtagtcacgtgaaaacccatcaggaaattaaacttgatgatagcaacattcctcctccctctttaaaaacacgcccaccgtcaccaacttttatcacaatagaatctactgcccgacgaacagaaaaccctactaagaacgagctttctcagtcccctaaaaaggacagttatgttgaacccccaccaagaaggcccatgtcgcaaaaatctgaaattcacagagcaaacacttccccttctccacccaggagtcgctctgaacaacttgtcagactcaaagacaccactgcaaagttatccaaaggggccatcccatgtccagcagcaaccccggttccaattgtagagaagaggtctgaaatcatcatgtctcctgcaacacttcgtcgtcaaattaagatagaaactcgtggtagggactctccacctacaatcacaataccagtaaatataaatcatgctgctagtggttccttcagagaatctgtggacgctcaagaggaaatcaggaaagtggagaagagagctacttatgttcataaagatggactaaattccactgatcacatggtgcccgacactgaaagttatgatgcagttgaaatcatccgcaaggttgcagtgcctcctcgcctgtcagagcacacacagagatatgaagcggccaaccgaactgttcaaatggctgaaaatttcgtgaatgaccctgaaaatgaaataaacagatggttcagggaatttgagcatggcccagtttctgaagcaaagtcaaatagaagagtttatgcaaagggagaaacaaaccataacatacaacaagaaagtcgtacattttgtaaggaggaatttggattaacatctttaggaaacacgagttttacagacttttcttgcaaacatcctagagaactgcgagaaaagattcctgttaagcagcccaggatctgctctgaaaccaggtctctaagtgaacatttctcaggcatggatgcatttgagagtcaaattgttgagtcgaagatgaaaacctcttcatcacatagctcagaagctggcaaatctggctgtgacttcaagcatgccccaccaacctatgaggatgtcattgctggacatattttagatatctctgattcacctaaagaagtaagaaaaaattttcaaaagacgtggcaagagagtggaagagtttttaaaggcctgggatatgcaaccgcagatgcttctgcaactgagatgagaaccaccttccaagaggaatctgcatttataagtgaagctgctgctccaagacaaggaaatatgtatactttgtcaaaagacagtttatccaatggagtgcctagtggcagacaagcagaattttcataagtcctgcttccgatgccaccattgcaacagtaaactaagtttgggaaattatgcatcacttcatggacaaatatactgtaaacctcactttaaacaacttttcaaatccaaaggaaattatgatgaaggttttggacataagcagcataaagatagatggaactgcaaaaaccaaagcagatcagtggactttattcctaatgaagaaccaaatatgtgtaaaaatattgcagaaaacacccttgtacctggagatcgtaatgaacatttagatgctggtaacagtgaagggcaaaggaatgatttgagaaaattaggggaaaggggaaaattaaaagtcatttggcctccttccaaggagatccctaagaaaaccttaccctttgaggaagagctcaaaatgagtaaacctaagtggccacctgaaatgacaaccctgctatcccctgaatttaaaagtgaatctctgctagaagatgttagaactccagaaaataaaggacaaagacaagatcactttccatttttgcagccttatctacagtccacccatgtttgtcagaaagaggatgttataggaatcaaagaaatgaaaatgcctgaaggaagaaaagatgaaaagaaggaaggaaggaagaatgtgcaagataggccgagtgaagctgaagacacaaagagtaacaggaaaagtgctatggatcttaatgacaacaataatgtgattgtgcagagtgctgaaaaggagaaaaatgaaaaaactaaccaaactaatggtgcagaagttttacaggttactaacactgatgatgagatgatgccagaaaatcataaagaaaatttgaataagaataataataacaattatgtagcagtctcatatctgaataattgcaggcagaagacatctattttagaatttcttgatctattacccttgtcgagtgaagcaaatgacactgcaaatgaatatgaaattgagaagttagaaaatacatctagaatctcagagttacttggtatatttgaatctgaaaagacttattcgaggaatgtactagcaatggctctgaagaaacagactgacagagcagctgctggcagtcctgtgcagcctgctccaaaaccaagcctcagcagaggccttatggtaaaggggggaagttcaatcatctctcctgatacaaatctcttaaacattaaaggaagccattcaaagagcaaaaatttacactttttcttttctaacaccgtgaaaatcactgcattttccaagaaaaatgagaacattttcaattgtgatttaatagattctgtagatcaaattaaaaatatgccatgcttggatttaagggaatttggaaaggatgttaaaccttggcatgttgaaacaacagaagctgcccgcaataatgaaaacacaggttttgatgctctgagccatgaatgtacagctaagcctttgtttcccagagtggaggtgcagtcagaacaactcacggtggaagagcagattaaaagaaacaggtgctacagtgacactgagtaaaatatctatggccactgacagtccacacttaggcactgagagatattgatgttctgaaataagattttatgaatttggatacccttttgaggaacttgatgtaaacatggtgttcagaaatctcgtgtctatctcaatgggatatttcttgtattacaccttgtcatttttttcacaatttatttacatctacttttgtttgaactggaatgaagagatgaaacactatggatatgttttccattcaaatggcactttagcatattgttctgttttcctgtaaaacatcatgggtgtgatttttatactgctgctgcttgtcacaattattataacttctctgtaatttcctctgaaataaaattgaatcacctgaggtgcaaacc

SEQ ID NO: 200442 - DNA, 1690 bp, Homo sapiens
  Payload ID: 19545
  Gene Name: XK, Kell blood group complex subunit-related family, member 3
  Uniprot ID: Q5GH77
  ENST ID: ENST00000331428
  CDS Start-End: 104-1483
cttttgaaattctaaattctgatgcagaacgtatcagtgaaactccctcccactgtctcttgtattagcatcaaggaagcgagaaaaaataagcaccctgagaatggagacagtgtttgaagagatggatgaagaaagcacaggaggagtttcatcttcgaaagaagaaatagtccttggccagagactccatctaagctttccttttagcattatcttctcaactgttctctactgtggtgaggttgcctttggtttatacatgtttgaaatttatcgaaaagctaatgacacattctggatgtcatttaccatcagctttattattgtgggggcaattttggatcaaattatcctgatgtttttcaacaaagacttgaggagaaataaggctgcattacttttttggcacattcttcttttaggacctattgtgaggtgtttgcacaccattagaaattaccacaaatggttgaaaaatcttaaacaggagaaggaagagactcaagttagcatcacaaagagaaacacgatgctggaaagggagattgcattctcaatccgggataatttcatgcagcagaaggctttcaagtacatgtcagtgattcaggcttttctcggttctgttccacaattaattttgcagatgtatatcagtctcactatacgagaatggcctttgaatagagcattgctgatgacattttccctgttatcagttacttatggggccattcgctgcaatatactggccatccagatcagcaatgatgatactaccattaagctaccgccgatagaattcttctgtgtcgtgatgtggcgttttttggaggttatctcacgtgtagtgactctggcatttttcattgcatctctgaaactgaagagcctacccgttttgttaatcatatattttgtatcattgttggcaccgtggctggagttttggaaaagtggagctcatcttcctggcaacaaagaaaataattccaatatggtgggtacagtactgatgcttttcttgatcacactgctatatgctgccatcaacttctcctgctggtcagcagtgaaactgcagttgtcagatgacaaaataattgacgggagacagaggtggggccatagaatcctacactacagctttcagtttttagaaaatgtgataatgatattggtatttaggttctttggagggaaaactttgctgaattgttgtgactcattaattgccgtgcagctcatcataagctacctattggccactggctttatgctcctcttctatcagtatttgtacccatggcagtcaggcaaagtgttgccaggacgtactgaaaatcagccagaagcaccgtactattatgtaaacatcgagaaaactgaaaagaataaaaataagcagctgaggaattactgtcactcctgcaatagggttggatatttttcaatcagaaaaagtatgacatgttcataaaatatacatatatactttcacagaacaatgagtaaagatgctgaatgtgacttgttaagaggctcttaaatttaaaaaatatacacagcaaaatcttggaagtggtttctaataaaattcatttatgttctcctgtgaacgtgccttagtaatttttgttttcttaactataattatacaattcattaaataaaacaaaataaaaaa

SEQ ID NO: 200443 - DNA, 19880 bp, Homo sapiens
  Payload ID: 19546
  Gene Name: XK, Kell blood group complex subunit-related family, member 4
  Uniprot ID: Q5GH76
  ENST ID: ENST00000327381
  CDS Start-End: 101-2053
ctgggagggaagccggggcgaggcgaggaggtggcgggaggaggagacagcggggaaaggtgtcagataaaggagggctctcctccggtgtggaggcatcatggccgctaaatcagacgggaggctgaaaatgaagaaaagcagcgacgtggcgttcaccccgctgcagaactcggaccactcgggctcggtgcagggattggctccaggcttgccgtcggggtcgggagccgaggacgaggaggcggccgggggcggctgctgcccggacggcggcggctgctcgcgctgctgctgctgctgcgccgggagtggcggctccgcgggctcgggcggctccggcggcgtcgccggcccgggcggcggcggggcgggctcggctgcgctgtgcctgcgcctgggcagggagcagcggcgctactcactgtgggactgcctctggatcctggccgccgtggccgtgtacttcgcggacgtgggcacagacgtctggctcgccgtggactactacctgcgcggccagcgctggtggttcgggctcacgctcttcttcgtggtgctcggctctctgtcggtgcaagtgttcagcttccgctggtttgtgcacgatttcagcaccgaggacagcgccacggccgctgctgcctccagctgcccgcagcctggagccgattgcaagacggtggtcggcggtgggtctgcagccggggaaggcgaggctcgtccttccacgccgcaaaggcaagcatctaacgccagcaagagcaacatcgccgcggccaacagcggcagcaacagcagcggggctacccgggccagtggcaagcacaggtctgcgtcctgctccttctgcatctggctcctgcagtcactcatccacatcttgcagctcgggcaaatctggagatatttccacacaatatacttaggtattcgaagccgacagagtggggagaatgacagatggaggttttactggaaaatggtatatgagtatgcggatgtgagtatgctgcatttgctagccacctttctggaaagtgctccacagctggtcctgcagctctgcattatcgtacagactcatagcttacaggccctccaaggtttcacagcggcagcttccctcgtgtccctggcctgggccttggcctcctaccagaaggccctccgggactctcgagatgacaagaagcccatcagctacatggccgtcatcatccagttctgctggcacttcttcaccatcgccgccagggtcatcacgtttgccctctttgcctcggttttccagctgtactttgggatcttcatcgtccttcactggtgcatcatgaccttctggatcgtccactgtgagacagaattctgtatcaccaaatgggaagagattgtgttcgacatggtggtggggattatctatatcttcagttggttcaatgtcaaggaaggcaggacacgctgcaggctattcatttactattttgtgatccttttggaaaatacagccttgagtgccctctggtacctctacaaggctccccagattgcagacgcatttgccattccagcgctgtgtgtggtgttcagcagctttttaactggcgttgtttttatgctgatgtattatgccttctttcatcccaatggacccagattcgggcagtcaccaagttgtgcttgtgaggacccagccgctgccttcactttgcccccagacgtggccacaagcaccctacggtccatctccaacaaccgcagtgttgtcagcgaccgcgatcagaaattcgcagagcgggatgggtgtgtacctgtctttcaagtgaggcccactgccccatccaccccatcatctcgcccaccacggattgaagaatcagtcattaaaattgacttgttcaggaataggtacccagcatgggagagacatgttttggaccgaagcctccgaaaggctattttagcttttgaatgttccccatctcctccaaggctgcagtacaaagatgatgcccttattcaggagcggttggagtacgaaaccactttataaagcaaaaggagttgcaggacccacaacatccagatgaaggggtgacagcagggctgtggccataatgacacttcatcctagagcagggcagtgagccgtgaagttcctagtgggaccgtcatcaccattatcatttgatcctgtcggctgggggcggctggtctccttccaaagcagctgcacccgagagtctctgactccacctgaaagaatgacgctggcttaataggactctccattgctaccaaactcctcctgcacggtcttgggtgcacccaccagagggtactactattatggaaaaattttgcctccaatcattagggtgtcttgatggcgttaactgatctttccataaaaatagattcagtcatacacacatacacacactaacacacataagttacaccagtcctctgtcaaaaaagcttaggtgacttttcttgatgcaaagctctgattcccacaggaatataaaaacaaagaaagagggaaacatccctcgagaaaaaaaatagtattgcttagaaaagaaaccattttctcatttggaaatccataccatgtgtgaaaatcctatccaacggacagcaaacccaaatgttgtctacacatgtgttagcattgatggagtggttcattttctacacatttcaggatttgttttatattttaaattttcagttgcgaacatcctttttgacagaaatcctatgcagcccatgtacggctttcaacaagaccaaggagctcaataacttcatgatgtaaattaaatagtaatcatgattcagtattcaattgcaaaaatgtaacaggtacacaaagaggaagtggggaaaaaggcaaaatgagagtctgattcccaggcatgtgcagcgcccattgggacataacggcagtgcggcgcgagccagaggaatgggctggaaccggatctgtttccagacgcagaatgagtggctctgtgtgaccataggcagatgctgactctggaagactccgtgccactcctttctagtgccaaacaccatccaaccacaggactgacgtggaagccccaaacaactgagaatgagtggcatgagccccctaaaagcaggcgagagaacgagcaatcaagttctccactgtgtacagacttttcctccccccaatccaaggtcaaagtgatgtgtcttttagaggctttgggacactttttagtaagtatgagcagacaaatgcaatgaatatgctatgaaaaaacccttctgaactgagagagggcttatcactatatccagctaagatttgtatttgaatcatctgtaaagtcgcactcttacaacaagcttctgggttttaaatacctccgtacagcaagtaaacgttccccgctttctgttctcagtgtcctcggtcatggtgcttttcgttgcattaaaagtgccggtcaaactttgatagtatttttttatagttggtgcagagtggaataactcatggattatttcaatatttttgtaataaaaaatatagggtatacacataggcatcatcacattttttatagacctggaatcgtttaaaatactttaagcatcataattacttgggatgtcagaaactggtccacaaattccatcagcctgcctcagcagattgaaaacatttgtctcttgcaagatcaccctactttgcaagttggtgcccccaggaacctggccaggggtgctatcagaatatcaggtgaagagagaatcagcttaaatagaaagggcttgtcaagactggccaatgtttcccaggaaatcaaagatgtaaatgattactttcatccatccattataacaaacctgaccacagtggaagctgtcttaaacttccttccctggttttatattaacccaactgatagattaagtattagtcaaaccactaaaaaagaaaaagaaaaaagtttaacttaattattcggttatttggatctaattcacacaaagtagtccagttctctagccaccacctgtaatgggtgtgtcatccagagactgtgtccccacgatgacatccacaggaagtaacagagggctcaacctaggacttcttttggtacaaagccccaaatcaatttttttaaaaaatagacaatttttataagtagacatacttcctagtactccatgatttgatcctccaagcaagatttccactaaaaaatactaatcttttgttgggatgtggaaagattacctagtcaccagtaaaggcccaggaaaaggctcttcttgtcagcacatggtgaaaacattccatccccactggagaaggaaaaaacgattttggcaaattcttcacttttgtgcagaaccttgagttattagcttcattgtttccaagacaacttttaactgatgatctttggaaattgagtttctcagttgaactgtacctttgattctatgagtaaatcacagattacagtctaatagagtcaatcaatcaacacaaacccaacaggccccatcatgcttcaatcatgtaagttctaagttatttctcaacttgatccctcattcaacatgttaagagtcagaatgaatactatgtcaatgaaaaatgatgtactgtgctttgacttggaggtgagattggcagtcaggagaatgtaaggaggttgaatttttcagtgatttcccaaatactgtaaatactctgttatccgacatatttggagattatgatgttttaattaggcatgaattcttgttaaggaaagaacatatccatgatgtgatgaattacaacctttcaaaagattacaagagcaaaacaagagataaatcatgatttagccttgcttccatgattcaggaagcactacactgccatcagactgttgtggtaataacaacttttacttgttttctagatgcacagataacagagagtttaaagtattcagatttaaagagacatcatcagtgtacaaagaaacaaagtttcatttttgtatttatattttaattctaacatttccttttcaatctgccattaaaccctccgcagacagtaactggagaatcccaaaggaaaaaattggaaatgctgggttccttatctgcaggctcctttctgtgtctgagtccactttgattccatttaagagggagatctgctcttactcactttttgcataggatcaggaaattttctaaaggaacaacattgtaatttgttttacttttaaacttgcatttctaaatatgaaaccatgtttaatgaatatatataatgtgtgtgtgtgtatcttaaccatagtgacactttaagtgtttgtgtgaaagaaaaggaaataatttttccatgtaagtcaaagtttagtctcccaaaatgactatgtcctttaaatcctctttgcttatttacttaactacatactgtctagttcaatagcactgactttgcagacacttagttactactcatttgtgataaacgctgttaacccaacaaatataataaattctcttactgacatggcaagaatatataattcaagtattagcaaaagataatctgaggataaaagtaaaatgaagtattttatggttaatttctaaatgcccaatttattttgctctatgagtaaaggaagtgattgcacagaacaattaaaagtgaatgagaatagttgaaaactcaatggctgttttttaaaaatgatatgtgccttttaagtgtgtttgtgtacatacatatatgtatatatacgtacctatatatgtatgtacacacacacacacacacactttccaactaaagtaacagagatgaaaaggataaagtatatactgcttttgaatgtatataaagtggtatgttatgcatataaattgtacataaactttttagaaaagaagcattttcctgctcctttttcaaaaccaacccaagcttacagtccatctataagaccaacacacttacgaacttcagttggaaatacctaaatataattcagcacttcttagctcgaatgagttttatcacttcttaaggatctcatcttttaaacagctgaataaaatagttctgtgtcacttcaaagtttctttctctgaacagattgaattgagcaaagagaacctcttctgtccttaccaggattgtgtaaggttacacatttgcttttaaatataccaaatgccgttgattggaaacaagttctgacacaatgtttagacaagaatccagagattttttctaatgaaccattttctagactaaatatatgctcccttgcattttccacatatctttgccattagccattgctgtttctatataaagcttggatgagatgcctgcatttttatgtgctaaggagaattccttaaagcctttttaaaaatagctcatactgtcattcagattatagctcagaggatggttgaagcgcatggtgaaaacacaggaggactggggtggtcattcctataatttcagtgacagatgcagatcaacgttcctttgtctcggcaatccaatgtcatttttgaaaacaatcaaaaagatcgcttgtgtcagcttctgactcataacactcctcccacctgatgctccagtgtttcaaaatggccaaggatgggcgattccgctctatcccccatttctgagactcttgtctggacctgtaacaggccgtgaaatgccctgagcattcgagtggcatcccttctcctcacataggcacctgggtggcagcatcagaccactgaagttgttgtgttgacatatgtcttatctagttgctgtcctaaaaatgggcatgtggcaagactctcaatctacagcctcgacagtatcattactcattctaaagtaaaactgcagaatatgggtggaattgtataaaaacataatgagccatttaattttgctaattgaagcaattagtctaacatgcaagcagcctgctctcacagcagagagccacatggaagaagtgccaaatagccatttgcatttatatatatatattgcaggcagtgacctggcccccaaatgtaaagcttttgtcaaccttgaggcctatattctgctaaacaagagatgacttaatgtccttgaaatattttcgtaatatactgacagcctaatgtcagaaacgagctgcctaaatcaagttttgcttttggttatttcacttccccatagactttcttatggttccatctcccacattgagagtagctcaccacgatggatggtttactgcgcacctagtgctggactaagagctgtatctatgtggtttcatttagtcctcactgccatctgtgagttaagcatcatttacagatgacaaaatctgtaaatggcttagagatgtcaagcaatttgcccaaaggtcccacagctaggaaacagtggggctgagggttgagcacagctttcaacaactgcgacttctgggagcccagtgactcttcccacaaaatctagtcctgatttggcaagtcttcagaagaaacagaatcatggtctgatgatcaaatttttccaagaaaattttatttaaaagtcaaagatgtccttcaaaatgaacagttaaaaatgtaaaagtcgatgtaaaatggaagtctctatcacctgtaactaaattttaccttaactctaactcatagtaggcagataaatgctattcttccattccaggcaactgtccccctcctatggctccactatgtattcaattaagtgataaatataaattaacctgatgccatgtctcttgtattttatatgtgtatgctgttttcatccaattaagcagactgaaaaaaaactaaaccccattacttactttggcattttgacaagatagagagagaggaaaagaaagagggagggagagagggagggaaggaagaaggaaggaaggaaggaaggaaggaaggaaggaaggaaggaaggaaggaaggaaggaaggaaggagatttaacaagtctttgaagtgatattttcaaattataaggtaattctgtttcactgccataatttttccctaaattttatttaatatcttgcaggtcacaaactttaatatttaagaggattattaaaccactagcttgaacaatcatataagtctaggaaccttattttagtgttagatgccaataatactgcaagtgtcaaccaaatatttgttgaattgaattataaaataattgatgtgttctttcccttctcactttagatatagcatgtctgaaggtctgcaagatgacagagttgtaacccattcaatgatattgttgcctagtaagctgtgtgtgtgttgtttgaactgatactaaaaaggtagctgataataaaccaaaaattttctcaaccctggtgtttatttttaaaaaatcttcaatgatcaatatgaatgtagtgtattaaaatacaagtaactatcttcctactttgatttaagagatctttatgaatttatataaaattagaagtcactgatttttataggaaatagcatgtaaaataaatctaagtattgctttatcactttattttatagatgagacaactgagatccaaaaagaacaggtaatttttgtgatcaggattacacaatacacttttttttttccctgagtcatttattcaacaagtttgacctctacaactcatttggctaggcaatgcacagtcaagcacaaaaggaaagttgcactggaatagctcatagtctggctattagcagcacaatcatagttttctgacgccagctcttactcttttctactctaccacactgtttcttctcttctcaatatctatatttaattccatattgaagcaagaaagaaacacagcttttctaagactatgcagtcatgtgtcacttaaggatggggatatgttctgagatatgcatcgtcaggcaattttgtcattgtgtgatggagtgtgcttacacaagcttagatggtagagcctaccatgctcctaggctatatggtagagcctattgtccctaggctacaaacctgtacagcatgctactgtaccgaatactgtaggcaactgtaacaccatggtaagtacttgtgtatttaaatatagaaaagttaacagtaaaaaatatagtattattgtcttatgggatcgctgtcatatgtgcagtctattattgaccaaaatgccattgtgtggcatgtgagccttacaatatacaattaacatatgaaataatgatgatgaacataaagtaacaatacaaatacaaaaaaaaaactagatgactgcttataaagagaaaagtaattttataatttgtttatatgactctccaacactagatatttttaaattgatatcacaacacacaaaaaaattgaaatactctcttggtgcatagtatttgattgaaaacaatcatttttggataaactttgaagcgattcttgagaacttatttcaagaaaaggcatgaaattagggagactccaaagtgaagagttttccaataggtgacttctctgatttttcaagaaagcattcttcactaactgtatttctccagcatactggttatttaggaataacaaatttctggacataaacatgagctgtttctctaaagcctttcctccaatgcccagaagagcagcactgtgctgcgtgacaatttcaggagtcaggagtcaggagtcaggacagtcagccccagcttcctggggaaacccacactggctttggacccgattgcattctctcctgagtgattggcttcccacatatataagcagcagattgttaaagatcactattaacttgtataactaattttccttatgtgaaataattctggtcagggaatatataaacccattggccctctaaggagtagaagaaaagagagaagaaagtatattaacttttatgagtacagaataattcaagttccttagcgagtcacattatgcattaataaaagagttgacctaataaatgttacaaggtaccatgatctctaggttcatgccaccattaccacattccttactacaattattgctattttagtcattggaccagacaaaatgaagcatataattactgatataatatttgctaagcaaaaatcttgtttaacgaaaaaaatcaataccaaaactaattaatcaaaatattaagcaaatattaccagcacagtactgacacaaaattttctcttgtgctagtaattgaagtatgtcatctaccctgttattagaatttcagaaaataggccgggcgcagtggctcacgcctgtaatcccaacactttgggaggctgaggcgggcggatcacaaggtcaggagatcgagaccatcctggctaacacagtgaaacccccatctctactaaaactacaaaaaaattagccaggcatggtggcgggcgcctgtggtcccagctactcgggaggctgaggcaggagaatggcatgaacccaggaggcagagcttgcagtgagccaagatcgtgccactgcactccagcctgggtgacagagcaagactccgtctcaaaaaaaaaaaaaaaaaaaaaaaagaatttcagaaaatataaagttttatgtttttattatatttccatctaccaaattgttgaccttctcctcctctccattgcttaatttatattaaaacagatttaatcaaattattacttaagtactacaaatgttatcagatggagatgtggttaagctaatttaatttacctattctagtggcattctggtatggagctgtatcaaatcaacacttttaattatttcacattaattcatcaagaagttccaaaacactactaaatgtgttgaaaatatagtttgagtttctatgattgtaatcaaaattcctattttgatcgcacaccagtagaacgcatcttaacaccagcattgccattgtgagtctagaaaatgagcactttgtgtgttgagcgctgttgcattcacttagcaattaacctttgacctgtggttttctgctgagccccttgtgattttttttattctattcaaattgggagcaataacacaccttaacataaccaaaaaaaggagacctgtcagctagtgaaagaattgtcattttatatcattctttcaaaaaattaaaatattcaacttcccttattaacctttctaatgcattgtacataaaagaggaaatggatttctgaaatatattttgaaagcctggggtgaaacattttccacggtctgaatcggaagcttggggctctgtggaaagatgtaaatccctcctgctgtaagaggagggaaggcagcagtgagctgtcactcagaaatacagtcaccactgtcacaaagctgcctattgctgatgctatcgattcccttctttttctacagaaacatcttggagcttgtcaagctttactggaggtgatttgcagttaattaattcaacagacactttaatcttgcaaattcttgacttgtaatattgtaaccaagctcctgcaagggaacattaatcagttagtgaaaaaggagcacttccgttcagccgtagtaccatgacgtgcacaggcctgaagagaaatacctctgtgaagtggagcgctagtgaattcctgctacctgcttcttatggctcacgctatgaatattcacctgcttcatttgttttttccagtaaacgctgttttgaaaaaaaagaaaaatattcccgggggcttgcatagctcagagaacggagtactgggtcgtggagacttgctttaaatggattcaaatccacatgtttggaaatgaaaataatgcactgtcatctgttgaataattgatctgtctgagtacagttgctgcttttatttcatttcttgagactaccattgtcagcattgtaataaccaatttataaaaattgagtttttattcagtttcagaggtaaaatctgcatgggtgcagctactgaataatttgattcctgccttcttaggtggtgacattagcagttccaaaccgagatccatttctatgtggaattggctatcctgttgcttctcaggccctgcaaaaccttggttacgagctcaaagatcacgaatctgatattcttttttttttttttttttttttttttttgagacagagtctcgctctgtcgcaggggctggagtgcagtggcacaatctcggctcactgcaagctctgcctcccaggttcacaccatccttctgcctcagccttctgagtaggtgggactacaggcgcctgtcaccacgcccggctaatttttttgtattttttagtagagatggggtttcaccgtgttagccagaatggtctcgatctcctgacctcgtgatctgccctccttggcctcccaaagtgctgggattacaggcgtgagccaccacacccggccccgatattcttaatgactaaattttcacatagaggtaaacagatcatctcttaatttaatacatggttctttctcccttgcttctgggttttgttttttttttttcaaagaaagatttgagctacgagataagaatgaagttaccagaagttatcaggtcatagtttcagagtatgcaagagagtcgggccttcatatgttcttgtaaagttttctgtctaatcttttggtataacaattttaggagttcaccctagatgaaagagtggaagtcatcagatttgtcaataagcagtctagaggaaaaatgagaagaggaagaagcagggattctttttcttgtgttttgaagatgtttctcctcccaaagctatcaccttggtagttatcaccaagatgtataatagcaagcactactgaatgatcttcccagttatcagcactagcatcacggcgagtcagttttcagaactagctcttggcgcaagccctgaaataaaatggggacaaaaagtggtctaccaccatgtgacttattttctttttttttttaattttattattattatactttaagttttagggtacatgtgcacaacgtgcaggtttgttacatatgtatacatgtgccatgttggtgtgctgtacctattaactcgtcatttagcatcaggtatatctcctaatgctatccctcccccctccccccaccccacaacactccccggtgtgtgatgttccccttcctgtgcacgtgacttattttcaattgcccagcaatgaaaactaacaagttaaagaaaatgttcattttctgaaccccagagcccacataggtacaaagatactctgtaatgtacaatgaggtggccaatcgtgggaatataggagcaataaatagtcctcttaagcaaggttcatgggtaagagttactctagcaggattgggtgttgggtcagagggtatctattaatgtagaggcccaagtatggtgatgaagagaaaacctgtcagtggctcatccatagtatttgccttttcacagagcagagaagttcaaaatagtcacagccagtccataactataacaacagacatgtccactttggaaaggctagggcctgacgaaagtgggaaaacagagatgtcagtggtgtcatgtctaagagtgactctgtcattaggggaacccaccccctgtgatagttctccttgaccactggtccctatgggctctgcaggagagcttctcgtgggttctaagataaggtattccaaggtattgtaagttacccttgtttgtagaacatgaaccacttaaccatccctccttttaacagcaatgagattcagggttaccatggccttactcatcttcccattgtaaatatatcacaatgtcacaagagcctctgtgtccaaacacactaaactgggtttacaagcattagaatctttcactcatattgtgaatctcaattctgccagtcacctagtctgtgtatctgttcccaaactggaaaaaataattcttgagagaataattttcagaataatggaggtggaaagaaatgaacagttaagcaatttttcaacatagacaaaaccactggaccattgatagccctcaagctctgattcttcctcctgactaagtttcttttctttggggggctttcaacatctgaattttccagatgattgcggaaccatcgtcactaaaccaaagtagacaaggagttattaaaaaataaagactgtccacatgactgcaaatatcctgatgaaaagtggccaagtagatcactcaagtggtaaatttggtcttcatgatatcaaacatacggatatttggaaaagtcgagatgtttgaatcatacagttttccgtctgggtgtctggtgtttctggatagacagactgctccggtgttgtaagtaatggaattgaactttcttgcgccgtaagcaattgctggtcatattctgctgctaaaagtctctttgttgtgccaagagaaataatgcagaacaaatgttatttaatttttatttactttcagcaaacacatgaatgaaagaggtcaggtaggctgtcctgggcattctgggcctggctgcggcacaccctccttcacttggcccctgccaggcaagaaactttctattcagtctttgctatctttcataaattgtatcattgctcttctgctgttcatatcatcttagttattcacaaagtctacttgataaaatggctcaagggaaatacaagtttcttaagtttttattcttcaaatagaagttttaattttaagcattccttatgatattttttaagcctaaaaaccattcaaattgcttgacaaaattatttcatggtgaattttataaggttgatagaagtaaaagctatttttcccaaaacaaacaaaataccatacatagttttttgggtttggtttgttgatgtcatgccaatttccaagcaccaactggttaccacaaacatgggaatatttagtgatatctttgtagtcatcgttaaaattcctgggaaaaaaagaaaaagtttacgtcaaaggaaaattcacctcccacaaggaaagtctgagatgttcatcctgacatttgcgttcctgattatttgtggacatttcttcattgtgactgtaggaagctgagcttgtttctcctaatttgacactgggttggtgagcattgtctcaaattttgtgcttgcctcatttatggtcctgaagcttagcagaaaaacagacaagctattcagaccagttttctttaagagcacttatgttgcagaacatgatacaaatgattcaccgtgagcaggcacacagagtacggaaaggtattcaactatgcaaagatattgaggggatttccagagaaaacttaaatgttttgaagatttgtaggtagggttttgattgtgtcacattctacactcagtgccaagttagaatgtctttatggggaaggcaataaagttacttgttgggtccttccttcccttacaaacagaatgtttttatgaaatcaaatggatcctccactttgtgtagtaaggaccccccaggccccacaacatcatcactgtgagtcctatcgcagatgtgtgtaccagcccaattcagttttgcttttctttttccctaagatttttacttcaccaaatcccatttcaaatctttttaccttcatgttaccaacaggatgtttagttgaatcagcaacaaagacgtgacaacctattgtcctccacaaaagcatgagtcattttattcagtgatctttggtagtacgataatcaatggaatttatggtgtcgtagaaaaccaaaaatccatgttgaatatagtgactgtcttaaatatacttaaatatgttattctacaaaacaatatccttttacactatgggatggattcctttctggatgcagggatgggagggtctatgggtcagtgactgggacaaaggaactgggaatctctgcacaactgagccctaatccctggtccatctctccagcctcagaaactcaccctcagcctcattttccccatatgcaaaagagagatatttatttacctacctcataggggtgttgtggagattagctagatttgctaaagtgcttgtaggttagaaagtgctgtcattcctgagaactggcattaacagaagagagctgtgtgcagcacggaggaagtggagtctgaggaatacaacagcaacaactcaccaagcagagaatacaatggttcttcatcactatataaaactaacacttttccttcaaaggtctatgtataattttcttcaatgattagctttttaatgagacaactcctttcatccagacattcagatgctttatataagttggcaattttcctgttaaccaaactgaattttattaaatgtttattaaaatgcacccagaaaacttgtctcctcctgatgcctgaggggtttgcatgcctgatcccaagctgcattttttcagaatgcgtgcatgatgccccagttctgtactcatgatcaccaggtggcgttctgaaatccactactggggaaagatttttaacagatattagtgagattagagttggtgtcatttccattgagtatcctcttcacccctaagatgacacatctttacaacacaataaaagaacgtaaagccttatttccacctgtaactcctgaattgattcattttcacgttataactacatttcaaatatttcggagaagtttttacacagggcttcagctatatactgatatacatatgcttacatgtgcttaggtgggaattctactaaaggataaaggacacagtgtgaaaacaacatcagagaatatcctgtacaacttccccaaaagtgacaagttttcttgtacttaaaaatttaatcctgataagaactaatgtgaaataacatcattttggtttataaatatttgtaatttttgagacatagaggcaatatcatgatataggaatacattcataaaactagactagcaaagcagataatgttttcatgatatggcttcatgaggcaaagttgttgtacatcaatattatcattgtgcccttatttaaggattatattccattgtgaaaaaaatgtgcacactcttaaaaacacaaaatgggtttcagaaagtttaccttgagaagtgggtttgaaatcatcttgtgcttggagctgacataagatacgcactcaatataatctcttctggattctaaaatctaattggcagtgatatttcaaagccttaacatttcaaggtggttaattaatatctaatgcatggtattaaactttctgaagcatgaatttaacctaggcaattatctgattcattttttttaaagtttgtgctgccaaaccagactgaagtattgtttttctggactaatactatgagaatagtaagtgagtcaaaaaataattgggactgtcctttttcccctgcccacttcctagtatcaatactcccccaaccagaaatgcagcagaatatcctttttgctataaaggaaaatactgtgtttttatttgtttttgcagaagaaaactggtgttgcctatttggactagatgtaggggcctggaagaaggaagtggcagattcacaggtggggtgaccaggatgggaggaaaatagtggggcgagtatgtcatggggagattttgccacaaagatacaaaacagaattgaagtgtgttagagctggacaaccctttgaaatgacagagtctagattcttcaccaaacagatgaaaagacaagtagagacaacatgtacttgagatataagctatacatctcatcactggaagaaaggagacttcagcctcttttcaaggctttccagaccacatggaactctccagagccctccttgaaagtttttagaaaaactaccattttcagcaaagattcatgtgattatgctgctgaggaccagtcattctgtaaacatcacatatgtgatgctttgtaaatgtattaattgtggtcaattttcatggatatttcccattaacattgtattccatgaacaagtgatagaaaacatatggaaattctcttttgatcaaaaggagtgtctcccaattagtttacgtgtgttagtattgctgacatattattatcatcacaaaattccttttatatctagatggtatcaaataagaaaaaaatgcatcatttggtcaattgcttattgaagatcccagctgaagcctttctttggtaaagagcgcagaaagagaccatagctattcttggatgagaaccttgcctctactaaatagtttctgcttttcctctctgtagccagacagctcaatagcctagggagagtcgatgaaggatatgcaaattacatttttcccattctcagaacaaagacagcaaccaatgagccagaggtttcttctctctttgaaaccaaatagcacgctgaatttagggctatgacaaaaatgttgttaaagcaagagcaaaatcatccttcctatggattcttttctcagtgtttacttaattctttttgcagtttggattggagtttctagtaatgataattaatgccattttacatgatagcttcaatgcagaaatggtgtgagcctgagttacaaatgacatgactagggatacaaacttcgtctgtactaacatcctaccaagcagattggaaacaaatactactaccactaatattctgatgtaattaataacatctaatagaaaaatagaaacatcgtgcttagcatgaaaccattgcacaatataaacctgctcccaaatggcaaggatttttgctaccaatatttgttcttaattctccagttattttaagtaaataagtttcacatctaactacctcagctactgttgttttatttagaaacatgaaaccatgcactttgtaatcaataagtcttttgtttaacatttcaaaaggatatttggtgcaaagcaattttcaaaaatttgtacatgatatacaccacccaacctcaggaggttgtacttaattttgtttgtttgtttctaaggttggttttgggtaaaatcctcatttccactcaacatcaagataagctgctctatatttgcttaatttgccttaaacattttgtgctcctttccctgttcaatttttttgttttgttttaaatctatctctgaaaaaaaaatggaacaggtggcaggtgaacagcaaatggaagagaatggaccagtaatttctcagtcccctgttgtcaactatctgcatgacattctgattgtgcaaaaatgccattcctgtgcttccccctccattacagaataaggtccgagagaccccacgagtgtgcgtagggaacggtgtagacatttcccccagtatgagcacagtgcctggacctgaatgatcatcttggcagttcttgtgcttttactttgtaaacattgtacaaatgtatttggaattttatttgaaatggagacttaaactagttattaaatttgtttccttcctgtaaatatatatattcaaattccatgtatccaaacatccctttagcgttcagattgtaagtgtgtctttattcgcgggaggccactgtcagcaggcagtgacccccagtgccctagtttgaagcacagtgtgtggagtatttgatgtactacagtaccatagttattttggtctgttaagtaagttgcaatttgtgatgaaatgaagtggaaagtagtacttcataatgaacaaatttccttggttacatggtttttcttgtaaaacttaaagaaaaaaaaagaaaacttgaaatttta

SEQ ID NO: 200444 - DNA, 3907 bp, Homo sapiens
  Payload ID: 19546
  Gene Name: XK, Kell blood group complex subunit-related family, member 4
  Uniprot ID: Q5GH76
  ENST ID: ENST00000622811
  CDS Start-End: 33-1985
aaaggagggctctcctccggtgtggaggcatcatggccgctaaatcagacgggaggctgaaaatgaagaaaagcagcgacgtggcgttcaccccgctgcagaactcggaccactcgggctcggtgcagggattggctccaggcttgccgtcggggtcgggagccgaggacgaggaggcggccgggggcggctgctgcccggacggcggcggctgctcgcgctgctgctgctgctgcgccgggagtggcggctccgcgggctcgggcggctccggcggcgtcgccggcccgggcggcggcggggcgggctcggctgcgctgtgcctgcgcctgggcagggagcagcggcgctactcactgtgggactgcctctggatcctggccgccgtggccgtgtacttcgcggacgtgggcacagacgtctggctcgccgtggactactacctgcgcggccagcgctggtggttcgggctcacgctcttcttcgtggtgctcggctctctgtcggtgcaagtgttcagcttccgctggtttgtgcacgatttcagcaccgaggacagcgccacggccgctgctgcctccagctgcccgcagcctggagccgattgcaagacggtggtcggcggtgggtctgcagccggggaaggcgaggctcgtccttccacgccgcaaaggcaagcatctaacgccagcaagagcaacatcgccgcggccaacagcggcagcaacagcagcggggctacccgggccagtggcaagcacaggtctgcgtcctgctccttctgcatctggctcctgcagtcactcatccacatcttgcagctcgggcaaatctggagatatttccacacaatatacttaggtattcgaagccgacagagtggggagaatgacagatggaggttttactggaaaatggtatatgagtatgcggatgtgagtatgctgcatttgctagccacctttctggaaagtgctccacagctggtcctgcagctctgcattatcgtacagactcatagcttacaggccctccaaggtttcacagcggcagcttccctcgtgtccctggcctgggccttggcctcctaccagaaggccctccgggactctcgagatgacaagaagcccatcagctacatggccgtcatcatccagttctgctggcacttcttcaccatcgccgccagggtcatcacgtttgccctctttgcctcggttttccagctgtactttgggatcttcatcgtccttcactggtgcatcatgaccttctggatcgtccactgtgagacagaattctgtatcaccaaatgggaagagattgtgttcgacatggtggtggggattatctatatcttcagttggttcaatgtcaaggaaggcaggacacgctgcaggctattcatttactattttgtgatccttttggaaaatacagccttgagtgccctctggtacctctacaaggctccccagattgcagacgcatttgccattccagcgctgtgtgtggtgttcagcagctttttaactggcgttgtttttatgctgatgtattatgccttctttcatcccaatggacccagattcgggcagtcaccaagttgtgcttgtgaggacccagccgctgccttcactttgcccccagacgtggccacaagcaccctacggtccatctccaacaaccgcagtgttgtcagcgaccgcgatcagaaattcgcagagcgggatgggtgtgtacctgtctttcaagtgaggcccactgccccatccaccccatcatctcgcccaccacggattgaagaatcagtcattaaaattgacttgttcaggaataggtacccagcatgggagagacatgttttggaccgaagcctccgaaaggctattttagcttttgaatgttccccatctcctccaaggctgcagtacaaagatgatgcccttattcaggagcggttggagtacgaaaccactttataaagcaaaaggagttgcaggacccacaacatccagatgaaggggtgacagcagggctgtggccataatgacacttcatcctagagcagggcagtgagccgtgaagttcctagtgggaccgtcatcaccattatcatttgatcctgtcggctgggggcggctggtctccttccaaagcagctgcacccgagagtctctgactccacctgaaagaatgacgctggcttaataggactctccattgctaccaaactcctcctgcacggtcttgggtgcacccaccagagggtactactattatggaaaaattttgcctccaatcattagggtgtcttgatggcgttaactgatctttccataaaaatagattcagtcatacacacatacacacactaacacacataagttacaccagtcctctgtcaaaaaagcttaggtgacttttcttgatgcaaagctctgattcccacaggaatataaaaacaaagaaagagggaaacatccctcgagaaaaaaaatagtattgcttagaaaagaaaccattttctcatttggaaatccataccatgtgtgaaaatcctatccaacggacagcaaacccaaatgttgtctacacatgtgttagcattgatggagtggttcattttctacacatttcaggatttgttttatattttaaattttcagttgcgaacatcctttttgacagaaatcctatgcagcccatgtacggctttcaacaagaccaaggagctcaataacttcatgatgtaaattaaatagtaatcatgattcagtattcaattgcaaaaatgtaacaggtacacaaagaggaagtggggaaaaaggcaaaatgagagtctgattcccaggcatgtgcagcgcccattgggacataacggcagtgcggcgcgagccagaggaatgggctggaaccggatctgtttccagacgcagaatgagtggctctgtgtgaccataggcagatgctgactctggaagactccgtgccactcctttctagtgccaaacaccatccaaccacaggactgacgtggaagccccaaacaactgagaatgagtggcatgagccccctaaaagcaggcgagagaacgagcaatcaagttctccactgtgtacagacttttcctccccccaatccaaggtcaaagtgatgtgtcttttagaggctttgggacactttttagtaagtatgagcagacaaatgcaatgaatatgctatgaaaaaacccttctgaactgagagagggcttatcactatatccagctaagatttgtatttgaatcatctgtaaagtcgcactcttacaacaagcttctgggttttaaatacctccgtacagcaagtaaacgttccccgctttctgttctcagtgtcctcggtcatggtgcttttcgttgcattaaaagtgccggtcaaactttgatagtatttttttatagttggtgcagagtggaataactcatggattatttcaatatttttgtaataaaaaatatagggtatacacataggcatcatcacattttttatagacctggaatcgtttaaaatactttaagcatcataattacttgggatgtcagaaactggtccacaaattccatcagcctgcctcagcagattgaaaacatttgtctcttgcaagatcaccctactttgcaagttggtgcccccaggaacctggccaggggtgctatcagaatatcaggtgaagagagaatcagcttaaatagaaagggcttgtcaagactggccaatgtttcccaggaaatcaaagatgtaaatgattactttcatccatccattataacaaacctgaccacagtggaagctgtcttaaacttccttccctggttttatattaacccaactgatagattaagtattagtcaaaccact

SEQ ID NO: 200445 - DNA, 4893 bp, Homo sapiens
  Payload ID: 19547
  Gene Name: XK, Kell blood group complex subunit-related family, member 5
  ENST ID: ENST00000618742
  CDS Start-End: 152-2212
tggccactacgaataaaccagacatacaattcgcgcctaacggcttagccagaaatgccacccgcagtcgggccccgggccggaaacctccccgacgcggggccgcgtgcaggggaaggggcgggcgcaggctgcggggtcggcacggaagatgcacgcgaggctcctggggctctcggccctgctgcaggcggccgagcagagcgcgcgcctttacaccgtggcttactacttcaccacaggacggcttctgtgggggtggctggcccttgctgtcctcctgcccgggttcttggtccaggccctgagctacctgtggttccgagcagacgggcatccagggcattgctccttgatgatgctgcacctcctacagcttggtgtttggaagcggcactgggacgctgcactgaccagtctgcagaaggaactggaggctccccaccgaggctggctgcagctgcaggaggccgacctgtcggcccttcgactcttggaggccctgctgcagactgggccccacctgctgcttcagacatatgtttttctagcctcagacttcacagatattgtgccaggggtgagcaccctgttttcctggtcctcactctcctgggcactggtgtcctacactcgcttcatgggcttcatgaagccaggccacctggccatgccatgggccgccctcttctgccagcagctctggaggatgggcatgttgggaacccgcgtgctgagtctggttctgttctacaaagcctaccacttttgggtttttgtggttgcaggtgcccactggctggtgatgacattctggcttgtcgcccagcagagtgacatcatcgacagcacctgccactggaggctgttcaacctgctcgtgggggccgtgtacatcctctgctacctcagcttctgggacagcccttctagaaataggatggtcacgttctacatggtcatgctgttggagaacatcatcctgttgctgttggccaccgactttctccagggggcatcgtggaccagcctgcagaccatagctggggtcctgtctggatttctgattggcagtgtctcactggtaatttattacagcctgctgcatccaaaatccacagacatctggcagggctgcctaaggaagtcctgtggcattgcaggaggtgataaaacagagagaagagattctccccgggccacagatctagctgggaagagaaccgagagctcaggctcatgccaaggggcaagttatgaaccaaccattttagggaagccccctacccctgagcaggtccccccagaggctgggctggggacccaggttgctgtggaggactctttcctcagtcatcaccactggctgtgggtgaaacttgccctaaaaacaggaaatgtgtctaagatcaatgccgcctttggagataacagtcctgcctattgtccacctgcatgggggttgagtcaacaggactacctgcagagaaaggccttgtctgcccagcaagagctcccatcctcatcccgtgacccctcaaccttagagaacagctctgcgtttgaaggtgtccctaaagcagaggccgacccattggaaacctcaagttacgtatcttttgccagcgatcagcaggatgaagcacctacccagaacccagcagccacgcagggggagggcaccccaaaggaaggagctgacgctgtttctgggacacaggggaaggggacaggtgggcagcagagaggaggggaaggacagcagagttccacgttgtacttcagcgccactgcagaagtggccacatcctcacaacaagaaggcagcccagctactctgcaaacggcccactctggaaggaggctgggaaagagcagccctgcccagcctgcatcgccccacccagtgggcttggcgcccttccccgacaccatggccgacattagccccatcctaggcacaggcccatgtagaggcttctgccccagtgcaggcttccctggaagaaccctcagtatctcagagctagaggagccgctggagcccaaaagggagctaagtcaccatgcagctgttggtgtgtgggtgtcattgccacagctgaggactgcccatgagccctgcctcacgtccacccctaagtctgagtctatccaaacggactgcagctgcagggaacagatgaagcaagagccgagttttttcatctgaccacagtcatggtgggataagacaacaggctgacaaaccaagctggccatttggtaccgtgagaaaggaaatcccacttctgacacctgtgtccttgggcacatcactgtcacctctgaatctccatctgcatccctgaaaaatgaagaaacagggctggatgattttgcaggtccaatgcaaacatcacagaccccacccatgcataggagagactctaacatactttagaggaggagaaagagattccagtcaaaattgtctgctaccttttatgagctgtaggttcccttattttatctttttgctgtggcttctaggaaacacaaaggtaaaacccagattcctattttatttgaggttcttgttacaattagctttgcctcacatttagcggttatgaatctcattttaatatattctaactgtattatgttatgaaatctcttggtaagataatttgcatgctttctgggagtaggtaaggcctgtgtgcttgtaataactaacataactgaaagtgcaaatgtcattctaagattcccatatcttttggttaggggacaatattagagcttttaaaaaggaagggtagactcacttagctcagcctcacccatgctaagggcacatgcacacattttctgcaattcactctcagaccatcagcatcctcctggccagctgcataaatgtatttttctgtgaaatgtgctgctcccctttgtgcaggctggccagccaagagttcccttccagctcccactgctgctttccaccccatctcctttatgtccaagctttgttcccacttccattcaatgtgagacactatccatgatttaagcccatccaaaaagaagggaggaaacgtccattcctctcgcactctccttctctctgactcctccactctaaagtgttctttgtggctaggtatttccataatttctttaagccttcctttgtagctgattaaggaagtctagtcataaactatcaaagagaaaggcacacagagagctggatgctatttagggatgggtatttttgttttgttttgtttcatttcatttgtttatttgttgagacagggcctctctgtcacccaggctggagtgcagtggcatgatcatggctcactgcagcctcaacctccagggcttaagcaatcctctcacctcagcctctcgagtagctgggactactggcaggtgggcaccatgcctggctacttttttgtattttttgtagagacaggttcttgccaggtggctcaggctggtctccaactcctgagctcaagcgatctgcccatctcggcctcccaaagtgctgggattacaggcgtgagccaccgtgcccagccagaatgggtagtttttattctctccaaacacttttggattagggtacaatattagagctctaaaaaggaatagtagaataacttagctcagcctgacacatactaagggcacctgcagacactttctgcaataagctctcagaccatcagcatcctcctggccagccacataagccaatcggggatgcagacaagtggctacaaactttccatacaacaggtgaagataacgagactttgggtcggatgcaggggctcacaccggtaatcccagcactttgagaggctgaggcgggaagatcacttgaggccagaagttcgagaccagcctgggcaatgtagtgagaccccatcactactaaaaatacataaattatcctggtgtggtggcacacacctgtagtcccagctgctcgagaggctgaggcacgagaatcagttgaactgggaggcagaggttgcagtgagctgagatcgtaccatggcactccagcctgggcgacagagcaagactctatctaaaaaaaaagcttgttaatagaacaaaatcattcatagttccattcactgtgctatcccagcatctcagtccttcctccatgcagtctctcgcccagccaggtgagagcatgagcacttccctgagtcctcaccagccctccccatttgtcctccaagactccactcaaacatctcctcttggtgccttcctgggccctccccagctccagctctcccagacctaccctctgtccccaggttgtattccactgccctttgccctctggtgacctcttcctaaacttgaagccctgcctccctgaaggctaattaagggttgcagtcctccttctgggctaactccaaggtccagcagagtgtccagcaaaagtaggcgttagagcattcaacagcatgaattcactaacgagcggggctgtgggcatgaatttcagcttgagtgcatatcctggatcaacggcatttgtgttatggggtaaaagtaagggtgggatatggggaatttgctcattcttttcaaactttctagcccttgaatagcctggaaagctagaaatactcttcattcattcattcatttaaggaatattagttgagtatgacaggcactgagtatgcagaaatcaaggcatgtacttgctgttcgaggccctgtggaccaacatcggcttctcagatggcttcctcacttcatgcctccagaaagcatattgcccggtgatgaaaaggatcagaaaatatacactatatttattagagaagactaataaatggacacttaattcaaaaa

SEQ ID NO: 200446 - DNA, 4885 bp, Homo sapiens
  Payload ID: 19547
  Gene Name: XK, Kell blood group complex subunit-related family, member 5
  ENST ID: ENST00000618990
  CDS Start-End: 6-266
ggaagatgcacgcgaggctcctggggctctcggccctgctgcaggcggccgagcagagcgcgcgcctttacaccgtggcttactacttcaccacaggacggcttctgtgggggtggctggcccttgctgtcctcctgcccgggttcttggtccaggccctgagctacctgtggttccgagcagacgggcatccagggcattgctccttgatgatgctgcacctcctacagcttggtgtttggaagcgcccacaaatccacttgtaaatgcagcatgagatgacagaagaaggcctatctcatccttagcatgcaccttggtttagcaatttttctttagtgaaagttcaaggttgtcaaaaggaaagttaaggtaaactctaaaggcactgggacgctgcactgaccagtctgcagaaggaactggaggctccccaccgaggctggctgcagctgcaggaggccgacctgtcggcccttcgactcttggaggccctgctgcagactgggccccacctgctgcttcagacatatgtttttctagcctcagacttcacagatattgtgccaggggtgagcaccctgttttcctggtcctcactctcctgggcactggtgtcctacactcgcttcatgggcttcatgaagccaggccacctggccatgccatgggccgccctcttctgccagcagctctggaggatgggcatgttgggaacccgcgtgctgagtctggttctgttctacaaagcctaccacttttgggtttttgtggttgcaggtgcccactggctggtgatgacattctggcttgtcgcccagcagagtgacatcatcgacagcacctgccactggaggctgttcaacctgctcgtgggggccgtgtacatcctctgctacctcagcttctgggacagcccttctagaaataggatggtcacgttctacatggtcatgctgttggagaacatcatcctgttgctgttggccaccgactttctccagggggcatcgtggaccagcctgcagaccatagctggggtcctgtctggatttctgattggcagtgtctcactggtaatttattacagcctgctgcatccaaaatccacagacatctggcagggctgcctaaggaagtcctgtggcattgcaggaggtgataaaacagagagaagagattctccccgggccacagatctagctgggaagagaaccgagagctcaggctcatgccaaggggcaagttatgaaccaaccattttagggaagccccctacccctgagcaggtccccccagaggctgggctggggacccaggttgctgtggaggactctttcctcagtcatcaccactggctgtgggtgaaacttgccctaaaaacaggaaatgtgtctaagatcaatgccgcctttggagataacagtcctgcctattgtccacctgcatgggggttgagtcaacaggactacctgcagagaaaggccttgtctgcccagcaagagctcccatcctcatcccgtgacccctcaaccttagagaacagctctgcgtttgaaggtgtccctaaagcagaggccgacccattggaaacctcaagttacgtatcttttgccagcgatcagcaggatgaagcacctacccagaacccagcagccacgcagggggagggcaccccaaaggaaggagctgacgctgtttctgggacacaggggaaggggacaggtgggcagcagagaggaggggaaggacagcagagttccacgttgtacttcagcgccactgcagaagtggccacatcctcacaacaagaaggcagcccagctactctgcaaacggcccactctggaaggaggctgggaaagagcagccctgcccagcctgcatcgccccacccagtgggcttggcgcccttccccgacaccatggccgacattagccccatcctaggcacaggcccatgtagaggcttctgccccagtgcaggcttccctggaagaaccctcagtatctcagagctagaggagccgctggagcccaaaagggagctaagtcaccatgcagctgttggtgtgtgggtgtcattgccacagctgaggactgcccatgagccctgcctcacgtccacccctaagtctgagtctatccaaacggactgcagctgcagggaacagatgaagcaagagccgagttttttcatctgaccacagtcatggtgggataagacaacaggctgacaaaccaagctggccatttggtaccgtgagaaaggaaatcccacttctgacacctgtgtccttgggcacatcactgtcacctctgaatctccatctgcatccctgaaaaatgaagaaacagggctggatgattttgcaggtccaatgcaaacatcacagaccccacccatgcataggagagactctaacatactttagaggaggagaaagagattccagtcaaaattgtctgctaccttttatgagctgtaggttcccttattttatctttttgctgtggcttctaggaaacacaaaggtaaaacccagattcctattttatttgaggttcttgttacaattagctttgcctcacatttagcggttatgaatctcattttaatatattctaactgtattatgttatgaaatctcttggtaagataatttgcatgctttctgggagtaggtaaggcctgtgtgcttgtaataactaacataactgaaagtgcaaatgtcattctaagattcccatatcttttggttaggggacaatattagagcttttaaaaaggaagggtagactcacttagctcagcctcacccatgctaagggcacatgcacacattttctgcaattcactctcagaccatcagcatcctcctggccagctgcataaatgtatttttctgtgaaatgtgctgctcccctttgtgcaggctggccagccaagagttcccttccagctcccactgctgctttccaccccatctcctttatgtccaagctttgttcccacttccattcaatgtgagacactatccatgatttaagcccatccaaaaagaagggaggaaacgtccattcctctcgcactctccttctctctgactcctccactctaaagtgttctttgtggctaggtatttccataatttctttaagccttcctttgtagctgattaaggaagtctagtcataaactatcaaagagaaaggcacacagagagctggatgctatttagggatgggtatttttgttttgttttgtttcatttcatttgtttatttgttgagacagggcctctctgtcacccaggctggagtgcagtggcatgatcatggctcactgcagcctcaacctccagggcttaagcaatcctctcacctcagcctctcgagtagctgggactactggcaggtgggcaccatgcctggctacttttttgtattttttgtagagacaggttcttgccaggtggctcaggctggtctccaactcctgagctcaagcgatctgcccatctcggcctcccaaagtgctgggattacaggcgtgagccaccgtgcccagccagaatgggtagtttttattctctccaaacacttttggattagggtacaatattagagctctaaaaaggaatagtagaataacttagctcagcctgacacatactaagggcacctgcagacactttctgcaataagctctcagaccatcagcatcctcctggccagccacataagccaatcggggatgcagacaagtggctacaaactttccatacaacaggtgaagataacgagactttgggtcggatgcaggggctcacaccggtaatcccagcactttgagaggctgaggcgggaagatcacttgaggccagaagttcgagaccagcctgggcaatgtagtgagaccccatcactactaaaaatacataaattatcctggtgtggtggcacacacctgtagtcccagctgctcgagaggctgaggcacgagaatcagttgaactgggaggcagaggttgcagtgagctgagatcgtaccatggcactccagcctgggcgacagagcaagactctatctaaaaaaaaagcttgttaatagaacaaaatcattcatagttccattcactgtgctatcccagcatctcagtccttcctccatgcagtctctcgcccagccaggtgagagcatgagcacttccctgagtcctcaccagccctccccatttgtcctccaagactccactcaaacatctcctcttggtgccttcctgggccctccccagctccagctctcccagacctaccctctgtccccaggttgtattccactgccctttgccctctggtgacctcttcctaaacttgaagccctgcctccctgaaggctaattaagggttgcagtcctccttctgggctaactccaaggtccagcagagtgtccagcaaaagtaggcgttagagcattcaacagcatgaattcactaacgagcggggctgtgggcatgaatttcagcttgagtgcatatcctggatcaacggcatttgtgttatggggtaaaagtaagggtgggatatggggaatttgctcattcttttcaaactttctagcccttgaatagcctggaaagctagaaatactcttcattcattcattcatttaaggaatattagttgagtatgacaggcactgagtatgcagaaatcaaggcatgtacttgctgttcgaggccctgtggaccaacatcggcttctcagatggcttcctcacttcatgcctccagaaagcatattgcccggtgatgaaaaggatcagaaaatatacactatatttattagagaagactaataaatggacacttaattcaaaaa

SEQ ID NO: 200447 - DNA, 1550 bp, Homo sapiens
  Payload ID: 19548
  Gene Name: XK, Kell blood group complex subunit-related family, member 6
  ENST ID: ENST00000297303
  CDS Start-End: 1-864
atggcggcgaaatccgatggcggtggcgtgggggtgggcttcgctcagctgcacaacctggacgaggcggtgggcagcggcggcgaggaggacggggagcccgggggaggcggctgcggcggcggcggcgacggcagcgagcccggcgagagcagctcgatgcacatctgccactgctgcaacacctcctcgtgctactggggctgccgctccgcctgcctgcgctccctcctgggcaggaagccgcgccgcagcgccgccgccgacgggggggaccagccgctgcagcctcccgcggcccccggcgccggccgccaacccccgacgccctcggccgcgcggccggagccgccgccgccgcaggtggagcggccgtggctcgactgcctgtggatcgtgctggcgctgctggtgttcttcggggacgtgggcaccgacctgtggctggccctcgactactaccgcaagggggactacgtctacttcgggctgaccctcttcttcgtgctggtgccgtcgctgctggtgcagagcctgagcttccgctggttcgtgcaggactacacgggcggcgggctgggcgccgtggaggggctcaccagccggggcccccccatgatgggggccggctacgtccacggcgcggcccgcggtggcccaggcgtgagggtctcccccacgccgggggcgcagcgcctgtgtcgcctctccgtgtggatctggcagtcggtcatccacctgctgcagatggggcaggtgtggagtgggcaagaccctttggtaccatcaaggaaaagaaggagcagatttaaccacatgaagttgcctcacctggtttcttcccttctccctcctcccatctgaaaaatccagaaatacttgcttagctgtgagggtaagtgggttaaattgagacagagatacttcctccaggagaatgaataagaagagaacatctctaaagatttatttcttgtttttgagtgaacagtaaccctaaaaacttgacatttatggtaaattttcaagggaaggggatgaaaaaatggcatgctttggagcgaaattgcaactggggatgcagcatagtatttccagaaggatccagaaacaaagtgtcaaaatctgtattgtaagaaggctggtgctcctgaaatctagcaggcaggtgcttactagaagtcacaagttgttcatttctgtcttcaacatcatttgatactatagacttattcataaggtcaattgcctagtcaggcttatgcagtgcagtggatagattctgtaatgttggaaagattctgtgggatggaaagattctgtgggatgcaaaaagaaactgtgtctctgatgttgccattttcaccccaggatgatttgctttacaacgtgctgtctgcaaataagtttgtggttaaaattttagtttactccccatgatgtgctattcatctagtttcttctcatcaggaattctggatttcttatttgcctcttaaaaagtaaaacttttaaaaaatttatgaaaatataacctcatttaacaagtt

SEQ ID NO: 200448 - DNA, 3163 bp, Homo sapiens
  Payload ID: 19548
  Gene Name: XK, Kell blood group complex subunit-related family, member 6
  ENST ID: ENST00000382461
  CDS Start-End: 1-1256
gtctttttctcctgccttctcctggagatgaagagaactgcaaacactgtgtactgctgcacgcgggcctcccccaggccaacagaactgctgggtatatccgcaccatgtacctggggattcagagccagcggcggaaggaacaccagcgacgcttctactgggctatgatgtatgaatatgcagacgtcaacatgctgcgcctcctggagaccttcctggagagcgcgccccaactggtgctacagctctacatcatgctccagaagaacagcgccgagaccctgccctgtgtctcctctgtgacttccctgatgtccctggcttgggtgctagcctcctatcacaagctgctgcgggactccagggacgacaagaagagcatgagctacagaggggccatcatccaggtcttctggcgcctcttcaccatctcatcccgagtgatctcttttgccctctttgcttccatcttccagctctattttgggatcttcgtggtggttcactggtgcgccatggccttctggatcatccatggcggaacagacttctgcatgtccaagtgggaggagatcctcttcaacatggtggtagggatcgtgtacattttctgctggtttaacgtcaaggaagggcggactcgatatcgaatgtttgcatattatacgatagtcttgaccgagaatgctgccttgacgttcctttggtatttttacagagacccggagaccactgactcctatgcggtgccagcactgtgttgtgtctttattagctttgtggctgggatcgcaatgatgctcttatactatggcgtgctgcatcccacaggaccacgagctaagatccttgccagctcctgttgtgccgagctgctctggggcatccctttgccccccgatgttgagcccatggcgcctgagatccctgggtaccgggggacccaggttacgcccaccagagccgtaacggaacaacaggaggatctcacggctgacacttgcttgcctgttttccaagtgagacccatggggccccctaccccgttggggcgtccttacctcccagaagggcccctcattaagattgacatgccaagaaagcgatacccagcttgggatgctcattttgtagacaggaggctgagaaggactattaacattctacaatatgtcacccccaccgcagtaggcattcgatatcgagacggaccactcctctatgagttgctacagtatgagtcttcactctaagagcatcttgaccaagttgagaaggggaccttaagtttggtttgcggcaaacagcacttgcaagaaatataaccctcccttcccccaatacacagaaccaccgccaccaccaccaacaccgccacaccaacaccaccactacaaaaaaaaaagaattaataagtcacaaccccttcaaataagctttctttccagtcgctgtatgtatacaaagatattctctatgttttgtaagtaaaaacaaaaagaaaacctttcttttgttttttacacataagaaacagtattgaaaaatcccacgctatggttcatagggtggagaaggaggagttatctccactccaaaagaaaaaaaaaaagttttttaccttacaccaagtgtagatcatttatgggattggtgctgattgaaagaacaaaacaaaacaaaacaaacacaaacaaacaaaaaaccttcaactgccttatgcccttaggtgctgagtttcattaagtactgtcacgttttctcatgcaaaactctctggtgatttttgcaccagaagagggaaaattaaacaattaaatgaaacaaatctaaaagtgaaacaaaaaccaaccaacaaatacaacacaaagcaattattcttcctatctgattatttgtattgaagaaaacaaatttaccaaaagcaaaagcataaacccctccctcttttcagtttctccccctcctctcctgaccttctccccactttgcagagccttctaggagctcaagggctgtttgaaactcaaatggctggagaagctacttgaaggctgattatgtgccattttagcatttgcctagcaagaatcacattcgtttcccagtgaaaagcaaaccagaacaaaacaaaaagccaccgcaataattcggtaaggacaggatattctaaagcaaattaaaggagatttctgtacacatagtcagtaataataaaactcagcatagtagcaaaaagaacgacatcagtttaaaggcacaatacttaatcagtgactggcaacaacgattagttccatcattttaaggctgtgaatggtagacatttatcacatgtgatattgtgtaaagcctcttctgtttccatttggtgggaagccttaaattgatctggaaagaattcttcatttttcatttgtgcttttttaaaaaaaaaaataacacaaagaggaaaactagaatatatatatatatatacatatatataaaaagtcaaaattgtaataactgacccatttcaaagactgtttggtgcttctgtctttcaccattgtggttggctgaaaatcattcagctcacctggtgcatctgggttgaatgggaaattttgtgtgtgtagtatgtgtgtgtttgtgtgtgtatgtgtgtgtgtgcccatagcacacgtatatatgtgtgtgtccctgctgcaaagtcttgccagagatatacaaaactgatgtaagacgaacttggatcacggcttggttcagcagagcatgggggcgggggctctggagtggtggggaagtgatgctgcctgcccacgagccctggtttgggtggcaagactcacaccagcagcggactgcaggccttagaggccatgccatttgggtgaggatttgattccactgtttattttctcattgtatcaagttgaatttctgcaggtgttgcaagtatgttcaacgatttaaatttttttttatttttcaaagtattgttcctttaaagaatatttctgttctagggcatcgtttcaatcgcatcgtatctctacttgggcacaaaaaaaaaggaaaagaaaaaaaatcacaaaaaagatatataataagtatatatatatatatatatataaacacacacaatatttttaagtaaatactgttagtcttt

SEQ ID NO: 200449 - DNA, 3382 bp, Homo sapiens
  Payload ID: 19548
  Gene Name: XK, Kell blood group complex subunit-related family, member 6
  Uniprot ID: Q5GH73
  ENST ID: ENST00000416569
  CDS Start-End: 28-1953
acctccggagctgggaagagagtcaagatggcggcgaaatccgatggcggtggcgtgggggtgggcttcgctcagctgcacaacctggacgaggcggtgggcagcggcggcgaggaggacggggagcccgggggaggcggctgcggcggcggcggcgacggcagcgagcccggcgagagcagctcgatgcacatctgccactgctgcaacacctcctcgtgctactggggctgccgctccgcctgcctgcgctccctcctgggcaggaagccgcgccgcagcgccgccgccgacgggggggaccagccgctgcagcctcccgcggcccccggcgccggccgccaacccccgacgccctcggccgcgcggccggagccgccgccgccgcaggtggagcggccgtggctcgactgcctgtggatcgtgctggcgctgctggtgttcttcggggacgtgggcaccgacctgtggctggccctcgactactaccgcaagggggactacgtctacttcgggctgaccctcttcttcgtgctggtgccgtcgctgctggtgcagagcctgagcttccgctggttcgtgcaggactacacgggcggcgggctgggcgccgtggaggggctcaccagccggggcccccccatgatgggggccggctacgtccacggcgcggcccgcggtggcccaggcgtgagggtctcccccacgccgggggcgcagcgcctgtgtcgcctctccgtgtggatctggcagtcggtcatccacctgctgcagatggggcaggtgtggaggtatatccgcaccatgtacctggggattcagagccagcggcggaaggaacaccagcgacgcttctactgggctatgatgtatgaatatgcagacgtcaacatgctgcgcctcctggagaccttcctggagagcgcgccccaactggtgctacagctctacatcatgctccagaagaacagcgccgagaccctgccctgtgtctcctctgtgacttccctgatgtccctggcttgggtgctagcctcctatcacaagctgctgcgggactccagggacgacaagaagagcatgagctacagaggggccatcatccaggtcttctggcgcctcttcaccatctcatcccgagtgatctcttttgccctctttgcttccatcttccagctctattttgggatcttcgtggtggttcactggtgcgccatggccttctggatcatccatggcggaacagacttctgcatgtccaagtgggaggagatcctcttcaacatggtggtagggatcgtgtacattttctgctggtttaacgtcaaggaagggcggactcgatatcgaatgtttgcatattatacgatagtcttgaccgagaatgctgccttgacgttcctttggtatttttacagagacccggagaccactgactcctatgcggtgccagcactgtgttgtgtctttattagctttgtggctgggatcgcaatgatgctcttatactatggcgtgctgcatcccacaggaccacgagctaagatccttgccagctcctgttgtgccgagctgctctggggcatccctttgccccccgatgttgagcccatggcgcctgagatccctgggtaccgggggacccaggttacgcccaccagagccgtaacggaacaacaggaggatctcacggctgacacttgcttgcctgttttccaagtgagacccatggggccccctaccccgttggggcgtccttacctcccagaagggcccctcattaagattgacatgccaagaaagcgatacccagcttgggatgctcattttgtagacaggaggctgagaaggactattaacattctacaatatgtcacccccaccgcagtaggcattcgatatcgagacggaccactcctctatgagttgctacagtatgagtcttcactctaagagcatcttgaccaagttgagaaggggaccttaagtttggtttgcggcaaacagcacttgcaagaaatataaccctcccttcccccaatacacagaaccaccgccaccaccaccaacaccgccacaccaacaccaccactacaaaaaaaaaagaattaataagtcacaaccccttcaaataagctttctttccagtcgctgtatgtatacaaagatattctctatgttttgtaagtaaaaacaaaaagaaaacctttcttttgttttttacacataagaaacagtattgaaaaatcccacgctatggttcatagggtggagaaggaggagttatctccactccaaaagaaaaaaaaaaagttttttaccttacaccaagtgtagatcatttatgggattggtgctgattgaaagaacaaaacaaaacaaaacaaacacaaacaaacaaaaaaccttcaactgccttatgcccttaggtgctgagtttcattaagtactgtcacgttttctcatgcaaaactctctggtgatttttgcaccagaagagggaaaattaaacaattaaatgaaacaaatctaaaagtgaaacaaaaaccaaccaacaaatacaacacaaagcaattattcttcctatctgattatttgtattgaagaaaacaaatttaccaaaagcaaaagcataaacccctccctcttttcagtttctccccctcctctcctgaccttctccccactttgcagagccttctaggagctcaagggctgtttgaaactcaaatggctggagaagctacttgaaggctgattatgtgccattttagcatttgcctagcaagaatcacattcgtttcccagtgaaaagcaaaccagaacaaaacaaaaagccaccgcaataattcggtaaggacaggatattctaaagcaaattaaaggagatttctgtacacatagtcagtaataataaaactcagcatagtagcaaaaagaacgacatcagtttaaaggcacaatacttaatcagtgactggcaacaacgattagttccatcattttaaggctgtgaatggtagacatttatcacatgtgatattgtgtaaagcctcttctgtttccatttggtgggaagccttaaattgatctggaaagaattcttcatttttcatttgtgcttttttaaaaaaaaaaataacacaaagaggaaaactagaatatatatatatatatacatatatataaaaagtcaaaattgtaataactgacccatttcaaagactgtttggtgcttctgtctttcaccattgtggttggctgaaaatcattcagctcacctggtgcatctgggttgaatgggaaattttgtgtgtgtagtatgtgtgtgtttgtgtgtgtatgtgtgtgtgtgcccatagcacacgtatatatgtgtgtg

SEQ ID NO: 200450 - DNA, 728 bp, Homo sapiens
  Payload ID: 19548
  Gene Name: XK, Kell blood group complex subunit-related family, member 6
  ENST ID: ENST00000529336
  CDS Start-End: 1-278
tgctggtgccgtcgctgctggtgcagagcctgagcttccgctggttcgtgcaggactacacgggcggcgggctgggcgccgtggaggggctcaccagccggggcccccccatgatgggggccggctacgtccacggcgcggcccgcggtggcccaggcgtgagggtctcccccacgccgggggcgcagcgcctgtgtcgcctctccgtgtggatctggcagtcggtcatccacctgctgcagatggggcaggtgtggagctctaagcgaaagacatgaggcctcagcctgaaatgaggttgttttgaggtcatctgatttctgactagaaggtgagcgatcgcctcgtcctgaaaccacttcagcccgcatggtaaatggcaaagccagcgagagggaggccttcatgtgtttccgtgtctgtgctgccccagttccttcctcttcaagattaaaaacattttaaagttgtaaaccaaaggtttgcaattttttttggtgatggcatgttcagaatcttggatccctaagttcaatatattggacatatttaggaactctggaaattatgttgttttcacatatctagtaacttactagatgaatcagtagatttcattaaagtatatctaataacagataattatgatgtacttctgggttgacatgcatgtctctcattatcagctatcagtattagtgtcatgctttggagacagttatcttttg

SEQ ID NO: 200451 - DNA, 7844 bp, Homo sapiens
  Payload ID: 19549
  Gene Name: XK, Kell blood group complex subunit-related family, member 7
  Uniprot ID: Q5GH72
  ENST ID: ENST00000562532
  CDS Start-End: 175-1914
agctcaggcgggtgggggcggggcggggcggcgccgaggagaatgaataattgaagtggaggggaggaggaagaagaggagaaggaggaagaggagccgcccgcgcagggtcctccccacgccgcacccccctccgccgcccggaagtcgctccccgcctccctctccgccaacatggccgcgaagtcggatggagcggcggcctcggccagcccggacccggagggggctgccggtggagcccggggcagtgccggcgggcgcggggaggcggcggcggcggccgggcccccgggggtcgtcggggcgggcggcccggggccgcgctacgagctgcgggactgctgctgggtgctgtgcgcgctgctcgtgttcttctccgacggtgccacggacctgtggctggcggcctcctactacctgcagaatcaacacacctacttcagcctcaccttgctgttcgtgctcctgccctcgctggtcgtgcagttactgagcttccgctggttcgtctacgactactcggagcccgcagggtccccgggacccgccgtcagcaccaaggacagcgtagccggcggagccgccatcagcaccaaggacagcgccggcgccttccggaccaaagaaggcagccccgagccgggtccccagcctgcgccctcctcggccagcgcctaccgccgccgctgctgccgcctctgcatctggctgctgcagaccctcgtccacctcctgcagctcggccaggtctggaggtacctgcgcgccctgtacctggggctgcagagccgctggcgcggggagcggctgcggcgccacttctactggcagatgctgttcgagagcgccgacgtgagcatgctgcgcttgctggagaccttcctgcgcagcgcgccgcagctagtgctgcagctcagcctgctggtgcaccgcggtggcgcgcccgacctgctgccggccctctccacctccgcctccctcgtgtctctggcctggacgctggcctcctaccagaaggtgctgcgggactcgcgggacgacaagcggccgctgtcctacaagggcgccgtggcacaggtgctgtggcacctgttcagcattgccgcccgcggcctggccttcgcgctcttcgccagcgtctacaagctctattttggcatcttcatcgtggcccactggtgcgtcatgaccttctgggtcatccaaggggagacggacttctgcatgtccaagtgggaggagatcatctacaacatggtcgtgggcatcatctacatcttctgctggttcaacgtcaaggagggccgcagccgccgccgcatgaccctctaccactgcatcgtcctgctggagaacgccgcgctcaccggcttctggtactccagccgcaacttctcaaccgacttctactcgctcatcatggtctgcgtagtggcctccagctttgcgctgggcatattcttcatgtgtgtctactactgtctcctgcaccccaatgggcccatgctgggtccccaggcacctggttgcatcttccgtaaggcctcagagccctgtggcccacccgctgacgccatcacgagtccccccaggtccctgccaaggactacaggtgctgagcgggatggggcctcggcgggagagcgtgcagggacccccaccccacctgtcttccaggtgcggcctggcttgcctcccacaccagtggcccgcaccttgcggacagaggggcctgtcatccggattgacttgcctcgcaagaagtacccggcctgggatgctcattttattgaccgccggctccggaagaccatcctggcactggagtactcctcacctgccacgccccggttgcagtaccggagtgtggggacttcccaggagctgctggagtatgagaccacagtgtaggctacagtgtcccagcacaaaagggacaggcttggctgatcccacatccgccgcagtgttgtgccccgaatttcagggccaccaggctaagggggagtggatctgttggtccaagggtagagtggccccactcttgggttctttcaggggagggggcagccttgcggaggccccagccctgggccccgttttcagccttgtggcccattccctaaattcccctgacccagggcctggggaatcatctggtgctacacttttcgagctgccctgctttcatggggcctccacacctctcccctgcctggcgttgcccatgtgttgcccctgctggacttgccagagaaagggcactgtctggggtccatgacctagaccctgtgctcctcaggggttgtggagagtgggctgcctctatggtgggaaaagatctctgagaaggatggaggtggccgtggaagggatggggtgaggttggagcattgtgtggacagggatggcgtggctcctgtagcatctgaggcctggagccagggcaagagggagctgaagaagggagttggggtggggcagggtgttggggtggggggctggcagtgctggagatggataggagaaagaactggggggggggtctaggctggcagaagcatggaggggtggaagacttgggggaggggaacctgcaatccagagcatagcgaacaagaatgaactccttaggagacgtctcttgttgtgttgtgggctctgtgaaggatgaagttccacacacctcaggtgaaatgtttgaaggagccattttttgttctagatgtgcacctggaacgtggcttctagatacaggtcttcaacacagcagataagatgtctggaaagatctctgggctcaagtgcaggtgaggttttagcacagttatcagaggaactgatccagaagcaggcttagttctagattgagttctagagtgctaggctgataaaatgtcccagggagccactctgatctgtgtattctgttgtgaggaggaggacactggaggcctgctgctctgctgtgggggattctagcacctgtcacagtggtgggggagaagaggttctagagcccagcgtgaatggaattttctaggaatgggtgctctcattctagacttctggggctcatgggagctctaggcccctgttaccttggtccatagccatctttctaaaaggaaattgtcctcagaacccctgagacatttcagctgccaactggttcccagctggaaaaaaaaatagctctggggacgtgacatgaatcctggctctcagccactctgcaaatggggctccctggagcggcatctgggaaactgacttgttttgccttagatctgatgactccccaggacctgtggtctattcccatggcctgaacatcctggagtgcccaggggactcacccagggcccctcctcccacctaggacagccagtgctggattgagggggcgtatgggagaggggaagtaggcagttccatggggtgaggagacagagcctctagcagagctgggaacccaacccaccccccacccccccacacacacactcccacagcaacttaggtgtgattggtgggagaggacagcagcggatgttaaggacagatgccaacctgatcctggagtgaggtgggccatgagaatcctagactatgcaaattagagggatgcttagccctccctggttcagcctctcttgggttacagatgggaaactgaggcccagagtggcagccactctctcaaggtcccagactctgggctgcccatcaaaaggtgatgggtaatgatgaattgctggggatgcagggtaaccccaaaggcagggagggccagactgcccacatacacacaagcacaagcacaaccatgatacgggtcaccctccccaccagcacacaggccgagatggtgtacgcatcatccctcctgccaacacagcaagagtgcttttccttctttctgctgctaagcaccctcaggaacgaggcctcgagggtgacgggaggtgggagaagcccaaggctgacccaggcccactctgttgggttcatccatcctccaaatccatctttggaggctgaattcacacacaaagccgttgtgagatgggagctctgaagatgcggacccagacccagaaacagactgtttctccagggccaactttgtgccaggaattttcaccccatgtcgtttcacttacactctcctctggtcacgacgtccctgcaagagaggtattatcaacccatcttacagacgaggaaactgaggcccagagatgtagcatgagggtcacccttggcaagttattctcctccccagtatcccagaatggcccatctggctgctgccttctagaggaaaagtcctagctggggtcctttacactccaggagactcccaaggggcagggatgtgctggcagggcttggcatggtctgaggctcgcagggaagccatggctacatttttggattttactccacccccactccccacctcttctcaaccccacacacccttccctcagggcttctgcctgcagggacatctgggcacaggaatggccacagtcaaagggcccagggagagggctgcaggcacctcctcctgcttctcaccctcagaagagtctcagcccttaaaggactctccacccaggagctcgggaccaggcctgaggccccctgctccactggcttgtcccttcatttcactgggatagaggagtcagatgagggaggggtccatccccttggagctgttttgtttttctttctgtgacacaatctacctcagccagtctctcccctagcagaactgacccccctggtcctctgcctcctgtcccctgacccccaccccagtctggatgttcagtccttccctgtccttcccaccctgccagggtccttgcagcccagagggtccctgagggttccttaagccacctgccctccacatccattagacaggagaaagtgagacccagagaggaccaaggactcaccaaaggccacacaggaagtcagtggcagttaggatttccctggggatgagaggtagttgggtgtgtcttaattttgccaggaacagaagagaacaggatgctttgggtaccaaatatggcaggccctgccctcagttacctctaaccccaggagaccagtgtccccatctccagggcagacttctgtctacctgttttcttagaactgacccccacgctgttgactgtgttccccaaacctctgcaggcaccacacacacccacatcacggcgcctcctggcactgatgtgccatgtgccttgtaactgtcaccccagctgaacagcacagacctccccactcccccacacagggctccccaatgagggagccttgcttgatcccctcctgtcatctgcctcattcttgtgtctcccccaaatctgccttacccccagccagctccctgctacacctgtgtcccacagaggcatgtcacccatgagagtcgggaaagacagagggcagggaaggtgaggcctggggaaagtccaggcctctggataagggctgagggagctgggaatatccagggaaggtctcgcttgcagtcaacaccctcctaagtactcgagttctgcaggttcttcccttggaattaatctggacctggagtccacagaagcctcagacaatagggagaaggttttctgggacgaaggctgcatgggatgcaaactcaaatgcctcgagataatgaaactaagagtaatggagacaatagggagtgttggggactctggcagacaggagagtgagtgtgtgccctgcctgtaggtactaaaattcaaatgtttgggaaactgctggccactcatatttggcccacgtgccaccagtttgagacttacggttcaaaatgttgagaaggttctggagtgtcctgccaagtggaaacccctcagcggaagtcagggacagaggctgtggctccctctgagactttgctagtccaaccctaaatccccatcacctggctatctgagaactgagcccactgccctctcagctgaaaagggaaatctggggggtccacagggtccctggtttgggaatcatctgataagggctacaggcccctccagtgcctcatggggttagaggctgctggagtcttctccagcttgggggcccctggttaggaggaatctacattgggttgcaggggagtccaggtgcaggatgtggactgaaagccaggacccaagagtcccattctgtgctggcccctgccacctttggcacctgtctccctcccagttcaagctgtggtggggcctgcagtagaggttggtagggggagctgtagtttctatattaaagtgctttgcagtgtctcaatggaagggaacaagtgggtgtcaagccgcatgggcagtagtagggttggggtttgagcccccttcccaaccatagaggcttctgagacctggggctggggaggaaaggagcttcaatgtgccattctggttggggagaggataggacatttctgggtccttggctgctgccggtagaggtatggggaggaaaaactctagagtgggagatgtggaagtggaaaaggaaggccctgtccaggcctggcctggtttctggagacagaaaactccccaggggacagagaggttacccccttgtgcttagcttctgccacccttcccttctctggaggagaaggctgccctctcctcagcaaccctggcctttattctatgcataaccactgcaagggcacccctggccaggctgaatgggtgggggtcccagggcacctgcaataatctcagaatggagggtatcctgggacaaagagggggtacagaaggtgccaggggggaaaaggtgattcctccatctctctctcacccaaatccccccagatcgaatctgacccttttccctggtctccattgtgctaaaccaccgaacttggaggagcctcatataaacatagcccccagccccactggctttccgaacccatcatgaaatagctggaaggtatctgaaccgttcccatagctccctcattattttcttccctgaggatcctgtggtttaggagatttttctcccaaaccagcctcatttcttgaagaagaattcattttcccatattaaattaactcaagctgagcttctgattgcagataaatgtttctaaggcctcaagtcaacttctagggcttgaaggtgggggaatatatgtattttattgagttgcttaatacaaaattctcaaaagcacttgtgggcactcattcctgccttcacaggccctcagggtctgggaccccacgttgggaatcaatggtttagacatccagcatcctattttactgaaggggcaagcccagagatgggagatggccagcccaaggtcacacagcaagttggtggcagggtgagaccagaacccggttcttttgagggtcccaccagaatatccccagccctgatcctcccctccatgcccctggaactctaggaatcactagccatgcctgaggggctaatctccctctgtcagcacaattccgagtgattcttcccctccctgtcgtctcttcctccctaacgggccctcacccctgtcctcttctgtttccttttcctggtcccacctcctggtatttactacatctgtgccatccctcatccccctgacccccattcaccctccgagcttcccccaggagggggagggggagggggccccgagctggggcctctttactgagactcttttgtacaccacaaactttttgtatatttttaattttgctgcgacatgagatattaaaagtcatttcagtacgtgc

SEQ ID NO: 200452 - DNA, 2692 bp, Homo sapiens
  Payload ID: 19550
  Gene Name: XK, Kell blood group complex subunit-related family, member 8
  Uniprot ID: Q9H6D3
  ENST ID: ENST00000373884
  CDS Start-End: 609-1796
attcccttccgtatggaaatgaggttaactcatttgcaggaacctaacgcccgccctcccccgactcggatcgctggcgtgaacccagcggccccgtgctctccgggtatccctggatcgaggcgcacgcgttgttgcaaagtctcgcacttagggattagaatgtgcctttgcgtttcgttttgttttgcaacaatacaggtgtgagggatcgcagccctggtccaggctctagtctccccgccctctcgctttcttgggcctccgggcgcctcaaaggtaaaactaggccatttgaagcctgcgaagcgaagggcagtcggtcttcaggcctagcgggcttggctgggctgggtcggtggacccctgggctggcggcgggagcagagcatcgagcggcttttagctggggttcgggcggaggacctgggacaaccgcgggcctcgctcctccccggacggggcgggacggggaagtcccgcccaccaggcccaggccccgggccgccccgagggctgcgcccacctccttcctgcctcggcaaccccgggccctgagggcaggccccaaccgcggaggagcaggagagggcggaggccggcgggccatgccctggtcgtcccgcggcgccctccttcgggacctggtcctgggcgtgctgggcaccgccgccttcctgctcgacctgggcaccgacctgtgggccgccgtccagtatgcgctcggcggccgctacctgtgggcggcgctggtgctggcgctgctgggcctggcctccgtggcgctgcagctcttcagctggctctggctgcgcgctgaccctgccggcctgcacgggtcgcagcccccgcgccgctgcctggcgctgctgcatctcctgcagctgggttacctgtacaggtgcgtgcaggagctgcggcaggggctgctggtgtggcagcaggaggagccctctgagtttgacttggcctacgccgacttcctcgccctggacatcagcatgctgcggctcttcgagaccttcttggagacggcaccacagctcacgctggtgctggccatcatgctgcagagtggccgggctgagtactaccagtgggttggcatctgcacatccttcctgggcatctcgtgggcactgctcgactaccaccgggccttgcgcacctgcctcccctccaagccgctcctgggcctgggctcctccgtgatctacttcctgtggaacctgctgctgctgtggccccgagtcctggctgtggccctgttctcagccctcttccccagctatgtggccctgcacttcctgggcctgtggctggtactgctgctctgggtctggcttcagggcacagacttcatgccggaccccagctccgagtggctgtaccgggtgacggtggccaccatcctctatttctcctggttcaacgtggctgagggccgcacccgaggccgggccatcatccacttcgccttcctcctgagtgacagcattctcctggtggccacctgggtgactcatagctcctggctgcccagcgggattccactgcagctgtggctgcctgtgggatgcggctgcttctttctgggcctggctctgcggcttgtgtactaccactggctgcaccctagctgctgctggaagcccgaccctgaccaggtagacggggcccggagtctgctttctccagaggggtatcagctgcctcagaacaggcgcatgacccatttagcacagaagtttttccccaaggctaaggatgaggctgcttcgccagtgaagggataggtgaacggcgtcctttgaagcaggatcagacccagccagcagagatggagagtgactctgttggcagaaggcaggcgaggataagctaacgatgctgctgtggcctctatgcactcagcaagagcgggacgcctgtgctgggccgggcaccagggatggtgctgagtcgggcagaggcctcctttcaaggagttcacagtgaacaagatgagaagggctgggccctggagggtcaagagccccaattatgtacaagacactttgggaggaaagaagactaccttttccccctgccattggtatagctggtgccccaaaacttccacctccctccctggctacctctaaaatgactggtataggtgctgccccaccccttagctcccctatcctgggctaggaggccacaggggctgtcctctagaattcttccttccctcccccacaccattcattcaattcatgaaacaaatctttgccaagagcagtttatgtgccaggaacatcattctgtccttgcaacctggaacaagaccagctaccagcctagcttcatccgctacttgcaccaaccagtcccgggttagatcccaaatgctagaagccagggatgcccaactctgggtggccccagtcagaacctctgggatctcagtgaagctggcctggcctctgctcctgctctcaaggggctgcttttcaaccaagagccttgtgagcctggtctgagccttgcacagccactgagtattttttttgccttagccagtgtacctcctacctcagtctatgtgagaggaagagaatgtgtgtgcctgtgggtctctacaagtgacagatgtgttgttttcaacagtattattaggttatgaataaagcctcatgaaatcctccaa

SEQ ID NO: 200453 - DNA, 3174 bp, Homo sapiens
  Payload ID: 19551
  Gene Name: XK, Kell blood group complex subunit-related family, member 9
  Uniprot ID: Q5GH70
  ENST ID: ENST00000408926
  CDS Start-End: 535-1656
gcgcgggcagtggtgggaaggctggcgcgaggcgtgaggtggcgtgaggcgaagctggaatctgcctctgtcacgggggctggtgcctcacgggtttgtgtcctagacaggcgagtggatccaagtgggcgagagacattttaatctggaagagtcttgtgatttgggagacagtgaagaagaagtaaaatattcacaagatgaagatttttccagaagggactttgagtcaaagatggctttttatatttgacaagtcttgtcatctgtaatgaagatcattgtgaaacagaagattgattaaagccttgtaacattggacctagattagagatttagaaaagaaagtcaaaattagtcactttagtgttagtgttcccatttcataatatttattctttcttctaaatagatttagggagtagaaattaaaattcaatgctataccaaagggtatactaatatttgtttggctttttttccctttttgtgagggagaaaaaagtagataacgaaaagctatagtcattcgtaatgaaatatactaaacagaattttatgatgtcagttcttggcattataatctacgtaactgatttaattgtggacatatgggtatctgtcagatttttccatgaaggacagtatgtttttagtgctttagcgttaagctttatgctttttggaacacttgtggctcagtgttttagttattcttggttcaaggctgatttaaagaaagcaggccaagaaagtcagcattgttttcttctacttcattgcttgcaaggaggagtttttacaaggtattggtttgccttaaaaaggggttaccatgcagcttttaaatatgacagcaatactagtaacttcgtggaagaacaaattgatctacataaagaagttatagatagagtgactgatttgagcatgctcagactatttgagacctacctggaaggctgcccacaacttattcttcaactctacattcttctggagcatggacaagcgaatttcagtcagtatgcggccatcatggtctcttgctgtgctatttcttggtcaactgttgattatcaagtagctttaagaaaatccttgcctgacaaaaagcttcttaatggattatgtcccaaaatcacatatctcttttacaagttgtttacattattatcgtggatgctgagtgttgtacttctactattcttaaatgttaagattgctttatttctgttgttatttctttggttgttaggtataatatgggcatttaaaaacaacacccagttttgtacttgtataagtatggaattcttatataggattgttgttggattcattcttatctttacattttttaatattaagggacagaataccaagtgtccaatgtcttgttattatattgttagggtactgggcactttggggatattgactgtattctgggtttgccccctcactatttttaatccagactattttatacctatcagtataactatagttcttactcttcttcttggaattctttttcttattgtttattatgggagttttcacccaaacagaagtgcagaaacaaaatgtgatgaaattgatggaaaaccagttctaagagaatgtagaatgagatatttcctaatggaataagctattcatttatgatatatattttcttatattttgtttcattggttagtaaagaaaatgtgtgttatgtgggtgtgttgtctcttatttttgccacctttaatttgaaattagttcagtgaaataggagatacatagtagtattttatttttaaaattaatttctcatttggttttgaagatcttgagtactcagatatctttctactgcctggtagagctgccatcttgagcctgaaatataagaaatggtctggttttcataatgagaaggctggaattgagcttccctcccattttccttgttcctgaactaatactactgtacctgttatggaggactgcaaagggaagagaaaagcagaacactgtattattttttcctttattgtcttcagtgcatatatttgcagttggggacaggttgagtagaggaaaagggaaagaagggaaagcagaaaacaaatttttagcatctgctgtgctttcatccatgaaatctccaattcagtaagtgcaaaagagaattggtgtgcatctgagaggtctgacatttcattatttacttatttcctagcttttctgaattaatgcactcttaacatataattatattaatcctatttgtgctagaatagttgtatctaaatcatattttaaaattatttttatttttaaaaaattatggtaaaaacatataaaatttaccatcttaatcactttgagtgtacagttcatcagtgttaactgtattcaccttgtgcaacagatctcaaggactttttcaccttgtaaaactaagattctctatttattgaacaaatccccatttcctccttccccaagtctctctcaactgaaattataattttttgtttctatgagtttgaatactttagataccttgttgccatggtttgaatgtgccccccagatttcatgtgtgtgaaacttaatctccaaatttgtatgttgatggcatttggaagtggtggggactttgtttatttatttatttttaattttttaattttatattattattattattattatactttaaggtttagggtacatgtgcacaatgtgcaggttagttacatatgtatacatgtgccatgctggtgtgctgcacccattaactcgtcatttatcattaggtatatctcctaaagctatccctcccccctccccccaccccacaacagtccccagagtgtgatgatccccttcctgtgtccatgtgttctcattgttcagttcccacctatgagtgagaatatgcagtgtttggttttttgttcttgcgatagtttactgagaatgatgatttccagcttcatccatgtccctacaaaggacatgaactcatcattttttatggctgcatagtattccatggtgtatatgtgccacattttcttaatccagtctattgttgttggacatttgggttggttccaagtctttgctattgtgaatagtgctgcaataaacatacgtgtgcatgtgtcttta

SEQ ID NO: 200454 - DNA, 716 bp, Homo sapiens
  Payload ID: 19551
  Gene Name: XK, Kell blood group complex subunit-related family, member 9
  ENST ID: ENST00000519350
  CDS Start-End: 450-716
agatatttctgatgaagaaaacgatctgctcttacctattttatgaatcagcagcatagtgtatcagagtggctaatgacatctgcttttgaagaagaagtaaaatattcacaagatgaagatttttccagaagggactttgagtcaaagatggctttttatatttgacaagtcttgtcatctgtaatgaagatcattgtgaaacagaagattgattaaagccttgtaacattggacctagattagagatttagaaaagaaagtcaaaattagtcactttagtgttagtgttcccatttcataatatttattctttcttctaaatagatttagggagtagaaattaaaattcaatgctataccaaagggtatactaatatttgtttggctttttttccctttttgtgagggagaaaaaagtagataacgaaaagctatagtcattcgtaatgaaatatactaaacagaattttatgatgtcagttcttggcattataatctacgtaactgatttaattgtggacatatgggtatctgtcagatttttccatgaaggacagtatgtttttagtgctttagcgttaagctttatgctttttggaacacttgtggctcagtgttttagttattcttggttcaaggctgatttaaagaaagcaggccaagaaagtcagcattgttttcttctacttcattgcttgcaaggaggagttttt

SEQ ID NO: 200455 - DNA, 1841 bp, Homo sapiens
  Payload ID: 19551
  Gene Name: XK, Kell blood group complex subunit-related family, member 9
  ENST ID: ENST00000520092
  CDS Start-End: 535-912
gcgcgggcagtggtgggaaggctggcgcgaggcgtgaggtggcgtgaggcgaagctggaatctgcctctgtcacgggggctggtgcctcacgggtttgtgtcctagacaggcgagtggatccaagtgggcgagagacattttaatctggaagagtcttgtgatttgggagacagtgaagaagaagtaaaatattcacaagatgaagatttttccagaagggactttgagtcaaagatggctttttatatttgacaagtcttgtcatctgtaatgaagatcattgtgaaacagaagattgattaaagccttgtaacattggacctagattagagatttagaaaagaaagtcaaaattagtcactttagtgttagtgttcccatttcataatatttattctttcttctaaatagatttagggagtagaaattaaaattcaatgctataccaaagggtatactaatatttgtttggctttttttccctttttgtgagggagaaaaaagtagataacgaaaagctatagtcattcgtaatgaaatatactaaacagaattttatgatgtcagttcttggcattataatctacgtaactgatttaattgtggacatatgggtatctgtcagatttttccatgaaggacagtatgtttttagtgctttagcgttaagctttatgctttttggaacacttgtggctcagtgttttagttattcttggttcaaggctgatttaaagaaagcaggccaagaaagtcagcattgttttcttctacttcattgcttgcaaggaggagtttttacaagggccttgctctgtcacccaggctggcctgcagtggcgccttcccagctcattgcagcctccacctccttggttcaagagattctcctgcatcagcttcctgagtagctgggattacaggtattggtttgccttaaaaaggggttaccatgcagcttttaaatatgacagcaatactagtaacttcgtggaagaacaaattgatctacataaagaagttatagatagagtgactgatttgagcatgctcagactatttgagacctacctggaaggctgcccacaacttattcttcaactctacattcttctggagcatggacaagcgaatttcagtcagtatgcggccatcatggtctcttgctgtgctatttcttggtcaactgttgattatcaagtagctttaagaaaatccttgcctgacaaaaagcttcttaatggattatgtcccaaaatcacatatctcttttacaagttgtttacattattatcgtggatgctgagtgttgtacttctactattcttaaatgttaagattgctttatttctgttgttatttctttggttgttaggtataatatgggcatttaaaaacaacacccagttttgtacttgtataagtatggaattcttatataggattgttgttggattcattcttatctttacattttttaatattaagggacagaataccaagtgtccaatgtcttgttattatattgttagggtactgggcactttggggatattgactgtattctgggtttgccccctcactatttttaatccagactattttatacctatcagtataactatagttcttactcttcttcttggaattctttttcttattgtttattatgggagttttcacccaaacagaagtgcagaaacaaaatgtgatgaaattgatggaaaaccagttctaagagaatgtagaatgagatatttcctaatggaataagctattcatttatgatatatattttcttatattttgtttcattggttagtaaagaaaatgtgtgtta

SEQ ID NO: 200456 - DNA, 1799 bp, Homo sapiens
  Payload ID: 19551
  Gene Name: XK, Kell blood group complex subunit-related family, member 9
  Uniprot ID: Q5GH70
  ENST ID: ENST00000520030
  CDS Start-End: 612-1733
gtgaggtggcgtgaggcgaagctggaatctgcctctgtcacgggggctggtgcctcacgggtttgtgtcctagacaggcgagtggatccaagtgggcgagagacattttaatctggaagagtcttgtgatttgggagacagtgaagaagaagtaaaatattcacaagatgaagatttttccagaagggactttgagtcaaagatggctttttatatttgacaagattcaaaatctagtgcattagacttttgaactagctgttccttcaagctggaaggcttttccatctctatgcacatggccaatttcactactcaaatgccaccttctcagtcttgtcatctgtaatgaagatcattgtgaaacagaagattgattaaagccttgtaacattggacctagattagagatttagaaaagaaagtcaaaattagtcactttagtgttagtgttcccatttcataatatttattctttcttctaaatagatttagggagtagaaattaaaattcaatgctataccaaagggtatactaatatttgtttggctttttttccctttttgtgagggagaaaaaagtagataacgaaaagctatagtcattcgtaatgaaatatactaaacagaattttatgatgtcagttcttggcattataatctacgtaactgatttaattgtggacatatgggtatctgtcagatttttccatgaaggacagtatgtttttagtgctttagcgttaagctttatgctttttggaacacttgtggctcagtgttttagttattcttggttcaaggctgatttaaagaaagcaggccaagaaagtcagcattgttttcttctacttcattgcttgcaaggaggagtttttacaaggtattggtttgccttaaaaaggggttaccatgcagcttttaaatatgacagcaatactagtaacttcgtggaagaacaaattgatctacataaagaagttatagatagagtgactgatttgagcatgctcagactatttgagacctacctggaaggctgcccacaacttattcttcaactctacattcttctggagcatggacaagcgaatttcagtcagtatgcggccatcatggtctcttgctgtgctatttcttggtcaactgttgattatcaagtagctttaagaaaatccttgcctgacaaaaagcttcttaatggattatgtcccaaaatcacatatctcttttacaagttgtttacattattatcgtggatgctgagtgttgtacttctactattcttaaatgttaagattgctttatttctgttgttatttctttggttgttaggtataatatgggcatttaaaaacaacacccagttttgtacttgtataagtatggaattcttatataggattgttgttggattcattcttatctttacattttttaatattaagggacagaataccaagtgtccaatgtcttgttattatattgttagggtactgggcactttggggatattgactgtattctgggtttgccccctcactatttttaatccagactattttatacctatcagtataactatagttcttactcttcttcttggaattctttttcttattgtttattatgggagttttcacccaaacagaagtgcagaaacaaaatgtgatgaaattgatggaaaaccagttctaagagaatgtagaatgagatatttcctaatggaataagctattcatttatgatatatattttcttatattttgtttcattggttagtaaagaaaatgtgtgtt

SEQ ID NO: 200457 - DNA, 2848 bp, Homo sapiens
  Payload ID: 19552
  Gene Name: XK, Kell blood group complex subunit-related, X-linked
  Uniprot ID: Q6PP77
  ENST ID: ENST00000372956
  CDS Start-End: 606-1955
ctgagagcgcgcaggtgagcgggccagctgatagctacagcctagcaatagctaggatacctaggcactgaactgaatcccctcttctgccctccttcttctgcgcccgctcttctgccctggctcagctctccgctgacttgagaggacacactggtcaggactctttgtgaggagctgctgagtgtcggtgcccccgacagatcggctacaccctgcctgaggggctgcgaaaggagccgccacggaagccgctgttctcatgactcttcacgtccctggagttggactctggatggggcgctgggatgcttgcttttgtcttgttcaagtttcacagcaagtatgttgacgattggaatcggggccaatcaagagtcaagttcaaagtggtactcctgggctttccatcccagactccaagtcgaatctgagtctagaagagagcggtttcttgctctaactagtgaatctctgttcccaaactggacttgacagagctctcctcacctatacttggactgtagcggccatagggttctcttggggatgggtgggagggtgctatgaacacaagaccacaacattcagaaagaacctcgacaatggacagagtttatgaaattcctgaggagccaaatgtggatccggtttcatctctggaggaagatgtcatccgtggagccaacccccgatttacttttccatttagcatccttttctccacctttttgtactgtggggaggctgcatctgctttgtacatggttagaatctatcgaaagaatagtgaaacttactggatgacatacaccttttctttctttatgttttcatccattatggtccagttgaccctcatttttgtccacagagatctagccaaagataaaccgctatcattatttatgcatctaatcctcttgggacctgttatcagatgtttggaggccatgattaagtacctcacactgtggaagaaagaggagcaggaggagccctatgtcagcctcacccgaaagaagatgctaatagatggcgaggaggtgctgatagaatgggaggtgggccactccatccggaccctggctatgcaccgcaatgcctacaaacgtatgtcacagatccaagccttcctgggctcagtgccccagctgacctatcagctctatgtgagcctgatctctgcagaggttcccctgggtagagttgtgctaatggtattttccctggtatctgtcacctatggggccaccctttgcaatatgttggctatccagatcaagtacgatgactacaagattcgccttgggccactagaagtcctctgcatcaccatctggcggacattggagatcacttcccgcctcctgattctggtgctcttctcagccactttgaaattgaaggctgtgcccttcctagtgctcaacttcctgatcatcctctttgagccctggattaagttctggagaagtggtgcccagatgcccaataacattgagaaaaacttcagccgggtcggcactctggtggtcctgatttcagtcaccatcctctatgctggcatcaacttctcttgctggtcagctttgcagttgaggttggcagacagagatctcgtcgacaaagggcagaactggggacatatgggcctgcactatagtgtgaggttggtagagaatgtgatcatggtcttggtttttaagttctttggagtgaaagtgttactgaattactgtcattccttgattgccttgcagctcattattgcttatctgatttccattggcttcatgctccttttcttccagtacttgcatccattgcgctcactcttcacccataatgtagtagactacctccattgtgtctgctgtcaccagcaccctcggaccagggttgagaactcagagccaccctttgagactgaagcaaggcaaagtgttgtctgattctattttctgggtattttaggaagagttgggagttgccaagagtaaccatgaaattgaacgaaaggatgaggttcatgggtgagatacccatcagtacattttcttgacttttctgttaagcctatcagaagaaagagcaactcccaaataggttttattttcttaagagttaccactatgtttggaaacagggggtatcgactatatagttgaaagggtcagaaataccattcacacccttcttacccaagtcaattggaataacttgtcttcaaacactttaggctctctaaagtgaccttctagctctgctcatttgcttgatgcatttctgagctttcctgggctgagctgaaggcccagaatcccgctagaatatatcctgactgatcagaggatatgacagcttaccagctaagagtacctcccaggaaacagtctgactaatgtggaacctgcaactgtcagtgtggctggggtctttttaattccagtgagaagctctggctgagaagaaaatcaccactattaaaaaagctgctccccaagcagattagctctctgttaggattttactagtggccattcagcaaggacctctctttacagtggcacttcataggcacactctaaggagaaagtgcagagtagaattccttcagggcataagccaaaatgactctttttctcagggacctgcatgggcctccagcttgtctattggaattgttaagtgaagcctctcacttagtgcctcattagcagagatttcctccaacccagcttttctgtgctcttggtattttactacttgatgtggacctcagagaagctgaactgtaattgaaaatgtttccgatgtgtggaagaaatgaagactgctttgtgtc

SEQ ID NO: 200458 - DNA, 2249 bp, Homo sapiens
  Payload ID: 19552
  Gene Name: XK, Kell blood group complex subunit-related, X-linked
  ENST ID: ENST00000468904
  CDS Start-End: 1130-1549
aaagctgtggctcctgcctgggtctggaggtggtggtcagaagtgcttctgaagagcggcccaagcccctttttgtcccgccactccacaacgagcatccctcggctggccgcctgcccgggaactctccggctggttttgtttggccgcagccgtcccgcccatctcgcccgcccccgccgtcccggtgccttagtttttgaagctgccgacctctcgcagctggaatcgcagaccaggcaggaccctggcagcagacggcgtccaagagtttggcgacctccgtccagccaggttggcgccccgcacatcgtgcctctcactagcaaagtttctccgaggagaagcagcccctccagccttttcttcatcctgtagagcgagcgcgctctgcttctgtccctcaacactgcattcggagacagggtggtgacaatactccactcccgggccaggcggtcttgggggcggggcttgggggaatccgaggagctatcctgagaaccctggactcggcaaaggtcctgagagcgcgcaggtgagcgggccagctgatagctacagcctagcaatagctaggatacctaggcactgaactgaatcccctcttctgccctccttcttctgcgcccgctcttctgccctggctcagctctccgctgacttgagaggacacactggtcaggactctttgtgaggagctgctgagtgtcggtgcccccgacagatcggctacaccctgcctgaggggctgcgaaaggagccgccacggaagccgctgttctcatgactcttcacgtccctggagttggactctggatggggcgctgggatgcttgcttttgtcttgttcaagtttcacagcaagtatgttgacgattggaatcggggccaatcaagagtcaagttcaaagtggtactcctgggctttccatcccagactccaagtcgaatctgagtctagaagagagcggtttcttgctctaactagtgaatctctgttcccaaactggacttgacagagctctcctcacctatacttggactgtagcggccatagggttctcttggggatgggtgggagggtgctatgaacacaagaccacaacattcagaaagaacctcgacaatggacagagtttatgaaattcctgaggagccaaatgtggatccggtttcatctctggaggaagatgtcatccgtggagccaacccccgatttacttttccatttagcatccttttctccacctttttgtactgtggggaggctgcatctgctttgtacatggttagaatctatcgaaagaatagtgaaacttactggatgacatacaccttttctttctttatgttttcatccattatggtccagttgaccctcatttttgtccacagagatctagccaaagataaaccgctatcattatttatgcatctaatcctcttgggacctgttatcagttgtgctaatggtattttccctggtatctgtcacctatggggccaccctttgcaatatgttggctatccagatcaagtacgatgactacaagattcgccttgggccactagaagtcctctgcatcaccatctggcggacattggagatcacttcccgcctcctgattctggtgctcttctcagccactttgaaattgaaggctgtgcccttcctagtgctcaacttcctgatcatcctctttgagccctggattaagttctggagaagtggtgcccagatgcccaataacattgagaaaaacttcagccgggtcggcactctggtggtcctgatttcagtcaccatcctctatgctggcatcaacttctcttgctggtcagctttgcagttgaggttggcagacagagatctcgtcgacaaagggcagaactggggacatatgggcctgcactatagtgtgaggttggtagagaatgtgatcatggtcttggtttttaagttctttggagtgaaagtgttactgaattactgtcattccttgattgccttgcagctcattattgcttatctgatttccattggcttcatgctccttttcttccagtacttgcatccattgcgctcactcttcacccataatgtagtagactacctccattgtgtctgctgtcaccagcaccctcggaccagggttgagaactcagagccaccctttgagactgaagcaaggcaaagtgttgtctgattctattttctgggtattttaggaagagttgggagttgc

SEQ ID NO: 200459 - DNA, 8584 bp, Homo sapiens
  Payload ID: 19553
  Gene Name: X-linked inhibitor of apoptosis, E3 ubiquitin protein ligase
  Uniprot ID: P98170
  ENST ID: ENST00000355640
  CDS Start-End: 307-1800
tcgggccggctgtcctggcgcggtgggtacagcttgtgtaggctttcccctcccccgctttccctccttcccctctcctccctcccctcttcttttcccctccacttccctcgggccggcgctgctggggagggcgggaaggccgcgccagcccatcaggggtggcccggccccggctgcttgcccgggttcctcggactgccgacggcaggcgtgggtgggtgggtgacttcaggcctgcaggattgccttcctaaaccctgtgacacctaagaaaaggtggacaagtcctattttcaagagaagatgacttttaacagttttgaaggatctaaaacttgtgtacctgcagacatcaataaggaagaagaatttgtagaagagtttaatagattaaaaacttttgctaattttccaagtggtagtcctgtttcagcatcaacactggcacgagcagggtttctttatactggtgaaggagataccgtgcggtgctttagttgtcatgcagctgtagatagatggcaatatggagactcagcagttggaagacacaggaaagtatccccaaattgcagatttatcaacggcttttatcttgaaaatagtgccacgcagtctacaaattctggtatccagaatggtcagtacaaagttgaaaactatctgggaagcagagatcattttgccttagacaggccatctgagacacatgcagactatcttttgagaactgggcaggttgtagatatatcagacaccatatacccgaggaaccctgccatgtatagtgaagaagctagattaaagtcctttcagaactggccagactatgctcacctaaccccaagagagttagcaagtgctggactctactacacaggtattggtgaccaagtgcagtgcttttgttgtggtggaaaactgaaaaattgggaaccttgtgatcgtgcctggtcagaacacaggcgacactttcctaattgcttctttgttttgggccggaatcttaatattcgaagtgaatctgatgctgtgagttctgataggaatttcccaaattcaacaaatcttccaagaaatccatccatggcagattatgaagcacggatctttacttttgggacatggatatactcagttaacaaggagcagcttgcaagagctggattttatgctttaggtgaaggtgataaagtaaagtgctttcactgtggaggagggctaactgattggaagcccagtgaagacccttgggaacaacatgctaaatggtatccagggtgcaaatatctgttagaacagaagggacaagaatatataaacaatattcatttaactcattcacttgaggagtgtctggtaagaactactgagaaaacaccatcactaactagaagaattgatgataccatcttccaaaatcctatggtacaagaagctatacgaatggggttcagtttcaaggacattaagaaaataatggaggaaaaaattcagatatctgggagcaactataaatcacttgaggttctggttgcagatctagtgaatgctcagaaagacagtatgcaagatgagtcaagtcagacttcattacagaaagagattagtactgaagagcagctaaggcgcctgcaagaggagaagctttgcaaaatctgtatggatagaaatattgctatcgtttttgttccttgtggacatctagtcacttgtaaacaatgtgctgaagcagttgacaagtgtcccatgtgctacacagtcattactttcaagcaaaaaatttttatgtcttaatctaactctatagtaggcatgttatgttgttcttattaccctgattgaatgtgtgatgtgaactgactttaagtaatcaggattgaattccattagcatttgctaccaagtaggaaaaaaaatgtacatggcagtgttttagttggcaatataatctttgaatttcttgatttttcagggtattagctgtattatccattttttttactgttatttaattgaaaccatagactaagaataagaagcatcatactataactgaacacaatgtgtattcatagtatactgatttaatttctaagtgtaagtgaattaatcatctggattttttattcttttcagataggcttaacaaatggagctttctgtatataaatgtggagattagagttaatctccccaatcacataatttgttttgtgtgaaaaaggaataaattgttccatgctggtggaaagatagagattgtttttagaggttggttgttgtgttttaggattctgtccattttcttttaaagttataaacacgtacttgtgcgaattatttttttaaagtgatttgccatttttgaaagcgtatttaatgatagaatactatcgagccaacatgtactgacatggaaagatgtcaaagatatgttaagtgtaaaatgcaagtggcaaaacactatgtatagtctgagccagatcaaagtatgtatgtttttaatatgcatagaacaaaagatttggaaagatatacaccaaactgttaaatgtggtttctcttcggggagggggggattgggggaggggccccagaggggttttataggggccttttcactttctacttttttcattttgttctgttcgaattttttataagtatgtattacttttgtaatcagaatttttagaaagtattttgctgatttaaaggcttaggcatgttcaaacgcctgcaaaactacttatcactcagctttagtttttctaatccaagaaggcagggcagttaacctttttggtgccaatgtgaaatgtaaatgattttatgtttttcctgctttgtggatgaaaaatatttctgagtggtagttttttgacaggtagaccatgtcttatcttgtttcaaaataagtatttctgattttgtaaaatgaaatataaaatatgtctcagatcttccaattaattagtaaggattcatccttaatccttgctagtttaagcctgcctaagtcactttactaaaagatctttgttaactcagtattttaaacatctgtcagcttatgtaggtaaaagtagaagcatgtttgtacactgcttgtagttatagtgacagctttccatgttgagattctcatatcatcttgtatcttaaagtttcatgtgagtttttaccgttaggatgattaagatgtatataggacaaaatgttaagtctttcctctacctacatttgttttcttggctagtaatagtagtagatacttctgaaataaatgttctctcaagatccttaaaacctcttggaaattataaaaatattggcaagaaaagaagaatagttgtttaaatattttttaaaaaacacttgaataagaatcagtagggtataaactagaagtttaaaaatgcttcatagaacgtccagggtttacattacaagattctcacaacaaacctattgtagaggtgagtaaggcatgttactacagaggaaagtttgagagtaaaactgtaaaaaattatatttttgttgtactttctaagagaaagagtattgttatgttctcctaacttctgttgattactactttaagtgatattcatttaaaacattgcaaatttattttatttatttaattttctttttgagatggagtcttgcttgtcacccaggctggagtgcagtggagtgatctctgctcactgcaacctccgccttctgggttcaagcgattctcgtgcctcagcttcctgagtagctggaattacaggcaggtgccaccatgcccgactaatttttttttatttttagtagagacggggtttcaccatgttggccaggctggtatcaaactcctgacctcaagagatccactcgccttgccctcccaaagtgctgggattacaggcttgagccaccacgcccggctaaaacattgcaaatttaaatgagagttttaaaaattaaataatgactgccctgtttctgttttagtatgtaaatcctcagttcttcacctttgcactgtctgccacttagtttggttatatagtcattaacttgaatttggtctgtatagtctagactttaaatttaaagttttctacaaggggagaaaagtgttaaaatttttaaaatatgttttccaggacacttcacttccaagtcaggtaggtagttcaatctagttgttagccaaggactcaaggactgaattgttttaacataaggcttttcctgttctgggagccgcacttcattaaaattcttctaaaacttgtatgtttagagttaagcaagactttttttcttcctctccatgagttgtgaaatttaatgcacaacgctgatgtggctaacaagtttattttaagaattgtttagaaatgctgttgcttcaggttcttaaaatcactcagcactccaacttctaatcaaatttttggagacttaacagcatttgtctgtgtttgaactataaaaagcaccggatcttttccatctaattccgcaaaaattgatcatttgcaaagtcaaaactatagccatatccaaatcttttccccctcccaagagttctcagtgtctacatgtagactattccttttctgtataaagttcactctaggatttcaagtcaccacttattttacattttagtcatgcaaagattcaagtagttttgcaataagtacttatctttatttgtaataatttagtctgctgatcaaaagcattgtcttaatttttgagaactggttttagcatttacaaactaaattccagttaattaattaatagctttatattgcctttcctgctacatttggttttttcccctgtccctttgattacgggctaaggtagggtagagtgggtgtagtgagtgtatataatgtgatttggccctgtgtattatgatattttgttatttttgttgttatattatttacatttcagtagttgttttttgtgtttccattttagtggataaaatttgtattttgaactatgaatggagactaccgccccagcattagtttcacatgatataccctttaaacccgaatcattgttttatttcctgattacacaggtgttgaatggggaaaggggctagtatatcagtaggatatactatgggatgtatatatatcattgctgttagagaaatgaaataaaatggggctgggctcagtggctcacgcctgtaatcccagcactttgggaggctgaggcaggtggatcacgaggtcaggagatcgagaccatcctggctaacacggtgaaaccccgtctctactaaaaaacagaaaattagccgggcgtggtggcgggcgcctgtagtcccagctactcgggaggctgaggcaggagaatggtgtgaacccgggaggcagagcttgcagtgagccgagatctcgccactgcactccagcctgggcaacagagcaagactctgtctcaaaaaaaaaaaaaaaagaaataagaaaatgggaagcaatatttgacatagttctttttagtcaaatctacttgttaaaaaaagggtagcagtttattcatctgtgaaaggaaaataatacttatcttacaaggttgcaagagctcaaggagaccatgtatgtaaagttcctgctgtaaatatgaactcccatcctaatacccttttacctctctgtgggtttgtcttgacctggaaatttgggctaaaacttagaaaaaattcttacatgataactcagtgatgcttactcatagtttttggtgtttctcatagataagatataaatcagctgggcgcggtggctcatgcctgtaatcccagcactttgggaggccgaggcgggcagatcacctgaggtcgggaggtcgagaccagcctgaccaacatggagaaaccccgtctctactaaaaatacaaaattagctgggcgtggtggctcatgcctgtaatcccagctacttgggaggctgaggcaggagaatcgcttgaacccaggaggcggaggttgtggtgagcgaagatcgtgccattgcactccagcctgggcaacaagagcaaaactctgtctcaaaaaaaaaaaaagatataaatcacaataaataaataggtcaatacaaatgttagccaggcgtggtggcacatgcccatagtcgcagctactctggaggcagaggcaggaggatcacttgagcccatgaatttgaggcagcagtgagctatgattgtgccactgtactccagtctgggtgacagagtgagaccccatctctaaataaataggtcaaacccttaaaaatatttaaattcttaaaaaattgaaaagattattcttctcaaatttagttgagctttctaagagaagcaattggctttttcccacttcaataatcattttcagtttgactcatacagttaacacaatgtgaatttcttcctcagcataacagagttatagaatgacagggctggaagtgaccttagagagtatccagttctttcattttacaggtgaggcaactgagactcaaaggtgatgtaatttgtgcaaagattatagctaattagtagcagagccctgactgggacatagtttgaaggtgaaaaacttcaccaagctacctttcttgaaaggtccaaatgtttatgttttcaactactctttccactgtaccataactttcactacatattaaatgacactttataactaatataataggacaatcatcaatgcatatatagccagcccttcatatctgtgggttttgcatccatggattcaaccaaggaggaattgaaaacactgagaaaaaaaaaaaagaccacacaataaaaaaaaaaaatacaaaataatacaaagaaaaagccaaaattgtcatactgttgttaagcaacagtataacaactatttacatagcattaaggttggtgcaaaaatgcaaaaaaaaaaaaagcaattatttttaaaccaacctaatatattgtattaggtattaaagtcatctggacatgaattaaagtatatgatgccagcctggacaaaaggcaaaaccctgtctctacaaaaaatacaaaaattagctgggcatggtggtgtgtgcctgtagtcctggctactccggagcctgaggtgggaggatcgcttgagtctgggaggcagaggctgcattgagctatgatcatggcactgcattccagcctgggtgacagtgcaagaccttgtctcagaataaataaagtatgtgatgaagatgtgcatacattatatgcaaatactgttttttttttttttaatttaaacagtctcactgtgttgcccaggatggagtgcaatggcacaatcttggctcatggcaaactctgcctcgcaagcagctgggactacaggcatgctccacggtgcccagttaattttttttgtattcttagtagagacagggtttcaccatgttggccaggctagtcttgaatttctgacctcaagtgattcatctcccaaagtgctgggattacaggcgtgagccaccacggccggctaatttttgtattttttagtagtgactggtttcgcggtgttgaccaggctggtctcgaactcctgatctcaggtgatctgcctgcctcggcctcacaaagtgctgggattacaggtgtgaaccactgctcccggccttgtgtgattttatctaagggacttaagcgtcctcaggtcctagggggtcgtgaaaccaaaaccccagggatagcaagggacaattgtatcttcaaagtagacaaatggcgccgggcacggtggctcacgcctgtaatcccagcagtttccgaggctgaggcaggcggctcacctgaggtcaggagttggagaccagcctggccaacatgctgaaaccctgtctgtacaaaaatacaaaaatagctgggcatggtggcgcatgcctgtagtcccagctactagagcgactgaggcaggagaattgcttgaacctgggaggcggaggttgcagggagccaagatggcgccaccgcactccagcctaggtgatagagtgagactccctctcaaaaacaaaacaaaacaaaaaaattagacaaatgctacattaatgtttgggtggtcagattctactttgaatctgaagtttgcagatatgcctatagatttttggagtttaccactttcttattctgtatcattaatgtaatattttaaattactatatatgttaccatttttctggatttagtaagaaatttgcagttttggtttgatgtaacaagggttttaatgtaatttatgttagattttgcatttttttcattactgttatattttaacctgactgactgatctaattgtattagtattgtgaataatcatgtgaaatgttttgagacagagtactatatttgtgaatataattttatggtttttttcacttagaacctttctgtgtggaaaactaagaaaattgctttctgctgtataatctggcattcattgtagattaaagcttatttttctgtgaataaaacgtattcaataaaatactattcttt

SEQ ID NO: 200460 - DNA, 8591 bp, Homo sapiens
  Payload ID: 19553
  Gene Name: X-linked inhibitor of apoptosis, E3 ubiquitin protein ligase
  Uniprot ID: P98170
  ENST ID: ENST00000371199
  CDS Start-End: 300-1793
tgacggaccgcgcccggtgtctctttgaggccctgacgtggacacacttcgggtttcacgactccgggtttctccaggggatgggccggccggtagaggcgcgtgagggagacgaagggacttccgtttccttcacctaggctggggccaagccgcagagcggagttggcatttccagattggggctcgggccgcgcctcctccgggaccctccccttggaccgagccgatcgccgcggggcagttcgggccggctgtcctggcgcgaaaaggtggacaagtcctattttcaagagaagatgacttttaacagttttgaaggatctaaaacttgtgtacctgcagacatcaataaggaagaagaatttgtagaagagtttaatagattaaaaacttttgctaattttccaagtggtagtcctgtttcagcatcaacactggcacgagcagggtttctttatactggtgaaggagataccgtgcggtgctttagttgtcatgcagctgtagatagatggcaatatggagactcagcagttggaagacacaggaaagtatccccaaattgcagatttatcaacggcttttatcttgaaaatagtgccacgcagtctacaaattctggtatccagaatggtcagtacaaagttgaaaactatctgggaagcagagatcattttgccttagacaggccatctgagacacatgcagactatcttttgagaactgggcaggttgtagatatatcagacaccatatacccgaggaaccctgccatgtatagtgaagaagctagattaaagtcctttcagaactggccagactatgctcacctaaccccaagagagttagcaagtgctggactctactacacaggtattggtgaccaagtgcagtgcttttgttgtggtggaaaactgaaaaattgggaaccttgtgatcgtgcctggtcagaacacaggcgacactttcctaattgcttctttgttttgggccggaatcttaatattcgaagtgaatctgatgctgtgagttctgataggaatttcccaaattcaacaaatcttccaagaaatccatccatggcagattatgaagcacggatctttacttttgggacatggatatactcagttaacaaggagcagcttgcaagagctggattttatgctttaggtgaaggtgataaagtaaagtgctttcactgtggaggagggctaactgattggaagcccagtgaagacccttgggaacaacatgctaaatggtatccagggtgcaaatatctgttagaacagaagggacaagaatatataaacaatattcatttaactcattcacttgaggagtgtctggtaagaactactgagaaaacaccatcactaactagaagaattgatgataccatcttccaaaatcctatggtacaagaagctatacgaatggggttcagtttcaaggacattaagaaaataatggaggaaaaaattcagatatctgggagcaactataaatcacttgaggttctggttgcagatctagtgaatgctcagaaagacagtatgcaagatgagtcaagtcagacttcattacagaaagagattagtactgaagagcagctaaggcgcctgcaagaggagaagctttgcaaaatctgtatggatagaaatattgctatcgtttttgttccttgtggacatctagtcacttgtaaacaatgtgctgaagcagttgacaagtgtcccatgtgctacacagtcattactttcaagcaaaaaatttttatgtcttaatctaactctatagtaggcatgttatgttgttcttattaccctgattgaatgtgtgatgtgaactgactttaagtaatcaggattgaattccattagcatttgctaccaagtaggaaaaaaaatgtacatggcagtgttttagttggcaatataatctttgaatttcttgatttttcagggtattagctgtattatccattttttttactgttatttaattgaaaccatagactaagaataagaagcatcatactataactgaacacaatgtgtattcatagtatactgatttaatttctaagtgtaagtgaattaatcatctggattttttattcttttcagataggcttaacaaatggagctttctgtatataaatgtggagattagagttaatctccccaatcacataatttgttttgtgtgaaaaaggaataaattgttccatgctggtggaaagatagagattgtttttagaggttggttgttgtgttttaggattctgtccattttcttttaaagttataaacacgtacttgtgcgaattatttttttaaagtgatttgccatttttgaaagcgtatttaatgatagaatactatcgagccaacatgtactgacatggaaagatgtcaaagatatgttaagtgtaaaatgcaagtggcaaaacactatgtatagtctgagccagatcaaagtatgtatgtttttaatatgcatagaacaaaagatttggaaagatatacaccaaactgttaaatgtggtttctcttcggggagggggggattgggggaggggccccagaggggttttataggggccttttcactttctacttttttcattttgttctgttcgaattttttataagtatgtattacttttgtaatcagaatttttagaaagtattttgctgatttaaaggcttaggcatgttcaaacgcctgcaaaactacttatcactcagctttagtttttctaatccaagaaggcagggcagttaacctttttggtgccaatgtgaaatgtaaatgattttatgtttttcctgctttgtggatgaaaaatatttctgagtggtagttttttgacaggtagaccatgtcttatcttgtttcaaaataagtatttctgattttgtaaaatgaaatataaaatatgtctcagatcttccaattaattagtaaggattcatccttaatccttgctagtttaagcctgcctaagtcactttactaaaagatctttgttaactcagtattttaaacatctgtcagcttatgtaggtaaaagtagaagcatgtttgtacactgcttgtagttatagtgacagctttccatgttgagattctcatatcatcttgtatcttaaagtttcatgtgagtttttaccgttaggatgattaagatgtatataggacaaaatgttaagtctttcctctacctacatttgttttcttggctagtaatagtagtagatacttctgaaataaatgttctctcaagatccttaaaacctcttggaaattataaaaatattggcaagaaaagaagaatagttgtttaaatattttttaaaaaacacttgaataagaatcagtagggtataaactagaagtttaaaaatgcttcatagaacgtccagggtttacattacaagattctcacaacaaacctattgtagaggtgagtaaggcatgttactacagaggaaagtttgagagtaaaactgtaaaaaattatatttttgttgtactttctaagagaaagagtattgttatgttctcctaacttctgttgattactactttaagtgatattcatttaaaacattgcaaatttattttatttatttaattttctttttgagatggagtcttgcttgtcacccaggctggagtgcagtggagtgatctctgctcactgcaacctccgccttctgggttcaagcgattctcgtgcctcagcttcctgagtagctggaattacaggcaggtgccaccatgcccgactaatttttttttatttttagtagagacggggtttcaccatgttggccaggctggtatcaaactcctgacctcaagagatccactcgccttgccctcccaaagtgctgggattacaggcttgagccaccacgcccggctaaaacattgcaaatttaaatgagagttttaaaaattaaataatgactgccctgtttctgttttagtatgtaaatcctcagttcttcacctttgcactgtctgccacttagtttggttatatagtcattaacttgaatttggtctgtatagtctagactttaaatttaaagttttctacaaggggagaaaagtgttaaaatttttaaaatatgttttccaggacacttcacttccaagtcaggtaggtagttcaatctagttgttagccaaggactcaaggactgaattgttttaacataaggcttttcctgttctgggagccgcacttcattaaaattcttctaaaacttgtatgtttagagttaagcaagactttttttcttcctctccatgagttgtgaaatttaatgcacaacgctgatgtggctaacaagtttattttaagaattgtttagaaatgctgttgcttcaggttcttaaaatcactcagcactccaacttctaatcaaatttttggagacttaacagcatttgtctgtgtttgaactataaaaagcaccggatcttttccatctaattccgcaaaaattgatcatttgcaaagtcaaaactatagccatatccaaatcttttccccctcccaagagttctcagtgtctacatgtagactattccttttctgtataaagttcactctaggatttcaagtcaccacttattttacattttagtcatgcaaagattcaagtagttttgcaataagtacttatctttatttgtaataatttagtctgctgatcaaaagcattgtcttaatttttgagaactggttttagcatttacaaactaaattccagttaattaattaatagctttatattgcctttcctgctacatttggttttttcccctgtccctttgattacgggctaaggtagggtagagtgggtgtagtgagtgtatataatgtgatttggccctgtgtattatgatattttgttatttttgttgttatattatttacatttcagtagttgttttttgtgtttccattttagtggataaaatttgtattttgaactatgaatggagactaccgccccagcattagtttcacatgatataccctttaaacccgaatcattgttttatttcctgattacacaggtgttgaatggggaaaggggctagtatatcagtaggatatactatgggatgtatatatatcattgctgttagagaaatgaaataaaatggggctgggctcagtggctcacgcctgtaatcccagcactttgggaggctgaggcaggtggatcacgaggtcaggagatcgagaccatcctggctaacacggtgaaaccccgtctctactaaaaaacagaaaattagccgggcgtggtggcgggcgcctgtagtcccagctactcgggaggctgaggcaggagaatggtgtgaacccgggaggcagagcttgcagtgagccgagatctcgccactgcactccagcctgggcaacagagcaagactctgtctcaaaaaaaaaaaaaaaagaaataagaaaatgggaagcaatatttgacatagttctttttagtcaaatctacttgttaaaaaaagggtagcagtttattcatctgtgaaaggaaaataatacttatcttacaaggttgcaagagctcaaggagaccatgtatgtaaagttcctgctgtaaatatgaactcccatcctaatacccttttacctctctgtgggtttgtcttgacctggaaatttgggctaaaacttagaaaaaattcttacatgataactcagtgatgcttactcatagtttttggtgtttctcatagataagatataaatcagctgggcgcggtggctcatgcctgtaatcccagcactttgggaggccgaggcgggcagatcacctgaggtcgggaggtcgagaccagcctgaccaacatggagaaaccccgtctctactaaaaatacaaaattagctgggcgtggtggctcatgcctgtaatcccagctacttgggaggctgaggcaggagaatcgcttgaacccaggaggcggaggttgtggtgagcgaagatcgtgccattgcactccagcctgggcaacaagagcaaaactctgtctcaaaaaaaaaaaaagatataaatcacaataaataaataggtcaatacaaatgttagccaggcgtggtggcacatgcccatagtcgcagctactctggaggcagaggcaggaggatcacttgagcccatgaatttgaggcagcagtgagctatgattgtgccactgtactccagtctgggtgacagagtgagaccccatctctaaataaataggtcaaacccttaaaaatatttaaattcttaaaaaattgaaaagattattcttctcaaatttagttgagctttctaagagaagcaattggctttttcccacttcaataatcattttcagtttgactcatacagttaacacaatgtgaatttcttcctcagcataacagagttatagaatgacagggctggaagtgaccttagagagtatccagttctttcattttacaggtgaggcaactgagactcaaaggtgatgtaatttgtgcaaagattatagctaattagtagcagagccctgactgggacatagtttgaaggtgaaaaacttcaccaagctacctttcttgaaaggtccaaatgtttatgttttcaactactctttccactgtaccataactttcactacatattaaatgacactttataactaatataataggacaatcatcaatgcatatatagccagcccttcatatctgtgggttttgcatccatggattcaaccaaggaggaattgaaaacactgagaaaaaaaaaaaagaccacacaataaaaaaaaaaaatacaaaataatacaaagaaaaagccaaaattgtcatactgttgttaagcaacagtataacaactatttacatagcattaaggttggtgcaaaaatgcaaaaaaaaaaaaagcaattatttttaaaccaacctaatatattgtattaggtattaaagtcatctggacatgaattaaagtatatgatgccagcctggacaaaaggcaaaaccctgtctctacaaaaaatacaaaaattagctgggcatggtggtgtgtgcctgtagtcctggctactccggagcctgaggtgggaggatcgcttgagtctgggaggcagaggctgcattgagctatgatcatggcactgcattccagcctgggtgacagtgcaagaccttgtctcagaataaataaagtatgtgatgaagatgtgcatacattatatgcaaatactgttttttttttttttaatttaaacagtctcactgtgttgcccaggatggagtgcaatggcacaatcttggctcatggcaaactctgcctcgcaagcagctgggactacaggcatgctccacggtgcccagttaattttttttgtattcttagtagagacagggtttcaccatgttggccaggctagtcttgaatttctgacctcaagtgattcatctcccaaagtgctgggattacaggcgtgagccaccacggccggctaatttttgtattttttagtagtgactggtttcgcggtgttgaccaggctggtctcgaactcctgatctcaggtgatctgcctgcctcggcctcacaaagtgctgggattacaggtgtgaaccactgctcccggccttgtgtgattttatctaagggacttaagcgtcctcaggtcctagggggtcgtgaaaccaaaaccccagggatagcaagggacaattgtatcttcaaagtagacaaatggcgccgggcacggtggctcacgcctgtaatcccagcagtttccgaggctgaggcaggcggctcacctgaggtcaggagttggagaccagcctggccaacatgctgaaaccctgtctgtacaaaaatacaaaaatagctgggcatggtggcgcatgcctgtagtcccagctactagagcgactgaggcaggagaattgcttgaacctgggaggcggaggttgcagggagccaagatggcgccaccgcactccagcctaggtgatagagtgagactccctctcaaaaacaaaacaaaacaaaaaaattagacaaatgctacattaatgtttgggtggtcagattctactttgaatctgaagtttgcagatatgcctatagatttttggagtttaccactttcttattctgtatcattaatgtaatattttaaattactatatatgttaccatttttctggatttagtaagaaatttgcagttttggtttgatgtaacaagggttttaatgtaatttatgttagattttgcatttttttcattactgttatattttaacctgactgactgatctaattgtattagtattgtgaataatcatgtgaaatgttttgagacagagtactatatttgtgaatataattttatggtttttttcacttagaacctttctgtgtggaaaactaagaaaattgctttctgctgtataatctggcattcattgtagattaaagcttatttttctgtgaataaaacgtattcaataaaatactattctttaaaattatatcata

SEQ ID NO: 200461 - DNA, 8415 bp, Homo sapiens
  Payload ID: 19553
  Gene Name: X-linked inhibitor of apoptosis, E3 ubiquitin protein ligase
  Uniprot ID: P98170
  ENST ID: ENST00000434753
  CDS Start-End: 127-1620
ttcttactgcccccatccggttcggggaggtggcgggaccttggcggcgcccggagccggcgtggcgctcatcgagggacgcccggcccaagtgaaaaggtggacaagtcctattttcaagagaagatgacttttaacagttttgaaggatctaaaacttgtgtacctgcagacatcaataaggaagaagaatttgtagaagagtttaatagattaaaaacttttgctaattttccaagtggtagtcctgtttcagcatcaacactggcacgagcagggtttctttatactggtgaaggagataccgtgcggtgctttagttgtcatgcagctgtagatagatggcaatatggagactcagcagttggaagacacaggaaagtatccccaaattgcagatttatcaacggcttttatcttgaaaatagtgccacgcagtctacaaattctggtatccagaatggtcagtacaaagttgaaaactatctgggaagcagagatcattttgccttagacaggccatctgagacacatgcagactatcttttgagaactgggcaggttgtagatatatcagacaccatatacccgaggaaccctgccatgtatagtgaagaagctagattaaagtcctttcagaactggccagactatgctcacctaaccccaagagagttagcaagtgctggactctactacacaggtattggtgaccaagtgcagtgcttttgttgtggtggaaaactgaaaaattgggaaccttgtgatcgtgcctggtcagaacacaggcgacactttcctaattgcttctttgttttgggccggaatcttaatattcgaagtgaatctgatgctgtgagttctgataggaatttcccaaattcaacaaatcttccaagaaatccatccatggcagattatgaagcacggatctttacttttgggacatggatatactcagttaacaaggagcagcttgcaagagctggattttatgctttaggtgaaggtgataaagtaaagtgctttcactgtggaggagggctaactgattggaagcccagtgaagacccttgggaacaacatgctaaatggtatccagggtgcaaatatctgttagaacagaagggacaagaatatataaacaatattcatttaactcattcacttgaggagtgtctggtaagaactactgagaaaacaccatcactaactagaagaattgatgataccatcttccaaaatcctatggtacaagaagctatacgaatggggttcagtttcaaggacattaagaaaataatggaggaaaaaattcagatatctgggagcaactataaatcacttgaggttctggttgcagatctagtgaatgctcagaaagacagtatgcaagatgagtcaagtcagacttcattacagaaagagattagtactgaagagcagctaaggcgcctgcaagaggagaagctttgcaaaatctgtatggatagaaatattgctatcgtttttgttccttgtggacatctagtcacttgtaaacaatgtgctgaagcagttgacaagtgtcccatgtgctacacagtcattactttcaagcaaaaaatttttatgtcttaatctaactctatagtaggcatgttatgttgttcttattaccctgattgaatgtgtgatgtgaactgactttaagtaatcaggattgaattccattagcatttgctaccaagtaggaaaaaaaatgtacatggcagtgttttagttggcaatataatctttgaatttcttgatttttcagggtattagctgtattatccattttttttactgttatttaattgaaaccatagactaagaataagaagcatcatactataactgaacacaatgtgtattcatagtatactgatttaatttctaagtgtaagtgaattaatcatctggattttttattcttttcagataggcttaacaaatggagctttctgtatataaatgtggagattagagttaatctccccaatcacataatttgttttgtgtgaaaaaggaataaattgttccatgctggtggaaagatagagattgtttttagaggttggttgttgtgttttaggattctgtccattttcttttaaagttataaacacgtacttgtgcgaattatttttttaaagtgatttgccatttttgaaagcgtatttaatgatagaatactatcgagccaacatgtactgacatggaaagatgtcaaagatatgttaagtgtaaaatgcaagtggcaaaacactatgtatagtctgagccagatcaaagtatgtatgtttttaatatgcatagaacaaaagatttggaaagatatacaccaaactgttaaatgtggtttctcttcggggagggggggattgggggaggggccccagaggggttttataggggccttttcactttctacttttttcattttgttctgttcgaattttttataagtatgtattacttttgtaatcagaatttttagaaagtattttgctgatttaaaggcttaggcatgttcaaacgcctgcaaaactacttatcactcagctttagtttttctaatccaagaaggcagggcagttaacctttttggtgccaatgtgaaatgtaaatgattttatgtttttcctgctttgtggatgaaaaatatttctgagtggtagttttttgacaggtagaccatgtcttatcttgtttcaaaataagtatttctgattttgtaaaatgaaatataaaatatgtctcagatcttccaattaattagtaaggattcatccttaatccttgctagtttaagcctgcctaagtcactttactaaaagatctttgttaactcagtattttaaacatctgtcagcttatgtaggtaaaagtagaagcatgtttgtacactgcttgtagttatagtgacagctttccatgttgagattctcatatcatcttgtatcttaaagtttcatgtgagtttttaccgttaggatgattaagatgtatataggacaaaatgttaagtctttcctctacctacatttgttttcttggctagtaatagtagtagatacttctgaaataaatgttctctcaagatccttaaaacctcttggaaattataaaaatattggcaagaaaagaagaatagttgtttaaatattttttaaaaaacacttgaataagaatcagtagggtataaactagaagtttaaaaatgcttcatagaacgtccagggtttacattacaagattctcacaacaaacctattgtagaggtgagtaaggcatgttactacagaggaaagtttgagagtaaaactgtaaaaaattatatttttgttgtactttctaagagaaagagtattgttatgttctcctaacttctgttgattactactttaagtgatattcatttaaaacattgcaaatttattttatttatttaattttctttttgagatggagtcttgcttgtcacccaggctggagtgcagtggagtgatctctgctcactgcaacctccgccttctgggttcaagcgattctcgtgcctcagcttcctgagtagctggaattacaggcaggtgccaccatgcccgactaatttttttttatttttagtagagacggggtttcaccatgttggccaggctggtatcaaactcctgacctcaagagatccactcgccttgccctcccaaagtgctgggattacaggcttgagccaccacgcccggctaaaacattgcaaatttaaatgagagttttaaaaattaaataatgactgccctgtttctgttttagtatgtaaatcctcagttcttcacctttgcactgtctgccacttagtttggttatatagtcattaacttgaatttggtctgtatagtctagactttaaatttaaagttttctacaaggggagaaaagtgttaaaatttttaaaatatgttttccaggacacttcacttccaagtcaggtaggtagttcaatctagttgttagccaaggactcaaggactgaattgttttaacataaggcttttcctgttctgggagccgcacttcattaaaattcttctaaaacttgtatgtttagagttaagcaagactttttttcttcctctccatgagttgtgaaatttaatgcacaacgctgatgtggctaacaagtttattttaagaattgtttagaaatgctgttgcttcaggttcttaaaatcactcagcactccaacttctaatcaaatttttggagacttaacagcatttgtctgtgtttgaactataaaaagcaccggatcttttccatctaattccgcaaaaattgatcatttgcaaagtcaaaactatagccatatccaaatcttttccccctcccaagagttctcagtgtctacatgtagactattccttttctgtataaagttcactctaggatttcaagtcaccacttattttacattttagtcatgcaaagattcaagtagttttgcaataagtacttatctttatttgtaataatttagtctgctgatcaaaagcattgtcttaatttttgagaactggttttagcatttacaaactaaattccagttaattaattaatagctttatattgcctttcctgctacatttggttttttcccctgtccctttgattacgggctaaggtagggtagagtgggtgtagtgagtgtatataatgtgatttggccctgtgtattatgatattttgttatttttgttgttatattatttacatttcagtagttgttttttgtgtttccattttagtggataaaatttgtattttgaactatgaatggagactaccgccccagcattagtttcacatgatataccctttaaacccgaatcattgttttatttcctgattacacaggtgttgaatggggaaaggggctagtatatcagtaggatatactatgggatgtatatatatcattgctgttagagaaatgaaataaaatggggctgggctcagtggctcacgcctgtaatcccagcactttgggaggctgaggcaggtggatcacgaggtcaggagatcgagaccatcctggctaacacggtgaaaccccgtctctactaaaaaacagaaaattagccgggcgtggtggcgggcgcctgtagtcccagctactcgggaggctgaggcaggagaatggtgtgaacccgggaggcagagcttgcagtgagccgagatctcgccactgcactccagcctgggcaacagagcaagactctgtctcaaaaaaaaaaaaaaaagaaataagaaaatgggaagcaatatttgacatagttctttttagtcaaatctacttgttaaaaaaagggtagcagtttattcatctgtgaaaggaaaataatacttatcttacaaggttgcaagagctcaaggagaccatgtatgtaaagttcctgctgtaaatatgaactcccatcctaatacccttttacctctctgtgggtttgtcttgacctggaaatttgggctaaaacttagaaaaaattcttacatgataactcagtgatgcttactcatagtttttggtgtttctcatagataagatataaatcagctgggcgcggtggctcatgcctgtaatcccagcactttgggaggccgaggcgggcagatcacctgaggtcgggaggtcgagaccagcctgaccaacatggagaaaccccgtctctactaaaaatacaaaattagctgggcgtggtggctcatgcctgtaatcccagctacttgggaggctgaggcaggagaatcgcttgaacccaggaggcggaggttgtggtgagcgaagatcgtgccattgcactccagcctgggcaacaagagcaaaactctgtctcaaaaaaaaaaaaagatataaatcacaataaataaataggtcaatacaaatgttagccaggcgtggtggcacatgcccatagtcgcagctactctggaggcagaggcaggaggatcacttgagcccatgaatttgaggcagcagtgagctatgattgtgccactgtactccagtctgggtgacagagtgagaccccatctctaaataaataggtcaaacccttaaaaatatttaaattcttaaaaaattgaaaagattattcttctcaaatttagttgagctttctaagagaagcaattggctttttcccacttcaataatcattttcagtttgactcatacagttaacacaatgtgaatttcttcctcagcataacagagttatagaatgacagggctggaagtgaccttagagagtatccagttctttcattttacaggtgaggcaactgagactcaaaggtgatgtaatttgtgcaaagattatagctaattagtagcagagccctgactgggacatagtttgaaggtgaaaaacttcaccaagctacctttcttgaaaggtccaaatgtttatgttttcaactactctttccactgtaccataactttcactacatattaaatgacactttataactaatataataggacaatcatcaatgcatatatagccagcccttcatatctgtgggttttgcatccatggattcaaccaaggaggaattgaaaacactgagaaaaaaaaaaaagaccacacaataaaaaaaaaaaatacaaaataatacaaagaaaaagccaaaattgtcatactgttgttaagcaacagtataacaactatttacatagcattaaggttggtgcaaaaatgcaaaaaaaaaaaaagcaattatttttaaaccaacctaatatattgtattaggtattaaagtcatctggacatgaattaaagtatatgatgccagcctggacaaaaggcaaaaccctgtctctacaaaaaatacaaaaattagctgggcatggtggtgtgtgcctgtagtcctggctactccggagcctgaggtgggaggatcgcttgagtctgggaggcagaggctgcattgagctatgatcatggcactgcattccagcctgggtgacagtgcaagaccttgtctcagaataaataaagtatgtgatgaagatgtgcatacattatatgcaaatactgttttttttttttttaatttaaacagtctcactgtgttgcccaggatggagtgcaatggcacaatcttggctcatggcaaactctgcctcgcaagcagctgggactacaggcatgctccacggtgcccagttaattttttttgtattcttagtagagacagggtttcaccatgttggccaggctagtcttgaatttctgacctcaagtgattcatctcccaaagtgctgggattacaggcgtgagccaccacggccggctaatttttgtattttttagtagtgactggtttcgcggtgttgaccaggctggtctcgaactcctgatctcaggtgatctgcctgcctcggcctcacaaagtgctgggattacaggtgtgaaccactgctcccggccttgtgtgattttatctaagggacttaagcgtcctcaggtcctagggggtcgtgaaaccaaaaccccagggatagcaagggacaattgtatcttcaaagtagacaaatggcgccgggcacggtggctcacgcctgtaatcccagcagtttccgaggctgaggcaggcggctcacctgaggtcaggagttggagaccagcctggccaacatgctgaaaccctgtctgtacaaaaatacaaaaatagctgggcatggtggcgcatgcctgtagtcccagctactagagcgactgaggcaggagaattgcttgaacctgggaggcggaggttgcagggagccaagatggcgccaccgcactccagcctaggtgatagagtgagactccctctcaaaaacaaaacaaaacaaaaaaattagacaaatgctacattaatgtttgggtggtcagattctactttgaatctgaagtttgcagatatgcctatagatttttggagtttaccactttcttattctgtatcattaatgtaatattttaaattactatatatgttaccatttttctggatttagtaagaaatttgcagttttggtttgatgtaacaagggttttaatgtaatttatgttagattttgcatttttttcattactgttatattttaacctgactgactgatctaattgtattagtattgtgaataatcatgtgaaatgttttgagacagagtactatatttgtgaatataattttatggtttttttcacttagaacctttctgtgtggaaaactaagaaaattgctttctgctgtataatctggcattcattgtagattaaagcttatttttctgtgaataaaacgtattcaataaaatactattctttaaaattatatc

SEQ ID NO: 200462 - DNA, 528 bp, Homo sapiens
  Payload ID: 19553
  Gene Name: X-linked inhibitor of apoptosis, E3 ubiquitin protein ligase
  ENST ID: ENST00000430625
  CDS Start-End: 61-528
gctcatcgagggacgcccggcccaagtgaaaaggtggacaagtcctattttcaagagaagatgacttttaacagttttgaaggatctaaaacttgtgtacctgcagacatcaataaggaagaagaatttgtagaagagtttaatagattaaaaacttttgctaattttccaagtggtagtcctgtttcagcatcaacactggcacgagcagggtttctttatactggtgaaggagataccgtgcggtgctttagttgtcatgcagctgtagatagatggcaatatggagactcagcagttggaagacacaggaaagtatccccaaattgcagatttatcaacggcttttatcttgaaaatagtgccacgcagtctacaaattctggtatccagaatggtcagtacaaagttgaaaactatctgggaagcagagatcattttgccttagacaggccatctgagacacatgcagactatcttttgagaactgggcaggttgtagatatatcagacaccatatacccgagg

SEQ ID NO: 200463 - DNA, 390 bp, Homo sapiens
  Payload ID: 19553
  Gene Name: X-linked inhibitor of apoptosis, E3 ubiquitin protein ligase
  ENST ID: ENST00000422098
  CDS Start-End: 342-390
atgtgcgcgcgctaggtcagcttctcggttccagccgggcgggggggtcgggtgggggtgggggtaggggttgcaagggcctcattttttcttactgcccccatccggttcggggaggtggcgggaccttggcggcgcccggagccggcgtggcgctcatcgagggacgcccggcccaagtggctggggccaagccgcagagcggagttggcatttccagattggggctcgggccgcgcctcctccgggaccctccccttggaccgagccgatcgccgcggggcagttcgggccggctgtcctggcgcgaaaaggtggacaagtcctattttcaagagaagatgacttttaacagttttgaaggatctaaaacttgtgtacctgcagaca

SEQ ID NO: 200464 - DNA, 5206 bp, Homo sapiens
  Payload ID: 19554
  Gene Name: X-linked Kx blood group
  Uniprot ID: P51811
  ENST ID: ENST00000378616
  CDS Start-End: 204-1538
ccaggtcggccgcccccaccaggtccagttccagagcccaggccggtcggccgggcccgcgtgccctcggcgggctgcgcagagcgcgggagcggtttggggctgggcatgctgggagcccctcgggcaacggccgccgccgccacagccacacagccgccgccactgcgtccgtccccggtgagcgccgctgacgcgcggagatgaaattcccggcctcggtgctggcgtccgtgttcctgttcgtggccgagacaacggcggcgctcagcctgagcagcacctaccgctcgggcggggaccgcatgtggcaggcgctgacgttgcttttctcgctactgccttgcgcgctcgtgcagctcacgcttctcttcgtacaccgcgacctcagccgcgaccgcccgctcgtactgctgctgcacctgctgcaacttgggccccttttcaggtgttttgaagtcttctgcatctactttcagtcaggcaacaatgaagagccttatgtcagtatcaccaagaagaggcaaatgccaaaaaatggcctctcagaggagattgagaaggaggtgggccaggcagaaggcaaactaatcacccaccgatcagcgttcagccgggcgtcggtgatccaggctttcttgggctcagccccccagctgaccctacagctgtacataagtgtcatgcagcaggacgtcactgttggaagaagtctcctcatgaccatatccctgttgtccattgtgtatggagccttgcgctgcaacatcctagccatcaaaatcaagtacgatgagtatgaagtcaaagtgaagcctctggcctatgtctgtatcttcctgtggaggagctttgagattgccactcgagttgtagtcctggtcctctttacctccgtcctgaagacctgggtggtggttataatactcatcaacttcttcagtttcttcttgtacccctggatcctcttctggtgcagtggttccccattccctgagaacatagagaaggccctcagtagagtgggcaccaccattgtactatgctttctaactttactctatactggtatcaacatgttctgctggtctgctgtacagctgaaaattgacagccctgacctcatcagcaagtcccataattggtaccagctactggtgtattacatgataagattcatcgagaatgccatcctcctcctcctgtggtatcttttcaagactgacatctatatgtatgtgtgcgcacctctgttggtcctgcagctgctcattgggtactgcacagccattctcttcatgcttgtattctatcagttcttccacccttgcaaaaagctcttttcttccagtgtttctgaaggctttcagaggtggctcaggtgtttttgctgggcctgcaggcagcaaaaaccctgtgagccgataggaaaggaagatctacagtcatccagagatagagatgagacaccttctagcagtaaaacaagtcctgagcctggtcagttcttgaatgctgaagatctctgctctgcttaatgggacccaaggtctcagagcacaggcatattattttctgggtttgatactcgttattcatacaaataatgagccctacacagggaacaaggcaggaagttagctgttaactccttgtgagctgcttctctttatagagctcttgggtatgtagaactgtatgggaagaagccaggaaaacctctgagtgttgaaggggcaacccaaggcatcacagttcacaggtaaccatgttgtgttcttctaggcattactggccttttcactgacaagttacccctgaaatctgagttgtactggttagattcattaggttgaatgaggagaggggcttacctgttctctagttttccagactgctggtttgggtaacctgaagttttatgatccctgaacatagttttcacccaagagctgtcctggtgaccaaaaaagattactagggttttgccatcagcaacatcattcctgtcagagctttcagggagggctgttcaagtttggtttttgaatagacagaggtttcattttcatctcattagggcttttttgtacatagccaactgtagccaccctggcatgctgtctctaattgattcaagggcctagatttggagactttgttccttagcatccatggatgcagaaatgagtgataaatttggccatgaaagccctggaattttaggaaagttgtgattctttgatatgttgatgaaattctggatcaggaggggtgttaaaacatcaaaatgatggcgacttgtataagtagaattcttaccatcttactcctgcctccccattccttgcctgtcaggaccattttagaagagttaccttggttaacttaagggttttttagaaaaccccacagaaatctctcacccagttcaggtgtatagggaattttcattttcattatttcaaggaatagagttttcctcactaccacttgtaattagagattgacttcagaaactttttctaaattataaagacggaatgaccagaaaatttttgtctttcatggaatgcaatttgacttggcataattgtgagttaatttgataaagatctccagttgtatcctctgacaccctttaatgttctatataatttttcctttaatcggagaccctatttgtttcattaaagaggattgggtagcatatcctcaattatcttggaaaaatgcgtagatctagtgccattatttctaccattaaaatcttgaaagcgaaatacttgaaaagaggtgaccataaagatcacaccaatttagaatgaatattaaagtctgagaaatttacaaaagggactctatggactcgattttaccatatggaatagggatccacttctctgttaacctacaaaacgtatttatctggccattgcacttcggataattttcatttttaattcctcttggtgtcaaatttttaagtaatttcatgcacacaggagaaaatgcaatttgataatcagtttccactacattcggaggtcaagaaagcagtatatattctttcacaaggcatccatactgtttaatatttatagagttcatagaaatacatcaataagctcctaaattatagagcctcaattttggtttttctcatttgaaatgtttttgatttatcaatatttgtggtttaactttgtgggggtgtccaggcagtagatcattttttgtctatttttaaccaaataagaataacactcaagactatgttctccatcccaacacatcacttaccacttgcactattcttaataggcctaaaatagtgagcatatataatcaaaataatacttcatacaacatatacttccatgcactcttcatgtaatcacatatgtgcatagatacacaatcgtattacataaaacacccttgaaaatatatgactttgaataaaataaagctaccatgttaatacatcattttttgtttcttcctaattaacaaaagggctctataatgattaggagagctgtaaggccattctttagtcattccaagtgtatatttgtatcacaccagttacttgtgttcattgacaccaaatattttcaagctttttgtgagaaagagattcttgccttgaggctctgcagtggcaaatggtaggggcaatagcgctcccttttcacctgaaatgccttcagctcaggccttgggagtgaggtgtgggagtagccaccagcctcccactgactaggcatgttaggaattagacaaggatggagagactggttttttccagccttggtttggaagcttgtctcaaaaaccattacaaaatcttaaccttcaaatacattctaaatcactttaatttagaagataggtgagcaacttgagtgatcccaaaccaaactaacagtgctggtttgtccgacacccaaagcccacttcacacatttataaggacagagatttggtaactcatttgggtattttgtcagttttaacccttaatatacaggtatcccagctttgggcacatgtatgtccattcactttcaggaaggggtgtcagtactttctttctgtgtggtgaaaacataagccatggtgaactgataatttttgtttttaaattatttatattactgaattggcaaaattacagttcacactgcagagctaggttgtcctattggcataaaacaaaccagcaacttttctcatgtgtttggagttaaaatgtgtttttcagttataatttcaatttttaaatttcttggtgctttgtctaattaattacatcccataacttgtcaggatagttgctccaactgaattgctatcatttggctggatgggggtgaagtatgtcttcaaaatatattgaagtaagttcatcaaacatgtttagacttcctctcattgctggagacagcccagtgtagagattggcacttccctgtccagcactacaacttaattgctctatgcctcagtttccccataatacccttttccaacctacctcacaaggttatcagaaagatcaaattaaataatagatgtgaaaatgctttgaaaatgtttttaagtgctatgcatatttatagagttattatagttattcaaatccataagcaggttatttttatttttttactgtttgaaaagaaataagtagtgtcattcatatgagttcctgagtggatatgcgaatctttggtcttctcgacaggtgccctttctcttaccactagttgcttacaaaaatagcacccaaacacatggcacttggaagaaaaagacccactgaatctgagaaagtactttctggtggcaaatgaatttatcattttagtatagttttcgataaaggatatagcaacatcttttgataattgtgctttacaacttgaatgctgattcaaggcattatttggatgtgagtttaatcttttcagccttgtaaatgggaaaatatatattaaaattgattgtcaaatacagcatttctttggaaaccaccttaaaacattagtgctatggttatgagtgtatgtgccagtacttaccagtcaatgcattgtggatatgagctttcgttgactgcttctctgcagtcgttgatgctaataaatattgtcctgtttcttcatataataaattaatttttcaatttctccttgta

SEQ ID NO: 200465 - DNA, 2667 bp, Homo sapiens
  Payload ID: 19555
  Gene Name: XPA binding protein 2
  Uniprot ID: Q9HCS7
  ENST ID: ENST00000358368
  CDS Start-End: 39-2606
agcgcgcgactctctcctgtacctgggcatccagaaaaatggtggtgatggcgcgactctcgcggcccgagcggccggaccttgtcttcgaggaagaggacctcccctatgaggaggaaatcatgcggaaccaattctctgtcaaatgctggcttcgctacatcgagttcaaacagggcgccccgaagcccaggctcaatcagctatacgagcgggcactcaagctgctgccctgcagctacaaactctggtaccgatacctgaaggcgcgtcgggcacaggtgaagcatcgctgtgtgaccgaccctgcctatgaagatgtcaacaactgtcatgagagggcctttgtgttcatgcacaagatgcctcgtctgtggctagattactgccagttcctcatggaccaggggcgcgtcacacacacccgccgcaccttcgaccgtgccctccgggcactgcccatcacgcagcactctcgaatttggcccctgtatctgcgcttcctgcgctcacacccactgcctgagacagctgtgcgaggctatcggcgcttcctcaagctgagtcctgagagtgcagaggagtacattgagtacctcaagtcaagtgaccggctggatgaggccgcccagcgcctggccaccgtggtgaacgacgagcgtttcgtgtctaaggccggcaagtccaactaccagctgtggcacgagctgtgcgacctcatctcccagaatccggacaaggtacagtccctcaatgtggacgccatcatccgcgggggcctcacccgcttcaccgaccagctgggcaagctctggtgttctctcgccgactactacatccgcagcggccatttcgagaaggctcgggacgtgtacgaggaggccatccggacagtgatgaccgtgcgggacttcacacaggtgtttgacagctacgcccagttcgaggagagcatgatcgctgcaaagatggagaccgcctcggagctggggcgcgaggaggaggatgatgtggacctggagctgcgcctggcccgcttcgagcagctcatcagccggcggcccctgctcctcaacagcgtcttgctgcgccaaaacccacaccacgtgcacgagtggcacaagcgtgtcgccctgcaccagggccgcccccgggagatcatcaacacctacacagaggctgtgcagacggtggaccccttcaaggccacaggcaagccccacactctgtgggtggcgtttgccaagttttatgaggacaacggacagctggacgatgcccgtgtcatcctggagaaggccaccaaggtgaacttcaagcaggtggatgacctggcaagcgtgtggtgtcagtgcggagagctggagctccgacacgagaactacgatgaggccttgcggctgctgcgaaaggccacggcgctgcctgcccgccgggccgagtactttgatggttcagagcccgtgcagaaccgcgtgtacaagtcactgaaggtctggtccatgctcgccgacctggaggagagcctcggcaccttccagtccaccaaggccgtgtacgaccgcatcctggacctgcgtatcgcaacaccccagatcgtcatcaactatgccatgttcctggaggagcacaagtacttcgaggagagcttcaaggcgtacgagcgcggcatctcgctgttcaagtggcccaacgtgtccgacatctggagcacctacctgaccaaattcattgcccgctatgggggccgcaagctggagcgggcacgggacctgtttgaacaggctctggacggctgccccccaaaatatgccaagaccttgtacctgctgtacgcacagctggaggaggagtggggcctggcccggcatgccatggccgtgtacgagcgtgccaccagggccgtggagcccgcccagcagtatgacatgttcaacatctacatcaagcgggcggccgagatctatggggtcacccacacccgcggcatctaccagaaggccattgaggtgctgtcggacgagcacgcgcgtgagatgtgcctgcggtttgcagacatggagtgcaagctcggggagattgaccgcgcccgggccatctacagcttctgctcccagatctgtgacccccggacgaccggcgcgttctggcagacgtggaaggactttgaggtccggcatggcaatgaggacaccatcaaggaaatgctgcgtatccggcgcagcgtgcaggccacgtacaacacgcaggtcaacttcatggcctcgcagatgctcaaggtctcgggcagtgccacgggcaccgtgtctgacctggcccctgggcagagtggcatggacgacatgaagctgctggaacagcgggcagagcagctggcggctgaggcggagcgtgaccagcccttgcgcgcccagagcaagatcctgttcgtgaggagtgacgcctcccgggaggagctggcagagctggcacagcaggtcaaccccgaggagatccagctgggcgaggacgaggacgaggacgagatggacctggagcccaacgaggttcggctggagcagcagagcgtgccagccgcagtgtttgggagcctgaaggaagactgacccgtccctcccccatcccccctccccaccccctccccaatacagctacgtttgtacatca

SEQ ID NO: 200466 - DNA, 2467 bp, Homo sapiens
  Payload ID: 19556
  Gene Name: X-prolyl aminopeptidase (aminopeptidase P) 1, soluble
  Uniprot ID: Q9NQW7
  ENST ID: ENST00000322238
  CDS Start-End: 121-2049
gacccggcgctagcccgcccgcccgcccgccggctctcgcgcctccttcgcgccggcccttccgcgggtgatcagctggtctgcgctcccctgacgtgggctggggcacgtcaccgccgaatggcagcctccagaaagccaccgcgagtaagggtgaatcaccaggattttcaactgagaaatttaagaataattgaacctaacgaggtgacacactcaggagacacaggtgtggaaacagacggcagaatgcctccaaaggtgacttcagagctgcttcggcagctgagacaagccatgaggaactctgagtatgtgaccgaaccgatccaggcctacatcatcccatcgggagatgctcatcagagtgagtatattgctccatgtgactgtcggcgggcttttgtctctggattcgatggctctgcgggcacagccatcatcacagaagagcatgcagccatgtggactgacgggcgctactttctccaggctgccaagcaaatggacagcaactggacacttatgaagatgggtctgaaggacacaccaactcaggaagactggctggtgagtgtgcttcctgaaggatccagggttggtgtggaccccttgatcattcctacagattattggaagaaaatggccaaagttctgagaagtgccggccatcacctcattcctgtcaaggagaacctcgttgacaaaatctggacagaccgtcctgagcgcccttgcaagcctctcctcacactgggcctggattacacaggcatctcctggaaggacaaggttgcagaccttcggttgaaaatggctgagaggaacgtcatgtggtttgtggtcactgccttggatgagattgcgtggctatttaatctccgaggatcagatgtggagcacaatccagtatttttctcctacgcaatcataggactagagacgatcatgctcttcattgatggtgaccgcatagacgcccccagtgtgaaggagcacctgcttcttgacttgggtctggaagccgaatacaggatccaggtgcatccctacaagtccatcctgagcgagctcaaggccctgtgtgctgacctctccccaagggagaaggtgtgggtcagtgacaaggccagctatgctgtgagcgagaccatccccaaggaccaccgctgctgtatgccttacacccccatctgcatcgccaaagctgtgaagaattcagctgagtcagaaggcatgaggcgggctcacattaaagatgctgttgctctctgtgaactctttaactggctggagaaagaggttcccaaaggtggtgtgacagagatctcagctgctgacaaagctgaggagtttcgcaggcaacaggcagactttgtggacctgagcttcccaacaatttccagtacgggacccaacggcgccatcattcactacgcggatggcaccacagatgtgacgcggacaatgcattttgggacccctacagcctacgagaaggaatgcttcacatatgtcctcaagggccacatagctgtgagtgcagccgttttcccgactggaaccaaaggtcaccttcttgactcctttgcccgttcagctttatgggattcaggcctagattacttgcacgggactggacatggtgttgggtcttttttgaatgtccatgagggtccttgcggcatcagttacaaaacattctctgatgagcccttggaggcaggcatgattgtcactgatgagcccgggtactatgaagatggggcttttggaattcgcattgagaatgttgtccttgtggttcctgtgaagaccaagtataattttaataaccggggaagcctgacctttgaacctctaacattggttccaattcagaccaaaatgatagatgtggattctcttacagacaaagagtgcgactggctcaacaattaccacctgacctgcagggatgtgattgggaaggaattgcagaaacagggccgccaggaagctctcgagtggctcatcagagagacgcaacccatctccaaacagcattaataaatacctccccggttttgtttttgtaaaatgctctggaggaaggaagaaacgtggcagatccctgacatctttcccctttcctttccttcttccctacctcccctttttactttagactttaagaagaacagaaaatcttcttatcctctttgatattttattgcaaacactcagtcttttatgattttttaattgttgagaacaagccaagaataaaattgctgcaccagaaggagggtccctccaaagttgaacacttggtgaaaggaagatgccccgacttctttggccagtgatggggaatcagtgagtgctccatgatggtcatgttccaggtgctagtacatcattcatgatcaccttaatgctcatgagactatatttatgatcagtgaataaaaatgtcagaactgtg

SEQ ID NO: 200467 - DNA, 2344 bp, Homo sapiens
  Payload ID: 19556
  Gene Name: X-prolyl aminopeptidase (aminopeptidase P) 1, soluble
  ENST ID: ENST00000369683
  CDS Start-End: 268-1926
ctccttcgcgccggcccttccgcgggtgatcagctggtctgcgctcccctgacgtgggctggggcacgtcaccgccgaatggcagcctccagaaagccaccgcgagtaagacggcagaatgcctccaaaggtgacttcagagctgcttcggcagctgagacaagccatgaggaactctgagtatgtgaccgaaccgatccaggcctacatcatcccatcgggagatgctcatcaggcacagccatcatcacagaagagcatgcagccatgtggactgacgggcgctactttctccaggctgccaagcaaatggacagcaactggacacttatgaagatgggtctgaaggacacaccaactcaggaagactggctggtgagtgtgcttcctgaaggatccagggttggtgtggaccccttgatcattcctacagattattggaagaaaatggccaaagttctgagaagtgccggccatcacctcattcctgtcaaggagaacctcgttgacaaaatctggacagaccgtcctgagcgcccttgcaagcctctcctcacactgggcctggattacacaggcatctcctggaaggacaaggttgcagaccttcggttgaaaatggctgagaggaacgtcatgtggtttgtggtcactgccttggatgagattgcgtggctatttaatctccgaggatcagatgtggagcacaatccagtatttttctcctacgcaatcataggactagagacgatcatgctcttcattgatggtgaccgcatagacgcccccagtgtgaaggagcacctgcttcttgacttgggtctggaagccgaatacaggatccaggtgcatccctacaagtccatcctgagcgagctcaaggccctgtgtgctgacctctccccaagggagaaggtgtgggtcagtgacaaggccagctatgctgtgagcgagaccatccccaaggaccaccgctgctgtatgccttacacccccatctgcatcgccaaagctgtgaagaattcagctgagtcagaaggcatgaggcgggctcacattaaagatgctgttgctctctgtgaactctttaactggctggagaaagaggttcccaaaggtggtgtgacagagatctcagctgctgacaaagctgaggagtttcgcaggcaacaggcagactttgtggacctgagcttcccaacaatttccagtacgggacccaacggcgccatcattcactacgcgccagtccctgagacgaataggaccttgtccctggatgaggtgtaccttattgactcgggtgctcaatacaaggatggcaccacagatgtgacgcggacaatgcattttgggacccctacagcctacgagaaggaatgcttcacatatgtcctcaagggccacatagctgtgagtgcagccgttttcccgactggaaccaaaggtcaccttcttgactcctttgcccgttcagctttatgggattcaggcctagattacttgcacgggactggacatggtgttgggtcttttttgaatgtccatgagggtccttgcggcatcagttacaaaacattctctgatgagcccttggaggcaggcatgattgtcactgatgagcccgggtactatgaagatggggcttttggaattcgcattgagaatgttgtccttgtggttcctgtgaagaccaagtataattttaataaccggggaagcctgacctttgaacctctaacattggttccaattcagaccaaaatgatagatgtggattctcttacagacaaagagtgcgactggctcaacaattaccacctgacctgcagggatgtgattgggaaggaattgcagaaacagggccgccaggaagctctcgagtggctcatcagagagacgcaacccatctccaaacagcattaataaatacctccccggttttgtttttgtaaaatgctctggaggaaggaagaaacgtggcagatccctgacatctttcccctttcctttccttcttccctacctcccctttttactttagactttaagaagaacagaaaatcttcttatcctctttgatattttattgcaaacactcagtcttttatgattttttaattgttgagaacaagccaagaataaaattgctgcaccagaaggagggtccctccaaagttgaacacttggtgaaaggaagatgccccgacttctttggccagtgatggggaatcagtgagtgctccatgatggtcatgttccaggtgctagtacatcattcatgatcaccttaatgctcatgagactatatttatgatcagtgaataaaaatgtcagaactgtg

SEQ ID NO: 200468 - DNA, 1006 bp, Homo sapiens
  Payload ID: 19556
  Gene Name: X-prolyl aminopeptidase (aminopeptidase P) 1, soluble
  ENST ID: ENST00000403138
  CDS Start-End: 98-1006
gcgggtgatcagctggtctgcgctcccctgacgtgggctggggcacgtcaccgccgaatggcagcctccagaaagccaccgcgagtaagacggcagaatgcctccaaaggtgacttcagagctgcttcggcagctgagacaagccatgaggaactctgagtatgtgaccgaaccgatccaggcctacatcatcccatcgggagatgctcatcagagtgagtatattgctccatgtgactgtcggcgggcttttgtctctggattcgatggctctgcgggcacagccatcatcacagaagagcatgcagccatgtggactgacgggcgctactttctccaggctgccaagcaaatggacagcaactggacacttatgaagatgggtctgaaggacacaccaactcaggaagactggctggtgagtgtgcttcctgaaggatccagggttggtgtggaccccttgatcattcctacagattattggaagaaaatggccaaagttctgagaagtgccggccatcacctcattcctgtcaaggagaacctcgttgacaaaatctggacagaccgtcctgagcgcccttgcaagcctctcctcacactgggcctggattacacaggcatctcctggaaggacaaggttgcagaccttcggttgaaaatggctgagaggaacgtcatgtggtttgtggtcactgccttggatgagattgcgtggctatttaatctccgaggatcagatgtggagcacaatccagtatttttctcctacgcaatcataggactagagacgatcatgctcttcattgatggtgaccgcatagacgcccccagtgtgaaggagcacctgcttcttgacttgggtctggaagccgaatacaggatccaggtgcatccctacaagtccatcctgagcgagctcaaggccctgtgtgctgacctctccccaagggagaaggtgtgggtcagtgacaaggccagctatgctgtgagcgagaccatcccc

SEQ ID NO: 200469 - DNA, 712 bp, Homo sapiens
  Payload ID: 19556
  Gene Name: X-prolyl aminopeptidase (aminopeptidase P) 1, soluble
  ENST ID: ENST00000423625
  CDS Start-End: 13-712
gcagacggcagaatgcctccaaaggtgacttcagagctgcttcggcagctgagacaagccatgaggaactctgagtatgtgaccgaaccgatccaggcctacatcatcccatcgggagatgctcatcagagtgagtatattgctccatgtgactgtcggcgggcttttgtctctggattcgatggctctgcgggcacagccatcatcacagaagagcatgcagccatgtggactgacgggcgctactttctccaggctgccaagcaaatggacagcaactggacacttatgaagatgggtctgaaggacacaccaactcaggaagactggctggtgagtgtgcttcctgaaggatccagggttggtgtggaccccttgatcattcctacagattattggaagaaaatggccaaagttctgagaagtgccggccatcacctcattcctgtcaaggagaacctcgttgacaaaatctggacagaccgtcctgagcgcccttgcaagcctctcctcacactgggcctggattacacagggctatttaatctccgaggatcagatgtggagcacaatccagtatttttctcctacgcaatcataggactagagacgatcatgctcttcattgatggtgaccgcatagacgcccccagtgtgaaggagcacctgcttcttgacttgggtctggaagccgaatacaggatccaggtgc

SEQ ID NO: 200470 - DNA, 2539 bp, Homo sapiens
  Payload ID: 19556
  Gene Name: X-prolyl aminopeptidase (aminopeptidase P) 1, soluble
  Uniprot ID: Q9NQW7
  ENST ID: ENST00000502935
  CDS Start-End: 121-2121
gacccggcgctagcccgcccgcccgcccgccggctctcgcgcctccttcgcgccggcccttccgcgggtgatcagctggtctgcgctcccctgacgtgggctggggcacgtcaccgccgaatggcagcctccagaaagccaccgcgagtaagggtgaatcaccaggattttcaactgagaaatttaagaataattgaacctaacgaggtgacacactcaggagacacaggtgtggaaacagacggcagaatgcctccaaaggtgacttcagagctgcttcggcagctgagacaagccatgaggaactctgagtatgtgaccgaaccgatccaggcctacatcatcccatcgggagatgctcatcagagtgagtatattgctccatgtgactgtcggcgggcttttgtctctggattcgatggctctgcgggcacagccatcatcacagaagagcatgcagccatgtggactgacgggcgctactttctccaggctgccaagcaaatggacagcaactggacacttatgaagatgggtctgaaggacacaccaactcaggaagactggctggtgagtgtgcttcctgaaggatccagggttggtgtggaccccttgatcattcctacagattattggaagaaaatggccaaagttctgagaagtgccggccatcacctcattcctgtcaaggagaacctcgttgacaaaatctggacagaccgtcctgagcgcccttgcaagcctctcctcacactgggcctggattacacaggcatctcctggaaggacaaggttgcagaccttcggttgaaaatggctgagaggaacgtcatgtggtttgtggtcactgccttggatgagattgcgtggctatttaatctccgaggatcagatgtggagcacaatccagtatttttctcctacgcaatcataggactagagacgatcatgctcttcattgatggtgaccgcatagacgcccccagtgtgaaggagcacctgcttcttgacttgggtctggaagccgaatacaggatccaggtgcatccctacaagtccatcctgagcgagctcaaggccctgtgtgctgacctctccccaagggagaaggtgtgggtcagtgacaaggccagctatgctgtgagcgagaccatccccaaggaccaccgctgctgtatgccttacacccccatctgcatcgccaaagctgtgaagaattcagctgagtcagaaggcatgaggcgggctcacattaaagatgctgttgctctctgtgaactctttaactggctggagaaagaggttcccaaaggtggtgtgacagagatctcagctgctgacaaagctgaggagtttcgcaggcaacaggcagactttgtggacctgagcttcccaacaatttccagtacgggacccaacggcgccatcattcactacgcgccagtccctgagacgaataggaccttgtccctggatgaggtgtaccttattgactcgggtgctcaatacaaggatggcaccacagatgtgacgcggacaatgcattttgggacccctacagcctacgagaaggaatgcttcacatatgtcctcaagggccacatagctgtgagtgcagccgttttcccgactggaaccaaaggtcaccttcttgactcctttgcccgttcagctttatgggattcaggcctagattacttgcacgggactggacatggtgttgggtcttttttgaatgtccatgagggtccttgcggcatcagttacaaaacattctctgatgagcccttggaggcaggcatgattgtcactgatgagcccgggtactatgaagatggggcttttggaattcgcattgagaatgttgtccttgtggttcctgtgaagaccaagtataattttaataaccggggaagcctgacctttgaacctctaacattggttccaattcagaccaaaatgatagatgtggattctcttacagacaaagagtgcgactggctcaacaattaccacctgacctgcagggatgtgattgggaaggaattgcagaaacagggccgccaggaagctctcgagtggctcatcagagagacgcaacccatctccaaacagcattaataaatacctccccggttttgtttttgtaaaatgctctggaggaaggaagaaacgtggcagatccctgacatctttcccctttcctttccttcttccctacctcccctttttactttagactttaagaagaacagaaaatcttcttatcctctttgatattttattgcaaacactcagtcttttatgattttttaattgttgagaacaagccaagaataaaattgctgcaccagaaggagggtccctccaaagttgaacacttggtgaaaggaagatgccccgacttctttggccagtgatggggaatcagtgagtgctccatgatggtcatgttccaggtgctagtacatcattcatgatcaccttaatgctcatgagactatatttatgatcagtgaataaaaatgtcagaactgtg

SEQ ID NO: 200471 - DNA, 912 bp, Homo sapiens
  Payload ID: 19557
  Gene Name: X-prolyl aminopeptidase (aminopeptidase P) 2, membrane-bound
  ENST ID: ENST00000371105
  CDS Start-End: 241-792
cttgcacagtccgcctcgggcagcccaaagctcctctgcccaccctggctcccagagccctccaaaacaaaagaccagagaagcactctccacccagcagccagacgcctccttcttgacgccagcccccaccctctgtctgctcgagcccaggaaaggcctgaaggaagaggccggggaaagagccctccctctctcccttgtccctccatccacccagcgccggcatctggagaccctatggcccgggctcactggggctgctgcccctggctggtcctcctctgtgcttgtgcctggggccacacaaagccagtggaccttggagggcaggatgtgagaaactgttccaccaaccccccttaccttccagttactgtggtcaataccacaatgtcactcacagccctccgccagcagatgcagacccagaatctctcagcctacatcatcccaggcacagatgctcacatgaacgagtacatcggccaacatgacgagaggcgtgcgtggattacaggctttacagggtctgcaggaactgcagtggtgactatgaagaaagcagctgtctggaccgacagtcgctactggactcaggctgagcggcagatggactgcaactgggagctccataaggaagttggcaccactcctattgtcacctggctcctcaccgagattcctgctggagggcgtgtgggttttgaccccttcctcttgtccattggtatgctcttccttcagtccctgaatttgtccatgctaacgagggtgactcagcttccctaggatataaagaaatggaccttggtagaaggaggggcggtgggactataaagatagagcatttgaaattgtagttgcagaatgttttgcaatgaggatgtattcatggattgtgtaattaaa

SEQ ID NO: 200472 - DNA, 3270 bp, Homo sapiens
  Payload ID: 19557
  Gene Name: X-prolyl aminopeptidase (aminopeptidase P) 2, membrane-bound
  Uniprot ID: O43895
  ENST ID: ENST00000371106
  CDS Start-End: 193-2217
ctcccagagccctccaaaacaaaagaccagagaagcactctccacccagcagccagacgcctccttcttgacgccagcccccaccctctgtctgctcgagcccaggaaaggcctgaaggaagaggccggggaaagagccctccctctctcccttgtccctccatccacccagcgccggcatctggagaccctatggcccgggctcactggggctgctgcccctggctggtcctcctctgtgcttgtgcctggggccacacaaagccagtggaccttggagggcaggatgtgagaaactgttccaccaaccccccttaccttccagttactgtggtcaataccacaatgtcactcacagccctccgccagcagatgcagacccagaatctctcagcctacatcatcccaggcacagatgctcacatgaacgagtacatcggccaacatgacgagaggcgtgcgtggattacaggctttacagggtctgcaggaactgcagtggtgactatgaagaaagcagctgtctggaccgacagtcgctactggactcaggctgagcggcagatggactgcaactgggagctccataaggaagttggcaccactcctattgtcacctggctcctcaccgagattcctgctggagggcgtgtgggttttgaccccttcctcttgtccattgacacctgggagagttatgatctggccctccaaggctctaacagacagctggtgtccatcacaaccaatcttgtggacctggtatggggatcagagaggccaccggttccaaatcaacccatttatgccctgcaggaggcattcacagggagcacttggcaggagaaagtatctggcgtccgaagccagatgcagaagcatcaaaaggtcccgactgccgtccttctgtcggcgcttgaggagacggcctggctcttcaaccttcgagccagtgacatcccctataaccccttcttctattcctacacgctgctcacagactcttctattaggttgtttgcaaacaagagtcgctttagctccgaaaccttgagctatctgaactccagttgcacaggccccatgtgtgtgcaaatcgaggattacagccaagttcgtgacagcatccaggcctactcattgggagatgtgaggatctggattgggaccagctataccatgtatgggatctatgaaatgatacccaaggagaaactcgtgacagacacctactccccagtgatgatgaccaaggcagtgaagaacagcaaggagcaggccctcctcaaggccagccacgtgcgggacgctgtggctgtgatccggtacttggtctggctggagaagaacgtgcccaaaggcacagtggatgagttctcgggggcagagatcgtggacaagttccgaggagaagaacagttctcctccggacccagttttgaaaccatctctgctagtggtctgaatgctgccctggcccactacagcccgaccaaggagctgaaccgcaagctgtcctcagatgagatgtacctgctggactctggggggcagtactgggacgggaccacagacatcaccagaacagtccactggggcaccccctctgccttccagaaggaggcatacacccgtgtgctgataggaaatattgacctgtccaggctcatctttcccgctgctacatcagggcgaatggtggaggcctttgcccgcagagccttgtgggatgctggtctcaattatggtcatgggacaggccacggcattggcaacttcctgtgtgtgcatgagtggccagtgggattccagtccaacaacatcgctatggccaagggcatgttcacttccattgaacctggttactataaggatggagaatttgggatccgtctcgaagatgtggctctcgtggtagaagcaaagaccaagtacccagggagctacctgacctttgaagtggtatcatttgtgccctatgaccggaacctcatcgatgtcagcctgctgtctcccgagcatctccagtacctgaatcgctactaccagaccatccgggagaaggtgggtccagagctgcagaggcgccagctactagaggagttcgagtggcttcaacagcacacagagcccctggccgccagggccccagacaccgcctcctgggcctctgtgttagtggtctccacccttgccatccttggctggagtgtctagaggctccagactctcctgttaaccctccatctagatggggggctcccttgcttagctcccctcaccctgcactgaacataccccaagagcccctgctggcccattgcctagaaacctttgcattcatcctccttctccaagacctatggagaaggtcccaggccccaggaacacagggcttcttggccccagatggcacctccctgcaccccggggttgtataccacaccctgggcccctaatcccaggccccgagataggaaagccagctagtctcttctcttctgtgatctcagtaggcctaacctataacctagcacagactgctacagctgctcccctcccgccaaacaaaaccccaagagagcaatgcccctaccacccaagggtgccatggtcccgggagagcccaaacctatcaccacctgttgggcatagccagagctgttcccacccagccagggcatgaaacatcaaccccccacatgtgaacccatcattcctaaaccctgggtaggctccatgccaagtaacagcagagggagttaagccataggaatttggctgtggagtaagagggaatgcggtgaggcactctggaatatgaccctaccagaggttggagaacaaacttgggcagccggaacccgtcactattctagacttccctggcattcgaggagccctttgaactttccaaagtgcagccacagctacaatgctgttaaatcctcccacattcttggatgccccttcaccttgtgtggacagtgtctggtttctccattttacagacaggaaaactgagcttcagacagggggtgggctttgcctaaggacacacaaatttggttgggagttgatggggccagatgagccagcattccagctctttcacccttcagcaacatgcagagtccctgagcccacctcccagccctctcctcattctctgaacccactgtggtgagaagaatttgctccggccaaattggccgttagccacctgggtccacatcctgctaagacgtttaaaacagcctaacaaagaca

SEQ ID NO: 200473 - DNA, 7988 bp, Homo sapiens
  Payload ID: 19558
  Gene Name: X-prolyl aminopeptidase 3, mitochondrial
  Uniprot ID: Q9NQH7
  ENST ID: ENST00000357137
  CDS Start-End: 85-1608
ggtttcctggcgacgcggccctgcaggcggttgcgttccccgtcgttaccctctttctcttcccgacgcgtgagttaggccgtaatgccttggctgctctcagcccccaagctggttcccgctgtagcaaacgtccgcggcctctcaggatgtatgttgtgttcacagcgaaggtactcccttcagcctgtcccagaaaggaggattccaaaccgatacttaggccagcccagcccctttacacacccacacctcctcagaccaggggaggtaactccaggactatctcaggtggaatatgcacttcgcagacacaaactaatgtctctgatccagaaggaagctcaagggcagagtgggacagaccagacagtggttgtgctctccaaccctacatactacatgagcaacgatattccctatactttccaccaagacaacaatttcctgtacctatgtggattccaagagcctgatagcattcttgtccttcagagcctccctggcaaacaattaccatcacacaaagccatactttttgtgcctcggcgagatcccagtcgagaactttgggatggtccgcgatctggcactgatggagcaatagctctaactggagtagacgaagcctatacgctagaagaatttcaacatcttctaccaaaaatgaaagctgagacgaacatggtttggtatgactggatgaggccctcacatgcacagcttcactctgactatatgcagcccctgactgaggccaaagccaagagcaagaacaaggttcggggtgttcagcagctgatacagcgcctccggctgatcaagtctcctgcagaaattgaacgaatgcagattgctgggaagctgacatcacaggctttcatagaaaccatgttcaccagtaaagcccctgtggaagaagcctttctttatgctaagtttgaatttgaatgccgggctcgtggcgcagacattttagcctatccacctgtggtggctggtggtaatcggtcaaacactttgcactatgtgaaaaataatcaactcatcaaggatggggaaatggtgcttctggatggaggttgtgagtcttcctgctatgtgagtgacatcacacgtacgtggccagtcaatggcaggttcaccgcacctcaggcagaactctatgaagccgttctagagatccaaagagattgtttggccctctgcttccctgggacaagcttggagaacatctacagcatgatgctgaccctgataggacagaagcttaaagacttggggatcatgaagaacattaaggaaaataatgccttcaaggctgctcgaaaatactgtcctcatcatgttggccactacctcgggatggatgtccatgacactccagacatgccccgttccctccctctgcagcctgggatggtaatcacaattgagcccggcatttatattccagaggatgacaaagatgccccagagaagtttcggggtcttggtgtacgaattgaggatgatgtagtggtgactcaggactcacctctcatcctttctgcagactgtcccaaagagatgaatgacattgaacagatatgcagccaggcttcttgaccttcactgcggcccacatgcacctcaggttcaaaatgggtgtcttctggcagccctgcacgtgtgctttctgagtgtctctgtgtgtgcattaatatatgcattccatttgggagcatagcagctgtgtgaatgtatgtaattgtgtgtggggggttttttgttttaagtagttagaagtctgggaaaatgaatttttgaatagtatgttactgcagctttggtaacattaattctatagaattaatgatcagagcaagtttaatttttaaacataaaggtcttggttacacatgtccatgcattccagttaacacatttaaacatatagaaaattcacttcttctttcaagtccttccctttctatacttttgctgagatcaacccaatatcataagaagtttgtgtgatgcctgtatttttagctaattaccaaggtctctgcctatgcaaaaattcatctttcggtgattgtgggcggccaatacataccttctgtaactcctccctacctattctagatcctgcatatctactggagccatatgagccctcaggggcactggtgtcctgcagtcttactagtcagccacagtccaggttccagcaacactagctacctaccaaacaaaacacttctgagcttttcttgccatttggttgcctgggacctggaaagtgtttagattcttgataaagatggaaatggaagagaaagaaaattatatatgtatatactaaagatccagacatcagggctgggcacagcggttccgcctgtaatcccagcactttgggaggtccaggcaggtggatctcttgagaccaggaggtcaagaccagcctggccaacgtggtgaaacactgtctctactaaaaatacaaaaatgagctgggtgtgatgatacatgcctgtaatcctggctacttgggaggctgaggcatgagaattgcttgaacctgggaggtggaggttgcagtgagctgagctcatgcgactgcactccagcctgggtgactgagcaagactctgcctcaaaaaaacaaataaataaataaaatcctgacatcctgccatcttttctcttcaatttaaagttgatttcttaatgatgacttcaaaaattaataaaaagaaaagaaaaaaatgatttctggccgggcgtggtggctcaagcctgtaatcccagcactttgggaggccgaggtgggcggatcacgaggtcaggagattgagacctcctggctaacacggtgaaaccccgtctttactaaaaatacaaaaaaaattagctgggcgtggtggcggatgcctgtagtcccagctactcaggaggctgaggcaggagaatggcgtgaacccagaaggcagagcttgcagtgagccaagatcgcgccactgcactccagcctgggtgacagagcgagactccgtctcaaaaaaaaaaaaaaaaaagaaaaaaaaaagaaagatttctttcgcagatatccctgctccctctatagattcttaatgcactgaccctcacaggttacccttttagctgttgtgctgcgcaggagcagatcctctacttacgtaccctgtcagagtcacagtagtagcgcccagttttcagagaagtacccctgttatcattctgtgatttcctctagtgctaatagaaacaaaatatggaatctaccaagtacccgtaaatatcctatgattcttatctttctttgatactagcactgggagtgcagtggtaaagagtcatacttcttttttttttttttttttggagacagagtctcgctctgtcgcctgggctggatggagtgcagtggcgtaatctcagctcactacaacctccaccacctgggttcaggcaattctcctgcctcagcctcccaagtaactgggactacaggtgcacgctgccatgcccagctaattttttgtattttagtagagacagggtttcaccctgttgcccaggccggtctcaaactcctgagctccggcaatccgcccacctcagcctcccaaagtgctaggattacaggcatgagccactgcgcccggtgtaagagtcatatttttttaaacacaaacattggatacaattatacagcaactcagtttgcaagatgaacagggctagattaccacagatagcttatttaggagcgtctgtgatagagggaagctttaagaaccagtgtgttcacctcctttaaacctggatatgaggtcaagatgtataaaacatgccaattgttagaacacaaatttgagggtttcttaaaaaaacaatttgtattagggaagcacaagctaggggattaacaatctctgtaatgctggaagtttgcctatcttatcagggaaacccagggtacagagtgaaaagcagacaggcagtgacttcctcaagagacagataatgtgaaaacaaaagtgatacaaatcatatcctgacagtgctagcctaggaatgcctggctttgcgcaccttatctaagcagctctcagaatggaggctgcacagctggagtctccatcccccatacccaccttcccacctccctccaatttctcaatccagagctttttaaaaaaaggggagggaaataactccacagctctggctgctcacttcccaggctctgtgcccccaacagccctttccttggattgtgtttcctttgttcatttgtaatccaggaataaggaatttccttttcttcttgtatcattttcttttcttttctttttttttttttttttgagacggagtctcacactgtcaccggggctggtgtgcaatagcgagacctcagctccctgcaacctccatctcccaggttcaagcgattctcctgcctcagcctcccgaatagctaggaatacaggcgcctgccaccacacccggctatttttttgtattttaaatagagacgaggtttcactgtgttggccaggctggtctcgaactcctgacctcatgatctgcccgcctcggcctccctaagtgctgcgattacagacgtgagccaccgcacctcctgtatcattttctatggtctaaacttttctagctaaaagcctaggtagcttgtatgtatagcagcatacttggacatgaaacacacttctggttagattccagtcaagttctataggtgttattggtaggcagaaaggctgttgtagaattcttctggtgattttcagtccctgacccaggtatattgtcctttgagtcccagattaactaactatagcagctaagcatttgaatcagacttctcatagcaatgttatgggctgtctgatatattcaggatttgttgagcagataagctgtgtgtgatcttactcattctcagccatgccgcagacatacccatttccctttagtaattttttaatacagagaatgctattaactgttactggatatcaaataattttatttttctaatagtattttccaaatatttcttaaaattcttaaaatttaggttaaagtttgctggtctcttacatttaataaagctgggacttgaagacttaccatagttttcaactgcctttgcaagttcataaacttctaagggtaaaaagtgaataagataaattcagagttttaaggtaaaggctttatattagctttttttttttttaaaggttttttgtggggtttttttgttttttttttttttgagatggagtctcgctctgtcacccaggctggagtgcagtggcacgatcttggctcactgcaacctccatctcccgggttcaggcaattcttctgcctcagcctcctgagtagctgggactacaggcgcgtgccaccatgcccggctagtttattgtatttttagtagagatggggttttactgtgttagccaggatggtctcaatctcctgacctcataatctgcccacctcagcctcccaaagtgctgggattacaggcgtgagccactgcacccagcctttttaaagtttttaattgacatataattgtacgtatttacagggtaaataatgatgttttgatacatatataatgatcagatcagaacaattagcatatccatcacattgaacatttatcatttatttgtgttgagcctttagttcttttttttttttgagatagagtctcactctgtcacccaggctggagtacagtggtgtgatcttggctcactgcaacctccacccaccggcttcaaccaattctcctgcctcagcctccctagtaactgggattacaggcacctgccaccacacccaatttttgtatttttagtagagacggggtttcaccatcttggccaggccaggctggtcttgatctcctgaccttgtgatccacccacctcagcttcccaaactgctgggattacaggcatgagccacggcccccagccagagacagtcttgctttgtcgccaggctggagtgtagtggcgccatcttggctcactgcaacctccaactccctggttcaagcagttctcctgcctcagcctcccaagtagctgggattacaggcacgcaccaccatgcccagctaatttttgtatttttagtagagacagggtttcaccatgttggccaggatggtcttgatctcctgacctcgtgatctgcccactttggcctcccaaagtgctgggattacaggtgtgagccaccgtgcccagccgagcctttagttctaagtataataaataatatatataccaggcattcctattaaaaatcttaacttaaaaaaaattactcaaatgttactactggaatttttctccctgaattgaagatacatggttagatcattaacaataccacctaaatgaaggaaacatatctggatatccagtgtcacatacttttatgtatttatttcaggaattactattttgtcaccataattaggaaacagactgtgttctttatttgaaacacaacagtataaatactatagtaaagttgggtgcagtggatcacagctataatcccagcactttgggagaccaaggagggatggtcacttgagcccaggagtttgagaccagcctaggcaacatagagagaccttgtctcaacaaaaaaatttaaagttagccaggtgtggtggtttgcacctatagtcccagctactcaggaggctgaggtgggaggatcgcttgagcttaggaggtcaaggctgcagtgagccatgattgtgccacttcaccctgggcaacagagaaagaccctgtctcaataaaaaagaagagaaaaactggagtgagaactctcctcctctcataatcatagtatccacgttaggaaaatgcttctgagagtaacttaaagtactgtgtgtgcatcttccttcaaaaccttgcttttttctccgtttttgtaaggtgagaaagggaaaaaccttcaccgtagaaatactgtcttgagattaagatacaaataaaacatgttaaacctccatctaaagacattgcaacttattaaaacagaaaaatgtacctttgttatgtctttccaaatatccacacccacaccctgttcagctttgttaataatacagagatcagaaatgtgaagcacaaatgctgcttctccccctcctgttcccatgtcagagatggagaagaaagcacagtgagctgttcaccagtccagcggtgacctcggagtcctttgtaacagtgtttccaataacttctgccaataaaacagaatttgagttagaacctatctgctgtccctcaactagtgtctgatagctgagaatgtaattcgtttgtgtgtctattagaaaattaggcaggcaccacagacagtagcaacataaaggaacctgcttagaagaggtttttatggtgtgattgtgtttttttttttttaatttttgtttcctgaagtagaatccatagctcaaaacaagttttaagcctgagaaaatataatttgaggtgttttttatgctcctaatgaaaagatgaatgaatgcatcattaaaccttaacagtagagcagaatttcactgttacaaaccacatgggttctcctggttgtgctgctgttctctacctgtgtgtcactgagtttgagcatcattattgtttgaatcagaggacccactggaatcaaggcttcttggaattgcgcaagaatctgagaaaacttcaatctttaccagcatttcttaatgctttccatgacttttgtgcaattatataagttcagtttagacaaaatgctgttactttttaaggcattactaataactgaaaatagttacgtcattgcccatcaagggaaaagcacttgtaactgtcatttaaaaaaaataaaactataaaacaata

SEQ ID NO: 200474 - DNA, 2737 bp, Homo sapiens
  Payload ID: 19558
  Gene Name: X-prolyl aminopeptidase 3, mitochondrial
  ENST ID: ENST00000428799
  CDS Start-End: 52-261
cgttccccgtcgttaccctctttctcttcccgacgcgtgagttaggccgtaatgccttggctgctctcagcccccaagctggttcccgctgtagcaaacgtccgcggcctctcaggatgtatgttgtgttcacagcgaaggtactcccttcagcctgtcccagaaaggaggattccaaaccgatacttaggccagcccagcccctttacacacccacacctcctcagaccagactcgaattcctgctgggaagtcggctgaaactaaggaaatgcagctcaccactgaaacccacaagaaatcagagtttttcaaagctgtaaggggaggtaactccaggactatctcaggtggaatatgcacttcgcagacacaaactaatgtctctgatccagaaggaagctcaagggcagagtgggacagaccagacagtggttgtgctctccaaccctacatactacatgagcaacgatattccctatactttccaccaagacaacaatttcctgtacctatgtggattccaagagcctgatagcattcttgtccttcagagcctccctggcaaacaattaccatcacacaaagccatactttttgtgcctcggcgagatcccagtcgagaactttgggatggtccgcgatctggcactgatggagcaatagctctaactggagtagacgaagcctatacgctagaagaatttcaacatcttctaccaaaaatgaaagctgagacgaacatggtttggtatgactggatgaggccctcacatgcacagcttcactctgactatatgcagcccctgactgaggccaaagccaagagcaagaacaaggttcggggtgttcagcagctgatacagcgcctccggctgatcaagtctcctgcagaaattgaacgaatgcagattgctgggaagctgacatcacaggctttcatagaaaccatgttcaccagtaaagcccctgtggaagaagcctttctttatgctaagtttgaatttgaatgccgggctcgtggcgcagacattttagcctatccacctgtggtggctggtggtaatcggtcaaacactttgcactatgtgaaaaataatcaactcatcaaggatggggaaatggtgcttctggatggaggttgtgagtcttcctgctatgtgagtgacatcacacgtacgtggccagtcaatggcaggttcaccgcacctcaggcagaactctatgaagccgttctagagatccaaagagattgtttggccctctgcttccctgggacaagcttggagaacatctacagcatgatgctgaccctgataggacagaagcttaaagacttggggatcatgaagaacattaaggaaaataatgccttcaaggctgctcgaaaatactgtcctcatcatgttggccactacctcgggatggatgtccatgacactccagacatgccccgttccctccctctgcagcctgggatggtaatcacaattgagcccggcatttatattccagaggatgacaaagatgccccagagaagtttcggggtcttggtgtacgaattgaggatgatgtagtggtgactcaggactcacctctcatcctttctgcagactgtcccaaagagatgaatgacattgaacagatatgcagccaggcttcttgaccttcactgcggcccacatgcacctcaggttcaaaatgggtgtcttctggcagccctgcacgtgtgctttctgagtgtctctgtgtgtgcattaatatatgcattccatttgggagcatagcagctgtgtgaatgtatgtaattgtgtgtggggggttttttgttttaagtagttagaagtctgggaaaatgaatttttgaatagtatgttactgcagctttggtaacattaattctatagaattaatgatcagagcaagtttaatttttaaacataaaggtcttggttacacatgtccatgcattccagttaacacatttaaacatatagaaaattcacttcttctttcaagtccttccctttctatacttttgctgagatcaacccaatatcataagaagtttgtgtgatgcctgtatttttagctaattaccaaggtctctgcctatgcaaaaattcatctttcggtgattgtgggcggccaatacataccttctgtaactcctccctacctattctagatcctgcatatctactggagccatatgagccctcaggggcactggtgtcctgcagtcttactagtcagccacagtccaggttccagcaacactagctacctaccaaacaaaacacttctgagcttttcttgccatttggttgcctgggacctggaaagtgtttagattcttgataaagatggaaatggaagagaaagaaaattatatatgtatatactaaagatccagacatcagggctgggcacagcggttccgcctgtaatcccagcactttgggaggtccaggcaggtggatctcttgagaccaggaggtcaagaccagcctggccaacgtggtgaaacactgtctctactaaaaatacaaaaatgagctgggtgtgatgatacatgcctgtaatcctggctacttgggaggctgaggcatgagaattgcttgaacctgggaggtggaggttgcagtgagctgagctcatgcgactgcactccagcctgggtgactgagcaagactctgcctcaaaaaaacaaataaataaataaaatcctgaca

SEQ ID NO: 200475 - DNA, 230 bp, Homo sapiens
  Payload ID: 19558
  Gene Name: X-prolyl aminopeptidase 3, mitochondrial
  ENST ID: ENST00000614001
  CDS Start-End: 63-230
gcaggcggttgcgttccccgtcgttaccctctttctcttcccgacgcgtgagttaggccgtaatgccttggctgctctcagcccccaagctggttcccgctgtagcaaacgtccgcggcctctcagggtcttactttgtcacccaagctggagtgcagtggcgtgatcccattacactgcaacctatgtcttccaggctcaagcagtctttctaccagcttcccgagtag

SEQ ID NO: 200476 - DNA, 4695 bp, Homo sapiens
  Payload ID: 19559
  Gene Name: X-ray radiation resistance associated 1
  Uniprot ID: Q6P2D8
  ENST ID: ENST00000321448
  CDS Start-End: 852-2405
ggccgcggggcttgctgggacttgaggttagacgtcccggccgtcggttgccgcctacactgtctgccgtcgcgtcgcagttactaaggcgtggggaagatagcggcaggcaccgcagtggagcggctccgagatccccggggggctcgcaggcgcgcatccctcctgactgggacgtcgcctccgcagacccctcggaggctgaagcgacgccggaggcaggccaaggacactggttagtggttcagaaaggtaacctcaagaagaagcccaagggtttggttggagcacaagctgaacgtcgggaaagcctgaaggcgacttcttttgagttcaaggggaagaaagagtctcggcgggaaaatcaggtggaccttcctggacatatcctggaccaggcttttctgctgaagcaccactgtgtgaggaagccatcagatctgtgcaccattaatgtgagtggcctgaagttctccaaggccaaggaaaatgacttcaagcattttcattctgtgatttatatcaatgcctcagaaaacctgctgcctctagaggcatttcacacgtttccagccctaaaggaactggatctcgcatttaatggcatcaaaactatctacgtgaaatatggagactttaagttattagaattcttggacctttccttcaacagcctgactgtggaggccatctgtgatttggggattctgccacacctccgtgtcctgctcctcacaggcaatggccttacctccctgccgcccaatttggccgtcgcagaacaggaggcatctgtaacatcgctgacaagcaagaggtacatcctgaggttcccagcgctggagacactgatgctggatgacaacagactctccaaccccagttgctttgccagcctggctgggctcaggagactgaagaagttaagcttggatgaaaacaggattatcaggatcccatacctacagcaagttcagctctatgacgagtcagtagactggaatggaggcaggggaagtccccataaagagccccaattcatgctgcagtccaagccaaggatgcttgaggactcagatgagcaactggattatactgtactgcccatgaaaaaggatgttgaccggacagaggttgtgttttcatcttaccctggattttcaacctcagagatcgcaaaagaggatgctgtcctaccagtagctctcttcccatctctctgcgagttcgtctttcataacaaccctctggtggcccatacacgaggggtccctccactgctgaagagcttcctccaggagcgactgggaatccacttaattcgaaggaagatagtaaagcctaagcatcatgttttgatgtctcggaaggaatcatggaaggtgaaaagcgaaatcccaaaggtgccgaagcagcctctggtgctccatcacccgcgcatgacgacaaccaagtctccctcaaaggatatgctagagccagaggcagagctggctgaagatctgcccactaccaaaagcacttctgtggagtcagagatgcccactgagaacctggaaggccattccccgtcttgccggaccttcgtgccactgcctcccatctgctccaactccactgtgcatagtgaagagaccctgtcccacctgagtgacacaactgtccgcctcagcccagagcgcccatcagatgaggactccaagagcacagagtccatcttcctgacccaggtgagtgaactgccttcctccgtcatccataaggatgatttagagttaaaggagaaagaccaaaagaaaccaccaacggcacccagagaggtgaaagggactcggaggaaactcccaactgccttccttcccagcaagtaccacggctatgaagaactgctgacagccaagcctgatccagccttcattgagccaaagggaatccagaagaatgcacaagccctgcaacaaatgctgaagcacccactcctgtgccactcctccaagcccaagctggacactcttcagaaaccctatgttcacaaagagaaacgggcccagagaatcccgattccacccccaaagaagactagagcccaacttctggatgacatcttcattcgcttgcgggatccccggaacattacagaggctccactaggtgctgtcctgcaccagtggacagaacggcggctggtgaaccacaagcagtacctggaggccaagaggctgttgaaggagttccaggcacgttaccggcagctggtgagtggctctctgcgcacagtgttcgggactaccccgctccccatggcctgcccagcgctgagtgagagccagcccaagttcggccacttcctcgagttcatggatgagttctgccaggagcccacagccagtgactcacaaggctagagctgtgcatgggggctgtgtgcaccacccggcctgtgccccagctctccccgagggctctgtgccctggaccgcacctcaaggttgaccagccggccacaggcctcagagctcagctgggccccacttgctggccacaaggtggcatccccttgtcaggatctcccctccttggcccaggcatgacctggtgcctggcccagcggcaataaagagtgggtgcacagggcaatagactgggtgccacatgcattctttcttggaacccaggccacagcagcattgtcacacttccctctaaaaatggttttccagttcagatgcaacagggatacatttgttctctgttgtatgagaaactgacaccaaggggatcttaacaaattcctgaacaatggctccaaaaaagggtatttttaaaaaccagatcttgtgagtacagccctaatgtgcagggacagtgtcatcctgtatattcgttctttactcagactctttcttggttccttcattaggagcatgaatggttgaatgtgaacatgacagtaaattggagcaaactgtaaactggacataacttatgccaaaagacgtagttgtacaccatggaaaccccatccctgctcctaatctctactgccattctgaatgccaaagcaagacatccaacatggggcatctcccagagcacatacagcaccaaaaatccacacacagcctaagcttaacccatgtttttgtctgagattgttcaccagagacaagactctgactataaacagaacatccactttcatgagtttcctttactgtattctcaacttgggccttgcttcaagcaggcaaacatacattgaagaatgcactttggtactgtttaaataacaacacatcagcccacttgattccatgccatgtccttgctgacagaaacatccccaacagggcatgccctggtccaagtcctctgtctttgtcaaaatgctcttctgatgagttggagaggaggcagccagcagtggcagtccacaaggatccaggtaccttctccaatcctaaagcagacagcaggttgaataaaaccaatacacaacctattttctaggcaggaggggaaaaggcccttaggacaataatatttgtacaaagagttgagagtaaacaaacagtgtatcaggttcaaaaaaaaaaaaactattcgttggcatttaaatttttttcccttgcatagtatctattctctcactaggacttttaagtgctctgctggaggctcagcgttggtaataccatgtttgatgcaaacttgaacccaatgctctcattggtggcacagctttggagggtggtggccccaagaaggggcaatctgcctgctgctatattaatctggaaccagggccaacagctactcttgaactatggtatttgaagagcgagttcattgcctgttttaccttaaatgacaggaaaggaagatgaacaaaccttgctttgccttggcttcaaactagttcttgatttaagacaccagaaagggagagagggagtctgcttagagtttgaggttgcctctcacaagatgacagttaaaagttgccaccttacttaaaaggcattaaggaggcatttactcacaaaggagagagagtaaatttttttcttaagaggaaaaaaatactgataatacatagaacaatctgcacatccagtcttggcactttttccaatttgactgatctctaaactggtgacccttgcatatatcttagtctcttttctacaatcttcttcagaaagctacagcagctaacaatcatgtataaagatgcatttcctagatcatcttcagaagaaaatctcttcagcactttccctagaatctgtctcctgaccaccccgccccagacctgctttctcttttgagaattcataaccaggtatgtttagataccagttcaaaagaccactctatgggttgatgaggaaaaggctgcctgaggacaatttaagaccataatgagtttccaatttttaaagaaaatttggctagctggcttttaattcttaattaaaatcattaaatttaattaaaattattccaatcaaaatatatcactttccaagattccacattcatattacttacttatactatggagactttctctacctgagcatgtattcaggggctataggtacatttaactctaactaactgaaaaaaatcaggaagaaaaaactattaaaataaaataacctcctaaatcatttgggggtatccccatca

SEQ ID NO: 200477 - DNA, 5681 bp, Homo sapiens
  Payload ID: 19559
  Gene Name: X-ray radiation resistance associated 1
  Uniprot ID: Q6P2D8
  ENST ID: ENST00000340360
  CDS Start-End: 333-2711
agtttgggtcttgctggcgcgaggtagtcagaggacgtggccgcggggcttgctgggacttgaggttagacgtcccggccgtcggttgccgcctacactgtctgccgtcgcgtcgcagttactaaggcgtggggaagatagcggcaggcaccgcagtggagcggctccgagatccccggggggctcgcaggcgcgcatccctcctgactgggacgtcgcctccgcagacccctcggaggctgaagcgacgccggaggcaggcaaagaaacaagtgaagaaacaaaaaaaaaaggaagttaaggggccattcccaaagtcaaagatcaaggagatggccttctcaggaatctacaagctggatgatgggaagccttacctgaacaactgcttcccagccagaaatctgcttcgcgtgccggaggaaggccaaggacactggttagtggttcagaaaggtaacctcaagaagaagcccaagggtttggttggagcacaagctgaacgtcgggaaagcctgaaggcgacttcttttgagttcaaggggaagaaagagtctcggcgggaaaatcaggtggaccttcctggacatatcctggaccaggcttttctgctgaagcaccactgtgtgaggaagccatcagatctgtgcaccattaatgccaaggaaaatgacttcaagcattttcattctgtgatttatatcaatgcctcagaaaacctgctgcctctagaggcatttcacacgtttccagccctaaaggaactggatctcgcatttaatggcatcaaaactatctacgtgaaatatggagactttaagttattagaattcttggacctttccttcaacagcctgactgtggaggccatctgtgatttggggattctgccacacctccgtgtcctgctcctcacaggcaatggccttacctccctgccgcccaatttggccgtcgcagaacaggaggcatctgtaacatcgctgacaagcaagaggtacatcctgaggttcccagcgctggagacactgatgctggatgacaacagactctccaaccccagttgctttgccagcctggctgggctcaggagactgaagaagttaagcttggatgaaaacaggattatcaggatcccatacctacagcaagttcagctctatgacgagtcagtagactggaatggaggcaggggaagtccccataaagagccccaattcatgctgcagtccaagccaaggatgcttgaggactcagatgagcaactggattatactgtactgcccatgaaaaaggatgttgaccggacagaggttgtgttttcatcttaccctggattttcaacctcagagacaaccaagatatgttcacttcctcccatattcgagatccttcctgtgaagtcactgaaggccaggaaccagacgctggccccacccttcccagagctgagataccttagcctggcctacaacaagatcgcaaaagaggatgctgtcctaccagtagctctcttcccatctctctgcgagttcgtctttcataacaaccctctggtggcccatacacgaggggtccctccactgctgaagagcttcctccaggagcgactgggaatccacttaattcgaaggaagatagtaaagcctaagcatcatgttttgatgtctcggaaggaatcatggaaggtgaaaagcgaaatcccaaaggtgccgaagcagcctctggtgctccatcacccgcgcatgacgacaaccaagtctccctcaaaggatatgctagagccagaggcagagctggctgaagatctgcccactaccaaaagcacttctgtggagtcagagatgcccactgagaacctggaaggccattccccgtcttgccggaccttcgtgccactgcctcccatctgctccaactccactgtgcatagtgaagagaccctgtcccacctgagtgacacaactgtccgcctcagcccagagcgcccatcagatgaggactccaagagcacagagtccatcttcctgacccaggtgagtgaactgccttcctccgtcatccataaggatgatttagagttaaaggagaaagaccaaaagaaaccaccaacggcacccagagaggtgaaagggactcggaggaaactcccaactgccttccttcccagcaagtaccacggctatgaagaactgctgacagccaagcctgatccagccttcattgagccaaagggaatccagaagaatgcacaagccctgcaacaaatgctgaagcacccactcctgtgccactcctccaagcccaagctggacactcttcagaaaccctatgttcacaaagagaaacgggcccagagaatcccgattccacccccaaagaagactagagcccaacttctggatgacatcttcattcgcttgcgggatccccggaacattacagaggctccactaggtgctgtcctgcaccagtggacagaacggcggctggtgaaccacaagcagtacctggaggccaagaggctgttgaaggagttccaggcacgttaccggcagctggtgagtggctctctgcgcacagtgttcgggactaccccgctccccatggcctgcccagcgctgagtgagagccagcccaagttcggccacttcctcgagttcatggatgagttctgccaggagcccacagccagtgactcacaaggctagagctgtgcatgggggctgtgtgcaccacccggcctgtgccccagctctccccgagggctctgtgccctggaccgcacctcaaggttgaccagccggccacaggcctcagagctcagctgggccccacttgctggccacaaggtggcatccccttgtcaggatctcccctccttggcccaggcatgacctggtgcctggcccagcggcaataaagagtgggtgcacagggcaatagactgggtgccacatgcattctttcttggaacccaggccacagcagcattgtcacacttccctctaaaaatggttttccagttcagatgcaacagggatacatttgttctctgttgtatgagaaactgacaccaaggggatcttaacaaattcctgaacaatggctccaaaaaagggtatttttaaaaaccagatcttgtgagtacagccctaatgtgcagggacagtgtcatcctgtatattcgttctttactcagactctttcttggttccttcattaggagcatgaatggttgaatgtgaacatgacagtaaattggagcaaactgtaaactggacataacttatgccaaaagacgtagttgtacaccatggaaaccccatccctgctcctaatctctactgccattctgaatgccaaagcaagacatccaacatggggcatctcccagagcacatacagcaccaaaaatccacacacagcctaagcttaacccatgtttttgtctgagattgttcaccagagacaagactctgactataaacagaacatccactttcatgagtttcctttactgtattctcaacttgggccttgcttcaagcaggcaaacatacattgaagaatgcactttggtactgtttaaataacaacacatcagcccacttgattccatgccatgtccttgctgacagaaacatccccaacagggcatgccctggtccaagtcctctgtctttgtcaaaatgctcttctgatgagttggagaggaggcagccagcagtggcagtccacaaggatccaggtaccttctccaatcctaaagcagacagcaggttgaataaaaccaatacacaacctattttctaggcaggaggggaaaaggcccttaggacaataatatttgtacaaagagttgagagtaaacaaacagtgtatcaggttcaaaaaaaaaaaaactattcgttggcatttaaatttttttcccttgcatagtatctattctctcactaggacttttaagtgctctgctggaggctcagcgttggtaataccatgtttgatgcaaacttgaacccaatgctctcattggtggcacagctttggagggtggtggccccaagaaggggcaatctgcctgctgctatattaatctggaaccagggccaacagctactcttgaactatggtatttgaagagcgagttcattgcctgttttaccttaaatgacaggaaaggaagatgaacaaaccttgctttgccttggcttcaaactagttcttgatttaagacaccagaaagggagagagggagtctgcttagagtttgaggttgcctctcacaagatgacagttaaaagttgccaccttacttaaaaggcattaaggaggcatttactcacaaaggagagagagtaaatttttttcttaagaggaaaaaaatactgataatacatagaacaatctgcacatccagtcttggcactttttccaatttgactgatctctaaactggtgacccttgcatatatcttagtctcttttctacaatcttcttcagaaagctacagcagctaacaatcatgtataaagatgcatttcctagatcatcttcagaagaaaatctcttcagcactttccctagaatctgtctcctgaccaccccgccccagacctgctttctcttttgagaattcataaccaggtatgtttagataccagttcaaaagaccactctatgggttgatgaggaaaaggctgcctgaggacaatttaagaccataatgagtttccaatttttaaagaaaatttggctagctggcttttaattcttaattaaaatcattaaatttaattaaaattattccaatcaaaatatatcactttccaagattccacattcatattacttacttatactatggagactttctctacctgagcatgtattcaggggctataggtacatttaactctaactaactgaaaaaaatcaggaagaaaaaactattaaaataaaataacctcctaaatcatttgggggtatccccatcattggtgcgtgtgtctgcgtgtgtcaaactttaatgattatttattcagaccctggaaaaccacactataaaatagggcactggatcacaagttcgtttggttaaaaaaaaaaaaaaaaaaaagtgggggcggggggcagagaagaagtttaacttggatgatttccatgcccattccagctgtaacattctatgactgtgacccagcctttgttctcttttctcactctcctactagacatttcaatgaaaagttaggcaggaaaaaggaaaggaatcccaagttgctgccagctctgatgagagatcaggttgggggagagattaggtggttactgaattgaggtgtgggcctcccctgaccatgtcagtgatccacaacccacctcacttcttggggcttaagctaaaagcagcttctgaagagatgttaatgtcctgtaatcactagaggagaaaattcattctccttccataacattacttagtaaaggaaaagcggtggtgcaatcaaattcacaaataccaatggggtctctaaaatgtagaatgcagcttgctgggtgctggtcagttttctaaatgggaccagaaatggctttcctaagaccataaatgaactctccagccacacatacattcaaatgcattccattagacattgagctcctcaagagcagg

SEQ ID NO: 200478 - DNA, 1588 bp, Homo sapiens
  Payload ID: 19559
  Gene Name: X-ray radiation resistance associated 1
  ENST ID: ENST00000531449
  CDS Start-End: 1-191
gcaggggaagtccccataaagagccccaattcatgctgcagtccaagccaaggatgcttgaggactcagatgagcaactggattatactgtactgcccatgaaaaaggatgttgaccggacagatcgcaaaagaggatgctgtcctaccagtagctctcttcccatctctctgcgagttcgtctttcataacaaccctctggtggcccatacacgaggggtccctccactgctgaagagcttcctccaggagcgactgggaatccacttaattcgaaggaagatagtaaagcctaagcatcatgttttgatgtctcggaaggaatcatggaaggtgaaaagcgaaatcccaaaggtgccgaagcagcctctggtgctccatcacccgcgcatgacgacaaccaagtctccctcaaaggatatgctagagccagaggcagagctggctgaagatctgcccactaccaaaagcacttctgtggagtcagagatgcccactgagaacctggaaggccattccccgtcttgccggaccttcgtgccactgcctcccatctgctccaactccactgtgcatagtgaagagaccctgtcccacctgagtgacacaactgtccgcctcagcccagagcgcccatcagatgaggactccaagagcacagagtccatcttcctgacccaggtgagtgaactgccttcctccgtcatccataaggatgatttagagttaaaggagaaagaccaaaagaaaccaccaacggcacccagagaggtgaaagggactcggaggaaactcccaactgccttccttcccagcaagtaccacggctatgaagaactgctgacagccaagcctgatccagccttcattgagccaaagggaatccagaagaatgcacaagccctgcaacaaatgctgaagcacccactcctgtgccactcctccaagcccaagctggacactcttcagaaaccctatgttcacaaagagaaacgggcccagagaatcccgattccacccccaaagaagactagagcccaacttctggatgacatcttcattcgcttgcgggatccccggaacattacagaggctccactaggtgctgtcctgcaccagtggacagaacggcggctggtgaaccacaagcagtacctggaggccaagaggctgttgaaggagttccaggcacgttaccggcagctggtgagtggctctctgcgcacagtgttcgggactaccccgctccccatggcctgcccagcgctgagtgagagccagcccaagttcggccacttcctcgagttcatggatgagttctgccaggagcccacagccagtgactcacaaggctagagctgtgcatgggggctgtgtgcaccacccggcctgtgccccagctctccccgagggctctgtgccctggaccgcacctcaaggttgaccagccggccacaggcctcagagctcagctgggccccacttgctggccacaaggtggcatccccttgtcaggatctcccctccttggcccaggcatgacctggtgcctggcccagcggcaataaagagtgggtgcacagggcaa

SEQ ID NO: 200479 - DNA, 5084 bp, Homo sapiens
  Payload ID: 19559
  Gene Name: X-ray radiation resistance associated 1
  ENST ID: ENST00000531849
  CDS Start-End: 903-1250
aatcgggatccgtagtttgggtcttgctggcgcgaggtagtcagaggacgtggccgcggggcttgctgggacttgaggttagacgtcccggccgtcggttgccgcctacactgtctgccgtcgcgtcgcagttactaaggcgtggggaagatagcggcaggcaccgcagtggagcggctccgagatccccggggggctcgcaggcgcgcatccctcctgactgggacgtcgcctccgcagacccctcggaggctgaagcgacgccggaggcaggccaaggacactggttagtggttcagaaaggtaacctcaagaagaagcccaagggtttggttggagcacaagctgaacgtcgggaaagcctgaaggcgacttcttttgagttcaaggggaagaaagagtctcggcgggaaaatcaggtggaccttcctggacatatcctggaccaggcttttctgctgaagcaccactgtgtgaggaagccatcagatctgtgcaccattaatgtgagtggcctgaagttctccaaggccaaggaaaatgacttcaagcattttcattctgtgatttatatcaatgcctcagaaaacctgctgcctctagaggcatttcacacgtttccagccctaaaggaactggatctcgcatttaatggcatcaaaactatctacgtgaaatatggagactttaagttattagaattcttggacctttccttcaacagcctgactgtggaggccatctgtgatttggggattctgccacacctccgtgtcctgctcctcacaggcaatggccttacctccctgccgcccaatttggccgtcgcagaacaggaggcatctgtaacatcgctgacaagcaagaggtacatcctgaggttcccagcgctggagacactgatgctggatgacaacagactctccaaccccagttgctttgccagcctggctgggctcaggagactgaagaagttaagcttggatgaaaacaggattatcaggatcccatacctacagcaagttcagctctatgacgagtcagtagactggaatggaggcaggggaagtccccataaagagccccaattcatgctgcagtccaagccaaggatgcttgaggactcagatgagcaactggattatactgtactgcccatgaaaaaggatgttgaccggacagatcgcaaaagaggatgctgtcctaccagtagctctcttcccatctctctgcgagttcgtctttcataacaaccctctggtggcccatacacgaggggtccctccactgctgaagagcttcctccaggagcgactgggaatccacttaattcgaaggaagatagtaaagcctaagcatcatgttttgatgtctcggaaggaatcatggaaggtgaaaagcgaaatcccaaaggtgccgaagcagcctctggtgctccatcacccgcgcatgacgacaaccaagtctccctcaaaggatatgctagagccagaggcagagctggctgaagatctgcccactaccaaaagcacttctgtggagtcagagatgcccactgagaacctggaaggccattccccgtcttgccggaccttcgtgccactgcctcccatctgctccaactccactgtgcatagtgaagagaccctgtcccacctgagtgacacaactgtccgcctcagcccagagcgcccatcagatgaggactccaagagcacagagtccatcttcctgacccaggtgagtgaactgccttcctccgtcatccataaggatgatttagagttaaaggagaaagaccaaaagaaaccaccaacggcacccagagaggtgaaagggactcggaggaaactcccaactgccttccttcccagcaagtaccacggctatgaagaactgctgacagccaagcctgatccagccttcattgagccaaagggaatccagaagaatgcacaagccctgcaacaaatgctgaagcacccactcctgtgccactcctccaagcccaagctggacactcttcagaaaccctatgttcacaaagagaaacgggcccagagaatcccgattccacccccaaagaagactagagcccaacttctggatgacatcttcattcgcttgcgggatccccggaacattacagaggctccactaggtacggctctgccacagctgccaggatcccagatccagttcacgcctgctggctaaaggcaaagaaagggcttgtgtcagtgcaggaaaggcccttagagagcaactgcctacatcagtctctacatgtagatggacaaaaggagagccagcgtgaggcagggagttgcctaaaatcacacagcatgttaaggtcctgaaccagggcttaagatagagtcaatgcataggggcagtaggaagtcagtgacttcccaagctggaaaggccatttttagccccttagcatcctcctgccacaccatcccattttccaagggtctctggacccaatcctcttgcttctggctaggtgagaaccaggatgagcttggtgcctctcctggcttcttttcctgcaggtgctgtcctgcaccagtggacagaacggcggctggtgaaccacaagcagtacctggaggccaagaggctgttgaaggagttccaggcacgttaccggcagctggtgagtggctctctgcgcacagtgttcgggactaccccgctccccatggcctgcccagcgctgagtgagagccagcccaagttcggccacttcctcgagttcatggatgagttctgccaggagcccacagccagtgactcacaaggctagagctgtgcatgggggctgtgtgcaccacccggcctgtgccccagctctccccgagggctctgtgccctggaccgcacctcaaggttgaccagccggccacaggcctcagagctcagctgggccccacttgctggccacaaggtggcatccccttgtcaggatctcccctccttggcccaggcatgacctggtgcctggcccagcggcaataaagagtgggtgcacagggcaatagactgggtgccacatgcattctttcttggaacccaggccacagcagcattgtcacacttccctctaaaaatggttttccagttcagatgcaacagggatacatttgttctctgttgtatgagaaactgacaccaaggggatcttaacaaattcctgaacaatggctccaaaaaagggtatttttaaaaaccagatcttgtgagtacagccctaatgtgcagggacagtgtcatcctgtatattcgttctttactcagactctttcttggttccttcattaggagcatgaatggttgaatgtgaacatgacagtaaattggagcaaactgtaaactggacataacttatgccaaaagacgtagttgtacaccatggaaaccccatccctgctcctaatctctactgccattctgaatgccaaagcaagacatccaacatggggcatctcccagagcacatacagcaccaaaaatccacacacagcctaagcttaacccatgtttttgtctgagattgttcaccagagacaagactctgactataaacagaacatccactttcatgagtttcctttactgtattctcaacttgggccttgcttcaagcaggcaaacatacattgaagaatgcactttggtactgtttaaataacaacacatcagcccacttgattccatgccatgtccttgctgacagaaacatccccaacagggcatgccctggtccaagtcctctgtctttgtcaaaatgctcttctgatgagttggagaggaggcagccagcagtggcagtccacaaggatccaggtaccttctccaatcctaaagcagacagcaggttgaataaaaccaatacacaacctattttctaggcaggaggggaaaaggcccttaggacaataatatttgtacaaagagttgagagtaaacaaacagtgtatcaggttcaaaaaaaaaaaaactattcgttggcatttaaatttttttcccttgcatagtatctattctctcactaggacttttaagtgctctgctggaggctcagcgttggtaataccatgtttgatgcaaacttgaacccaatgctctcattggtggcacagctttggagggtggtggccccaagaaggggcaatctgcctgctgctatattaatctggaaccagggccaacagctactcttgaactatggtatttgaagagcgagttcattgcctgttttaccttaaatgacaggaaaggaagatgaacaaaccttgctttgccttggcttcaaactagttcttgatttaagacaccagaaagggagagagggagtctgcttagagtttgaggttgcctctcacaagatgacagttaaaagttgccaccttacttaaaaggcattaaggaggcatttactcacaaaggagagagagtaaatttttttcttaagaggaaaaaaatactgataatacatagaacaatctgcacatccagtcttggcactttttccaatttgactgatctctaaactggtgacccttgcatatatcttagtctcttttctacaatcttcttcagaaagctacagcagctaacaatcatgtataaagatgcatttcctagatcatcttcagaagaaaatctcttcagcactttccctagaatctgtctcctgaccaccccgccccagacctgctttctcttttgagaattcataaccaggtatgtttagataccagttcaaaagaccactctatgggttgatgaggaaaaggctgcctgaggacaatttaagaccataatgagtttccaatttttaaagaaaatttggctagctggcttttaattcttaattaaaatcattaaatttaattaaaattattccaatcaaaatatatcactttccaagattccacattcatattacttacttatactatggagactttctctacctgagcatgtattcaggggctataggtacatttaactctaactaactgaaaaaaatcaggaagaaaaaactattaaaataaaataacctcctaaat

SEQ ID NO: 200480 - DNA, 690 bp, Homo sapiens
  Payload ID: 19559
  Gene Name: X-ray radiation resistance associated 1
  ENST ID: ENST00000531852
  CDS Start-End: 632-690
ggttgccgcctacactgtctgccgtcgcgtcgcagttactaaggcgtggggaagatagcggcaggcaccgcagtggagcggctccgagatccccggggggctcgcaggcgcgcatccctcctgactgggacgtcgcctccgcagacccctcggaggctgaagcgacgccggaggcaggcaaagaaacaagtgaagaaacaaaaaaaaaaggaagttaaggggccattcccaaagtcaaagatcaagccaaggacactggttagtggttcagaaaggtaacctcaagaagaagcccaagggtttggttggagcacaagctgaacgtcgggaaagcctgaaggcgacttcttttgagttcaaggggaagaaagagtctcggcgggaaaatcaggtggaccttcctggacatatcctggaccaggcttttctgttcttggacctttccttcaacagcctgactgtggaggccatctgtgatttggggattctgccacacctccgtgtcctgctcctcacaggcaatggccttacctccctgccgcccaatttggccgtcgcagaacaggaggcatctgtaacatcgctgacaagcaagaggtacatcctgaggttcccagcgctggagacactgatgctggatgacaacagactctccaaccccagttgctttgccagcctggctgggctcag

SEQ ID NO: 200481 - DNA, 1016 bp, Homo sapiens
  Payload ID: 19559
  Gene Name: X-ray radiation resistance associated 1
  ENST ID: ENST00000528219
  CDS Start-End: 851-1016
tcgcgtcgcagttactaaggcgtggggaagatagcggcaggcaccgcagtggagcggctccgagatccccggggggctcgcaggcgcgcatccctcctgactgggacgtcgcctccgcagacccctcggaggctgaagcgacgccggaggcaggcaaagaaacaagtgaagaaacaaaaaaaaaaggaagttaaggggccattcccaaagtcaaagatcaagccaaggacactggttagtggttcagaaaggtaacctcaagaagaagcccaagggtttggttggagcacaagctgaacgtcgggaaagcctgaaggcgacttcttttgagttcaaggggaagaaagagtctcggcgggaaaatcaggtggaccttcctggacatatcctggaccaggcttttctgctgaagcaccactgtgtgaggaagccatcagatctgtgcaccattaatgtgagtggcctgaagttctccaaggccaaggaaaatgacttcaagcattttcattctgtgatttatatcaatgcctcagaaaacctgctgcctctagaggcatttcacacgtttccagccctaaaggaactggatctcgcatttaatggcatcaaaactatctacgtgaaatatggagactttaagttattagaattcttggacctttccttcaacagcctgactgtggaggccatctgtgatttggggattctgccacacctccgtgtcctgctcctcacaggcaatggccttacctccctgccgcccaatttggccgtcgcagaacaggaggcatctgtaacatcgctgacaagcaagaggtacatcctgaggttcccagcgctggagacactgatgctggatgacaacagactctccaaccccagttgctttgccagcctggctgggctcaggagactgaagaagttaagcttggatgaaaacaggattatcaggatcccatacctacagcaagttcagctctatgacgagtcagtagactggaatggaggcaggggaa

SEQ ID NO: 200482 - DNA, 2505 bp, Homo sapiens
  Payload ID: 19559
  Gene Name: X-ray radiation resistance associated 1
  Uniprot ID: Q6P2D8
  ENST ID: ENST00000527087
  CDS Start-End: 262-2058
gtcccggccgtcggttgccgcctacactgtctgccgtcgcgtcgcagttactaaggcgtggggaagatagcggcaggcaccgcagtggagcggctccgagatccccggggggctcgcaggcgcgcatccctcctgactgggacgtcgcctccgcagacccctcggaggctgaagcgacgccggaggcaggcaaagaaacaagtgaagaaacaaaaaaaaaaggaagttaaggggccattcccaaagtcaaagatcaaggagatggccttctcaggaatctacaagctggatgatgggaagccttacctgaacaactgcttcccagccagaaatctgcttcgcgtgccggaggaaggccaaggacactggttagtggttcagaaaggtaacctcaagaagaagcccaagggtttggttggagcacaagctgaacgtcgggaaagcctgaaggcgacttcttttgagttcaaggggaagaaagagtctcggcgggaaaatcaggtggaccttcctggacatatcctggaccaggcttttctgctgaagcaccactgtgtgaggaagccatcagatctgtgcaccattaatgccaaggaaaatgacttcaagcattttcattctgtgatttatatcaatgcctcagaaaacctgctgcctctagaggcatttcacacgtttccagccctaaaggaactggatctcgcatttaatggcatcaaaactatctacgtgaaatatggagactttaagttattagaattcttggacctttccttcaacagcctgactgtggaggccatctgtgatttggggattctgccacacctccgtgtcctgctcctcacaggcaatggccttacctccctgccgcccaatttggccgtcgcagaacaggaggcatctgtaacatcgctgacaagcaagaggtacatcctgaggttcccagcgctggagacactgatgctggatgacaacagactctccaaccccagttgctttgccagcctggctgggctcaggagactgaagaagttaagcttggatgaaaacaggattatcaggatcccatacctacagcaagttcagctctatgacgagtcagtagactggaatggaggcaggggaagtccccataaagagccccaattcatgctgcagtccaagccaaggatgcttgaggactcagatgagcaactggattatactgtactgcccatgaaaaaggatgttgaccggacaggggtccctccactgctgaagagcttcctccaggagcgactgggaatccacttaattcgaaggaagatagtaaagcctaagcatcatgttttgatgtctcggaaggaatcatggaaggtgaaaagcgaaatcccaaaggtgccgaagcagcctctggtgctccatcacccgcgcatgacgacaaccaagtctccctcaaaggatatgctagagccagaggcagagctggctgaagatctgcccactaccaaaagcacttctgtggagtcagagatgcccactgagaacctggaaggccattccccgtcttgccggaccttcgtgccactgcctcccatctgctccaactccactgtgcatagtgaagagaccctgtcccacctgagtgacacaactgtccgcctcagcccagagcgcccatcagatgaggactccaagagcacagagtccatcttcctgacccaggtgagtgaactgccttcctccgtcatccataaggatgatttagagttaaaggagaaagaccaaaagaaaccaccaacggcacccagagaggtgaaagggactcggaggaaactcccaactgccttccttcccagcaagtaccacggctatgaagaactgctgacagccaagcctgatccagccttcattgagccaaagggaatccagaagaatgcacaagccctgcaacaaatgctgaagcacccactcctgtgccactcctccaagcccaagctggacactcttcagaaaccctatgttcacaaagagaaacgggtgctgtcctgcaccagtggacagaacggcggctggtgaaccacaagcagtacctggaggccaagaggctgttgaaggagttccaggcacgttaccggcagctggtgagtggctctctgcgcacagtgttcgggactaccccgctccccatggcctgcccagcgctgagtgagagccagcccaagttcggccacttcctcgagttcatggatgagttctgccaggagcccacagccagtgactcacaaggctagagctgtgcatgggggctgtgtgcaccacccggcctgtgccccagctctccccgagggctctgtgccctggaccgcacctcaaggttgaccagccggccacaggcctcagagctcagctgggccccacttgctggccacaaggtggcatccccttgtcaggatctcccctccttggcccaggcatgacctggtgcctggcccagcggcaataaagagtgggtgcacagggcaa

SEQ ID NO: 200483 - DNA, 2339 bp, Homo sapiens
  Payload ID: 19559
  Gene Name: X-ray radiation resistance associated 1
  ENST ID: ENST00000530562
  CDS Start-End: 1101-1826
gtcttgctggcgcgaggtagtcagaggacgtggccgcggggcttgctgggacttgaggttagacgtcccggccgtcggttgccgcctacactgtctgccgtcgcgtcgcagttactaaggcgtggggaagatagcggcaggcaccgcagtggagcggctccgagatccccggggggctcgcaggcgcgcatccctcctgactgggacgtcgcctccgcagacccctcggaggctgaagcgacgccggaggcaggcaaagaaacaagtgaagaaacaaaaaaaaaaggaagttaaggggccattcccaaagtcaaagatcaagccaaggacactggttagtggttcagaaaggtaacctcaagaagaagcccaagggtttggttggagcacaagctgaacgtcgggaaagcctgaaggcgacttcttttgagttcaaggggaagaaagagtctcggcgggaaaatcaggtggaccttcctggacatatcctggaccaggcttttctgctgaagcaccactgtgtgaggaagccatcagatctgtgcaccattaatgtgagtggcctgaagttctccaaggccaaggaaaatgacttcaagcattttcattctgtgatttatatcaatgcctcagaaaacctgctgcctctagttcttggacctttccttcaacagcctgactgtggaggccatctgtgatttggggattctgccacacctccgtgtcctgctcctcacaggcaatggccttacctccctgccgcccaatttggccgtcgcagaacaggaggcatctgtaacatcgctgacaagcaagaggtacatcctgaggttcccagcgctggagacactgatgctggatgacaacagactctccaaccccagttgctttgccagcctggctgggctcaggagatcgcaaaagaggatgctgtcctaccagtagctctcttcccatctctctgcgagttcgtctttcataacaaccctctggtggcccatacacgaggggtccctccactgctgaagagcttcctccaggagcgactgggaatccacttaattcgaaggaagatagtaaagcctaagcatcatgttttgatgtctcggaaggaatcatggaaggtgaaaagcgaaatcccaaaggtgccgaagcagcctctggtgctccatcacccgcgcatgacgacaaccaagtctccctcaaaggatatgctagagccagaggcagagctggctgaagatctgcccactaccaaaagcacttctgtggagtcagagatgcccactgagaacctggaaggccattccccgtcttgccggaccttcgtgccactgcctcccatctgctccaactccactgtgcatagtgaagagaccctgtcccacctgagtgacacaactgtccgcctcagcccagagcgcccatcagatgaggactccaagagcacagagtccatcttcctgacccaggtgagtgaactgccttcctccgtcatccataaggatgatttagagttaaaggagaaagaccaaaagaaaccaccaacggcacccagagaggtgaaagggactcggaggaaactcccaactgccttccttcccagcaagtaccacggctatgaagaactgctgacagccaagcctgatccagccttcattgagccaaagggaatccagaagaatgcacaagccctgcaacaaatgctgaagcacccactcctgtgccactcctccaagcccaagctggacactcttcagaaaccctatgttcacaaagagaaacgggtgctgtcctgcaccagtggacagaacggcggctggtgaaccacaagcagtacctggaggccaagaggctgttgaaggagttccaggcacgttaccggcagctgagtctcaatatgttgcccaggctggtctcaaactcctgagctcaaatgatcctcctgcctcccaaagtgctgttatcacaggagtcaaccactatgcccggcttcctaataatttttactgctgctctcaaagtttttgacaacgcacttgtgttgctggcaaacaacattttcaccgcaatgctgagccactgctaacagaccattagctaaaaatttacaaaagtgaaaaaaatcatgtatccatttaaatattcaaatgaatcatgttggtgttttctcaatatggagttctgtacaagtttttgtttctttgttttcattgcttttggttgttatttataaggatttgagaacttggtctctagaagagagtttttatactgaaaaagactaagggagggtgagaaagtagcattttaaatgtgaataaaaaatatcaattgct

SEQ ID NO: 200484 - DNA, 986 bp, Homo sapiens
  Payload ID: 19559
  Gene Name: X-ray radiation resistance associated 1
  ENST ID: ENST00000525407
  CDS Start-End: 98-986
cgagatccccggggggctcgcaggcgcgcatccctcctgactgggacgtcgcctccgcagacccctcggaggctgaagcgacgccggaggcagggagatggccttctcaggaatctacaagctggatgatgggaagccttacctgaacaactgcttcccagccagaaatctgcttcgcgtgccggaggaaggccaaggacactggttagtggttcagaaaggtaacctcaagaagaagcccaagggtttggttggagcacaagctgaacgtcgggaaagcctgaaggcgacttcttttgagttcaaggggaagaaagagtctcggcgggaaaatcaggtggaccttcctggacatatcctggaccaggcttttctgctgaagcaccactgtgtgaggaagccatcagatctgtgcaccattaatgtgagtggcctgaagttctccaaggccaaggaaaatgacttcaagcattttcattctgtgatttatatcaatgcctcagaaaacctgctgcctctagaggcatttcacacgtttccagccctaaaggaactggatctcgcatttaatggcatcaaaactatctacgtgaaatatggagactttaagttattagaattcttggacctttccttcaacagcctgactgtggaggccatctgtgatttggggattctgccacacctccgtgtcctgctcctcacaggcaatggccttacctccctgccgcccaatttggccgtcgcagaacaggaggcatctgtaacatcgctgacaagcaagaggtacatcctgaggttcccagcgctggagacactgatgctggatgacaacagactctccaaccccagttgctttgccagcctggctgggctcaggagactgaagaagttaagcttggatgaaaacaggattatcaggatcccatacctacagcaagttcagctctatgacgagtcagtagactggaatggaggcaggggaa

SEQ ID NO: 200485 - DNA, 2802 bp, Homo sapiens
  Payload ID: 19560
  Gene Name: X-ray repair complementing defective repair in Chinese hamster cells 1
  Uniprot ID: P18887
  ENST ID: ENST00000262887
  CDS Start-End: 549-2450
tcccttggccccaggagacaggggttgcagaaagccgagatcgtgccactgcactccatcctgggtgagagagcaagaccctgtctcaacaaaaaatttttaaaaaataaaataaataataatacagcaaaaagatttgctttctcggcttcagtgtgggcggtaactccatcgtgcaatgagaaaggcgaatttcttccagacaccaatcccggaggtcgcttctgttgctaggctcccagaaagcagggttcggacgtcattgggaggcgaggctagagcggggttgtgtgtggcggagggaggcggggctggaggaaacgctcgttgctaaggaacgcagcgctcttcccgctctggagaggcgcgactgggcttgcgcagtgtcgacgccggcgccggcgcgccggggtttgaaaggcccgagcctcgcgcgcttgcgcactttagccagcgcagggcgcaccccgccccctcccactctccctgcccctcggaccccatactctacctcatccttctggccaggcgaagcccacgacgttgacatgccggagatccgcctccgccatgtcgtgtcctgcagcagccaggactcgactcactgtgcagaaaatcttctcaaggcagacacttaccgaaaatggcgggcagccaaggcaggcgagaagaccatctctgtggtcctacagttggagaaggaggagcagatacacagtgtggacattgggaatgatggctcagctttcgtggaggtgctggtgggcagttcagctggaggcgctggggagcaagactatgaggtccttctggtcacctcatctttcatgtccccttccgagagccgcagtggctcaaaccccaaccgcgttcgcatgtttgggcctgacaagctggtccgggcagccgccgagaagcgctgggaccgggtcaaaattgtttgcagccagccctacagcaaggactccccctttggcttgagttttgtacggtttcatagccccccagacaaagatgaggcagaggccccgtcccagaaggtgacagtgaccaagcttggccagttccgtgtgaaggaggaggatgagagcgccaactctctgaggccgggggctctcttcttcagccggatcaacaagacatccccagtcacagccagcgacccagcaggacctagctatgcagctgctaccctccaggcttctagtgctgcctcctcagcctctccagtctccagggccataggcagcacctccaagccccaggagtctcccaaagggaagaggaagttggatttgaaccaagaagaaaagaagacccccagcaaaccaccagcccagctgtcgccatctgttcccaagagacctaaattgccagctccaactcgtaccccagccacagccccagtccctgcccgagcacagggggcagtgacaggcaaaccccgaggagaaggcaccgagcccagacgaccccgagctggcccagaggagctggggaagatccttcagggtgtggtagtggtgctgagtggcttccagaaccccttccgctccgagctgcgagataaggccctagagcttggggccaagtatcggccagactggacccgggacagcacgcacctcatctgtgcctttgccaacacccccaagtacagccaggtcctaggcctgggaggccgcatcgtgcgtaaggagtgggtgctggactgtcaccgcatgcgtcggcggctgccctcccagaggtacctcatggcagggccaggttccagcagtgaggaggatgaggcctctcacagcggtggcagcggagatgaagcccccaagcttcctcagaagcaaccccagaccaaaaccaagcccactcaggcagctggacccagctcaccccagaagcccccaacccctgaagagaccaaagcagcctcaccagtgctccaggaagatatagacattgagggggtacagtcagaaggacaggacaatggggcggaagattctggggacacagaggatgagctgaggagggtggcagagcagaaggaacacagactgccccctggccaggaggagaatggggaagacccgtatgcaggctccacggatgagaacacggacagtgaggaacaccaggagcctcctgatctgccagtccctgagctcccagatttcttccagggcaagcacttctttctttacggggagttccctggggacgagcggcggaaactcatccgatacgtcacagccttcaatggggagctcgaggactatatgagtgaccgggttcagtttgtgatcacagcacaggaatgggatcccagctttgaggaggccctgatggacaacccctccctggcattcgttcgtccccgatggatctacagttgcaatgagaagcagaagttacttcctcaccagctctatggggtggtgccgcaagcctgaagtatgtgctatacacacacacacacacacacacacacacacacacacacgatgcatttaataaagatgagttggttctcatccaagagtctcccaaaactctaagaggctccctgggacctggggaagaatgctgggcacctccgtcagagatctggtagagaaggaactctttgtctcttctgcttggccccttatccctgtgttggcaagaggcagggaactgggaatctgaccctcagcactgcccctcaactttttctggccctctgagccacacctgtatcttggctgtccctttgtggctggaggcctgggtacccatgaggcttgtctctctcctgaagcctca

SEQ ID NO: 200486 - DNA, 1994 bp, Homo sapiens
  Payload ID: 19560
  Gene Name: X-ray repair complementing defective repair in Chinese hamster cells 1
  ENST ID: ENST00000543982
  CDS Start-End: 106-1914
actttagccagcgcagggcgcaccccgccccctcccactctccctgcccctcggaccccatactctacctcatccttctggccaggcgaagcccacgacgttgacatgccggagatccgcctccgccatgtcgtgtcctgcagcagccaggactcgttggagaaggaggagcagatacacagtgtggacattgggaatgatggctcagctttcgtggaggtgctggtgggcagttcagctggaggcgctggggagcaagactatgaggtccttctggtcacctcatctttcatgtccccttccgagagccgcagtggctcaaaccccaaccgcgttcgcatgtttgggcctgacaagctggtccgggcagccgccgagaagcgctgggaccgggtcaaaattgtttgcagccagccctacagcaaggactccccctttggcttgagttttgtacggtttcatagccccccagacaaagatgaggcagaggccccgtcccagaaggtgacagtgaccaagcttggccagttccgtgtgaaggaggaggatgagagcgccaactctctgaggccgggggctctcttcttcagccggatcaacaagacatccccagtcacagccagcgacccagcaggacctagctatgcagctgctaccctccaggcttctagtgctgcctcctcagcctctccagtctccagggccataggcagcacctccaagccccaggagtctcccaaagggaagaggaagttggatttgaaccaagaagaaaagaagacccccagcaaaccaccagcccagctgtcgccatctgttcccaagagacctaaattgccagctccaactcgtaccccagccacagccccagtccctgcccgagcacagggggcagtgacaggcaaaccccgaggagaaggcaccgagcccagacgaccccgagctggcccagaggagctggggaagatccttcagggtgtggtagtggtgctgagtggcttccagaaccccttccgctccgagctgcgagataaggccctagagcttggggccaagtatcggccagactggacccgggacagcacgcacctcatctgtgcctttgccaacacccccaagtacagccaggtcctaggcctgggaggccgcatcgtgcgtaaggagtgggtgctggactgtcaccgcatgcgtcggcggctgccctcccagaggtacctcatggcagggccaggttccagcagtgaggaggatgaggcctctcacagcggtggcagcggagatgaagcccccaagcttcctcagaagcaaccccagaccaaaaccaagcccactcaggcagctggacccagctcaccccagaagcccccaacccctgaagagaccaaagcagcctcaccagtgctccaggaagatatagacattgagggggtacagtcagaaggacaggacaatggggcggaagattctggggacacagaggatgagctgaggagggtggcagagcagaaggaacacagactgccccctggccaggaggagaatggggaagacccgtatgcaggctccacggatgagaacacggacagtgaggaacaccaggagcctcctgatctgccagtccctgagctcccagatttcttccagggcaagcacttctttctttacggggagttccctggggacgagcggcggaaactcatccgatacgtcacagccttcaatggggagctcgaggactatatgagtgaccgggttcagtttgtgatcacagcacaggaatgggatcccagctttgaggaggccctgatggacaacccctccctggcattcgttcgtccccgatggatctacagttgcaatgagaagcagaagttacttcctcaccagctctatggggtggtgccgcaagcctgaagtatgtgctatacacacacacacacacacacacacacacacacacacacgatgcatttaataaagatgagttggttctc

SEQ ID NO: 200487 - DNA, 913 bp, Homo sapiens
  Payload ID: 19560
  Gene Name: X-ray repair complementing defective repair in Chinese hamster cells 1
  ENST ID: ENST00000598165
  CDS Start-End: 38-913
tcccagcaacaggcatcctcctctctcagatcctgccatggtcactcctcagacctcccaacgagggtctcttgctgcccctcttggctattttcaggtcttgtttaagactcactgtgcagaaaatcttctcaaggcagacacttaccgaaaatggcgggcagccaaggcaggcgagaagaccatctctgtggtcctacagttggagaaggaggagcagatacacagtgtggacattgggaatgatggctcagctttcgtggaggtgctggtgggcagttcagctggaggcgctggggagcaagactatgaggtccttctggtcacctcatctttcatgtccccttccgagagccgcagtggctcaaaccccaaccgcgttcgcatgtttgggcctgacaagctggtccgggcagccgccgagaagcgctgggaccgggtcaaaattgtttgcagccagccctacagcaaggactccccctttggcttgagttttgtacggtttcatagccccccagacaaagatgaggcagaggccccgtcccagaaggtgacagtgaccaagcttggccagttccgtgtgaaggaggaggatgagagcgccaactctctgaggccgggggctctcttcttcagccggatcaacaagacatccccagtcacagccagcgacccagcaggacctagctatgcagctgctaccctccaggcttctagtgctgcctcctcagcctctccagtctccagggccataggcagcacctccaagccccaggagtctcccaaagggaagaggaagttggatttgaaccaagaagaaaagaagacccccagcaaaccaccagcccagctgtcgccatctgttcccaagagacctaaattgccagctccaactcgtaccccagccacagcc

SEQ ID NO: 200488 - DNA, 809 bp, Homo sapiens
  Payload ID: 19560
  Gene Name: X-ray repair complementing defective repair in Chinese hamster cells 1
  ENST ID: ENST00000597811
  CDS Start-End: 1-496
gggcagttcagctggaggcgctggggagcaagactatgaggtccttctggtcacctcatctttcatgtccccttccgagagccgcagtggctcaaaccccaaccgcgttcgcatgtttgggcctgacaagctggtccgggcagccgccgagaagcgctgggaccgggtcaaaattgtttgcagccagccctacagcaaggactccccctttggcttgagttttgtacggtttcatagccccccagacaaagatgaggcagaggccccgtcccagaaggtgacagtgaccaagcttggccagttccgtgtgaaggaggaggatgagagcgccaactctctgaggccgggggctctcttcttcagccggatcaacaagacatccccagcaaaccaccagcccagctgtcgccatctgttcccaagagacctaaattgccagctccaactcgtaccccagccacagccccagtccctgcccgagcacagggggcagtgacaggcaaaccccgaggagaaggcaccgagcccagacgaccccgagctggcccagaggagctggggaagatccttcagggtgtggtagtggtgctgagtggcttccagaaccccttccgctccgagctgcgagataaggccctagagcttggggccaagtatcggccagactggacccgggacagcacgcacctcatctgtgcctttgccaacacccccaagtacagccaggtcctaggcctgggaggccgcatcgtgcgtaaggagtgggtgctggactgtcaccgcatgcgtcggcggctgccctcccagag

SEQ ID NO: 200489 - DNA, 586 bp, Homo sapiens
  Payload ID: 19560
  Gene Name: X-ray repair complementing defective repair in Chinese hamster cells 1
  ENST ID: ENST00000594107
  CDS Start-End: 70-586
actctccctgcccctcggaccccatactctacctcatccttctggccaggcgaagcccacgacgttgacatgccggagatccgcctccgccatgtcgtgtcctgcagcagccaggactcgactcactgtgcagaaaatcttctcaaggcagacacttaccgaaaatggcgggcagccaaggcaggcgagaagaccatctctgtggtcctacaggtccttctggtcacctcatctttcatgtccccttccgagagccgcagtggctcaaaccccaaccgcgttcgcatgtttgggcctgacaagctggtccgggcagccgccgagaagcgctgggaccgggtcaaaattgtttgcagccagccctacagcaaggactccccctttggcttgagttttgtacggtttcatagccccccagacaaagatgaggcagaggccccgtcccagaaggtgacagtgaccaagcttggccagttccgtgtgaaggaggaggatgagagcgccaactctctgaggccgggggctctcttcttcagccggatcaacaagacatccccagtcacagccagcgacccagcaggaccta

SEQ ID NO: 200490 - DNA, 628 bp, Homo sapiens
  Payload ID: 19560
  Gene Name: X-ray repair complementing defective repair in Chinese hamster cells 1
  ENST ID: ENST00000599693
  CDS Start-End: 1-628
ggtcactcctcagacctcccaacgagggtctcttgctgcccctcttggctattttcaggtcttgtttaagttggagaaggaggagcagatacacagtgtggacattgggaatgatggctcagctttcgtggaggtgctggtgggcagttcagctggaggcgctggggagcaagactatgaggtccttctggtcacctcatctttcatgtccccttccgagagccgcagtggctcaaaccccaaccgcgttcgcatgtttgggcctgacaagctggtccgggcagccgccgagaagcgctgggaccgggtcaaaattgtttgcagccagccctacagcaaggactccccctttggcttgagttttgtacggtttcatagccccccagacaaagatgaggcagaggccccgtcccagaaggtgacagtgaccaagcttggccagttccgtgtgaaggaggaggatgagagcgccaactctctgaggccgggggctctcttcttcagccggatcaacaagacatccccagtcacagccagcgacccagcaggacctagctatgcagctgctaccctccaggcttctagtgctgcctcctcagcctctccagtctccagggccataggcagc

SEQ ID NO: 200491 - DNA, 3067 bp, Homo sapiens
  Payload ID: 19561
  Gene Name: X-ray repair complementing defective repair in Chinese hamster cells 2
  Uniprot ID: O43543
  ENST ID: ENST00000359321
  CDS Start-End: 87-929
tttgactggccgtagagtctgcgcagttggtgaatggcgttggtggcgggaaagttgagtctctcctgcgccgagccttcggggcgatgtgtagtgccttccatagggctgagtctgggaccgagctccttgcccgacttgaaggtagaagttccttgaaagaaatagaaccaaatctgtttgctgatgaagattcacctgtgcatggtgatattcttgaatttcatggcccagaaggaacaggaaaaacagaaatgctttatcacctaacagcacgatgtatacttcccaaatcagaaggtggcctggaagtagaagtcttatttattgatacagattaccactttgatatgctccggctagttacaattcttgagcacagactatcccaaagctctgaagaaataatcaaatactgcctgggaagattttttttggtgtactgcagtagtagcacccacttacttcttacactttactcactagaaagtatgttttgtagtcacccatctctctgccttttgattttggatagcctgtcagctttttactggatagaccgcgtcaatggaggagaaagtgtgaacttacaggagtctactctgaggaaatgttctcagtgcttagagaagcttgtaaatgactatcgcctggttctttttgcaacgacacaaactataatgcagaaagcctcgagctcatcagaagaaccttctcatgcctctcgacgactgtgtgatgtggacatagactacagaccttatctctgtaaggcatggcagcaactggtgaagcacaggatgtttttctccaaacaagatgattctcaaagcagcaaccaattttcattagtttcacgttgtttaaaaagtaacagtttaaaaaaacatttttttattattggagaaagtggggttgaattttgttgatatacatcataaaatagtcttttgcagggtactacgcaagccttaaaatttttcttaagacagagtcttgctctgtctcccaggctggagtgcagtggcacaatcatggctcactgcagccttgaactcctggcctcaagggatcctcctatgtgtgcctcctagagtgcagggattacaggcgtgagccactgctcgtggccaaaagttttctttttttttttttttctttttgaaacagtcttactctgtctcccaggctgctggagtgcagtggcacaatctcggcccgctgcagcctctgcctcttgggttcaagtgattcttccacctcagcctcccaggtagctgggattacaggcacccaccaccacgcctggctaatttttgtatttttaatagagacggggtttcaccatgttggccaggctggtctcgaactcctgacctcaagtgatccacccacctcggcctcccaaagtgctaggattacaggcccgtgcccagccctaaagttttaaactctaggggaattaacagtatttctttacagaatggatttgttaaactagcacagtaaaagtaaagactattctgtttctaggctgttgaatcaaagtgattttagcaattaaactttgtattaatttaccaccaatatttcttcacaaaggaacttttaaaagattatctcagaaagtaaatctgagaggtaagaagtaataatgagtaaatggtaagtacttgagtaaatctaaagaaatattgatagtaaggcaatcctaagcaaaaagaacaaagctggaggcatcacgctacccagcttcaaactatactacaaggctacagtaaccaaaacagcatagtactggcacaaaaacacacgtagactgatggaacagaatagagaatttagaaatgagaccacacacctataatttttttgatcttcgatgaacctgacaaaaacaagcaatgggcaatggattctctattcaataaatcgtgctgggataactggccagccatatggaaaagattgaaaatggacgccttccttatgccatatacaaaaattaactcaagatggattaaagacttaatgtaaaacccaaaacagtaaaaatcctggaagacaacccaggcagtaccattcaggacataggcacaggcaaagatttcatgacgaagacgccaaaaacaattgcaacagaagcaaaaattcacaaatgggatctaattaaactaaagagctgcacagcaaaagaaactatcaagagagtaaacagacagcttacagaatgggagaaaattgttgcaaactatgcatctgagaaaggtctgaaatccagcatctatacgtaatttaaacaaatttagaagaaaaaaccaccccattaaaaagtgggcaaaggacatgaacagacacttttcaaaagaagacatctgtggccaacaatcctatggaaaaaagcccagcatcactgatcattagagaaatgcaaatcgaaacaacaacgagataccatctcacaccagtccaaatggctattataaaaatgtcagaaaataacagatgctggtgaggttgtggagaaaaagatatgcttatacactgttggtggaaatgtaaattaaattagttcagccattgtggaagacagtgtggggataaagacagagataccattcaacccagcaatctcattactgggtatatacccaaaggaatagaaatcattgttataaagacacatgcacgcgtatgttcgttgcagcactgcccatcagtgacagactggattaaaaaaatgtggtacatacacaccagggaatactatacagccataaaaaggaacaagactgactgggcgtggtggctcatgcctgtgatcctagcactttgcgaggccgaggtgggtggattgcccgcgctcaggaggtcaagaccagcctgggcaacacggtgaaaccccatctctattaaaatacaaaaaattagctgggcatggtggtgcgtgcctgtagtgccagctactcaggaggccgaggcaggagaattgctggaacccaggaggtggaggttgcagtgagctgagatcgcgccattgcactcccgcctgggcgactccatctct

SEQ ID NO: 200492 - DNA, 2563 bp, Homo sapiens
  Payload ID: 19562
  Gene Name: X-ray repair complementing defective repair in Chinese hamster cells 3
  Uniprot ID: O43542
  ENST ID: ENST00000352127
  CDS Start-End: 342-1382
actcagggtgctaggcgcctattggaggagaaggccgagaggagcaggacggcgggaagaggagtgcggaacccgcgggagagtccccagggagacacttaagggaaattaaactgcagagtgcaagagatgcctcagtcaagtcagccaaaaacacgcgggtcatccccaagccccagagagtgacagagccccgatgacacggacacctcggctgctgtcacttccctggttcgggcctcccacaggctttgaattgaaggcgagtgcctcagaatttgcatccattgttctgtctttcctgggaagttattcatcctggtggccagcccaccgacaaaatggatttggatctactggacctgaatcccagaattattgctgcaattaagaaagccaaactgaaatcggtaaaggaggttttacacttttctggaccagacttgaagagactgaccaacctctccagccccgaggtctggcacttgctgagaacggcctccttacacttgcggggaagcagcatccttacagcactgcagctgcaccagcagaaggagcggttccccacgcagcaccagcgcctgagcctgggctgcccggtgctggacgcgctgctccgcggtggcctgcccctggacggcatcactgagctggccggacgcagctcggcagggaagacccagctggcgctgcagctctgcctggctgtgcagttcccgcggcagcacggaggcctggaggctggagccgtctacatctgcacggaagacgccttcccgcacaagcgcctgcagcagctcatggcccagcagccgcggctgcgcactgacgttccaggagagctgcttcagaagctccgatttggcagccagatcttcatcgagcacgtggccgatgtggacaccttgttggagtgtgtgaataagaaggtccccgtactgctgtctcggggcatggctcgcctggtggtcatcgactcggtggcagccccattccgctgtgaatttgacagccaggcctccgcccccagggccaggcatctgcagtccctgggggccacgctgcgtgagctgagcagtgccttccagagccctgtgctgtgcatcaaccaggtgacagaggccatggaggagcagggcgcagcacacgggccgctggggttctgggacgaacgtgtttccccagcccttggcataacctgggctaaccagctcctggtgagactgctggctgaccggctccgcgaggaagaggctgccctcggctgcccagcccggaccctgcgggtgctctctgccccccacctgcccccctcctcctgttcctacacgatcagtgccgaaggggtgcgagggacacctgggacccagtcccactgacacggtggcggctgcacaacagccctgcctgagaagccccgacacacggggctcgggcctttaaaacgcgtctgcctgggccgtggcacagctgggagcctggttcagacacagctcttccagggcagcggctccactttctcatccgaagatggtggccacagactgacccccatctgagctggggggatgttctgcctctccctgggtctggggacaggcccgcttgctgggtacctggtccccactgctgagctggcccttggggagaggtgattctcagggctggagcctggggtgtcctacagtgactccctgggagccgcctgcttcttctctccacatggaagcccaactggggttgcgtctgaggcctgccccctgggctggggcctcagaccccctcagccttgggaccgtgcccacgagggtctcccctcctgcacacagggcagtccttactcccccaccactcaggccacagtggggctgcaggcaggcggctcctcctcacccacctctgggtccttggctcccgggggccccacctcggcacacactgtgccccacaaaacttcagtgtggtacaaggtggagaaagcatatcccaccaacctccagtgtcagggtccaggagagcctgggggtggggggactgccttgtctctagtagtgtggcctgtgccagcaccacagccggtcagaggagcgcaggcagcgcagggctggcacgtgacaggctcgtcagccacctgggaacacagttctgggcaaagaggatccgaggttgagaggaaggagggtcccggtgtatcctggccctgggggtctgggcgtccagctcagccctggcctggctgggtggtattctggtagggatatggcaggactcctggcagggccacctgcaggaccctgtcctgcagtcccacactgtgcagacccagtcccacactgtggccaggccttacatctggctggaaagcagagcctcctgggaacacatctggctgcacaggctgaaatatccacccagcaggcagagtggcgtggcctccccatgggcacagtggtgacccccttgattcccaccgtacaaccccctccaccccccactcagtgcctccacatgctgcctggcacagaccaggcctttgacaaataaatgttcaatggatgca

SEQ ID NO: 200493 - DNA, 572 bp, Homo sapiens
  Payload ID: 19562
  Gene Name: X-ray repair complementing defective repair in Chinese hamster cells 3
  ENST ID: ENST00000554170
  CDS Start-End: 437-572
agatttgttctcgggttcacagtgctcagaggggaggagaggggaggaggtgaagacacctggcagggaagcagggcctccatggatggggtgcattcacggcagggagttctcagcaggatgtgcacagagggcccaggaggagcctcaggagccggactgccgttggccaaccgagtccccagggagacacttaagggaaattaaactgcagagtgcaagagatgcctcagtcaagtcagccaaaaacacgcgggtcatccccaagccccagagagtgacagagccccgatgacacggacacctcggctgctgtcacttccctggttcgggcctcccacaggctttgaattgaaggcgagtgcctcagaatttgcatccattgttctgtctttcctgggaagttattcatcctggtggccagcccaccgacaaaatggatttggatctactggacctgaatcccagaattattgctgcaattaagaaagccaaactgaaatcggtaaaggaggttttacacttttctggaccagacttgaagagactgaccaacctctccagccccgagg

SEQ ID NO: 200494 - DNA, 560 bp, Homo sapiens
  Payload ID: 19562
  Gene Name: X-ray repair complementing defective repair in Chinese hamster cells 3
  ENST ID: ENST00000553332
  CDS Start-End: 418-560
ctattggaggagaaggccgagaggagcaggacggcgggaagaggagtgcggaacccgcgggaggaagctgtcttctgctgttggctgctgggggcgactgatgtttggatccctgagcaccctgccaatcccagactcaccttcccactctttccagagtccccagggagacacttaagggaaattaaactgcagagtgcaagagatgcctcagtcaagtcagccaaaaacacgcgggtcatccccaagccccagagagtgacagagccccgatgacacggacacctcggctgctgtcacttccctggttcgggcctcccacaggctttgaattgaaggcgagtgcctcagaatttgcatccattgttctgtctttcctgggaagttattcatcctggtggccagcccaccgacaaaatggatttggatctactggacctgaatcccagaattattgctgcaattaagaaagccaaactgaaatcggtaaaggaggttttacacttttctggaccagacttgaagagactgaccaacctctccagccccgaggtctggca

SEQ ID NO: 200495 - DNA, 746 bp, Homo sapiens
  Payload ID: 19562
  Gene Name: X-ray repair complementing defective repair in Chinese hamster cells 3
  ENST ID: ENST00000553361
  CDS Start-End: 297-746
aggacggcgggaagaggagtgcggaacccgcgggagagtccccagggagacacttaagggaaattaaactgcagagtgcaagagatgcctcagtcaagtcagccaaaaacacgcgggtcatccccaagccccagagagtgacagagccccgatgacacggacacctcggctgctgtcacttccctggttcgggcctcccacaggctttgaattgaaggcgagtgcctcagaatttgcatccattgttctgtctttcctgggaagttattcatcctggtggccagcccaccgacaaaatggatttggatctactggacctgaatcccagaattattgctgcaattaagaaagccaaactgaaatcggtaaaggaggttttacacttttctggaccagacttgaagagactgaccaacctctccagccccgaggtctggcacttgctgagaacggcctccttacacttgcggggaagcagcatccttacagcactgcagctgcaccagcagaaggagcggttccccacgcagcaccagcgcctgagcctgggctgcccggtgctggacgcgctgctccgcggtggcctgcccctggacggcatcactgagctggccggacgcagctcggcagggaagacccagctggcgctgcagctctgcctggctgtgcagttcccgcggcagcacggaggcctggaggctgagtggcagtattttttcatcggtggcacctccgagcacatctgc

SEQ ID NO: 200496 - DNA, 562 bp, Homo sapiens
  Payload ID: 19562
  Gene Name: X-ray repair complementing defective repair in Chinese hamster cells 3
  ENST ID: ENST00000555964
  CDS Start-End: 257-562
attggaggagaaggccgagaggagcaggacggcgggaagaggagtgcggaacccgcgggagagtccccagggagacacttaagggaaattaaactgcagagtgcaagagatgcctcagtcaagtcagccaaaaacacgcgggtcatccccaagccccagagaggctttgaattgaaggcgagtgcctcagaatttgcatccattgttctgtctttcctgggaagttattcatcctggtggccagcccaccgacaaaatggatttggatctactggacctgaatcccagaattattgctgcaattaagaaagccaaactgaaatcggtaaaggaggttttacacttttctggaccagacttgaagagactgaccaacctctccagccccgaggtctggcacttgctgagaacggcctccttacacttgcggggaagcagcatccttacagcactgcagctgcaccagcagaaggagcggttccccacgcagcaccagcgcctgagcctgggctgcccggtgctggacgcgctgctccgcggtggcctgcccctggacggcatc

SEQ ID NO: 200497 - DNA, 801 bp, Homo sapiens
  Payload ID: 19562
  Gene Name: X-ray repair complementing defective repair in Chinese hamster cells 3
  ENST ID: ENST00000556980
  CDS Start-End: 464-801
gtatgattccacgaatcacacggtttattgtcaaagaagatttgttctcgggttcacagtgctcagaggggaggagaggggaggaggtgaagacacctggcagggaagcagggcctccatggatggggtgcattcacggcagggaggatgtgcacagagggcccaggaggagcctcaggagccggactgccgttggccaaccgagtccccagggagacacttaagggaaattaaactgcagagtgcaagagatgcctcagtcaagtcagccaaaaacacgcgggtcatccccaagccccagagagtgacagagccccgatgacacggacacctcggctgctgtcacttccctggttcgggcctcccacaggctttgaattgaaggcgagtgcctcagaatttgcatccattgttctgtctttcctgggaagttattcatcctggtggccagcccaccgacaaaatggatttggatctactggacctgaatcccagaattattgctgcaattaagaaagccaaactgaaatcggtaaaggaggttttacacttttctggaccagacttgaagagactgaccaacctctccagccccgaggtctggcacttgctgagaacggcctccttacacttgcggggaagcagcatccttacagcactgcagctgcaccagcagaaggagcggttccccacgcagcaccagcgcctgagcctgggctgcccggtgctggacgcgctgctccgcggtggcctgcccctggacggcatcactgagctggccggacgcagctcggcagggaa

SEQ ID NO: 200498 - DNA, 575 bp, Homo sapiens
  Payload ID: 19562
  Gene Name: X-ray repair complementing defective repair in Chinese hamster cells 3
  ENST ID: ENST00000554974
  CDS Start-End: 91-516
aggacggcgggaagaggagtgcggaacccgcgggaggacaccttgttggagtgtgtgaataagaaggtccccgtactgctgtctcggggcatggctcgcctggtggtcatcgactcggtggcagccccattccgctgtgaatttgacagccaggcctccgcccccagggccaggcatctgcagtccctgggggccacgctgcgtgagctgagcagtgccttccagagccctgtgctgtgcatcaaccaggtgacagaggccatggaggagcagggcgcagcacacgggccgctggggttctgggacgaacgtgtttccccagcccttggcataacctgggctaaccagctcctggtgagactgctggctgaccggctccgcgaggaagaggctgccctcggctgcccagcccggaccctgcgggtgctctctgccccccacctgcccccctcctcctgttcctacacgatcagtgccgaaggggtgcgagggacacctgggacccagtcccactgacacggtggcggctgcacaacagccctgcctgagaagccccgacacacggggctcgggcc

SEQ ID NO: 200499 - DNA, 2539 bp, Homo sapiens
  Payload ID: 19562
  Gene Name: X-ray repair complementing defective repair in Chinese hamster cells 3
  Uniprot ID: O43542
  ENST ID: ENST00000554913
  CDS Start-End: 310-1350
gagtgcggaacccgcgggagactttgagccaggcctgttaaaccaagttctcagcaggatgtgcacagagggcccaggaggagcctcaggagccggactgccgttggccaaccgagtccccagggagacacttaagggaaattaaactgcagagtgcaagagatgcctcagtcaagtcagccaaaaacacgcgggtcatccccaagccccagagaggctttgaattgaaggcgagtgcctcagaatttgcatccattgttctgtctttcctgggaagttattcatcctggtggccagcccaccgacaaaatggatttggatctactggacctgaatcccagaattattgctgcaattaagaaagccaaactgaaatcggtaaaggaggttttacacttttctggaccagacttgaagagactgaccaacctctccagccccgaggtctggcacttgctgagaacggcctccttacacttgcggggaagcagcatccttacagcactgcagctgcaccagcagaaggagcggttccccacgcagcaccagcgcctgagcctgggctgcccggtgctggacgcgctgctccgcggtggcctgcccctggacggcatcactgagctggccggacgcagctcggcagggaagacccagctggcgctgcagctctgcctggctgtgcagttcccgcggcagcacggaggcctggaggctggagccgtctacatctgcacggaagacgccttcccgcacaagcgcctgcagcagctcatggcccagcagccgcggctgcgcactgacgttccaggagagctgcttcagaagctccgatttggcagccagatcttcatcgagcacgtggccgatgtggacaccttgttggagtgtgtgaataagaaggtccccgtactgctgtctcggggcatggctcgcctggtggtcatcgactcggtggcagccccattccgctgtgaatttgacagccaggcctccgcccccagggccaggcatctgcagtccctgggggccacgctgcgtgagctgagcagtgccttccagagccctgtgctgtgcatcaaccaggtgacagaggccatggaggagcagggcgcagcacacgggccgctggggttctgggacgaacgtgtttccccagcccttggcataacctgggctaaccagctcctggtgagactgctggctgaccggctccgcgaggaagaggctgccctcggctgcccagcccggaccctgcgggtgctctctgccccccacctgcccccctcctcctgttcctacacgatcagtgccgaaggggtgcgagggacacctgggacccagtcccactgacacggtggcggctgcacaacagccctgcctgagaagccccgacacacggggctcgggcctttaaaacgcgtctgcctgggccgtggcacagctgggagcctggttcagacacagctcttccagggcagcggctccactttctcatccgaagatggtggccacagactgacccccatctgagctggggggatgttctgcctctccctgggtctggggacaggcccgcttgctgggtacctggtccccactgctgagctggcccttggggagaggtgattctcagggctggagcctggggtgtcctacagtgactccctgggagccgcctgcttcttctctccacatggaagcccaactggggttgcgtctgaggcctgccccctgggctggggcctcagaccccctcagccttgggaccgtgcccacgagggtctcccctcctgcacacagggcagtccttactcccccaccactcaggccacagtggggctgcaggcaggcggctcctcctcacccacctctgggtccttggctcccgggggccccacctcggcacacactgtgccccacaaaacttcagtgtggtacaaggtggagaaagcatatcccaccaacctccagtgtcagggtccaggagagcctgggggtggggggactgccttgtctctagtagtgtggcctgtgccagcaccacagccggtcagaggagcgcaggcagcgcagggctggcacgtgacaggctcgtcagccacctgggaacacagttctgggcaaagaggatccgaggttgagaggaaggagggtcccggtgtatcctggccctgggggtctgggcgtccagctcagccctggcctggctgggtggtattctggtagggatatggcaggactcctggcagggccacctgcaggaccctgtcctgcagtcccacactgtgcagacccagtcccacactgtggccaggccttacatctggctggaaagcagagcctcctgggaacacatctggctgcacaggctgaaatatccacccagcaggcagagtggcgtggcctccccatgggcacagtggtgacccccttgattcccaccgtacaaccccctccaccccccactcagtgcctccacatgctgcctggcacagaccaggcctttgacaaataaatgttcaatggatgcagttccagg

SEQ ID NO: 200500 - DNA, 3018 bp, Homo sapiens
  Payload ID: 19562
  Gene Name: X-ray repair complementing defective repair in Chinese hamster cells 3
  Uniprot ID: O43542
  ENST ID: ENST00000553264
  CDS Start-End: 798-1838
ctccctgagcaggctgaacatgggcatacgagtgaccagcgtgatcgtgtccaggccagtgccgcattctgtgtggtccaagggaaaaccttctccaagtccacggcccgccctttcctctgctgggttacggccaagggcgccaggcctcactggaggacatggatcctggacccggccctcgaggctgctgccttccagtttccccatgtcctggacactcttggtctcaccatttgggaggccgacaggggatgcagagtggcctgttggaaaggccttatgtgaccccaggctgagtccctgagcagcctgctgaggccggaggggagaagagctgagcttctcccttgctgggccaggctcgggctgtggaatggctgccagctcccttcctgggagaggctgggtggggtccacagcaccttcctcccgtcccacaggaagctgtcttctgctgttggctgctgggggcgactgatgtttggatccctgagcaccctgccaatcccagactcaccttcccactctttccagagtccccagggagacacttaagggaaattaaactgcagagtgcaagagatgcctcagtcaagtcagccaaaaacacgcgggtcatccccaagccccagagagtgacagagccccgatgacacggacacctcggctgctgtcacttccctggttcgggcctcccacaggctttgaattgaaggcgagtgcctcagaatttgcatccattgttctgtctttcctgggaagttattcatcctggtggccagcccaccgacaaaatggatttggatctactggacctgaatcccagaattattgctgcaattaagaaagccaaactgaaatcggtaaaggaggttttacacttttctggaccagacttgaagagactgaccaacctctccagccccgaggtctggcacttgctgagaacggcctccttacacttgcggggaagcagcatccttacagcactgcagctgcaccagcagaaggagcggttccccacgcagcaccagcgcctgagcctgggctgcccggtgctggacgcgctgctccgcggtggcctgcccctggacggcatcactgagctggccggacgcagctcggcagggaagacccagctggcgctgcagctctgcctggctgtgcagttcccgcggcagcacggaggcctggaggctggagccgtctacatctgcacggaagacgccttcccgcacaagcgcctgcagcagctcatggcccagcagccgcggctgcgcactgacgttccaggagagctgcttcagaagctccgatttggcagccagatcttcatcgagcacgtggccgatgtggacaccttgttggagtgtgtgaataagaaggtccccgtactgctgtctcggggcatggctcgcctggtggtcatcgactcggtggcagccccattccgctgtgaatttgacagccaggcctccgcccccagggccaggcatctgcagtccctgggggccacgctgcgtgagctgagcagtgccttccagagccctgtgctgtgcatcaaccaggtgacagaggccatggaggagcagggcgcagcacacgggccgctggggttctgggacgaacgtgtttccccagcccttggcataacctgggctaaccagctcctggtgagactgctggctgaccggctccgcgaggaagaggctgccctcggctgcccagcccggaccctgcgggtgctctctgccccccacctgcccccctcctcctgttcctacacgatcagtgccgaaggggtgcgagggacacctgggacccagtcccactgacacggtggcggctgcacaacagccctgcctgagaagccccgacacacggggctcgggcctttaaaacgcgtctgcctgggccgtggcacagctgggagcctggttcagacacagctcttccagggcagcggctccactttctcatccgaagatggtggccacagactgacccccatctgagctggggggatgttctgcctctccctgggtctggggacaggcccgcttgctgggtacctggtccccactgctgagctggcccttggggagaggtgattctcagggctggagcctggggtgtcctacagtgactccctgggagccgcctgcttcttctctccacatggaagcccaactggggttgcgtctgaggcctgccccctgggctggggcctcagaccccctcagccttgggaccgtgcccacgagggtctcccctcctgcacacagggcagtccttactcccccaccactcaggccacagtggggctgcaggcaggcggctcctcctcacccacctctgggtccttggctcccgggggccccacctcggcacacactgtgccccacaaaacttcagtgtggtacaaggtggagaaagcatatcccaccaacctccagtgtcagggtccaggagagcctgggggtggggggactgccttgtctctagtagtgtggcctgtgccagcaccacagccggtcagaggagcgcaggcagcgcagggctggcacgtgacaggctcgtcagccacctgggaacacagttctgggcaaagaggatccgaggttgagaggaaggagggtcccggtgtatcctggccctgggggtctgggcgtccagctcagccctggcctggctgggtggtattctggtagggatatggcaggactcctggcagggccacctgcaggaccctgtcctgcagtcccacactgtgcagacccagtcccacactgtggccaggccttacatctggctggaaagcagagcctcctgggaacacatctggctgcacaggctgaaatatccacccagcaggcagagtggcgtggcctccccatgggcacagtggtgacccccttgattcccaccgtacaaccccctccaccccccactcagtgcctccacatgctgcctggcacagaccaggcctttgacaaataaatgttcaatggatgc

SEQ ID NO: 200501 - DNA, 535 bp, Homo sapiens
  Payload ID: 19562
  Gene Name: X-ray repair complementing defective repair in Chinese hamster cells 3
  ENST ID: ENST00000556682
  CDS Start-End: 351-535
attggaggagaaggccgagaggagcaggacggcgggaagaggagtgcggaacccgcgggaggaagctgtcttctgctgttggctgctgggggcgactgatgtttggatccctgagcaccctgccaatcccagactcaccttcccactctttccagagtccccagggagacacttaagggaaattaaactgcagagtgcaagagatgcctcagtcaagtcagccaaaaacacgcgggtcatccccaagccccagagaggctttgaattgaaggcgagtgcctcagaatttgcatccattgttctgtctttcctgggaagttattcatcctggtggccagcccaccgacaaaatggatttggatctactggacctgaatcccagaattattgctgcaattaagaaagccaaactgaaatcggtaaaggaggttttacacttttctggaccagacttgaagagactgaccaacctctccagccccgaggtctggcacttgctgagaacggcctccttacacttgcggggaagcagcat

SEQ ID NO: 200502 - DNA, 2584 bp, Homo sapiens
  Payload ID: 19562
  Gene Name: X-ray repair complementing defective repair in Chinese hamster cells 3
  Uniprot ID: O43542
  ENST ID: ENST00000555055
  CDS Start-End: 364-1404
cgagaggagcaggacggcgggaagaggagtgcggaacccgcgggaggatgtgcacagagggcccaggaggagcctcaggagccggactgccgttggccaaccgagtccccagggagacacttaagggaaattaaactgcagagtgcaagagatgcctcagtcaagtcagccaaaaacacgcgggtcatccccaagccccagagagtgacagagccccgatgacacggacacctcggctgctgtcacttccctggttcgggcctcccacaggctttgaattgaaggcgagtgcctcagaatttgcatccattgttctgtctttcctgggaagttattcatcctggtggccagcccaccgacaaaatggatttggatctactggacctgaatcccagaattattgctgcaattaagaaagccaaactgaaatcggtaaaggaggttttacacttttctggaccagacttgaagagactgaccaacctctccagccccgaggtctggcacttgctgagaacggcctccttacacttgcggggaagcagcatccttacagcactgcagctgcaccagcagaaggagcggttccccacgcagcaccagcgcctgagcctgggctgcccggtgctggacgcgctgctccgcggtggcctgcccctggacggcatcactgagctggccggacgcagctcggcagggaagacccagctggcgctgcagctctgcctggctgtgcagttcccgcggcagcacggaggcctggaggctggagccgtctacatctgcacggaagacgccttcccgcacaagcgcctgcagcagctcatggcccagcagccgcggctgcgcactgacgttccaggagagctgcttcagaagctccgatttggcagccagatcttcatcgagcacgtggccgatgtggacaccttgttggagtgtgtgaataagaaggtccccgtactgctgtctcggggcatggctcgcctggtggtcatcgactcggtggcagccccattccgctgtgaatttgacagccaggcctccgcccccagggccaggcatctgcagtccctgggggccacgctgcgtgagctgagcagtgccttccagagccctgtgctgtgcatcaaccaggtgacagaggccatggaggagcagggcgcagcacacgggccgctggggttctgggacgaacgtgtttccccagcccttggcataacctgggctaaccagctcctggtgagactgctggctgaccggctccgcgaggaagaggctgccctcggctgcccagcccggaccctgcgggtgctctctgccccccacctgcccccctcctcctgttcctacacgatcagtgccgaaggggtgcgagggacacctgggacccagtcccactgacacggtggcggctgcacaacagccctgcctgagaagccccgacacacggggctcgggcctttaaaacgcgtctgcctgggccgtggcacagctgggagcctggttcagacacagctcttccagggcagcggctccactttctcatccgaagatggtggccacagactgacccccatctgagctggggggatgttctgcctctccctgggtctggggacaggcccgcttgctgggtacctggtccccactgctgagctggcccttggggagaggtgattctcagggctggagcctggggtgtcctacagtgactccctgggagccgcctgcttcttctctccacatggaagcccaactggggttgcgtctgaggcctgccccctgggctggggcctcagaccccctcagccttgggaccgtgcccacgagggtctcccctcctgcacacagggcagtccttactcccccaccactcaggccacagtggggctgcaggcaggcggctcctcctcacccacctctgggtccttggctcccgggggccccacctcggcacacactgtgccccacaaaacttcagtgtggtacaaggtggagaaagcatatcccaccaacctccagtgtcagggtccaggagagcctgggggtggggggactgccttgtctctagtagtgtggcctgtgccagcaccacagccggtcagaggagcgcaggcagcgcagggctggcacgtgacaggctcgtcagccacctgggaacacagttctgggcaaagaggatccgaggttgagaggaaggagggtcccggtgtatcctggccctgggggtctgggcgtccagctcagccctggcctggctgggtggtattctggtagggatatggcaggactcctggcagggccacctgcaggaccctgtcctgcagtcccacactgtgcagacccagtcccacactgtggccaggccttacatctggctggaaagcagagcctcctgggaacacatctggctgcacaggctgaaatatccacccagcaggcagagtggcgtggcctccccatgggcacagtggtgacccccttgattcccaccgtacaaccccctccaccccccactcagtgcctccacatgctgcctggcacagaccaggcctttgacaaataaatgttcaatggatgc

SEQ ID NO: 200503 - DNA, 2599 bp, Homo sapiens
  Payload ID: 19562
  Gene Name: X-ray repair complementing defective repair in Chinese hamster cells 3
  ENST ID: ENST00000557439
  CDS Start-End: 378-830
ttggaggagaaggccgagaggagcaggacggcgggaagaggagtgcggaacccgcgggaggatgtgcacagagggcccaggaggagcctcaggagccggactgccgttggccaaccgagtccccagggagacacttaagggaaattaaactgcagagtgcaagagatgcctcagtcaagtcagccaaaaacacgcgggtcatccccaagccccagagagtgacagagccccgatgacacggacacctcggctgctgtcacttccctggttcgggcctcccacaggctttgaattgaaggcgagtgcctcagaatttgcatccattgttctgtctttcctgggaagttattcatcctggtggccagcccaccgacaaaatggatttggatctactggacctgaatcccagaattattgctgcaattaagaaagccaaactgaaatcggtaaaggaggttttacacttttctggaccagacttgaagagactgaccaacctctccagccccgaggtctggcacttgctgagaacggcctccttacacttgcggggaagcagcatccttacagcactgcagctgcaccagcagaaggagcggttccccacgcagcaccagcgcctgagcctgggctgcccggtgctggacgcgctgctccgcggtggcctgcccctggacggcatcactgagctggccggacgcagctcggcagggaagacccagctggcgctgcagctctgcctggctgtgcagttcccgcggcagcacggaggcctggaggctgagtggcagtattttttcatcggtggcacctccgagcacatctgctaggctcacttcccacacagggccggaccccaggccctggacccacaggcccagccagccacctcctcacgggcctgacctgccagcagcggtgtggctgggaacctcacctctgccaccctcagcccaggggagggcaccctcttgtcaggtgcctgagtccctgcggctggtcttggggatgagcctggagacagccagaagccgggaggacaggagttggccttgaaaatgggagtctcccgcttaccgcacggaagagctgctgtgaggtggaggcgggactcgagcgtgctcaggaacgggacgggagccgccctcattctccagcgtcctccgtgccaggcttcgtgcaaatctgatttgtgcaatgactccccctcagcttccaccccgttggccttttcagtgaagcccacactccccgatacccagggacacagaagccttaggacaccctccctgaatcccccagctgtgcccagcccagtgactgctgcgggatgacagcacagtccagccttgcgggccaggggaagggagggggccccacggccaccgtgaccacatgcaaggttaggggtcagatgtgctttcctggggaaatgacttcctttcctggatccaatctaaaggcccgaattttgaaaagaaagcggcaggcgggctctgaagtgattccgactcccgtgcttaagccgcgtgaggctctcccaggcctgctggggccccgcccaccgctgggctgtccacagccaccctcctgccagcttcacgatgtccccatgactgtgcagcccctacataacgtcaccccaacaaaaacacgctgcttgaccggttccacctgcttccgagccttccagcccagcctctctccagccaacaggacggaggaagcccagggccccgaccttcctgtggctcctgactaggggcacagtcactgctggggacactggtggggaagggaaccagccacaaaagggatgtggcctcccaaggcagtatttatacgttcctggcctcaagcgggccagatgcttctcagaagcttagttctgacacagaatggggcggggggttcctgacccatttttgcaactcttctttacgtttgaaattctgtcaaagcaaaatcagctcagaattaaaggttacgcggacactcacaaacaggctgcatgacacggcgtgggggcactggctctcccacaactgcatgtgccactgcaggaacaggacgacgccccgtgggccacggggtcctggctgggcagccttcctggcatagtcagtgcttagagagctcgccggccttgtctttttgtttttgttttgcaggaaactggagttttattattactcaaatcagtccccctaagccttcctgttttttaaattgagatgtaatttacatgccataaaattccctctaaaagtgtacagttcggcctgataggcgcagtacctcatgcctgtaatcccagcactttgggaggccgaggctgaggcaggcggatcatgaagtcaggagttcgagagcagcctgaccaacatggtgaaacccagtctctactaaaaatacaaaaattagctgggcgtggtagcgcacgccttgtaatcccagctactcagaaggctgaggcaggagaatcacttgaacccgggaggcagaggttgcagtgagccgagatcgcaccactgcactccagcctgggcgacagagtgagtctcttgtctctcaaaaattaaaataaaataaataaatt

SEQ ID NO: 200504 - DNA, 1696 bp, Homo sapiens
  Payload ID: 19563
  Gene Name: X-ray repair complementing defective repair in Chinese hamster cells 4
  Uniprot ID: Q13426
  ENST ID: ENST00000282268
  CDS Start-End: 176-1180
cgggatttagatcacgtcccgcaggccggcggaagtagctgatactctcattggttgcaaaaccttgatctgtgaaagcgggcgttttggaagataccggaagtagagtcacggagaggtaggatccggaagtggggctgcctctttaaataacaaaaatctgaggtattaagaaatggagagaaaaataagcagaatccaccttgtttctgaacccagtataactcattttctacaagtatcttgggagaaaacactggaatctggttttgttattacacttactgatggtcattcagcatggactgggacagtttctgaatcagagatttcccaagaagctgatgacatggcaatggaaaaagggaaatatgttggtgaactgagaaaagcattgttgtcaggagcaggaccagctgatgtatacacgtttaatttttctaaagagtcttgttatttcttctttgagaaaaacctgaaagatgtctcattcagacttggttccttcaacctagagaaagttgaaaacccagctgaagtcattagagaacttatttgttattgcttggacaccattgcagaaaatcaagccaaaaatgagcacctgcagaaagaaaatgaaaggcttctgagagattggaatgatgttcaaggacgatttgaaaaatgtgtgagtgctaaggaagctttggagactgatctttataagcggtttattctggtgttgaatgagaagaaaacaaaaatcagaagtttgcataataaattattaaatgcagctcaagaacgagaaaaggacatcaaacaagaaggggaaactgcaatctgttctgaaatgactgctgaccgagatccagtctatgatgagagtactgatgaggaaagtgaaaaccaaactgatctctctgggttggcttcagctgctgtaagtaaagatgattccattatttcaagtcttgatgtcactgatattgcaccaagtagaaaaaggagacagcgaatgcaaagaaatcttgggacagaacctaaaatggctcctcaggagaatcagcttcaagaaaaggaaaagcctgattcttcactacctgagacgtctaaaaaggagcacatctcagctgaaaacatgtctttagaaactctgagaaacagcagcccagaagacctctttgatgagatttaacagtctcaaaaaatactttgatgttcactagactatgttttctattcatttctttaaaatgaaaaaggagaatttcaagtcagcagccgctattaccgtatcttacaatttaattacatacacagtgaattgaaaccattgtgcaaaatggattacacatgtatacaaagatacgatttgatgatgacactggcacattattctaaactattcattcagcatgcctataattacataaattgtatgagactttttgttgcaaaggacacatttatcatattcattcacacatattatatgtgatagctgtccaacatcctgtctgggaagattttgaaaacaggacaaagaaaacatcattttaaaatgtcttcagctttttttgaatagacgtattcaaacatattctgaacattgatgtttgaacattttaatttgtgtgatgatgtagaaaatataattttagtttgtacataaacattgtgaaaatctgataataaaatttttgatacattg

SEQ ID NO: 200505 - DNA, 1579 bp, Homo sapiens
  Payload ID: 19563
  Gene Name: X-ray repair complementing defective repair in Chinese hamster cells 4
  Uniprot ID: Q13426
  ENST ID: ENST00000338635
  CDS Start-End: 100-1110
cggaagtagctgatactctcattggttgcaaaaccttgatctgtgaaagcgggcgttttggaagataccggaagtagagtcacggagaggtattaagaaatggagagaaaaataagcagaatccaccttgtttctgaacccagtataactcattttctacaagtatcttgggagaaaacactggaatctggttttgttattacacttactgatggtcattcagcatggactgggacagtttctgaatcagagatttcccaagaagctgatgacatggcaatggaaaaagggaaatatgttggtgaactgagaaaagcattgttgtcaggagcaggaccagctgatgtatacacgtttaatttttctaaagagtcttgttatttcttctttgagaaaaacctgaaagatgtctcattcagacttggttccttcaacctagagaaagttgaaaacccagctgaagtcattagagaacttatttgttattgcttggacaccattgcagaaaatcaagccaaaaatgagcacctgcagaaagaaaatgaaaggcttctgagagattggaatgatgttcaaggacgatttgaaaaatgtgtgagtgctaaggaagctttggagactgatctttataagcggtttattctggtgttgaatgagaagaaaacaaaaatcagaagtttgcataataaattattaaatgcagctcaagaacgagaaaaggacatcaaacaagaaggggaaactgcaatctgttctgaaatgactgctgaccgagatccagtctatgatgagagtactgatgaggaaagtgaaaaccaaactgatctctctgggttggcttcagctgctgtaagtaaagatgattccattatttcaagtcttgatgtcactgatattgcaccaagtagaaaaaggagacagcgaatgcaaagaaatcttgggacagaacctaaaatggctcctcaggagaatcagcttcaagaaaaggaaaattctaggcctgattcttcactacctgagacgtctaaaaaggagcacatctcagctgaaaacatgtctttagaaactctgagaaacagcagcccagaagacctctttgatgagatttaacagtctcaaaaaatactttgatgttcactagactatgttttctattcatttctttaaaatgaaaaaggagaatttcaagtcagcagccgctattaccgtatcttacaatttaattacatacacagtgaattgaaaccattgtgcaaaatggattacacatgtatacaaagatacgatttgatgatgacactggcacattattctaaactattcattcagcatgcctataattacataaattgtatgagactttttgttgcaaaggacacatttatcatattcattcacacatattatatgtgatagctgtccaacatcctgtctgggaagattttgaaaacaggacaaagaaaacatcattttaaaatgtcttcagctttttttgaatagacgtattcaaacatattctgaacattgatgtttgaacattttaatttgtgtgatgatgtagaaaatataattttagttt

SEQ ID NO: 200506 - DNA, 1530 bp, Homo sapiens
  Payload ID: 19563
  Gene Name: X-ray repair complementing defective repair in Chinese hamster cells 4
  Uniprot ID: Q13426
  ENST ID: ENST00000396027
  CDS Start-End: 57-1061
tgaaagcgggcgttttggaagataccggaagtagagtcacggagaggtattaagaaatggagagaaaaataagcagaatccaccttgtttctgaacccagtataactcattttctacaagtatcttgggagaaaacactggaatctggttttgttattacacttactgatggtcattcagcatggactgggacagtttctgaatcagagatttcccaagaagctgatgacatggcaatggaaaaagggaaatatgttggtgaactgagaaaagcattgttgtcaggagcaggaccagctgatgtatacacgtttaatttttctaaagagtcttgttatttcttctttgagaaaaacctgaaagatgtctcattcagacttggttccttcaacctagagaaagttgaaaacccagctgaagtcattagagaacttatttgttattgcttggacaccattgcagaaaatcaagccaaaaatgagcacctgcagaaagaaaatgaaaggcttctgagagattggaatgatgttcaaggacgatttgaaaaatgtgtgagtgctaaggaagctttggagactgatctttataagcggtttattctggtgttgaatgagaagaaaacaaaaatcagaagtttgcataataaattattaaatgcagctcaagaacgagaaaaggacatcaaacaagaaggggaaactgcaatctgttctgaaatgactgctgaccgagatccagtctatgatgagagtactgatgaggaaagtgaaaaccaaactgatctctctgggttggcttcagctgctgtaagtaaagatgattccattatttcaagtcttgatgtcactgatattgcaccaagtagaaaaaggagacagcgaatgcaaagaaatcttgggacagaacctaaaatggctcctcaggagaatcagcttcaagaaaaggaaaagcctgattcttcactacctgagacgtctaaaaaggagcacatctcagctgaaaacatgtctttagaaactctgagaaacagcagcccagaagacctctttgatgagatttaacagtctcaaaaaatactttgatgttcactagactatgttttctattcatttctttaaaatgaaaaaggagaatttcaagtcagcagccgctattaccgtatcttacaatttaattacatacacagtgaattgaaaccattgtgcaaaatggattacacatgtatacaaagatacgatttgatgatgacactggcacattattctaaactattcattcagcatgcctataattacataaattgtatgagactttttgttgcaaaggacacatttatcatattcattcacacatattatatgtgatagctgtccaacatcctgtctgggaagattttgaaaacaggacaaagaaaacatcattttaaaatgtcttcagctttttttgaatagacgtattcaaacatattctgaacattgatgtttgaacattttaatttgtgtgatgatgtagaaaatataattttagttt

SEQ ID NO: 200507 - DNA, 1636 bp, Homo sapiens
  Payload ID: 19563
  Gene Name: X-ray repair complementing defective repair in Chinese hamster cells 4
  Uniprot ID: Q13426
  ENST ID: ENST00000511817
  CDS Start-End: 81-1091
accggaagtagagtcacggagaggtaggatccggaagtggggctgcctctttaaataacaaaaatctgaggtattaagaaatggagagaaaaataagcagaatccaccttgtttctgaacccagtataactcattttctacaagtatcttgggagaaaacactggaatctggttttgttattacacttactgatggtcattcagcatggactgggacagtttctgaatcagagatttcccaagaagctgatgacatggcaatggaaaaagggaaatatgttggtgaactgagaaaagcattgttgtcaggagcaggaccagctgatgtatacacgtttaatttttctaaagagtcttgttatttcttctttgagaaaaacctgaaagatgtctcattcagacttggttccttcaacctagagaaagttgaaaacccagctgaagtcattagagaacttatttgttattgcttggacaccattgcagaaaatcaagccaaaaatgagcacctgcagaaagaaaatgaaaggcttctgagagattggaatgatgttcaaggacgatttgaaaaatgtgtgagtgctaaggaagctttggagactgatctttataagcggtttattctggtgttgaatgagaagaaaacaaaaatcagaagtttgcataataaattattaaatgcagctcaagaacgagaaaaggacatcaaacaagaaggggaaactgcaatctgttctgaaatgactgctgaccgagatccagtctatgatgagagtactgatgaggaaagtgaaaaccaaactgatctctctgggttggcttcagctgctgtaagtaaagatgattccattatttcaagtcttgatgtcactgatattgcaccaagtagaaaaaggagacagcgaatgcaaagaaatcttgggacagaacctaaaatggctcctcaggagaatcagcttcaagaaaaggaaaattctaggcctgattcttcactacctgagacgtctaaaaaggagcacatctcagctgaaaacatgtctttagaaactctgagaaacagcagcccagaagacctctttgatgagatttaacagtctcaaaaaatactttgatgttcactagactatgttttctattcatttctttaaaatgaaaaaggagaatttcaagtcagcagccgctattaccgtatcttacaatttaattacatacacagtgaattgaaaccattgtgcaaaatggattacacatgtatacaaagatacgatttgatgatgacactggcacattattctaaactattcattcagcatgcctataattacataaattgtatgagactttttgttgcaaaggacacatttatcatattcattcacacatattatatgtgatagctgtccaacatcctgtctgggaagattttgaaaacaggacaaagaaaacatcattttaaaatgtcttcagctttttttgaatagacgtattcaaacatattctgaacattgatgtttgaacattttaatttgtgtgatgatgtagaaaatataattttagtttgtacataaacattgtgaaaatctgataataaaatttttgatacattgaagattttgtgtttttaataaaatgtgtt

SEQ ID NO: 200508 - DNA, 3428 bp, Homo sapiens
  Payload ID: 19564
  Gene Name: X-ray repair complementing defective repair in Chinese hamster cells 5 (double-strand-break rejoining)
  Uniprot ID: P13010
  ENST ID: ENST00000392132
  CDS Start-End: 141-2339
acggtttccccgcccctttcaggcctagcaggaaacgaagcggctctttccgctatctgccgcttgtccaccggaagcgagttgcgacacggcaggttcccgcccggaagaagcgaccaaagcgcctgaggaccggcaacatggtgcggtcggggaataaggcagctgttgtgctgtgtatggacgtgggctttaccatgagtaactccattcctggtatagaatccccatttgaacaagcaaagaaggtgataaccatgtttgtacagcgacaggtgtttgctgagaacaaggatgagattgctttagtcctgtttggtacagatggcactgacaatcccctttctggtggggatcagtatcagaacatcacagtgcacagacatctgatgctaccagattttgatttgctggaggacattgaaagcaaaatccaaccaggttctcaacaggctgacttcctggatgcactaatcgtgagcatggatgtgattcaacatgaaacaataggaaagaagtttgagaagaggcatattgaaatattcactgacctcagcagccgattcagcaaaagtcagctggatattataattcatagcttgaagaaatgtgacatctccctgcaattcttcttgcctttctcacttggcaaggaagatggaagtggggacagaggagatggcccctttcgcttaggtggccatgggccttcctttccactaaaaggaattaccgaacagcaaaaagaaggtcttgagatagtgaaaatggtgatgatatctttagaaggtgaagatgggttggatgaaatttattcattcagtgagagtctgagaaaactgtgcgtcttcaagaaaattgagaggcattccattcactggccctgccgactgaccattggctccaatttgtctataaggattgcagcctataaatcgattctacaggagagagttaaaaagacttggacagttgtggatgcaaaaaccctaaaaaaagaagatatacaaaaagaaacagtttattgcttaaatgatgatgatgaaactgaagttttaaaagaggatattattcaagggttccgctatggaagtgatatagttcctttctctaaagtggatgaggaacaaatgaaatataaatcggaggggaagtgcttctctgttttgggattttgtaaatcttctcaggttcagagaagattcttcatgggaaatcaagttctaaaggtctttgcagcaagagatgatgaggcagctgcagttgcactttcctccctgattcatgctttggatgacttagacatggtggccatagttcgatatgcttatgacaaaagagctaatcctcaagtcggcgtggcttttcctcatatcaagcataactatgagtgtttagtgtatgtgcagctgcctttcatggaagacttgcggcaatacatgttttcatccttgaaaaacagtaagaaatatgctcccaccgaggcacagttgaatgctgttgatgctttgattgactccatgagcttggcaaagaaagatgagaagacagacacccttgaagacttgtttccaaccaccaaaatcccaaatcctcgatttcagagattatttcagtgtctgctgcacagagctttacatccccgggagcctctacccccaattcagcagcatatttggaatatgctgaatcctcccgctgaggtgacaacaaaaagtcagattcctctctctaaaataaagaccctttttcctctgattgaagccaagaaaaaggatcaagtgactgctcaggaaattttccaagacaaccatgaagatggacctacagctaaaaaattaaagactgagcaagggggagcccacttcagcgtctccagtctggctgaaggcagtgtcacctctgttggaagtgtgaatcctgctgaaaacttccgtgttctagtgaaacagaagaaggccagctttgaggaagcgagtaaccagctcataaatcacatcgaacagtttttggatactaatgaaacaccgtattttatgaagagcatagactgcatccgagccttccgggaagaagccattaagttttcagaagagcagcgctttaacaacttcctgaaagcccttcaagagaaagtggaaattaaacaattaaatcatttctgggaaattgttgtccaggatggaattactctgatcaccaaagaggaagcctctggaagttctgtcacagctgaggaagccaaaaagtttctggcccccaaagacaaaccaagtggagacacagcagctgtatttgaagaaggtggtgatgtggacgatttattggacatgatataggtcgtggatgtatggggaatctaagagagctgccatcgctgtgatgctgggagttctaacaaaacaagttggatgcggccattcaaggggagccaaaatctcaagaaattcccagcaggttacctggaggcggatcatctaattctctgtggaatgaatacacacatatatattacaagggataatttagaccccatacaagtttataaagagtcattgttattttctggttggtgtattattttttctgtggtcttactgatctttgtatattacatacatgctttgaagtttctggaaagtagatcttttcttgacctagtatatcagtgacagttgcagcccttgtgatgtgattagtgtctcatgtggaaccatggcatggttattgatgagtttcttaaccctttccagagtcctcctttgcctgatcctccaacagctgtcacaacttgtgttgagcaagcagtagcatttgcttcctcccaacaagcagctgggttaggaaaaccatgggtaaggacggactcacttctctttttagttgaggccttctagttaccacattactctgcctctgtatataggtggttttctttaagtggggtgggaaggggagcacaatttcccttcatactccttttaagcagtgagttatggtggtggtctcatgaagaaaagaccttttggcccaatctctgccatatcagtgaacctttagaaactcaaaaactgagaaatttactacagtagttagaattatatcacttcactgttctctacttgcaagcctcaaagagagaaagtttcgttatattaaaacacttaggtaacttttcggtctttcccatttctacctaagtcagctttcatctttgtggatggtgtctcctttactaaataagaaaataacaaagcccttattctctttttttcttgtcctcattcttgccttgagttccagttcctctttggtgtacagacttcttggtacccagtcacctctgtcttcagcaccctcataagtcgtcactaatacacagttttgtacatgtaacattaaaggcataaatgactcatctctctgtg

SEQ ID NO: 200509 - DNA, 3761 bp, Homo sapiens
  Payload ID: 19564
  Gene Name: X-ray repair complementing defective repair in Chinese hamster cells 5 (double-strand-break rejoining)
  Uniprot ID: P13010
  ENST ID: ENST00000392133
  CDS Start-End: 462-2660
agaaaccccacaaaaattagctgggcttggtggcacacacctgtggtcccagctacctgggaggctgagctctggatcgtacaagaagggagacaaggaccactgacaagatatgcgtttcaggcggctcaaacaccacacgctcccgactacggcggaatggagagaatgtgcgcatgctcggcgggaatctgcgcatgctcggcgggaatctgcgcatgctcggagagaatctgcgcatgctcggccggaatctgcgcgagctcggcgggaatctgcgcaagctcggcgggaatctgcgcatgctcagagttccggggcacggtttccccgcccctttcaggcctagcaggaaacgaagcggctctttccgctatctgccgcttgtccaccggaagcgagttgcgacacggcaggttcccgcccggaagaagcgaccaaagcgcctgaggaccggcaacatggtgcggtcggggaataaggcagctgttgtgctgtgtatggacgtgggctttaccatgagtaactccattcctggtatagaatccccatttgaacaagcaaagaaggtgataaccatgtttgtacagcgacaggtgtttgctgagaacaaggatgagattgctttagtcctgtttggtacagatggcactgacaatcccctttctggtggggatcagtatcagaacatcacagtgcacagacatctgatgctaccagattttgatttgctggaggacattgaaagcaaaatccaaccaggttctcaacaggctgacttcctggatgcactaatcgtgagcatggatgtgattcaacatgaaacaataggaaagaagtttgagaagaggcatattgaaatattcactgacctcagcagccgattcagcaaaagtcagctggatattataattcatagcttgaagaaatgtgacatctccctgcaattcttcttgcctttctcacttggcaaggaagatggaagtggggacagaggagatggcccctttcgcttaggtggccatgggccttcctttccactaaaaggaattaccgaacagcaaaaagaaggtcttgagatagtgaaaatggtgatgatatctttagaaggtgaagatgggttggatgaaatttattcattcagtgagagtctgagaaaactgtgcgtcttcaagaaaattgagaggcattccattcactggccctgccgactgaccattggctccaatttgtctataaggattgcagcctataaatcgattctacaggagagagttaaaaagacttggacagttgtggatgcaaaaaccctaaaaaaagaagatatacaaaaagaaacagtttattgcttaaatgatgatgatgaaactgaagttttaaaagaggatattattcaagggttccgctatggaagtgatatagttcctttctctaaagtggatgaggaacaaatgaaatataaatcggaggggaagtgcttctctgttttgggattttgtaaatcttctcaggttcagagaagattcttcatgggaaatcaagttctaaaggtctttgcagcaagagatgatgaggcagctgcagttgcactttcctccctgattcatgctttggatgacttagacatggtggccatagttcgatatgcttatgacaaaagagctaatcctcaagtcggcgtggcttttcctcatatcaagcataactatgagtgtttagtgtatgtgcagctgcctttcatggaagacttgcggcaatacatgttttcatccttgaaaaacagtaagaaatatgctcccaccgaggcacagttgaatgctgttgatgctttgattgactccatgagcttggcaaagaaagatgagaagacagacacccttgaagacttgtttccaaccaccaaaatcccaaatcctcgatttcagagattatttcagtgtctgctgcacagagctttacatccccgggagcctctacccccaattcagcagcatatttggaatatgctgaatcctcccgctgaggtgacaacaaaaagtcagattcctctctctaaaataaagaccctttttcctctgattgaagccaagaaaaaggatcaagtgactgctcaggaaattttccaagacaaccatgaagatggacctacagctaaaaaattaaagactgagcaagggggagcccacttcagcgtctccagtctggctgaaggcagtgtcacctctgttggaagtgtgaatcctgctgaaaacttccgtgttctagtgaaacagaagaaggccagctttgaggaagcgagtaaccagctcataaatcacatcgaacagtttttggatactaatgaaacaccgtattttatgaagagcatagactgcatccgagccttccgggaagaagccattaagttttcagaagagcagcgctttaacaacttcctgaaagcccttcaagagaaagtggaaattaaacaattaaatcatttctgggaaattgttgtccaggatggaattactctgatcaccaaagaggaagcctctggaagttctgtcacagctgaggaagccaaaaagtttctggcccccaaagacaaaccaagtggagacacagcagctgtatttgaagaaggtggtgatgtggacgatttattggacatgatataggtcgtggatgtatggggaatctaagagagctgccatcgctgtgatgctgggagttctaacaaaacaagttggatgcggccattcaaggggagccaaaatctcaagaaattcccagcaggttacctggaggcggatcatctaattctctgtggaatgaatacacacatatatattacaagggataatttagaccccatacaagtttataaagagtcattgttattttctggttggtgtattattttttctgtggtcttactgatctttgtatattacatacatgctttgaagtttctggaaagtagatcttttcttgacctagtatatcagtgacagttgcagcccttgtgatgtgattagtgtctcatgtggaaccatggcatggttattgatgagtttcttaaccctttccagagtcctcctttgcctgatcctccaacagctgtcacaacttgtgttgagcaagcagtagcatttgcttcctcccaacaagcagctgggttaggaaaaccatgggtaaggacggactcacttctctttttagttgaggccttctagttaccacattactctgcctctgtatataggtggttttctttaagtggggtgggaaggggagcacaatttcccttcatactccttttaagcagtgagttatggtggtggtctcatgaagaaaagaccttttggcccaatctctgccatatcagtgaacctttagaaactcaaaaactgagaaatttactacagtagttagaattatatcacttcactgttctctacttgcaagcctcaaagagagaaagtttcgttatattaaaacacttaggtaacttttcggtctttcccatttctacctaagtcagctttcatctttgtggatggtgtctcctttactaaataagaaaataacaaagcccttattctctttttttcttgtcctcattcttgccttgagttccagttcctctttggtgtacagacttcttggtacccagtcacctctgtcttcagcaccctcataagtcgtcactaatacacagttttgtacatgtaacattaaaggcataaatgactcatctctctgtgaattgctgctaa

SEQ ID NO: 200510 - DNA, 415 bp, Homo sapiens
  Payload ID: 19564
  Gene Name: X-ray repair complementing defective repair in Chinese hamster cells 5 (double-strand-break rejoining)
  ENST ID: ENST00000451695
  CDS Start-End: 1-59
aagcaaagaaggtgataaccatgtttgtacagcgacagccatctgacatttttttctaggtgtttgctgagaacaaggatgagattgctttagtcctgtttggtacagatggcactgacaatcccctttctggtggggatcagtatcagaacatcacagtgcacagacatctgatgctaccagattttgatttgctggaggacattgaaagcaaaatccaaccaggttctcaacaggctgacttcctggatgcactaatcgtgagcatggatgtgattcaacatgaaacaataggaaagaagtttgagaagaggcatattgaaatattcactgacctcagcagccgattcagcaaaagtcagctggatattataattcatagcttgaagaaatgtgacatctccctgcaattctt

SEQ ID NO: 200511 - DNA, 605 bp, Homo sapiens
  Payload ID: 19564
  Gene Name: X-ray repair complementing defective repair in Chinese hamster cells 5 (double-strand-break rejoining)
  ENST ID: ENST00000417391
  CDS Start-End: 211-605
atctgccgcttgtccaccggaagcgagttgcgacacggcaggttcccgcccggaagaagcgaccaaagcgcctgaggaccggcaacatggtgcggtcggggaataagctgctgaaaactttgtagctctagtggaggagctgtttgttgcagatgaactggaagtaaaattctaacagcctgtattgcttcggcagctgttgtgctgtgtatggacgtgggctttaccatgagtaactccattcctggtatagaatccccatttgaacaagcaaagaaggtgataaccatgtttgtacagcgacaggtgtttgctgagaacaaggatgagattgctttagtcctgtttggtacagatggcactgacaatcccctttctggtggggatcagtatcagaacatcacagtgcacagacatctgatgctaccagattttgatttgctggaggacattgaaagcaaaatccaaccaggttctcaacaggctgacttcctggatgcactaatcgtgagcatggatgtgattcaacatgaaacaataggaaagaagtttgagaagaggcatattgaaatattcactgacctcagcagccgattcagcaaaag

SEQ ID NO: 200512 - DNA, 2709 bp, Homo sapiens
  Payload ID: 19565
  Gene Name: X-ray repair complementing defective repair in Chinese hamster cells 6
  Uniprot ID: P12956
  ENST ID: ENST00000359308
  CDS Start-End: 656-2485
gcgggccgttatccatttgtgttgttcgccagctaggcctggcctcgtcccgcttcgctcggtcggtctcgcgcgcccccatagccttgctagagggttagcgttagccttaagtgtgcgaatccgaggagcagcgacagactcgagaccacgctccttcctcgggaaggaggcggcacctcgcgtttgaggcccgcctgcgtttgaggcccgcctgcgcttgcggcccgcctgcgcttgaggcctgtctgcgtttgagatctcattgggcgtgattgaggaatttggggaggtttttgggcggtattgaggacgagggggtccgttagtcagcatagaatcctggagcgggaatccctcaccgtctaaatggcgtcgggggcgggacctccgggatctggcttccgcgggccgccgccggccctgaaacgtgagggatagctgagatgaggcagctactgggatggcccccatgcgcatttacatgcagtccgactgccgagctttcgaggcagcaggatttaccgtccacattcctcactactaaccaagcttttagaacagatctcacaagaacctagaggtcggtattttttcgatttaaatttgcctgttactgacgttaacgtctttcgcctagtgagcagtagccaacatgtcagggtgggagtcatattacaaaaccgagggcgatgaagaagcagaggaagaacaagaagagaaccttgaagcaagtggagactataaatattcaggaagagatagtttgatttttttggttgatgcctccaaggctatgtttgaatctcagagtgaagatgagttgacaccttttgacatgagcatccagtgtatccaaagtgtgtacatcagtaagatcataagcagtgatcgagatctcttggctgtggtgttctatggtaccgagaaagacaaaaattcagtgaattttaaaaatatttacgtcttacaggagctggataatccaggtgcaaaacgaattctagagcttgaccagtttaaggggcagcagggacaaaaacgtttccaagacatgatgggccacggatctgactactcactcagtgaagtgctgtgggtctgtgccaacctctttagtgatgtccaattcaagatgagtcataagaggatcatgctgttcaccaatgaagacaacccccatggcaatgacagtgccaaagccagccgggccaggaccaaagccggtgatctccgagatacaggcatcttccttgacttgatgcacctgaagaaacctgggggctttgacatatccttgttctacagagatatcatcagcatagcagaggatgaggacctcagggttcactttgaggaatccagcaagctagaagacctgttgcggaaggttcgcgccaaggagaccaggaagcgagcactcagcaggttaaagctgaagctcaacaaagatatagtgatctctgtgggcatttataatctggtccagaaggctctcaagcctcctccaataaagctctatcgggaaacaaatgaaccagtgaaaaccaagacccggacctttaatacaagtacaggcggtttgcttctgcctagcgataccaagaggtctcagatctatgggagtcgtcagattatactggagaaagaggaaacagaagagctaaaacggtttgatgatccaggtttgatgctcatgggtttcaagccgttggtactgctgaagaaacaccattacctgaggccctccctgttcgtgtacccagaggagtcgctggtgattgggagctcaaccctgttcagtgctctgctcatcaagtgtctggagaaggaggttgcagcattgtgcagatacacaccccgcaggaacatccctccttattttgtggctttggtgccacaggaagaagagttggatgaccagaaaattcaggtgactcctccaggcttccagctggtctttttaccctttgctgatgataaaaggaagatgccctttactgaaaaaatcatggcaactccagagcaggtgggcaagatgaaggctatcgttgagaagcttcgcttcacatacagaagtgacagctttgagaaccccgtgctgcagcagcacttcaggaacctggaggccttggccttggatttgatggagccggaacaagcagtggacctgacattgcccaaggttgaagcaatgaataaaagactgggctccttggtggatgagtttaaggagcttgtttacccaccagattacaatcctgaagggaaagttaccaagagaaaacacgataatgaaggttctggaagcaaaaggcccaaggtggagtattcagaagaggagctgaagacccacatcagcaagggtacgctgggcaagttcactgtgcccatgctgaaagaggcctgccgggcttacgggctgaagagtgggctgaagaagcaggagctgctggaagccctcaccaagcacttccaggactgaccagaggccgcgcgtccagctgcccttccgcagtgtggccaggctgcctggccttgtcctcagccagttaaaatgtgtttctcctgagctaggaagagtctacccgacataagtcgagggactttatgtttttgaggctttctgttgccatggtgatggtgtagccctcccactttgctgttccttactttactgcctgaataaagagccctaagtttgtacta

SEQ ID NO: 200513 - DNA, 2296 bp, Homo sapiens
  Payload ID: 19565
  Gene Name: X-ray repair complementing defective repair in Chinese hamster cells 6
  Uniprot ID: P12956
  ENST ID: ENST00000360079
  CDS Start-End: 243-2072
gtaggaaggggcggggctttgccgaagggggcggggctctcgctgatgggttggctttcgtcagggacataggtagaagctggttggggagtgtgcgtgccagcctgacgcgatatagtgcgcacatgcgtgatgacgtagagggcgttgattgggaccgagtacagggcccgcgcatgcgtggattgtcgtcttctgtccaagttggtcgcttccctgcgccaaagtgagcagtagccaacatgtcagggtgggagtcatattacaaaaccgagggcgatgaagaagcagaggaagaacaagaagagaaccttgaagcaagtggagactataaatattcaggaagagatagtttgatttttttggttgatgcctccaaggctatgtttgaatctcagagtgaagatgagttgacaccttttgacatgagcatccagtgtatccaaagtgtgtacatcagtaagatcataagcagtgatcgagatctcttggctgtggtgttctatggtaccgagaaagacaaaaattcagtgaattttaaaaatatttacgtcttacaggagctggataatccaggtgcaaaacgaattctagagcttgaccagtttaaggggcagcagggacaaaaacgtttccaagacatgatgggccacggatctgactactcactcagtgaagtgctgtgggtctgtgccaacctctttagtgatgtccaattcaagatgagtcataagaggatcatgctgttcaccaatgaagacaacccccatggcaatgacagtgccaaagccagccgggccaggaccaaagccggtgatctccgagatacaggcatcttccttgacttgatgcacctgaagaaacctgggggctttgacatatccttgttctacagagatatcatcagcatagcagaggatgaggacctcagggttcactttgaggaatccagcaagctagaagacctgttgcggaaggttcgcgccaaggagaccaggaagcgagcactcagcaggttaaagctgaagctcaacaaagatatagtgatctctgtgggcatttataatctggtccagaaggctctcaagcctcctccaataaagctctatcgggaaacaaatgaaccagtgaaaaccaagacccggacctttaatacaagtacaggcggtttgcttctgcctagcgataccaagaggtctcagatctatgggagtcgtcagattatactggagaaagaggaaacagaagagctaaaacggtttgatgatccaggtttgatgctcatgggtttcaagccgttggtactgctgaagaaacaccattacctgaggccctccctgttcgtgtacccagaggagtcgctggtgattgggagctcaaccctgttcagtgctctgctcatcaagtgtctggagaaggaggttgcagcattgtgcagatacacaccccgcaggaacatccctccttattttgtggctttggtgccacaggaagaagagttggatgaccagaaaattcaggtgactcctccaggcttccagctggtctttttaccctttgctgatgataaaaggaagatgccctttactgaaaaaatcatggcaactccagagcaggtgggcaagatgaaggctatcgttgagaagcttcgcttcacatacagaagtgacagctttgagaaccccgtgctgcagcagcacttcaggaacctggaggccttggccttggatttgatggagccggaacaagcagtggacctgacattgcccaaggttgaagcaatgaataaaagactgggctccttggtggatgagtttaaggagcttgtttacccaccagattacaatcctgaagggaaagttaccaagagaaaacacgataatgaaggttctggaagcaaaaggcccaaggtggagtattcagaagaggagctgaagacccacatcagcaagggtacgctgggcaagttcactgtgcccatgctgaaagaggcctgccgggcttacgggctgaagagtgggctgaagaagcaggagctgctggaagccctcaccaagcacttccaggactgaccagaggccgcgcgtccagctgcccttccgcagtgtggccaggctgcctggccttgtcctcagccagttaaaatgtgtttctcctgagctaggaagagtctacccgacataagtcgagggactttatgtttttgaggctttctgttgccatggtgatggtgtagccctcccactttgctgttccttactttactgcctgaataaagagccctaagtttgtacta

SEQ ID NO: 200514 - DNA, 1958 bp, Homo sapiens
  Payload ID: 19565
  Gene Name: X-ray repair complementing defective repair in Chinese hamster cells 6
  ENST ID: ENST00000405506
  CDS Start-End: 60-1739
cgcctagtgagcagtagccaacatgtcagggtgggagtcatattacaaaaccgagggcgatgaagaagcagaggaagaacaagaagagaaccttgaagcaagtgtgtatccaaagtgtgtacatcagtaagatcataagcagtgatcgagatctcttggctgtggtgttctatggtaccgagaaagacaaaaattcagtgaattttaaaaatatttacgtcttacaggagctggataatccaggtgcaaaacgaattctagagcttgaccagtttaaggggcagcagggacaaaaacgtttccaagacatgatgggccacggatctgactactcactcagtgaagtgctgtgggtctgtgccaacctctttagtgatgtccaattcaagatgagtcataagaggatcatgctgttcaccaatgaagacaacccccatggcaatgacagtgccaaagccagccgggccaggaccaaagccggtgatctccgagatacaggcatcttccttgacttgatgcacctgaagaaacctgggggctttgacatatccttgttctacagagatatcatcagcatagcagaggatgaggacctcagggttcactttgaggaatccagcaagctagaagacctgttgcggaaggttcgcgccaaggagaccaggaagcgagcactcagcaggttaaagctgaagctcaacaaagatatagtgatctctgtgggcatttataatctggtccagaaggctctcaagcctcctccaataaagctctatcgggaaacaaatgaaccagtgaaaaccaagacccggacctttaatacaagtacaggcggtttgcttctgcctagcgataccaagaggtctcagatctatgggagtcgtcagattatactggagaaagaggaaacagaagagctaaaacggtttgatgatccaggtttgatgctcatgggtttcaagccgttggtactgctgaagaaacaccattacctgaggccctccctgttcgtgtacccagaggagtcgctggtgattgggagctcaaccctgttcagtgctctgctcatcaagtgtctggagaaggaggttgcagcattgtgcagatacacaccccgcaggaacatccctccttattttgtggctttggtgccacaggaagaagagttggatgaccagaaaattcaggtgactcctccaggcttccagctggtctttttaccctttgctgatgataaaaggaagatgccctttactgaaaaaatcatggcaactccagagcaggtgggcaagatgaaggctatcgttgagaagcttcgcttcacatacagaagtgacagctttgagaaccccgtgctgcagcagcacttcaggaacctggaggccttggccttggatttgatggagccggaacaagcagtggacctgacattgcccaaggttgaagcaatgaataaaagactgggctccttggtggatgagtttaaggagcttgtttacccaccagattacaatcctgaagggaaagttaccaagagaaaacacgataatgaaggttctggaagcaaaaggcccaaggtggagtattcagaagaggagctgaagacccacatcagcaagggtacgctgggcaagttcactgtgcccatgctgaaagaggcctgccgggcttacgggctgaagagtgggctgaagaagcaggagctgctggaagccctcaccaagcacttccaggactgaccagaggccgcgcgtccagctgcccttccgcagtgtggccaggctgcctggccttgtcctcagccagttaaaatgtgtttctcctgagctaggaagagtctacccgacataagtcgagggactttatgtttttgaggctttctgttgccatggtgatggtgtagccctcccactttgctgttccttactttactgcctgaataaagagccctaagtttg

SEQ ID NO: 200515 - DNA, 2200 bp, Homo sapiens
  Payload ID: 19565
  Gene Name: X-ray repair complementing defective repair in Chinese hamster cells 6
  Uniprot ID: P12956
  ENST ID: ENST00000405878
  CDS Start-End: 147-1976
aagtgtgcgaatccgaggagcagcgacagactcgagaccacgctccttcctcgggaaggaggcggcacctcgcgtttgaggcccgcctgcgtttgaggcccgcctgcgcttgcggcccgcctgcgcttgagtgagcagtagccaacatgtcagggtgggagtcatattacaaaaccgagggcgatgaagaagcagaggaagaacaagaagagaaccttgaagcaagtggagactataaatattcaggaagagatagtttgatttttttggttgatgcctccaaggctatgtttgaatctcagagtgaagatgagttgacaccttttgacatgagcatccagtgtatccaaagtgtgtacatcagtaagatcataagcagtgatcgagatctcttggctgtggtgttctatggtaccgagaaagacaaaaattcagtgaattttaaaaatatttacgtcttacaggagctggataatccaggtgcaaaacgaattctagagcttgaccagtttaaggggcagcagggacaaaaacgtttccaagacatgatgggccacggatctgactactcactcagtgaagtgctgtgggtctgtgccaacctctttagtgatgtccaattcaagatgagtcataagaggatcatgctgttcaccaatgaagacaacccccatggcaatgacagtgccaaagccagccgggccaggaccaaagccggtgatctccgagatacaggcatcttccttgacttgatgcacctgaagaaacctgggggctttgacatatccttgttctacagagatatcatcagcatagcagaggatgaggacctcagggttcactttgaggaatccagcaagctagaagacctgttgcggaaggttcgcgccaaggagaccaggaagcgagcactcagcaggttaaagctgaagctcaacaaagatatagtgatctctgtgggcatttataatctggtccagaaggctctcaagcctcctccaataaagctctatcgggaaacaaatgaaccagtgaaaaccaagacccggacctttaatacaagtacaggcggtttgcttctgcctagcgataccaagaggtctcagatctatgggagtcgtcagattatactggagaaagaggaaacagaagagctaaaacggtttgatgatccaggtttgatgctcatgggtttcaagccgttggtactgctgaagaaacaccattacctgaggccctccctgttcgtgtacccagaggagtcgctggtgattgggagctcaaccctgttcagtgctctgctcatcaagtgtctggagaaggaggttgcagcattgtgcagatacacaccccgcaggaacatccctccttattttgtggctttggtgccacaggaagaagagttggatgaccagaaaattcaggtgactcctccaggcttccagctggtctttttaccctttgctgatgataaaaggaagatgccctttactgaaaaaatcatggcaactccagagcaggtgggcaagatgaaggctatcgttgagaagcttcgcttcacatacagaagtgacagctttgagaaccccgtgctgcagcagcacttcaggaacctggaggccttggccttggatttgatggagccggaacaagcagtggacctgacattgcccaaggttgaagcaatgaataaaagactgggctccttggtggatgagtttaaggagcttgtttacccaccagattacaatcctgaagggaaagttaccaagagaaaacacgataatgaaggttctggaagcaaaaggcccaaggtggagtattcagaagaggagctgaagacccacatcagcaagggtacgctgggcaagttcactgtgcccatgctgaaagaggcctgccgggcttacgggctgaagagtgggctgaagaagcaggagctgctggaagccctcaccaagcacttccaggactgaccagaggccgcgcgtccagctgcccttccgcagtgtggccaggctgcctggccttgtcctcagccagttaaaatgtgtttctcctgagctaggaagagtctacccgacataagtcgagggactttatgtttttgaggctttctgttgccatggtgatggtgtagccctcccactttgctgttccttactttactgcctgaataaagagccctaagtttgtacta

SEQ ID NO: 200516 - DNA, 2006 bp, Homo sapiens
  Payload ID: 19565
  Gene Name: X-ray repair complementing defective repair in Chinese hamster cells 6
  Uniprot ID: P12956
  ENST ID: ENST00000402580
  CDS Start-End: 67-1773
atgcgtggattgtcgtcttctgtccaagttggtcgcttccctgcgccaaagtgagcagtagccaacatgtcagggtgggagtcatattacaaaaccgagggcgatgaagaagcagaggaagaacaagaagagaaccttgaagcaagtggagactataaatattcaggaagagatagtttgatttttttggttgatgcctccaaggctatgtttgaatctcagagtgaagatgagttgacaccttttgacatgagcatccaggagctggataatccaggtgcaaaacgaattctagagcttgaccagtttaaggggcagcagggacaaaaacgtttccaagacatgatgggccacggatctgactactcactcagtgaagtgctgtgggtctgtgccaacctctttagtgatgtccaattcaagatgagtcataagaggatcatgctgttcaccaatgaagacaacccccatggcaatgacagtgccaaagccagccgggccaggaccaaagccggtgatctccgagatacaggcatcttccttgacttgatgcacctgaagaaacctgggggctttgacatatccttgttctacagagatatcatcagcatagcagaggatgaggacctcagggttcactttgaggaatccagcaagctagaagacctgttgcggaaggttcgcgccaaggagaccaggaagcgagcactcagcaggttaaagctgaagctcaacaaagatatagtgatctctgtgggcatttataatctggtccagaaggctctcaagcctcctccaataaagctctatcgggaaacaaatgaaccagtgaaaaccaagacccggacctttaatacaagtacaggcggtttgcttctgcctagcgataccaagaggtctcagatctatgggagtcgtcagattatactggagaaagaggaaacagaagagctaaaacggtttgatgatccaggtttgatgctcatgggtttcaagccgttggtactgctgaagaaacaccattacctgaggccctccctgttcgtgtacccagaggagtcgctggtgattgggagctcaaccctgttcagtgctctgctcatcaagtgtctggagaaggaggttgcagcattgtgcagatacacaccccgcaggaacatccctccttattttgtggctttggtgccacaggaagaagagttggatgaccagaaaattcaggtgactcctccaggcttccagctggtctttttaccctttgctgatgataaaaggaagatgccctttactgaaaaaatcatggcaactccagagcaggtgggcaagatgaaggctatcgttgagaagcttcgcttcacatacagaagtgacagctttgagaaccccgtgctgcagcagcacttcaggaacctggaggccttggccttggatttgatggagccggaacaagcagtggacctgacattgcccaaggttgaagcaatgaataaaagactgggctccttggtggatgagtttaaggagcttgtttacccaccagattacaatcctgaagggaaagttaccaagagaaaacacgataatgaaggttctggaagcaaaaggcccaaggtggagtattcagaagaggagctgaagacccacatcagcaagggtacgctgggcaagttcactgtgcccatgctgaaagaggcctgccgggcttacgggctgaagagtgggctgaagaagcaggagctgctggaagccctcaccaagcacttccaggactgaccagaggccgcgcgtccagctgcccttccgcagtgtggccaggctgcctggccttgtcctcagccagttaaaatgtgtttctcctgagctaggaagagtctacccgacataagtcgagggactttatgtttttgaggctttctgttgccatggtgatggtgtagccctcccactttgctgttccttactttactgcctgaataaagagccctaagtttgtactatatactgtt

SEQ ID NO: 200517 - DNA, 2148 bp, Homo sapiens
  Payload ID: 19565
  Gene Name: X-ray repair complementing defective repair in Chinese hamster cells 6
  ENST ID: ENST00000428575
  CDS Start-End: 236-1915
gatgggttggctttcgtcagggacataggtagaagctggttggggagtgtgcgtgccagcctgacgcgatatagtgcgcacatgcgtgatgacgtagagggcgttgattgggaccgagtacagggcccgcgcatgcgtggattgtcgtcttctgtccaagttggtcgcttccctgcgccaaagtgagcagtagccaacatgtcagggtgggagtcatattacaaaaccgagggcgatgaagaagcagaggaagaacaagaagagaaccttgaagcaagtgtgtatccaaagtgtgtacatcagtaagatcataagcagtgatcgagatctcttggctgtggtgttctatggtaccgagaaagacaaaaattcagtgaattttaaaaatatttacgtcttacaggagctggataatccaggtgcaaaacgaattctagagcttgaccagtttaaggggcagcagggacaaaaacgtttccaagacatgatgggccacggatctgactactcactcagtgaagtgctgtgggtctgtgccaacctctttagtgatgtccaattcaagatgagtcataagaggatcatgctgttcaccaatgaagacaacccccatggcaatgacagtgccaaagccagccgggccaggaccaaagccggtgatctccgagatacaggcatcttccttgacttgatgcacctgaagaaacctgggggctttgacatatccttgttctacagagatatcatcagcatagcagaggatgaggacctcagggttcactttgaggaatccagcaagctagaagacctgttgcggaaggttcgcgccaaggagaccaggaagcgagcactcagcaggttaaagctgaagctcaacaaagatatagtgatctctgtgggcatttataatctggtccagaaggctctcaagcctcctccaataaagctctatcgggaaacaaatgaaccagtgaaaaccaagacccggacctttaatacaagtacaggcggtttgcttctgcctagcgataccaagaggtctcagatctatgggagtcgtcagattatactggagaaagaggaaacagaagagctaaaacggtttgatgatccaggtttgatgctcatgggtttcaagccgttggtactgctgaagaaacaccattacctgaggccctccctgttcgtgtacccagaggagtcgctggtgattgggagctcaaccctgttcagtgctctgctcatcaagtgtctggagaaggaggttgcagcattgtgcagatacacaccccgcaggaacatccctccttattttgtggctttggtgccacaggaagaagagttggatgaccagaaaattcaggtgactcctccaggcttccagctggtctttttaccctttgctgatgataaaaggaagatgccctttactgaaaaaatcatggcaactccagagcaggtgggcaagatgaaggctatcgttgagaagcttcgcttcacatacagaagtgacagctttgagaaccccgtgctgcagcagcacttcaggaacctggaggccttggccttggatttgatggagccggaacaagcagtggacctgacattgcccaaggttgaagcaatgaataaaagactgggctccttggtggatgagtttaaggagcttgtttacccaccagattacaatcctgaagggaaagttaccaagagaaaacacgataatgaaggttctggaagcaaaaggcccaaggtggagtattcagaagaggagctgaagacccacatcagcaagggtacgctgggcaagttcactgtgcccatgctgaaagaggcctgccgggcttacgggctgaagagtgggctgaagaagcaggagctgctggaagccctcaccaagcacttccaggactgaccagaggccgcgcgtccagctgcccttccgcagtgtggccaggctgcctggccttgtcctcagccagttaaaatgtgtttctcctgagctaggaagagtctacccgacataagtcgagggactttatgtttttgaggctttctgttgccatggtgatggtgtagccctcccactttgctgttccttactttactgcctgaataaagagccctaagtttgtactatatactgtt

SEQ ID NO: 200518 - DNA, 1245 bp, Homo sapiens
  Payload ID: 19566
  Gene Name: XRCC6 binding protein 1
  Uniprot ID: Q9Y6H3
  ENST ID: ENST00000300145
  CDS Start-End: 126-866
ggctgcccttcttccctgcggagggagggcctgggcggtcgcgttggcgggagggaggttacctttcccagtctcgctctggccgcctgagccaggaggaagcagcggcgaggtctgcgggaggcatggcgggagctccggacgagcgccggcggggccccgcggcaggggagcagctgcagcagcaacacgtctcttgccaggtcttccccgagcgtctggcccaggggaatccccagcaagggttcttctccagcttcttcaccagcaaccagaagtgccagcttaggctcctgaagacgctggagacaaatccatatgtcaaacttctgcttgatgctatgaaacactcaggttgtgctgttaacaaagatagacacttttcttgcgaagactgtaatggaaatgtcagtggaggttttgatgcttcaacatctcagatagttttgtgccagaataatatccataatcaggcccatatgaacagagtggtcacacacgagcttattcatgcatttgatcattgtcgtgcccatgtcgactggttcaccaacatcagacatttggcgtgctcagaggttcgagctgctaaccttagtggagactgctcacttgtcaatgaaatattcaggttacattttggattaaaacaacaccaccagacttgtgtgcgagacagagccactctttctatcctggctgttaggaatatcagcaaagaagtagctaaaaaggctgttgatgaagtttttgaatcttgtttcaatgaccatgaaccttttggaaggatcccacataacaagacttatgcaagatatgctcacagagactttgaaaaccgtgatcggtattattcaaatatatgagcacaatgacatttttatattacagagcttccatcatcatgaagaaaaaaaaatttggttctcaagtgaacaaacatataaaatgtaaacaatccctacaatccagataaaacagagaagactgtgattctagcatattatcagaaaaagtaactatggcaaaaaatgaaactgctttaaactccaaggcagaaattgtatctttatagctaaccatttagtaaataaatacattacatttttgtattttagtcatttgtttttattacatgtgattattttaaaatttgattatgaaacctgtgaagtgtgctcttccatgatgttgataggtgaccactgttggtatttacattaaatgtaaagaaatgtgtactga

SEQ ID NO: 200519 - DNA, 519 bp, Homo sapiens
  Payload ID: 19566
  Gene Name: XRCC6 binding protein 1
  ENST ID: ENST00000549257
  CDS Start-End: 1-113
tggcccaggggaatccccagcaagggttcttctccagcttcttcaccagcaaccagaagtgccagcttaggctcctgaagacgctggagacaaatagttttgtgccagaataatatccataatcaggcccatatgaacagagtggtcacacacgagcttattcatgcatttgatcattgtcgtgcccatgtcgactggttcaccaacatcagacatttggcgtgctcagaggttcgagctgctaaccttagtggagactgctcacttgtcaatgaaatattcaggttacattttggattaaaacaacaccaccagacttgtgtgcgagacagagccactctttctatcctggctgttaggaatatcagcaaagaagtagctaaaaaggctgttgatgaagtttttgaatcttgtttcaatgaccatgaaccttttggaaggatcccacataacaagacttatgcaagatatgctcacagagactttgaaaaccgtgatcggtattattcaaatatatga

SEQ ID NO: 200520 - DNA, 1245 bp, Homo sapiens; identical to SEQ ID NO: 200518
  Payload ID: 19566
  Gene Name: XRCC6 binding protein 1
  Uniprot ID: Q9Y6H3
  ENST ID: ENST00000571490
  CDS Start-End: 126-866

SEQ ID NO: 200521 - DNA, 519 bp, Homo sapiens; identical to SEQ ID NO: 200519
  Payload ID: 19566
  Gene Name: XRCC6 binding protein 1
  ENST ID: ENST00000570321
  CDS Start-End: 1-113

SEQ ID NO: 200522 - DNA, 644 bp, Homo sapiens
  Payload ID: 19567
  Gene Name: XXbac-B562F10.12
  ENST ID: ENST00000429594
  CDS Start-End: 1-196
cagaggggaggattacctgaaagagacacactgctacgatccaggcagcaacacttggcacacactggctgatgggcctgtgcggcgcgcctggcacggcatggcaaccctcctcaacaagctgtatgtgatcgggggcagcaacaacgatgccggatacaggagggacgtgcaccaggtgcgagaccaagtgtagcaatggcacttacggcgaggactgcgccttcgtgtgcgccgactgcggcagcggacactgcgacttccagtcggggcgctgcctgtgcagccctggcgtccacgggccccactgtaacgtgacgtgcccgcccggactccacggcgcggactgtgctcaggcctgcagctgccacgaggacacgtgcgacccggtcactggtgcctgccacctagaaaccaaccagcgcaagggcgtgatgggcgcgggcgcgctgctcgtcctgctcgtctgcctgctgctctcgctgctcggctgctgctgcgcttgccgcggcaaggaccctacgcgccgaccccgcccccgcagggagctttcgcttgggaggaagaaggcgccgcaccgactatgcgggcgcttcagtcgcatcagcatgaagctgccccggatcccgctccggaggcagaaa

SEQ ID NO: 200523 - DNA, 4181 bp, Homo sapiens
  Payload ID: 19568
  Gene Name: XXbac-BCX105D18.9
  ENST ID: ENST00000468814
  CDS Start-End: 192-1097
agcgaggcctacggacccaggccaggtgggagtctgcactcttcaaggggcctgggctgctgctcacgggtattaaagaactccgcgttgttcatggctgaggcgatgcattaggaagatcctggacctagagaacaagtcccccgaacgctgagttggaggcgggacttcgggtgcgcgttggcgggagcatgctggggctctgggggcagcggctccccgcggcgtgggtcctgcttctgttgcctttcctgccgctgctgctgcttgcagcccccgcgccccaccgcgagtcctacaagccggtcatcgtggtgcatgggctcttcgacagctcgtacagcttccgccacctgctggaatacatcaatgagacacaccccgggactgtggtgacagtgctcgatctcttcgatgggagagagagcttgcgacccctgtgggaacaggtgcaagggttccgagaggctgtggtccccatcatggcaaaggcccctcaaggggtgcatctcatctgctactcgcaggggggccttgtgtgccgggctctgctttctgtcatggatgatcacaacgtggattctttcatctccctctcctctccacagatgggacagtatggagacacggactacttgaagtggctgttccccacctccatgcggtctaacctctatcggatctgctatagcccctggggccaggaattctccatctgcaactactggcatgatccccaccacgatgacttgtacctcaatgccagcagcttcctggccctgatcaatggggaaagagaccatcccaatgccacagtatggcggaagaactttctgcgtgtgggccacctggtgctgattgggggccctgatgatggtgttattactccctggcagtccagcttctttggtttctatgatgcaaatgagaccgtcctggagatggaggagcaactgcctgccaggcccacccaccagtctgagctgcttctgctgaggctggtctgcttgaagcctcccaggagaaagaagccagcctgtagggtccagcgtcaaagcgaatcatggggtccagggctgagctgtgcactctcttaggcggattctccttcctcctgctactgataccagtcagggagtctgctccaagcagacactggtggtcccgctccactacaacgagtcctacagccaaccagtgtacaagccctacctgaccttgtgcgctgggaggcgcatctgcagcacttacaggaccatgtaccgcgttatgtggcgggaggtgaagcgggaggttcagcagacccatgcagtgtgctgccagggctggaagaagcggcacccgggggcgctcacctgtgaagccatctgcgccaagccttgcctgaacggaggcgtctgcgttaggcctgaccagtgcgagtgcgcccccggctggggagggaagcactgtcatgtgggaccagcatcaccctctgctcgcaccattgttttaatacggcaggcagcttcacctgcggctgcccccatgacctagtgctaggcgtggacgggcgcacctgcatggaggggtccccagagcccccaaccagtgccagcatactcagcgtggccgttcgggaggcggaaaaagatgagcgcgctctgaagcaggagattcacgagctgcgagggcgcctggagcggctggagcagtgggccggtcaggctggggcctgggtcagagcggtgctgcccgtgccgcctgaagagctgcagccagaacaggtggctgagctgtggggccggggtgaccggatcgaatctctcagcgaccaggtgctgctgctggaggagaggctaggtgcctgctcctgtgaggacaacagcctgggcctcggcgtcaatcatcgataagaagcctctacagcacccctgccccctaatttatacagaaaccggacccactaatcctctgggattggccgactgtgagctgcagataaggctatcagccaccaaagagcaatgaacaatggaaacttcagagagctgaagaaagggggaggcctgtgttcttggcctgcccctgagtcttctggctgggggcaggttgcctgggcaagaactgcttcttcaattccttaacaaatgcaaccaccaacacccagatctctctctctctttattttcagtttttttgctgttatccagataattaataaaaaccaaccacgcaaaactgggtcccaccctctccttttgctcccagcctacctccccagttgtgggaacaggtctggagtgagaggcagggagtggctaatgccaccaggaagaaatgaaaactggctcagagagggggaagcctcaacagaaaaagaaataaattaaaagccctcctatcccctccagccagggttcgttcctttccccaactccccagggggcagaagtgagtgcagcacctgatgtctgcttcttccccttgtgtctggcttcttcagatagtcaccaccaccccggccatcagtggagatttcccggaaaacagtgagcatggagtgccggactctgtcagccagagctgggacgtcatctggtgtcagcccttccgtgggcactgggggcagcacccgcacctgacattgtcctggggcaaggggagcaccatcatggcctgtccacccaggtctttgcccacagggatgtcctcccagcctctccggacacaccctaccccagaactgctcaaagccctcacccgaggtgaagcgacgctccttcttgcagtagaagtcttggatgactcacgtcctgggtgagcagggtctgggcgacctcagacatgacactgatggcatcccccgtgcgcttccggtcgatgaagatgactcctgccagccagcaggccagcccggcagagccagcccacagtagctcgcgcttggcaatgggcacacagcggcctggcagtacctccatcatcccttgggcagggtgggagtgggtgaggatcggggtggaggcagagtgtcacagaaggcaacccacctcacccagctcatcaccctctggtagggactggaggtgaaggaggagactaggcagggaggggggccccaagtgaaggaaagggtgaccaaaagtatatgtaccctgcttatgagggcagttctacccagggaatgaaggcctgagtgggaggcaagggggcaatgtcccagaggaaggggaattgaggatctctaggagaagatattctagggaaggtttcaggaggggaggcatggctgggggaggtgtgccctgtggtggggtctcaccaagcagatcgagagagctctggtggttggagacaacaacatagggctgcgagggagggaagtggtgagcccctcgcacctccactcggatcccgtacaggtatttgatgtggagcagcattagacgcaagatcctgtggggtcatggcaaggggtcccagtgggatccattgatgtccatctgcatgcctcagctccccccaccttactgtctttctgaccacctttgcagtcctctccccattccctgtctctggtctctctcagtcttttctacacacaccatgcccccttcccccaatccactactcactttgtacccttaggttccctcattgcccaagaccccttgcccctcacttcatgttctcgacgttgcgtcctcgcacggcacacacagggatggcgagcacagccaggaagaggatccagccattgtagaaggccatcttgaagaagtacttggcactggggctgcagaaccacagggtgggcagcaggaagagcagcagcaggaagagcagcagcagcagcatccatgcccctggccacaaatccattctggccacctgcaggggatggggcaagggacaatcagcctggtttctggaggagagtggggctccggatatattcagacaagagacacaagacacagacatctacaattcacagatacctgataataaatgacaacaagaataatagctaacacttgtagctggtaagggtcttataatggtctatacttgtgctgtccgagaaagtagccaccacctacatgtggctacttgaaatgcagctagtctgaactgagatgtgctggaaatgtaaaatacacatcagatttcaaagactgaataaaaaacaaaatgtg

SEQ ID NO: 200524 - DNA, 2878 bp, Homo sapiens
  Payload ID: 19568
  Gene Name: XXbac-BCX105D18.9
  ENST ID: ENST00000467760
  CDS Start-End: 569-1474
ggaagtggggagaatcaaggcggggaaatcggacttttgggtcgctgggggcaacgaagcctggagaggccttctttccattcccagaatatgtttgctgctttttcctctccccactggcctaaatggatcgctccgcctgtttcctccccagcacctagggcgcaatggaatattccattgcccctcctgtcctgggtctgtgttgcggggaacgctcgcgcggttgccagagaaagccccggacgtgacggatttgcgcgaccccaagcagcccgcccttccccctcccatccgtcattcccctgcgctctctttcctcacccttccccccgccaccgtgggttccagacttgggataagtaaacagcgggtggagcgaggcctacggacccaggccaggtgggagtctgcactcttcaaggggcctgggctgctgctcacgggtattaaagaactccgcgttgttcatggctgaggcgatgcattaggaagatcctggacctagagaacaagtcccccgaacgctgagttggaggcgggacttcgggtgcgcgttggcgggagcatgctggggctctgggggcagcggctccccgcggcgtgggtcctgcttctgttgcctttcctgccgctgctgctgcttgcagcccccgcgccccaccgcgagtcctacaagccggtcatcgtggtgcatgggctcttcgacagctcgtacagcttccgccacctgctggaatacatcaatgagacacaccccgggactgtggtgacagtgctcgatctcttcgatgggagagagagcttgcgacccctgtgggaacaggtgcaagggttccgagaggctgtggtccccatcatggcaaaggcccctcaaggggtgcatctcatctgctactcgcaggggggccttgtgtgccgggctctgctttctgtcatggatgatcacaacgtggattctttcatctccctctcctctccacagatgggacagtatggagacacggactacttgaagtggctgttccccacctccatgcggtctaacctctatcggatctgctatagcccctggggccaggaattctccatctgcaactactggcatgatccccaccacgatgacttgtacctcaatgccagcagcttcctggccctgatcaatggggaaagagaccatcccaatgccacagtatggcggaagaactttctgcgtgtgggccacctggtgctgattgggggccctgatgatggtgttattactccctggcagtccagcttctttggtttctatgatgcaaatgagaccgtcctggagatggaggagcaactgcctgccaggcccacccaccagtctgagctgcttctgctgaggctggtctgcttgaagcctcccaggagaaagaagccagcctgtagggtccagcgtcaaagcgaatcatggggtccagggctgagctgtgcactctcttaggcggattctccttcctcctgctactgataccaggcgagggggccaagggtggatccctcagagagaggtgacaacagagggggtagggcccggggtgagctcttctcaggagccttctgctgggggtggggcttcacaggaggcaaaacataactgtaagtttagaatgggggtgagaggctgtcatctggagggagagcggggggcctcagtagcctcttgagggaagtgggactcctggctccccagggcctggcctactcaatctctcccacctcatcctctggcatggacgcagtcagggagtctgctccaagcagacactggtggtcccgctccactacaacgagtcctacagccaaccagtgtacaagccctacctgaccttgtgcgctgggaggcgcatctgcagcacttacaggaccatgtaccgcgttatgtggcgggaggtgaagcgggaggttcagcagacccatgcagtgtgctgccagggctggaagaagcggcacccgggggcgctcacctgtgaagccatctgcgccaagccttgcctgaacggaggcgtctgcgttaggcctgaccagtgcgagtgcgcccccggctggggagggaagcactgtcatgtggacgtggatgaatgtaggaccagcatcaccctctgctcgcaccattgttttaatacggcaggcagcttcacctgcggctgcccccatgacctagtgctaggcgtggacgggcgcacctgcatggaggggtccccagagcccccaaccagtgccagcatactcagcgtggccgttcgggaggcggaaaaagatgagcgcgctctgaagcaggagattcacgagctgcgagggcgcctggagcggctggagcagtgggccggtcaggctggggcctgggtcagagcggtgctgcccgtgccgcctgaagagctgcagccagaacaggtggctgagctgtggggccggggtgaccggatcgaatctctcagcgaccaggtgctgctgctggaggagaggctaggtgcctgctcctgtgaggacaacagcctgggcctcggcgtcaatcatcgataagaagcctctacagcacccctgccccctaatttatacagaaaccggacccactaatcctctgggattggccgactgtgagctgcagataaggctatcagccaccaaagagcaatgaacaatggaaacttcagagagctgaagaaagggggaggcctgtgttcttggcctgcccctgagtcttctggctgggggcaggttgcctgggcaagaactgcttcttcaattccttaacaaatgcaaccaccaacacccagatctctctctctctttattttcagtttttttgctgttatccagataattaataaaaaccaaccacgcaaaa

SEQ ID NO: 200525 - DNA, 1010 bp, Homo sapiens
  Payload ID: 19568
  Gene Name: XXbac-BCX105D18.9
  ENST ID: ENST00000460446
  CDS Start-End: 1-383
accacgatgacttgtacctcaatgccagcagcttcctggccctgatcaatggggaaagagaccatcccaatgccacagtatggcggaagaactttctgcgtgtgggccacctggtgctgattgggggccctgatgatggtgttattactccctggcagtccagcttctttggtttctatgatgcaaatgagaccgtcctggagatggaggagcaactgcctgccaggcccacccaccagtctgagctgcttctgctgaggctggtctgcttgaagcctcccaggagaaagaagccaggtgggaatggagagagagaggaagcctgtagggtccagcgtcaaagcgaatcatggggtccagggctgagctgtgcactctcttaggcggattctccttcctcctgctactgataccaggcgagggggccaagggtggatccctcagagagaggtgacaacagagggggtagggcccggggtgagctcttctcaggagccttctgctgggggtggggcttcacaggaggcaaaacataactgtaagtttagaatgggggtgagaggctgtcatctggagggagagcggggggcctcagtagcctcttgagggaagtgggactcctggctccccagggcctggcctactcaatctctcccacctcatcctctggcatggacgcagtcagggagtctgctccaagcagacactggtggtcccgctccactacaacgagtcctacagccaaccagtgtacaagccctacctgaccttgtgcgctgggaggcgcatctgcagcacttacaggaccatgtaccgcgttatgtggcgggaggtgaagcgggaggttcagcagacccatgcagtgtgctgccagggctggaagaagcggcacccgggggcgctcacctgtgaagccatctgcgccaagccttgcctgaacggaggcgtctgcgttaggcctgaccagtgcgagtgcgcccccggctggggagggaagcactgtcatgtgg

SEQ ID NO: 200526 - DNA, 3874 bp, Homo sapiens
  Payload ID: 19569
  Gene Name: XXbac-BPG116M5.17
  ENST ID: ENST00000456570
  CDS Start-End: 56-3856
atgaccttttccctcccgcggctctctacctctcgccgcccctagggaggacaccatgggcccactgatggttcttttttgcctgctgttcctgtacccaggtctggcagactcggctccctcctgccctcagaacgtgaatatctcgggtggcaccttcaccctcagccatggctgggctcctgggagccttctcacctactcctgcccccagggcctgtacccatccccagcatcacggctgtgcaagagcagcggacagtggcagaccccaggagccacccggtctctgtctaaggcggtctgcaaacctggccactgccccaacccaggcatttcactgggcgcagtgcggacaggcttccgctttggtcatggggacaaggtccgctatcgctgctcctcgaatcttgtgctcacggggtcttcggagcgggagtgccagggcaacggggtctggagtggaacggagcccatctgccgccaaccctactcttatgacttccctgaggacgtggcccctgccctgggcacttccttctcccacatgcttggggccaccaatcccacccagaagacaaaggatcatgaaaatggaactgggactaacacctatgcggccttaaacagtgtctatctcatgatgaacaaccaaatgcgactcctcggcatggaaacgatggcctggcaggaaatccgacatgccatcatccttctgacagatggaaagtccaatatgggtggctctcccaagacagctgttgaccatatcagagagatcctgaacatcaaccagaagaggaatgactatctggacatctatgccatcggggtgggcaagctggatgtggactggagagaactgaatgagctagggtccaagaaggatggtgagaggcatgccttcattctgcaggacacaaaggctctgcaccaggtctttgaacatatgctggatgtctccaagctcacagacaccatctgcggggtggggaacatgtcagcaaacgcctctgaccaggagaggacaccctggcatgtcactattaagcccaagagccaagagacctgccggggggccctcatctccgaccaatgggtcctgacagcagctcattgcttccgcgatggcaacgaccactccctgtggagggtcaatgtgggagaccccaaatcccagtggggcaaagaattccttattgagaaggcggtgatctccccagggtttgatgtctttgccaaaaagaaccagggaatcctggagttctatggtgatgacatagctctgctgaagctggcccagaaagtaaagatgtccacccatgccaggcccatctgccttccctgcacgatggaggccaatctggctctgcggagacctcaaggcagcacctgtagggaccatgagaatgaactgctgaacaaacagagtgttcctgctcattttgtcgccttgaatgggagcaaactgaacattaaccttaagatgggagtggagtggacaagctgtgccgaggttgtctcccaagaaaaaaccatgttccccaacttgacagatgtcagggaggtggtgacagaccagttcctatgcagtgggacccaggaggatgagagtccctgcaagggtgtgaccaccactccatggtctttggcccggccccagggatcctgctctctggagggggtagagatcaaaggcggctccttccgacttctccaagagggccaggcactggagtacgtgtgtccttctggcttctacccgtaccctgtgcagacacgtacctgcagatctacggggtcctggagcaccctgaagactcaagaccaaaagactgtcaggaaggcagagtgcagagcaatccactgtccaagaccacacgacttcgagaacggggaatactggccccggtctccctactacaatgtgagtgatgagatctctttccactgctatgacggttacactctccggggctctgccaatcgcacctgccaagtgaatggccgatggagtgggcagacagcgatctgtgacaacggagcggggtactgctccaacccgggcatccccattggcacaaggaaggtgggcagccagtaccgccttgaagacagcgtcacctaccactgcagccgggggcttaccctgcgtggctcccagcggcgaacgtgtcaggaaggtggctcttggagcgggacggagccttcctgccaagactccttcatgtacgacacccctcaagaggtggccgaagctttcctgtcttccctgacagagaccatagaaggagtcgatgctgaggatgggcacggcccaggggaacaacagaagcggaagatcgtcctggacccttcaggctccatgaacatctacctggtgctagatggatcagacagcattggggccagcaacttcacaggagccaaaaagtgtctagtcaacttaattgagaaggtggcaagttatggtgtgaagccaagatatggtctagtgacatatgccacataccccaaaatttgggtcaaagtgtctgaagcagacagcagtaatgcagactgggtcacgaagcagctcaatgaaatcaattatgaagaccacaagttgaagtcagggactaacaccaagaaggccctccaggcagtgtacagcatgatgagctggccagatgacgtccctcctgaaggctggaaccgcacccgccatgtcatcatcctcatgactgatggattgcacaacatgggcggggacccaattactgtcattgatgagatccgggacttgctatacattggcaaggatcgcaaaaacccaagggaggattatctggatgtctatgtgtttggggtcgggcctttggtgaaccaagtgaacatcaatgctttggcttccaagaaagacaatgagcaacatgtgttcaaagtcaaggatatggaaaacctggaagatgttttctaccaaatgatcgatgaaagccagtctctgagtctctgtggcatggtttgggaacacaggaagggtaccgattaccacaagcaaccatggcaggccaagatctcagtcattcgcccttcaaagggacacgagagctgtatgggggctgtggtgtctgagtactttgtgctgacagcagcacattgtttcactgtggatgacaaggaacactcaatcaaggtcagcgtaggaggggagaagcgggacctggagatagaagtagtcctatttcaccccaactacaacattaatgggaaaaaagaagcaggaattcctgaattttatgactatgacgttgccctgatcaagctcaagaataagctgaaatatggccagactatcaggcccatttgtctcccctgcaccgagggaacaactcgagctttgaggcttcctccaactaccacttgccagcaacaaaaggaagagctgctccctgcacaggatatcaaagctctgtttgtgtctgaggaggagaaaaagctgactcggaaggaggtctacatcaagaatggggataagaaaggcagctgtgagagagatgctcaatatgccccaggctatgacaaagtcaaggacatctcagaggtggtcacccctcggttcctttgtactggaggagtgagtccctatgctgaccccaatacttgcagaggtgattctggcggccccttgatagttcacaagagaagtcgtttcattcaagttggtgtaatcagctggggagtagtggatgtctgcaaaaaccagaagcggcaaaagcaggtacctgctcacgcccgagactttcacatcaacctctttcaagtgctgccctggctgaaggagaaactccaagatgaggatttgggttttctataaggggtttcctgctggaca

SEQ ID NO: 200527 - DNA, 3377 bp, Homo sapiens
  Payload ID: 19569
  Gene Name: XXbac-BPG116M5.17
  ENST ID: ENST00000477310
  CDS Start-End: 30-3377
tacctctcgccgcccctagggaggacaccatgggcccactgatggttcttttttgcctgctgttcctgtacccaggtctggcagactcggctccctcctgccctcagaacgtgaatatctcgggtggcaccttcaccctcagccatggctgggctcctgggagccttctcacctactcctgcccccagggcctgtacccatccccagcatcacggctgtgcaagagcagcggacagtggcagaccccaggagccacccggtctctgtctaaggcggtctgcaaacctgtgcgctgtccagcccctgtctcctttgagaatggcatttataccccacggctggggtcctatcccgtgggtggcaatgtgagcttcgagtgtgaggatggcttcatattgcggggctcgcctgtgcgtcagtgtcgccccaacggcatgtgggatggagaaacagctgtgtgtgataatggggatcatgaaaatggaactgggactaacacctatgcggccttaaacagtgtctatctcatgatgaacaaccaaatgcgactcctcggcatggaaacgatggcctggcaggaaatccgacatgccatcatccttctgacagatggaaagtccaatatgggtggctctcccaagacagctgttgaccatatcagagagatcctgaacatcaaccagaagaggaatgactatctggatgtctccaagctcacagacaccatctgcggggtggggaacatgtcagcaaacgcctctgaccaggagaggacaccctggcatgtcactattaagcccaagagccaagagacctgccggggggccctcatctccgaccaatgggtcctgacagcagctcattgcttccgcgatggcaacgaccactccctgtggagggtcaatgtgggagaccccaaatcccagtggggcaaagaattccttattgagaaggcggtgatctccccagggtttgatgtctttgccaaaaagaaccagggaatcctggagttctatggtgatgacatagctctgctgaagctggcccagaaagtaaagatgtccacccatgccaggcccatctgccttccctgcacgatggaggccaatctggctctgcggagacctcaaggcagcacctgtagggaccatgagaatgaactgctgaacaaacagagtgttcctgctcattttgtcgccttgaatgggagcaaactgaacattaaccttaagatgggagtggagtggacaagctgtgccgaggttgtctcccaagaaaaaaccatgttccccaacttgacagatgtcagggaggtggtgacagaccagttcctatgcagtgggacccaggaggatgagagtccctgcaagggtgggtctgcaatccactgtccaagaccacacgacttcgagaacggggaatactggccccggtctccctactacaatgtgagtgatgagatctctttccactgctatgacggttacactctccggggctctgccaatcgcacctgccaagtgaatggccgatggagtgggcagacagcgatctgtgacaacggagcggggtactgctccaacccgggcatccccattggcacaaggaaggtgggcagccagtaccgccttgaagacagcgtcacctaccactgcagccgggggcttaccctgcgtggctcccagcggcgaacgtgtcaggaaggtggctcttggagcgggacggagccttcctgccaagactccttcatgtacgacacccctcaagaggtggccgaagctttcctgtcttccctgacagagaccatagaaggagtcgatgctgaggatgggcacggcccaggggaacaacagaagcggaagatcgtcctggacccttcaggctccatgaacatctacctggtgctagatggatcagacagcattggggccagcaacttcacaggagccaaaaagtgtctagtcaacttaattgagaaggtggcaagttatggtgtgaagccaagatatggtctagtgacatatgccacataccccaaaatttgggtcaaagtgtctgaagcagacagcagtaatgcagactgggtcacgaagcagctcaatgaaatcaattatgaagaccacaagttgaagtcagggactaacaccaagaaggccctccaggcagtgtacagcatgatgagctggccagatgacgtccctcctgaaggctggaaccgcacccgccatgtcatcatcctcatgactgatggattgcacaacatgggcggggacccaattactgtcattgatgagatccgggacttgctatacattggcaaggatcgcaaaaacccaagggaggattatctggatgtctatgtgtttggggtcgggcctttggtgaaccaagtgaacatcaatgctttggcttccaagaaagacaatgagcaacatgtgttcaaagtcaaggatatggaaaacctggaagatgttttctaccaaatgatcgatgaaagccagtctctgagtctctgtggcatggtttgggaacacaggaagggtaccgattaccacaagcaaccatggcaggccaagatctcagtcattcgcccttcaaagggacacgagagctgtatgggggctgtggtgtctgagtactttgtgctgacagcagcacattgtttcactgtggatgacaaggaacactcaatcaaggtcagcgtaggaggggagaagcgggacctggagatagaagtagtcctatttcaccccaactacaacattaatgggaaaaaagaagcaggaattcctgaattttatgactatgacgttgccctgatcaagctcaagaataagctgaaatatggccagactatcaggcccatttgtctcccctgcaccgagggaacaactcgagctttgaggcttcctccaactaccacttgccagcaacaaaaggaagagctgctccctgcacaggatatcaaagctctgtttgtgtctgaggaggagaaaaagctgactcggaaggaggtctacatcaagaatggggataagaaaggcagctgtgagagagatgctcaatatgccccaggctatgacaaagtcaaggacatctcagaggtggtcacccctcggttcctttgtactggaggagtgagtccctatgctgaccccaatacttgcagaggtgattctggcggccccttgatagttcacaagagaagtcgtttcattcaagttggtgtaatcagctggggagtagtggatgtctgcaaaaaccagaagcggcaaaagcaggtacctgctcacgcccgagactttcacatcaacctctttcaagtgctgccctggctgaaggagaaactccaagatgaggatttgggttttctataa

SEQ ID NO: 200528 - DNA, 612 bp, Homo sapiens; identical to SEQ ID NO: 150944
  Payload ID: 19570
  Gene Name: XXbac-BPG181M17.5
  ENST ID: ENST00000429234
  CDS Start-End: 87-612

SEQ ID NO: 200529 - DNA, 2705 bp, Homo sapiens
  Payload ID: 19571
  Gene Name: XXbac-BPG246D15.9
  ENST ID: ENST00000452392
  CDS Start-End: 175-2705
gaatgaaggccttggctggggaagcgaaagcgaaagctgcccgagccctgacgcccgccctggccgagcgtagctggcggaccagagccggtagcgaggttgggagagacggagcggacctcagcgctgaagcagaagtccccggagctgcggtctccccgccgcggctgagccatgcggctccctgacctgagaccctggacctccctgctgctggtggacgcggctttactgtggctgcttcagggccctctggggactttgcttcctcaagggctgccaggactatggctggaggggaccctgcggctgggagggctgtgggggctgctaaagctaagagggctgctgggatttgtggggacactgctgctcccgctctgtctggccacccccctgactgtctccctgagagccctggtcgcgggggcctcacgtgctcccccagccagagtcgcttcagccccttggagctggctgctggtggggtacggggctgcggggctcagctggtcactgtgggctgttctgagccctcctggagcccaggagaaggagcaggaccaggtgaacaacaaagtcttgatgtggaggctgctgaagctctccaggccggacctgcctctcctcgttgccgccttcttcttccttgtccttgctgttttgggtgagacattaatccctcactattctggtcgtgtgattgacatcctgggaggtgattttgacccccatgcctttgccagtgccatcttcttcatgtgcctcttctcctttggcagctcactgtctgcaggctgccgaggaggctgcttcacctacaccatgtctcgaatcaacttgcggatccgggagcagcttttctcctccctgctgcgccaggacctcggtttcttccaggagactaagacaggggagctgaactcacggctgagctcggataccaccctgatgagtaactggcttcctttaaatgccaatgtgctcttgcgaagcctggtgaaagtggtggggctgtatggcttcatgctcagcatatcgcctcgactcaccctcctttctctgctgcacatgcccttcacaatagcagcggagaaggtgtacaacacccgccatcaggaagtgcttcgggagatccaggatgcagtggccagggcggggcaggtggtgcgggaagccgttggagggctgcagaccgttcgcagttttggggccgaggagcatgaagtctgtcgctataaagaggcccttgaacaatgtcggcagctgtattggcggagagacctggaacgcgccttgtacctgctcgtaaggagggtgctgcacttgggggtgcagatgctgatgctgagctgtgggctgcagcagatgcaggatggggagctcacccagggcagcctgctttcctttatgatctaccaggagagcgtggggagctatgtgcagaccctggtatacatatatggggatatgctcagcaacgtgggagctgcagagaaggttttctcctacatggaccgacagccaaatctgccttcacctggcacgcttgcccccaccactctgcagggggttgtgaaattccaagacgtctcctttgcatatcccaatcgccctgacaggcctgtgctcaaggggctgacgtttaccctacgtcctggtgaggtgacggcgctggtgggacccaatgggtctgggaagagcacagtggctgccctgctgcagaatctgtaccagcccacagggggacaggtgctgctggatgaaaagcccatctcacagtatgaacactgctacctgcacagccaggtggtttcagttgggcaggagcctgtgctgttctccggttctgtgaggaacaacattgcttatgggctgcagagctgcgaagatgataaggtgatggcggctgcccaggctgcccacgcagatgacttcatccaggaaatggagcatggaatatacacagatgtaggggagaagggaagccagctggctgcgggacagaaacaacgtctggccattgcccgggcccttgtacgagacccgcgggtcctcatcctggatgaggctactagtgccctagatgtgcagtgcgagcaggccaatgggttctgggtgggtcccctgggtggtggctctgctagtgaatctgacccgactggattcctccatgactcaaggcacagactctccagtgatgtggggatgtttgtggcattgaccaagctggggcagccagatgctgagcagtggaacagccggctggatctcttggagaggagcagacaggccgtggatggggtctgtagacacaactacaggctgggcgcacccttcactgtggggagaaaagtgcaaccagaggtgacagtgtacccagagaggaccccactcctgcaccagcataatctgctgcactgctctgtgacaggcttctatccaggggatatcaagatcaagtggttcctgaatgggcaggaggagagagctggggtcatgtccactggccctatcaggaatggagactggacctttcagactgtggtgatgctagaaatgactcctgaacttggacatgtctacacctgccttgtcgatcactccagcctgctgagccctgtttctgtggagtggagagctcagtctgaatattcttggagaaagatgctgagtggcattgcagccttcctacttgggctaat

SEQ ID NO: 200530 - DNA, 1266 bp, Homo sapiens; identical to SEQ ID NO: 124851
  Payload ID: 19572
  Gene Name: XXbac-BPG32J3.19
  ENST ID: ENST00000503322
  CDS Start-End: 4-1152

SEQ ID NO: 200531 - DNA, 2332 bp, Homo sapiens
  Payload ID: 19573
  Gene Name: XXbac-BPG32J3.20
  ENST ID: ENST00000461287
  CDS Start-End: 261-452
aagttacagagacaacatgctgagagagcagaggagaccctccaggcaagggcagactccttgcaggggcaggctgggggcccccgctgcctgctgggtcaggctggtgaatctggtcatggttccgccccccagattcactccctaggtgtgtttgtttactggttcctcactgtcttgctcaaatgctccaactctacaaatcccgggatctcggggtgcagatcacctctcccagattcctgagcctgtgtctggccatgggcacctccagcatcttcctctgcgtgctgttcctctgtggggcactgggtctcaccatgtcccctgcccggggaaggctccgctgctacatctgtggcttcaccaaaccctgccaccctgttcccaccgagtgtcgggacgatgaagcttgtggcatcagtattggcacttcagatgcccattgctgatgccccgtgtcagcccaggtcactggcaaggcaggcattttgatgacactgtggatctcaggcaaggggatcaaaggagcatcaggatacgtactatcagccccgtgccctggagaaacatgctgacagcatcctggcactggcttcagtattctggtccatctcttattactcctctcccttcgccttcttctacttgtacaggaaaggttacttgagtttgtccaaagtggtgccgttttctcactatgctgggacattgctgctacttctggcaggtgtggcctgcctccgaggcattggccgctggaccaacccccagtaccggcagttcatcaccatcttggaagcaacacatcggaaccagtcttcagaaaacaagaggcagcttgccaactacaactttgacttccggagctggccagtcgacttccactgggaagaacccagcagccggaaggagtctcgagggggcccttcccgccggggtgtggccctgcttcgcccagagcccctgcaccgggggacagcagacaccctcctcaaccgggttaagaagctgccttgtcagatcaccagctacctggtggcgcacaccctagggcgccggatgctgtatccaggctctgtgtacctgctgcagaaggccctcatgcctgtgctgctgcagggccaggcccgactggtggaagagtgtaatgggcgccgggcaaagctgctggcctgtgatggcaatgagattgacaccatgtttgtggaccggcgggggacagctgagccccagggacagaagctggtgatctgctgtgaggggaatgctgggttttatgaggtgggctgcgtctccacgcccctggaagctggatattcagtcctgggctggaatcatccaggctttgctggaagcacgggggtgccattcccgcagaatgaggctaatgccatggatgtggtggtccagtttgccatccaccgcctaggcttccagccccaggacatcatcatctacgcctggtccatcggcggcttcactgccacgtgggcagccatgtcctacccagatgttagtgccatgatcctggatgcctcctttgatgacctggtgcccttggccttgaaggtcatgccagacagctggaggggcctggtgaccaggaccgtgaggcagcatctcaatctaaacaacgcggagcagctgtgcagataccagggtcctgtactgctgatccggagaaccaaggatgagatcatcaccaccacggttcctgaggacatcatgtccaaccgaggcaatgacctcctgctgaagctcctgcagcatcggtatccccgggtgatggcagaggagggtcttcgagtggtgaggcagtggttggaggcctcctcacagctggaggaagcctcaatttatagccgatgggaggtggaagaggactggtgtctgtctgtcctccgctcctaccaggcagaacacgggcccgacttcccctggagcgtgggggaggacatgagtgcagatggacggcggcagctggctttgtttctggctcggaagcatctgcacaactttgaggccactcactgcaccccactcccagcccagaacttccagatgccctggcacctctagggaccaactgggactcattatggaagaatggggtgagaggagacatgaggaaagaccctcttatttgtgattctctgtgttcatgttgctgtttatagtttgtggaaagtgggggaccatcccccttctcaccactgttcctcttgcacgtttcccctcattcatgtggctgtacttaaccttctccaacatacatcctgcattacatgaatggattattcctaataattaataaaaaggtattttttct

SEQ ID NO: 200532 - DNA, 2487 bp, Homo sapiens
  Payload ID: 19574
  Gene Name: XXbac-BPG32J3.22
  ENST ID: ENST00000375880
  CDS Start-End: 119-805
cttcgcctgccgcggtcgggtccgcggcctgcgctgtagcggtcgccgccgttccctggaagtagcaacttccctaccccaccccagtcctggtccccgtccagccgctgacgtgaagatgagcagctcagaggaggtgtcctggatttcctggttctgtgggctccgtggcaatgaattcttctgtgaagtggatgaagactacatccaggacaaatttaatcttactggactcaatgagcaggtccctcactatcgacaagctctagacatgatcttggacctggagcctgatgaagaactggaagacaaccccaaccagagtgacctgattgagcaggcagccgagatgctttatggattgatccacgcccgctacatccttaccaaccgtggcatcgcccagatgttggaaaagtaccagcaaggagactttggttactgtcctcgtgtgtactgtgagaaccagccaatgcttcccattggcctttcagacatcccaggtgaagccatggtgaagctctactgccccaagtgcatggatgtgtacacacccaagtcatcaagacaccatcacacggatggcgcctacttcggcactggtttccctcacatgctcttcatggtgcatcccgagtaccggcccaagagacctgccaaccagtttgtgcccagttcctgttcccgacatccggacgtgccacttctgcctcgtagaagacccttctgtaggatgcatttcaggctcagagaagtgtaccatcagcagctcatccctgtgcatggtgatcaccatctattatgatgtcaaggttcgcttcatcgttcgaggctgtggacagtacatttcctaccgctgccaagaaaaacgcaacacctactttgcagagtactggtatcaggcccagtgctgtcagtacgattattgcaactcctggtcaagcccccaactccagagctctctgccggagccccatgacaggcccctggccctgcctctgtctgactcccagattcagtggttctaccaggccctgaacctctccctgcccctccccaatttccatgctgggacggagcctgatggcctggaccccatggtcacactgtccctgaacctgggcttgtcttttgctgagctgcgccgcatgtacttgttcctcaatagttcaggacttttggttcttccccaggctggactcttgacacctcacccttcctgaattccacagtgcaaatatctttctgtaacaccctcagcatcctgcactgccctctctgaaaacacccacattctttggtcactgtgatttcttaggcctccgtctgttgtaccactagcatctatatgacttttgtgtaattttctctcttgaactctggtgctgtttttttgtttgtttgagacaaagtctcgctctgtcacccagggtggagtgcagtggcatgatctctgctcactacaacctccacctcccgggttccagcgattctcctgcctcagcctcccgagtagctgggactacaggcgtgcaccaccacgcctggctaattttttgtatttttagtagagacggggtttcaccatgttggtcaggctggtctcgaactcctgacctcgtaatctgccctcctcgacctcccaaagtgccgggattacaggtgtgagccactgtgcctgtctgagctctggtgctgttcttccccctagaaaagaatctctagtgtggattctgcccagacaggctgacctgagaaaggcacagtggttcctccattccttccccatcatctgagtgttccagtatcccccatccctctcaatccagtcacctgcctattgacatctagctctgtttcccctgtcttgtccatgtctctaagacccagtaccagactgaactagcagcaagaaggacgaggaggccgggcatggtggctcacgccggtaatcccagcactttgggaggccgaggtgggcggatcacttgagattgggagtttgagaccagcctggccaacatggtaaaacccgctctctattaaaaatagaaaaatcagctgggtgtggtggcacacctctgtaatcccagctactcaggaggctgagacaggagaatcacttgaacccgggaggcagaggttgcagtgagccgagatcgcgccactgcactccagcctgggtgacacagtgagactccgtctccaaaaaaaaggatgaggaatagaattctgtgcagatgtcctgacttggcaattttgtgtccctgcctcactgtctccaccaacccccgcctgtcctagtgttgttctgcctcctgtcctctcttgctctcttgtcagtctctggcttcctcggccccatttcacttcactgagtcctgacacccatctccctaggggcctgtgagaggagagggaagggtctgttctgctcagctccatgtcccccattttcctccacaataaactgggactgggctaaaa

SEQ ID NO: 200533 - DNA, 1903 bp, Homo sapiens
  Payload ID: 19574
  Gene Name: XXbac-BPG32J3.22
  ENST ID: ENST00000409691
  CDS Start-End: 1-639
gactttggttactgtcctcgtgtgtactgtgagaaccagccaatgcttcccattggtgtgctggtcatggtgggcttcacagtaggaaaggttcctgttcccgacatccggacgtgccacttctgcctcgtagaagacccttctgtaggatgcatttcaggctcagagaagtgtaccatcagcagctcatccctgtgcatggtgatcaccatctattatgatgtcaaggttcgcttcatcgttcgaggctgtggacagtacatttcctaccgctgccaagaaaaacgcaacacctactttgcagagtactggtatcaggcccagtgctgtcagtacgattattgcaactcctggtcaagcccccaactccagagctctctgccggagccccatgacaggcccctggccctgcctctgtctgactcccagattcagtggttctaccaggccctgaacctctccctgcccctccccaatttccatgctgggacggagcctgatggcctggaccccatggtcacactgtccctgaacctgggcttgtcttttgctgagctgcgccgcatgtacttgttcctcaatagttcaggacttttggttcttccccaggctggactcttgacacctcacccttcctgaattccacagtgcaaatatctttctgtaacaccctcagcatcctgcactgccctctctgaaaacacccacattctttggtcactgtgatttcttaggcctccgtctgttgtaccactagcatctatatgacttttgtgtaattttctctcttgaactctggtgctgtttttttgtttgtttgagacaaagtctcgctctgtcacccagggtggagtgcagtggcatgatctctgctcactacaacctccacctcccgggttccagcgattctcctgcctcagcctcccgagtagctgggactacaggcgtgcaccaccacgcctggctaattttttgtatttttagtagagacggggtttcaccatgttggtcaggctggtctcgaactcctgacctcgtaatctgccctcctcgacctcccaaagtgccgggattacaggtgtgagccactgtgcctgtctgagctctggtgctgttcttccccctagaaaagaatctctagtgtggattctgcccagacaggctgacctgagaaaggcacagtggttcctccattccttccccatcatctgagtgttccagtatcccccatccctctcaatccagtcacctgcctattgacatctagctctgtttcccctgtcttgtccatgtctctaagacccagtaccagactgaactagcagcaagaaggacgaggaggccgggcatggtggctcacgccggtaatcccagcactttgggaggccgaggtgggcggatcacttgagattgggagtttgagaccagcctggccaacatggtaaaacccgctctctattaaaaatagaaaaatcagctgggtgtggtggcacacctctgtaatcccagctactcaggaggctgagacaggagaatcacttgaacccgggaggcagaggttgcagtgagccgagatcgcgccactgcactccagcctgggtgacacagtgagactccgtctccaaaaaaaaggatgaggaatagaattctgtgcagatgtcctgacttggcaattttgtgtccctgcctcactgtctccaccaacccccgcctgtcctagtgttgttctgcctcctgtcctctcttgctctcttgtcagtctctggcttcctcggccccatttcacttcactgagtcctgacacccatctccctaggggcctgtgagaggagagggaagggtctgttctgctcagctccatgtcccccattttcctccacaataaactgggactgggctaaaa

SEQ ID NO: 200534 - DNA, 991 bp, Homo sapiens
  Payload ID: 19574
  Gene Name: XXbac-BPG32J3.22
  ENST ID: ENST00000617558
  CDS Start-End: 13-927
gctgacgtgaagatgagcagctcagaggaggtgtcctggatttcctggttctgtgggctccgtggcaatgaattcttctgtgaagtggatgaagactacatccaggacaaatttaatcttactggactcaatgagcaggtccctcactatcgacaagctctagacatgatcttggacctggagcctgatgaagaactggaagacaaccccaaccagagtgacctgattgagcaggcagccgagatgctttatggattgatccacgcccgctacatccttaccaaccgtggcatcgcccagatgttggaaaagtaccagcaaggagactttggttactgtcctcgtgtgtactgtgagaaccagccaatgcttcccattgttcctgttcccgacatccggacgtgccacttctgcctcgtagaagacccttctgtaggatgcatttcaggctcagagaagtgtaccatcagcagctcatccctgtgcatggtgatcaccatctattatgatgtcaaggttcgcttcatcgttcgaggctgtggacagtacatttcctaccgctgccaagaaaaacgcaacacctactttgcagagtactggtatcaggcccagtgctgtcagtacgattattgcaactcctggtcaagcccccaactccagagctctctgccggagccccatgacaggcccctggccctgcctctgtctgactcccagattcagtggttctaccaggccctgaacctctccctgcccctccccaatttccatgctgggacggagcctgatggcctggaccccatggtcacactgtccctgaacctgggcttgtcttttgctgagctgcgccgcatgtacttgttcctcaatagttcaggacttttggttcttccccaggctggactcttgacacctcacccttcctgaattccacagtgcaaatatctttctgtaacaccctcagcatcctgcactgccctctctgaaaaca

SEQ ID NO: 200535 - DNA, 408 bp, Homo sapiens
  Payload ID: 19575
  Gene Name: XXcos-LUCA11.5
  ENST ID: ENST00000606589
  CDS Start-End: 119-271
gtgacggagcggcggtgcgcgcggcagggcccggagtatcccgctttctttggaggaaaccaccgcatcagatctgcgctgcggcagaggcaggctacaaccactagcacggctgacgatggccctttctgcggagaccgagtcacacatctaccgagctctgcgtactgcttctggcgctgccgcccaccttgtggccctgggctttaccatctttgtggctgtgcttgccaggcctggctccacaccaggaatcctccatcatcaatgaggacacagagctgggtgatgcctacgtgttgagatcctggtccctccacacacgctctaccagctgctgcgtgatgcccgtgtccaagatcaggttgtgcagaaggaagttgttgcctggaacaggaggggaggggt

SEQ ID NO: 200536 - DNA, 2727 bp, Homo sapiens
  Payload ID: 19576
  Gene Name: xyloside xylosyltransferase 1
  Uniprot ID: Q8NBI6
  ENST ID: ENST00000310380
  CDS Start-End: 110-1291
cccctttcatggccgccgcctggcgccggggctaagtggccgccggcgtccgggtacccgagggctctcccgcgttgctggcaccgctggcgccgcggtctcgtagcgcatgggcctcctccgaggcgggctcccatgcgctcgggccatggcgcgcctgggcgctgtgcgctcccactactgcgccctgctgctggccgcggcgctggccgtctgcgccttctactacctcggctcaggccgggagaccttctccagcgccaccaagaggctgaaggaggcccgcgccggggctcccgccgcgccctcgccgcccgcgctggagctagcgcggggctccgtggcgccagcccccggcgcgaaggccaagagcttggagggcggcggtgccgggccggtggactaccacctgctgatgatgttcaccaaggcggagcacaatgccgcgctgcaggccaaggcccgcgtcgcgctgcgctcactgctgcgcctcgccaagttcgaggcgcacgaggtgcttaaccttcacttcgtgagcgaggaggccagccgcgaggtggccaagggcctgctgcgggagctcctgccgcccgccgctggcttcaagtgcaaggtcatcttccacgatgttgctgtgctgacggataagctcttccccatcgtggaggccatgcagaagcacttcagtgctggcttgggaacctactacagtgactccatcttcttcctctcggtcgccatgcatcagatcatgcccaaagagatcctgcagatcattcagctggacctagacctgaagtttaagaccaacatccgggagttgtttgaggaatttgacagtttcctgccaggcgccatcatcggcatagcccgggagatgcagccagtttacaggcacacattctggcagttccgccatgagaacccccagacccgggttgggggcccgccccccgaggggctgccgggcttcaacagcggggtgatgttgctgaacctggaggccatgcgccagtccccgctctacagccgcctgctggagccggcgcaggtgcagcagctggccgacaagtaccacttccgcggccacctcggggaccaggacttcttcaccatgatcggcatggagcaccccaagctcttccatgtgctggactgtacctggaaccggcagctgtgcacctggtggagggaccatggctacagtgacgtcttcgaggcctatttcaggtgtgagggccacgtcaagatctaccacgggaactgcaacactcccatcccggaggactaggcgctccccgtgccttgcccccggggcctccagatctgggggaaggacagggttccttgggacagacccaagggcagtgtctgacccgctagagagacaccgcagggaagtcctgtgattaaggtgctgagacctcctgccgggcaggtcactgtgctgaggccacccgccaaggactggcctgtgcactgctggtgcttgggaccttattcctccagggagcaggcgacacaaaggacacgcatgtccagtgggctgggaagcaagcacttgaagagaaggaaggggagaaagggtcccccttgctgtctgcctctgaggaatggaaatcctttagacccggccttttttggaccaatataaatttaatttaaattgacagccttccatttttcgagaaagtacaaacagaactgctttagcacccatcgagccccaaacgggtaaggtaagccaaggttttaatgaccagcccagtatctaagcttccaaacgaatgccagcccatcacatactcaccctgggaggctgctgcacgcgcattctcctgatgctcacgtcacttggtgtaggtttcaggatcgcctctttgaggaaggacttcaggaccaactggggcctgcataagaaaacttatctcattattagagtactcacagcttgtatctcccagctacatcctagaaccccattgtcctttattccaccaaaccagctccaggtgaccagactctactcagaaagcaaattcgtcatcaaagaacagagactggccaccacaaggacatgcaggagaactgtcgggaccaggaagactcattccaaaaagcccaggccgggcacagtcgtcaagcctgtaatcccaacactttgggagaccgaggtgggggtatcgattgagcctcggaggtcgagatcagcctgggaaacacagggaggcccccatcgctacaaaatattttaaaaattagccaggtgtggtggcttgtgcttgttgtcccggctacttgggaggctgaagtgggagggtggcttgagtccaggagttcactgcactgagctgtgatcacaccactgcactccagcctggacgacagagtgagacgtccatctcaaaaaaaaaaaaaaaaccaaaaaggaacccagcaattcccaagtgtgaccatgtgggcttggaagacatgtcactcatgggctagtaagcattctagtttctttgtttaaaaaatccccttatcataccacgttagaccgtagaccttagcagaaattaaagcgtcatttcttttgatggggcctcctgtacgtaggctgcagacgtgaaagccccaggggtccatttgtatcaattttcatcttgttttgttttgatttcatttacgtttttctttttcccatgagtgaggatagccaataaatcatctttgagaacatgg

SEQ ID NO: 200537 - DNA, 564 bp, Homo sapiens
  Payload ID: 19576
  Gene Name: xyloside xylosyltransferase 1
  Uniprot ID: Q8NBI6
  ENST ID: ENST00000356740
  CDS Start-End: 1-564
atgaatgggatgagtgtcctgatgaaagagaccctgaagagctctgtcaccccttcaccatatgaggagactggggaaaggcagccatctgtgaactgggcagtgagtcctcaccagacacagaatcagtgggcacgttggtcttggacttcccagcctctagaactgcacacattctggcagttccgccatgagaacccccagacccgggttgggggcccgccccccgaggggctgccgggcttcaacagcggggtgatgttgctgaacctggaggccatgcgccagtccccgctctacagccgcctgctggagccggcgcaggtgcagcagctggccgacaagtaccacttccgcggccacctcggggaccaggacttcttcaccatgatcggcatggagcaccccaagctcttccatgtgctggactgtacctggaaccggcagctgtgcacctggtggagggaccatggctacagtgacgtcttcgaggcctatttcaggtgtgagggccacgtcaagatctaccacgggaactgcaacactcccatcccggaggactag

SEQ ID NO: 200538 - DNA, 582 bp, Homo sapiens
  Payload ID: 19576
  Gene Name: xyloside xylosyltransferase 1
  ENST ID: ENST00000418940
  CDS Start-End: 20-274
ctctctgtcctgctgcactatggtgagatgtgtcccttccgccgtgattgtgtgtttcctgaggcctccccagccaggcagaactgtcatcttccacgatgttgctgtgctgacggataagctcttccccatcgtggaggccatgcagaagcacttcagtgctggcttgggaacctactacagtgactccatcttcttcctctcggtcgccatgcatcagatcatgcccaaagagtgtacacctcttgtacaaggtagaacatcttgcacataacagaaggcctgtctgtcggtcccactttccaagagatcctgcagatcattcagctggacctagacctgaagtttaagaccaacatccgggagttgtttgaggaatttgacagtttcctgccaggcgccatcatcggcatagcccgggagatgcagccagtttacaggcacacattctggcagttccgccatgagaacccccagacccgggttgggggcccgccccccgaggggctgccgggcttcaacagcggggtgatgttgctgaacctggaggccatgcgccagtccccgctctacagccgcctg

SEQ ID NO: 200539 - DNA, 865 bp, Homo sapiens
  Payload ID: 19576
  Gene Name: xyloside xylosyltransferase 1
  ENST ID: ENST00000429994
  CDS Start-End: 84-827
gtgagagtcagtgagctctcaggagatctgctgtttgaaagtgtgtagcgcttcccccttctctctctctgtcctgctgcactatggtgagatgtgtcccttccgccgtgattgtgtgtttcctgaggcctccccagccaggcagaactgtcatcttccacgatgttgctgtgctgacggataagctcttccccatcgtggaggccatgcagaagcacttcagtgctggcttgggaacctactacagtgactccatcttcttcctctcggtcgccatgcatcagatcatgcccaaagagatcctgcagatcattcagctggacctagacctgaagtttaagaccaacatccgggagttgtttgaggaatttgacagtttcctgccaggcgccatcatcggcatagcccgggagatgcagccagtttacaggcacacattctggcagttccgccatgagaacccccagacccgggttgggggcccgccccccgaggggctgccgggcttcaacagcggggtgatgttgctgaacctggaggccatgcgccagtccccgctctacagccgcctgctggagccggcgcaggtgcagcagctggccgacaagtaccacttccgcggccacctcggggaccaggacttcttcaccatgatcggcatggagcaccccaagctcttccatgtgctggactgtacctggaaccggcagctgtgcacctggtggagggaccatggctacagtgacgtcttcgaggcctatttcaggtgtgagggccacgtcaagatctaccacgggaactgcaacactcccatcccggaggactaggcgctccccgtgccttgcccccggggcctccagatctg

SEQ ID NO: 200540 - DNA, 557 bp, Homo sapiens
  Payload ID: 19576
  Gene Name: xyloside xylosyltransferase 1
  ENST ID: ENST00000455281
  CDS Start-End: 1-343
ctcgccgcccgcgctggagctagcgcggggctccgtggcgccagcccccggcgcgaaggccaagagcttggagggcggcggtgccgggccggtggactaccacctgctgatgatgttcaccaaggcggagcacaatgccgcgctgcaggccaaggcccgcgtcgcgctgcgctcactgctgcgcctcgccaagttcgaggcgcacgaggtgcttaaccttcacttcgtgagcgaggaggccagccgcgaggtggccaagggcctgctgcgggagctcctgccgcccgccgctggcttcaagtgcaagtttttgacttctgaggatgggactggtcaccagtagtcatcctgagcaactggagagggccttggtgaggcctctggaagtgttgaagttgcagtgacacttctcattgctcttaaggtcatcttccacgatgttgctgtgctgacggataagctcttccccatcgtggaggccatgcagaagcacttcagtgctggcttgggaacctactacagtgactccatcttcttcctctcggtcgccatgcatc

SEQ ID NO: 200541 - DNA, 2149 bp, Homo sapiens
  Payload ID: 19576
  Gene Name: xyloside xylosyltransferase 1
  Uniprot ID: Q8NBI6
  ENST ID: ENST00000437101
  CDS Start-End: 463-1035
aattgaagtagtcacttctttcagaatgctaagttccctggaatattttcccagcctactgtgtctatgatagactcaaatattggaagttttaccggctgtgtgtggggtggggaaggaattctgttggttctccggtgagtcctgaagagaccttgtttctggagccaggaagaggagcatagaaagaaaaaggaacaggaaattgttcaaaagaagttcatgaaatgagaaaagcagcaggaaacagctcgggaatcggcgaggctgcagccgaaggaagacatcttccttttaagcagtgactcgggaatcgaggccacttccatcctgtaacgacgccatctggagcatgtggcttccaggggagcagtggctgaggccctgcagtggcttctcactgctacagtccagagttgcacacagcacttctgctcatagtccatcagccaggagctagtcatgtggccacctcgctgcaaggatccaggaaggcagagtgcggagatcctgcagatcattcagctggacctagacctgaagtttaagaccaacatccgggagttgtttgaggaatttgacagtttcctgccaggcgccatcatcggcatagcccgggagatgcagccagtttacaggcacacattctggcagttccgccatgagaacccccagacccgggttgggggcccgccccccgaggggctgccgggcttcaacagcggggtgatgttgctgaacctggaggccatgcgccagtccccgctctacagccgcctgctggagccggcgcaggtgcagcagctggccgacaagtaccacttccgcggccacctcggggaccaggacttcttcaccatgatcggcatggagcaccccaagctcttccatgtgctggactgtacctggaaccggcagctgtgcacctggtggagggaccatggctacagtgacgtcttcgaggcctatttcaggtgtgagggccacgtcaagatctaccacgggaactgcaacactcccatcccggaggactaggcgctccccgtgccttgcccccggggcctccagatctgggggaaggacagggttccttgggacagacccaagggcagtgtctgacccgctagagagacaccgcagggaagtcctgtgattaaggtgctgagacctcctgccgggcaggtcactgtgctgaggccacccgccaaggactggcctgtgcactgctggtgcttgggaccttattcctccagggagcaggcgacacaaaggacacgcatgtccagtgggctgggaagcaagcacttgaagagaaggaaggggagaaagggtcccccttgctgtctgcctctgaggaatggaaatcctttagacccggccttttttggaccaatataaatttaatttaaattgacagccttccatttttcgagaaagtacaaacagaactgctttagcacccatcgagccccaaacgggtaaggtaagccaaggttttaatgaccagcccagtatctaagcttccaaacgaatgccagcccatcacatactcaccctgggaggctgctgcacgcgcattctcctgatgctcacgtcacttggtgtaggtttcaggatcgcctctttgaggaaggacttcaggaccaactggggcctgcataagaaaacttatctcattattagagtactcacagcttgtatctcccagctacatcctagaaccccattgtcctttattccaccaaaccagctccaggtgaccagactctactcagaaagcaaattcgtcatcaaagaacagagactggccaccacaaggacatgcaggagaactgtcgggaccaggaagactcattccaaaaagcccaggccgggcacagtcgtcaagcctgtaatcccaacactttgggagaccgaggtgggggtatcgattgagcctcggaggtcgagatcagcctgggaaacacagggaggcccccatcgctacaaaatattttaaaaattagccaggtgtggtggcttgtgcttgttgtcccggctacttgggaggctgaagtgggagggtggcttgagtccaggagttcactgcactgagctgtgatcacaccactgcactccagcctggacgacagagtgagacgtccatctc

SEQ ID NO: 200542 - DNA, 1747 bp, Homo sapiens
  Payload ID: 19577
  Gene Name: xylosylprotein beta 1,4-galactosyltransferase, polypeptide 7
  Uniprot ID: Q9UBV7
  ENST ID: ENST00000029410
  CDS Start-End: 112-1095
cggggcggacaggcctgggcggagcgggaggcggaggcgccgcgtaggcccgggaggccgggccggccgggctgcgagcgcctgccccatgcgccgccgcctctccgcacgatgttcccctcgcggaggaaagcggcgcagctgccctgggaggacggcaggtccgggttgctctccggcggcctccctcggaagtgttccgtcttccacctgttcgtggcctgcctctcgctgggcttcttctccctactctggctgcagctcagctgctctggggacgtggcccgggcagtcaggggacaagggcaggagacctcgggccctccccgtgcctgccccccagagccgccccctgagcactgggaagaagacgcatcctggggcccccaccgcctggcagtgctggtgcccttccgcgaacgcttcgaggagctcctggtcttcgtgccccacatgcgccgcttcctgagcaggaagaagatccggcaccacatctacgtgctcaaccaggtggaccacttcaggttcaaccgggcagcgctcatcaacgtgggcttcctggagagcagcaacagcacggactacattgccatgcacgacgttgacctgctccctctcaacgaggagctggactatggctttcctgaggctgggcccttccacgtggcctccccggagctccaccctctctaccactacaagacctatgtcggcggcatcctgctgctctccaagcagcactaccggctgtgcaatgggatgtccaaccgcttctggggctggggccgcgaggacgacgagttctaccggcgcattaagggagctgggctccagcttttccgcccctcgggaatcacaactgggtacaagacatttcgccacctgcatgacccagcctggcggaagagggaccagaagcgcatcgcagctcaaaaacaggagcagttcaaggtggacagggagggaggcctgaacactgtgaagtaccatgtggcttcccgcactgccctgtctgtgggcggggccccctgcactgtcctcaacatcatgttggactgtgacaagaccgccacaccctggtgcacattcagctgagctggatggacagtgaggaagcctgtacctacaggccatattgctcaggctcaggacaaggcctcaggtcgtgggcccagctctgacaggatgtggagtggccaggaccaagacagcaagctacgcaattgcagccacccggccgccaaggcaggcttgggctgggccaggacacgtggggtgcctgggacgctgcttgccatgcacagtgatcagagagaggctggggtgtgtcctgtccgggaccccccctgccttcctgctcaccctactctgacctccttcacgtgcccaggcctgtgggtagtggggagggctgaacaggacaacctctcatcacccccacttttgttccttcctgctgggctgcctcgtgcagagacacagtgtaggggccatgcagctggcgtaggtggcagttgggcctggtgagggttaggacttcagaaaccagagcacaagccccacagagggggaacagccagcaccgctctagctggttgttgccatgccggaatgtgggcctagtgttgccagatcttctgatttttcgaaagaaactagaatgctggattcttaagtgatatcttctgattttttaaatgatagcacctaaatgaaactttcaaaaagtatggcaggccagacaaaa

SEQ ID NO: 200543 - DNA, 544 bp, Homo sapiens
  Payload ID: 19577
  Gene Name: xylosylprotein beta 1,4-galactosyltransferase, polypeptide 7
  ENST ID: ENST00000505468
  CDS Start-End: 437-544
aagcggcgcagctgccctgggaggacggcaggtgcttggggtagacgagttatgtgcagcctcctcgtggggaggccagagaacgggtctgtcacagggccagccctgccccgccctcctgaccctgtcccgcgcttgctccaggtccgggttgctctccggcggcctccctcggaagtgttccgtcttccacctgttcgtggcctgcctctcgctgggcttcttctccctactctggctgcagctcagctgctctggggacgtggcccgggcagtcaggggacaagggcaggagacctcgggccctccccgtgcctgccccccagagccgccccctgagcactgggaagaagacgcatcctggggcccccaccgcctggcagtgctggtgcccttccgcgaacgcttcgaggagctcctggtcttcgtgccccacatgcgccgcttcctgagcaggaagaagatccggcaccacatctacgtgctcaaccaggtggaccacttcaggttcaaccgggcagcgctcatcaacgtgggcttcctg

SEQ ID NO: 200544 - DNA, 552 bp, Homo sapiens
  Payload ID: 19577
  Gene Name: xylosylprotein beta 1,4-galactosyltransferase, polypeptide 7
  ENST ID: ENST00000510761
  CDS Start-End: 426-552
gcacgatgttcccctcgcggaggaaagcggcgcagctgccctgggaggacggcagttttgaggtcctgtaaccagagcagctgaggattcaaacctcgtagtacgaaggtctgtatgagacaagaaaggaaaggtccgggttgctctccggcggcctccctcggaagtgttccgtcttccacctgttcgtggcctgcctctcgctgggcttcttctccctactctggctgcagctcagctgctctggggacgtggcccgggcagtcaggggacaagggcaggagacctcgggccctccccgtgcctgccccccagagccgccccctgagcactgggaagaagacgcatcctggggcccccaccgcctggcagtgctggtgcccttccgcgaacgcttcgaggagctcctggtcttcgtgccccacatgcgccgcttcctgagcaggaagaagatccggcaccacatctacgtgctcaaccaggtggaccacttcaggttcaaccgggcagcgctcatcaacgtgggcttcctggagagcagcaacagcacgg

SEQ ID NO: 200545 - DNA, 410 bp, Homo sapiens
  Payload ID: 19577
  Gene Name: xylosylprotein beta 1,4-galactosyltransferase, polypeptide 7
  ENST ID: ENST00000507061
  CDS Start-End: 1-234
aggggacaagggcaggagacctcgggccctccccgtgcctgccccccagagccgccccctgagcactgggaagaagacgcatcctggggcccccaccgcctggcagtgctggtgcccttccgcgaacgcttcgaggagctcctggtcttcgtgccccacatgcgccgcttcctgagcaggaagaagatccggcaccacatctacgtgctcaaccaggtggaccacttcaggtaactcccactggaagatggattctcagccccaccagcctgatcttcccaccttttcaagtccccttgatccagatccccagaccccccccttttccctgccacccttcttgtctttacttcctccttacccaacctggagtccaaggtccatcattaaaaccctccctggcatactcc

SEQ ID NO: 200546 - DNA, 1064 bp, Homo sapiens
  Payload ID: 19577
  Gene Name: xylosylprotein beta 1,4-galactosyltransferase, polypeptide 7
  ENST ID: ENST00000505433
  CDS Start-End: 50-562
ccggccgggctgcgagcgcctgccccatgcgccgccgcctctccgcacgatgttcccctcgcggaggaaagcggcgcagctgccctgggaggacggcaggtccgggttgctctccggcggcctccctcggaagtgttccgtcttccacctgttcgtggcctgcctctcgctgggcttcttctccctactctggctgcagctcagctgctctggggacgtggcccgggcagtcaggggacaagggcaggagacctcgggccctccccgtgcctgccccccagagccgccccctgagcactgggaagaagacgcatcctggggcccccaccgcctggcagtgctggtgcccttccgcgaacgcttcgaggagctcctggtcttcgtgccccacatgcgccgcttcctgagcaggaagaagatccggcaccacatctacgtgctcaaccaggtggaccacttcagccttgcccaccctgcacaggttcaaccgggcagcgctcatcaacgtgggcttcctggagagcagcaacagcacggactacattgccatgcacgacgttgacctgctccctctcaacgaggagctggactatggctttcctgaggctgggcccttccacgtggcctccccggagctccaccctctctaccactacaagacctatgtcggcggcatcctgctgctctccaagcagcactaccggctgtgcaatgggatgtccaaccgcttctggggctggggccgcgaggacgacgagttctaccggcgcattaagggagctgggctccagcttttccgcccctcgggaatcacaactgggtacaagacatttcgccacctgcatgacccagcctggcggaagagggaccagaagcgcatcgcagctcaaaaacaggagcagttcaaggtggacagggagggaggcctgaacactgtgaagtaccatgtggcttcccgcactgccctgtctgtgggcggggccccctgcactgtcctcaacatcatgttggactgtgacaagaccgccacaccctggtgcacattcagctgagctggatggaca

SEQ ID NO: 200547 - DNA, 9891 bp, Homo sapiens
  Payload ID: 19578
  Gene Name: xylosyltransferase I
  Uniprot ID: Q86Y38
  ENST ID: ENST00000261381
  CDS Start-End: 86-2965
gcggccgcgggagctgcggggagcgcgggggcggcccggagcgtgccggggtccccgcgcctcgctcgccggccgcgctccgaagatggtggcggcgccgtgcgcccggaggctggcccggcgctcgcactcggcgctgctcgcggcgctcacggtgctgctgctgcagacgctggtcgtgtggaatttcagcagcctcgactccggggccggggagcgccgcgggggcgcagcggtcggcggcggggagcagccgcccccggccccggccccgcgccgggagcgccgggacctgcccgccgagccggctgcagcccgaggaggaggaggaggcggcggcggaggaggaggaggacgggggccccaggcgcgggcgcggggaggcggccccggagaaccgcggggacagcagccggccagccggggggcactgcccgcccgggctctggatccacacccaagtccgctcatcaccctggagactcaggatggctacttttctcatcggccgaaagagaaagtgcgaacagacagcaacaacgagaactctgtccccaaagactttgagaatgtcgacaacagcaacttcgcacccaggactcaaaagcagaagcaccagcctgagttggcgaagaagccaccgagtagacagaaggagcttttgaaaaggaagctggaacagcaggagaaaggaaaaggacatacattccctgggaaaggccccggtgaggtgctgcctcccggggacagagccgcagccaacagcagccacgggaaggatgtgtccagaccgcctcatgccaggaaaactgggggcagctcccccgagaccaagtatgaccagccccctaagtgtgacatctcaggcaaggaggccatctctgccctgtcccgtgctaagtccaagcactgccgccaggagattggggagacttactgccgccacaagttagggctgctgatgcctgagaaggtgactcggttctgccccctcgagggtaaagccaacaagaacgtgcagtgggacgaggactccgtggagtacatgccagccaacccggtcagaatcgcctttgtcctggtggtccacggccgtgcctctcggcagttgcagcgcatgttcaaggccatctaccacaaagaccacttctactacatccacgtggacaagcgctctaattacctgcatcggcaagtgctccaggtctccaggcagtacagcaatgtccgcgtcaccccctggagaatggccaccatctggggaggagccagcctcctgtccacctacctgcagagcatgcgggacctcctggagatgaccgactggccctgggacttcttcatcaacctgagtgcggccgactaccccatcaggacaaatgaccagttggtggcgtttctctcccgataccgagatatgaatttcttgaagtcacacggccgggacaatgcaaggttcattcggaagcagggcctggatcggctcttcctggagtgcgacgctcacatgtggcgcctgggagatcggcggatcccagagggcattgccgtggatggcggttcggactggttcctgctgaaccggaggtttgtagaatatgtgaccttctccacagacgatctggtgaccaagatgaaacagttctactcctacaccctgcttcctgctgagtccttcttccatacggtcctggagaacagcccccactgcgacaccatggtggacaacaacctgcgcatcaccaactggaatcgcaagctgggctgcaagtgccagtacaagcacatcgtggactggtgcggctgctcccccaatgacttcaagccgcaggacttccaccgcttccagcagacagcccggcctaccttctttgcccgcaagtttgaagccgtggtgaatcaggaaatcattgggcagctggactattacctgtacgggaactaccctgcaggtaccccgggcctgcgctcctactgggagaatgtctacgatgagcctgacggcatccacagcctgagcgacgtgacactcaccttgtaccactcctttgcccgcctgggtcttcgacgggccgagacgtccctgcacacggatggggagaacagctgccgatactacccaatgggccacccagcatctgtgcacctctacttccttgctgaccgcttccagggctttctgatcaagcatcatgctaccaatctggctgtgagcaaactagagactctggagacctgggtgatgccgaaaaaagtcttcaagatcgcaagcccacccagtgactttgggaggcttcagttttccgaggtcggcactgactgggatgccaaggagaggctattccgcaactttgggggtcttctggggcccatggatgagccggtgggtatgcagaagtgggggaagggacctaatgtgaccgtgaccgtcatttgggtggatcccgtcaatgtcatcgcagccacctacgacatcctcattgagtccactgccgaattcacacactacaagccccctttgaacttgcccctgaggcctggggtctggacagtgaaaattctccaccactgggtgccagttgcagagaccaaattcctcgttgcgcctctgaccttctcgaacaggcagcccatcaaacctgaggaggcactgaagctgcacaatgggcccctccgcaatgcctacatggagcagagcttccagagcctaaaccccgtcctcagcctgcccatcaaccccgcccaggtggaacaggcacggaggaacgcagcctccacgggcacagcgctggagggatggctggactcgttggtgggcgggatgtggactgccatggacatctgtgccacgggccccacagcctgcccggtcatgcagacctgcagccagacggcctggagctccttcagccctgaccccaagtcggagctgggggcagtcaaacctgatggccggctcaggtagcactgggcacgaggagtgggccacagcaggatctcaacgggaaagcagccagaggggttgtggggcctgaaccccggcctcccaccctgggggaggccctctgtgaatgggtctctcctggccatagaatgatggaaagggaaggtcagcaggtcaaagcaggatcagccaacaacctgcctttggcaagctgcgggtgggatggctcagtccctgcactgtgactgtctcacctcttctggttgatcctcaagtcctacaggttccttgtcttccccttccagtgacccacccctgaccccagacgtgtgattttcagacttttctttcgagcagcagaacttcgtttacggagcacagtcataagtggaggttcagggtgctgacgaaatccaagctgctctggttgaagctgacaagtgcgaggttccctcccaaagctcagccctctgggcggtccccttgcccagggtatctcctacggtacctcttcagaacccaagggctctgcaaatgccagtttgacaagcactgcccagaccaaccatgggttcaaactccagccctgccctttggttcatttttctgcttctcttggctgggggactctggtgccagccttgaaagtcatggtcgtgggccctttcccatggaggctgcagccttaggagagctctgagcctctcagcagccctccttgggttgaactattctccttagtaactaggtaagtgggaaagccttttgatgtggcatggccaaggtccagccacaagtgcaactgccacctgtccaggggtctgggcctccttccctcaaggctgccacacaaagtagcagaaataggatgatgtttgtgagcaccagactcaagaccatgaccttctttgatccttgaaaatgggaactttgacagccatgaccatgaaactcacaaggcaacgcgatgaaactcacaaagcaatgcttggagcaaaactcctgagctagacagcacagcagcacccatcccctgccagagcccttccgttctgaggtcagacacacaaaaccttcgtcaattgcacaccggtgctgttgggagtgaccaaaccacatgaaccagacttttcccgtccaggaaatagcatttcagatttggtttttaatttcatgcccttcggccacaggctcaacgggacatgcaacataaaaatgggaaggttatttaaacaacaaaaaacagtatgatttaagtgttgagttaccagaaacccaaaaggtttccttgccacgagccccctggagtgtcatccctgttcaccaggagagctcttcgcaggaggcctcccttgctcctgtaatcccacctcccctgaatgatgggattcccttggaaaaaggtctcacccctggtagccatctgcccttcccatggagagccagtcctgacacttctctccagcgtgggtttgaaggggctgcccttcgctttgtgtgacttgtcctaatcctagccagatgtgttgccccatcccaagcctcgcaaggcagggtgtcctgttggcaatggaggacgtagagaagggacactttagatatttattatttacatgttttagtcgatgactaattagtaggtgctgtttttgcagcttgtcaattatgttaccttactaactgaagctgcctttattcacaaaaggccccttttcccatcttttcccaccccctggtgtctctctctctctcggtttctctttctctgcgtctaccccccatcctcctcatcctcagagtaaagcaggggcatcgaacaccacgcaaagaaagctccaacccgcatcttccactggctttgagtggggtgccttggggaccgttggagccttgtttttttccttatgcagagtgtcagcctcactctccctcggattccaagagtattggaattcctgagcctcccatcctccccctactcaccccccgtcacaggcacaaggaggtgacaggcagaaaacgtggagggtgagtggggaatgtgctagctgcagagagtttgtggggaatgtgctagctgcagagagtttgggccattcctgcttgctccgtggttgccttcccatggcccatctaattatgggcattcatgcgaccttaacagagggaaacaggctcctttgagagagatccatcttaggaggagggtcgtcagatccaggcagcagagtccgggagatagccattctcaacagcgattccagggatctcagggtacttttctcagaaagcccctatgatctcttttacagactctatggtggccacgcgctgggtgccacatcctctttctgcccccggcctctgcctctggccagggtttccctggggctgccgaagccactttgggagcttccctttcaccctccttgctgggccaccagtgctttgtgttcgcagcgttatttgcagtggctttggggactcagcagtggcaagtccctgtgcataatgtgaacctgcagacttcaagatggggcccctcctgcacccactaacatgtctgcctttttttgtttttatcctggaacaagtggagaaatggcagagctggctgactctggggacccttccctttttcccatggcttcatttcttcctcaccacaactaattcggggagctgagaagtcacacagggtattcctctcccttctctgatgttattaattaatagaccagagaataaggttgcagatattacatttgttgtgtttttgtgttttgtttttttttttaaggaaaatcccaaacaaagcccagcatgatttgagaaaagaggatgttttcccagggaaaataatttttttaacctgcctgagaatgatttatttatttgttggaggccattggtcagacagcctggagcttgggctgtggaagatttcaaaagcatagggctgtggtctctggaaacctattacagcctgcagctgtgagctgagccagtgacgaggtccctggaaactcaggaaggctgacaggtgggccttggggtattggtttgtggagaaggaagcattctttaggctgcggcactccttatagtttcccacccaccgagtgacattcaggcagaaattgagctcaggagacagccagccttcccacatcccacttcacttcccggtccacacgtaaagcagtgtgtctccaaggaggcagtgagcaattcccaaggtccccgtgttgtgagaagcgcgctgctttctccctttgcaggggaaaaaaaaggctttcctggtgagatcatgagtccttccggcttcatttctcattgtgggtttaacttctaaaacgcaaatggagtttagagaggatgagcagaaccacaggacctgcccccatctctcactcactgcaattgcttctactctgggcacaagtagggtgtctgaagaccatgtttccctctggttctctagtttgcagataacacagaagacactggctagaaccttaagctttctgccaaaaagatgcagagagcagggcagtagctactggcagtggggtgtgaataaagagtcctttcacaaccaagttcactgaggatttggagcaccagcttcccagcagtatcgaggggtggagaggtgtacattcaggtggaggggtacatctaggggtggagaggtgtacattctagaaacagctgttaacacactccactttaaagacagcaagctagacctgcaggatcaaagccacacactgtggtaggggttacaaatgtttatggggcccagaatactagcatagatgcgtgaaatggttggtgtgaggcaaaagggcatggtgggggcaaggatggggactgtggtcttactggcatgcacgtgacctacccagaatgagcagctgctactcagccccaacctgtcattgtttgtaaaaatgtaagcacagtgtagtggaatcttccaatttggaagggaagccggaaatccagatttaatggaaaaaatctgatttttcaacgtcgggttgtttgtttgtttgtttttgttttttttaacagatagtgggcaaagaaaaattccactgttccacgtgtacactgccagcaacctctgctctctggagaggtggtttaaagtgagattatgcattgccctggtagaagaggaaaaaagccagcatcaggtcagggcaaaaataacagcccatgttgaactcggaatggggacctcttgctaagtcattccactcctcaagagaccattccacagaggggggatggatcattcagctctcctggtcccaagattgtgctgaagggaagaaggaatagaatctggagatctggactgctgccccttagatatgcagaggtccacatctgcctggggctacagcttgtgggactccatcaaaccaggccgaaatggcaaagacagtctaggaggaggaggaggtagggtgtgaaacagccaggctctctccaaatcccaagtgttgacacagccatcttgtcccatccctggaagcctctttggaaaccacatagagctgtgctggctcacgggatgtcctgtttgcttctgcctcagttaccttactttgcccatgggtctaccacaggcgctacctcattgtgtctgctgagaagtttacctgggaggggggaacaaagttgtccaaatctgcttgagctgaatgtatgatctatgcaaattctctctctcctctctctcttcctctctggctctcttagaagtttttttgttttgttttgttttgttttgtgtttaccttgcaaacaagatactgtataggaccctcttaagatggaggagggctttcttgcgccacctgtgtctacccctcacgttgtctttggctctggtcttaccaggcgtatgcagggagaaagtgacctctcttccctctccacttggctgggaatattccaactgcctctgcctacagataccaccagaaagcgggttctgcaccttgtcatccccctccctaacgtcatctactccatccctcatgttcctccaacttgcttctcccatccctccttcaaaaacaaaacaaaacaaaacaaaagccttaggtttctcctttttgaaatgtggccttaacattatttttgggaagctgaccatccatcctttccctcccatctccaccaacatcagagaagacagcatcgtgaagcttctgtggcagcctcctaaggaaggggctgccaatctgtagttggcagatgctataggaattgcttacaaatgtcgtctttaagaaaaatgttcttatatttttcctatgggcaaaatgaaggcttgggtgctcatctaaagctcagccaactcctgaagcactctctcagagcatactgctgctgtaatgggctggcttaattatcggcagagtgcttgaaaaggctttgcagacctcccctgcccccaagactgggtgactttatatgtacttcattcaagggtaaatcaggagacgttctccatttatctcttcgtccttcctgcctggaaagtgatagcactaaatattcccagcagatgggtagtgttctcaaaggaatcaccctttccctaccttcagactctattctttacccttccattgctccagtgctgatggaggccaaagacaaccccagggttttcataggaaattcactggaattgtgcgcaattgtctttgtagtccttttgccttttttttttttaaatattatgttgtcaatagcatttgtttgggtatttgttttagaggcctcactctaagttattaccgtccccttcattgttttcaaagacatgtggtgatatagtttttaaaaataactattttgttatagatcataatatgcataaaactgtacagaaatattttgtaatgtgttgattttaaaaaaaatctgtaaataaagttttaaaaaaagaattcaaatggcacacgctgaaatatgtagatattttgctatttatttaaaggagtattttaagagatattgaactatctgaaattgaccagtaatcaaagttccaatcatctgaatgcttttccttgaggtagaatgtgagtctcagaaatgactgcattacctgcccttttttgcaccttttctgtctttttattttgcagaacaacaacaacaacaaaattgtgccttagctgtatttttttgtctaggggagtttgtttctgtctgacaaagcaacattttttgcagaaaacagtggatgtattaaatactgtatcataccaaaaacactgcaggtgtatatagatgctttctgtcatactgtgttttcagatgcagaattttaaaattaaaaaaacactgcctttatggaacagtgactatatgtggcttcttttcagcaacattgtgcatctttacacaatctcatattctcttctgtcatctgcatggtgaagataggatgactatataatttatcatccaaactgggatacttttgagagttaaaggaagcaccacgtggatgggatgctgagactgcaggcataaatggcctatcctgggaaaacctgggtgtgtggacacatttccctcataaaaactgctgtcatcttctaactggattatagcaacaacctcctataagtacctcctggttgaggcagaagtatatgatttttaaacccgtactgagtagagaataacaagaagggactgccatggaaagttgcagtttcctatacccaactggttggttggttggcaaacgtgttttcctttcctctttaccacagagactacatttcccagactgccttgctcttagctgtgaccatgtgaccaggccaatggaacagctagactgcatcttccagactgccttgctcttagccatggccatgtgactgactcaggccaatggaatg

SEQ ID NO: 200548 - DNA, 3507 bp, Homo sapiens
  Payload ID: 19579
  Gene Name: xylosyltransferase II
  Uniprot ID: Q9H1B5
  ENST ID: ENST00000017003
  CDS Start-End: 50-2647
gcggccgggttgcagggctgggcgcgcgccccgcgtcccgggcaggaagatggtggcgagcgcgcgagtgcagaagctggtgcggcgctacaagctggcgattgccacggcgctggccatcctgctgctgcagggcctggtagtgtggagcttcagcggcctggaggaggacgaggcgggcgagaaaggaaggcagaggaagccacggccactggaccctggcgagggttccaaggacacagacagttcagcagggcgacggggcagcacaggcagaaggcatgggcgctggcggggccgtgctgagagcccaggagtgcccgtggccaaggtggtacgggcagtaaccagccggcagagagccagccggcgggtcccacctgccccacccccggaagccccaggccgccagaacctgagtggggcagcagctggggaggcgctggtaggggcagctggcttcccaccacacggagatacagggagcgtggagggcgccccccagcccacggacaatggcttcacccccaagtgcgagatcgtgggcaaggacgcactgtctgcactggcccgggccagcaccaagcagtgccagcaggagatcgccaatgtggtgtgcctgcaccaggctgggagcctcatgcccaaggctgtgccccggcactgtcagctgactgggaagatgagccccggcatccagtgggatgagagccaagcccagcagcccatggatggccccccggtgcgaatcgcctacatgctggtggttcacggccgcgccatccgccagctgaagcgtctcctcaaggccgtttatcacgagcagcacttcttttacatccatgtggacaagcgttccgactacctgcaccgggaggtggtggagctggcccagggctatgataacgtgcgggtgacgccctggcgcatggttaccatctggggcggggccagcctcctgaggatgtacctgcggagcatgcgggacctgctagaggtgcctggctgggcctgggacttcttcatcaacctcagtgccactgactatccaaccaggaccaatgaggagctggtggcattcctatccaagaaccgggacaagaatttcctcaagtcacatggccgggacaactccaggttcatcaagaaacagggcctggaccggctcttccatgagtgcgactcacacatgtggcgcctgggcgagcggcagatcccagcaggcattgtggtggatggcggttctgactggttcgtgctgacacgcagctttgtggagtatgtggtgtacacagatgacccgcttgtggcccagctgcgccagttctacacatacacactgctcccagccgagtccttcttccacacggtgctggagaacagcctggcctgtgagaccctcgtggacaacaacctgcgggtcaccaactggaaccgcaagctgggctgcaagtgccagtacaagcacattgtggactggtgtggctgctcccccaacgacttcaagccacaggacttcctccggctgcagcaagtctccagacccaccttcttcgcccggaagttcgagtcgactgtgaaccaggaggtgctggaaatcctggacttccacctgtatggcagctacccccccggcacgccagccctcaaggcctactgggagaacacctacgacgcggctgatggccccagtgggctcagtgatgtcatgctcactgcttacacagccttcgcccgcctcagcctgcaccatgccgccactgctgcacccccaatgggcaccccactctgcaggtttgagcccaggggcttgccgtccagcgtgcacctgtatttctatgacgaccatttccagggctacctggtgacgcaggcggtgcagccctcagcccaggggccggcagagacgcttgagatgtggctgatgccccaagggtcgctgaagctgttggggcgcagtgaccaggccagccggctccagagtctggaggttggcactgattgggaccccaaagagcgtcttttccggaactttggggggttactggggccgctggacgagcctgtggccgtgcagcgctgggcccggggccccaacctcacagccacagtggtctggatcgacccaacctatgtggtggccacatcttatgacatcacagtagatacggagactgaggtcacgcaatacaagcccccactgagccggcccctgcggccagggccctggactgttcgactccttcagttctgggaaccgctgggtgagacccgcttccttgtgctgcccttgaccttcaaccgcaaactacctctcaggaaagatgatgccagctggctgcacgcagggccaccccacaacgagtacatggagcagagtttccagggcctgagtagcatcctgaacctgcctcagccggagctcgcggaggaggctgcccagcggcacacacagctcacaggccctgcgctcgaggcctggacagacagggaactgagcagcttctggtccgtggctggactgtgtgccataggcccctctccctgcccctccctggagccctgcagactgaccagctggagctctctgtcccccgaccccaaatcagagctggggcctgtcaaagcagacgggcgactcaggtagcagggccccagccagtacccgtggaggacccgggaaattgcaccttacagacagtggaggggtgtcccctcccacaggcaagaaccagaggcccaggctgcacacccatttcagccatcaagaacccacacagacggcagggaaggtggacacagtatgaactactgctgatgtctctgttggggatcagagggctggcgggaacgcgagaagggcaccagcagcattccacacccagctcttcctcaccttcctgtctagtttgaatttcttttttttctttttttttttttttttttaatttaaaaaggaaaatgggtggttgggagagaaactagaacagaagatgtgcaatagggctcagagcagccccaggaagtgggccatgtctgtggggagcaggggcttgctgagcccacctgctattgttctgcacgaggctgggcctgcctcactctccagggcctcatgccccattctgggcctgtggtgctcgtggctgaggctccacagggctgcaagtgccctgccaggctctaaggcccgaagaacaggtgatatcgggggcgctgcagagctgggctctagcaggacagttcttttgtagccaggggaccctagaagtggggtggggcggctccagggctttccagcataccctgcccctggatgggaaaggcagggtcagggcccactgagacccatgcagagtttccaggtgtgcactggaagtgaggtcacatgagcagcgtgggaagaagactctgtcaagactctcagaagaacctggagtaattgtgcctgaagctcagcgtgaagtctgaaatatgcaacagaagaaatatatctctatctctcta

SEQ ID NO: 200549 - DNA, 3267 bp, Homo sapiens
  Payload ID: 19579
  Gene Name: xylosyltransferase II
  ENST ID: ENST00000376550
  CDS Start-End: 6-1925
ggaagatggtggcgagcgcgcgagtgcagaagctggtgcggcgctacaagctggcgattgccacggcgctggccatcctgctgctgcagggcctggtagtgtggagcttcagcggcctggaggaggacgaggcgggcgagaaaggaaggcagaggaagccacggccactggaccctggcgagggttccaaggacacagacagttcagcagggcgacggggcagcacaggcagaaggcatgggcgctggcggggccgtgctgagagcccaggagtgcccgtggccaaggtggtacgggcagtaaccagccggcagagagccagccggcgggtcccacctgccccacccccggaagccccaggccgccagaacctgagtggggcagcagctggggaggcgctggtaggggcagctggcttcccaccacacggagatacagggagcgtggagggcgccccccagcccacggacaatggcttcacccccaagtgcgagatcgtgggcaaggacgcactgtctgcactggcccgggccagcaccaagcagtgccagcaggagatcgccaatgtggtgtgcctgcaccaggctgggagcctcatgcccaaggctgtgccccggcactgtcagctgactgggaagatgagccccggcatccagtgggatgagagccaagcccagcagcccatggatggccccccggtgcgaatcgcctacatgctggtggttcacggccgcgccatccgccagctgaagcgtctcctcaaggccgtttatcacgagcagcacttcttttacatccatgtggacaagcgttccgactacctgcaccgggaggtggtggagctggcccagggctatgataacgtgcgggtgacgccctggcgcatggttaccatctggggcggggccagcctcctgaggatgtacctgcggagcatgcgggacctgctagaggtgcctggctgggcctgggacttcttcatcaacctcagtgccactgactatccaaccaggaccaatgaggagctggtggcattcctatccaagaaccgggacaagaatttcctcaagtcacatggccgggacaactccaggttcatcaagaaacagggcctggaccggctcttccatgagtgcgactcacacatgtggcgcctgggcgagcggcagatcccagcaggcattgtggtggatggcggttctgactggttcgtgctgacacgcagctttgtggagtatgtggtgtacacagatgacccgcttgtggcccagctgcgccagttctacacatacacactgctcccagccgagtccttcttccacacggtgctggagaacagcctggcctgtgagaccctcgtggacaacaacctgcgggtcaccaactggaaccgcaagctgggctgcaagtgccagtacaagcacattgtggactggtgtggctgctcccccaacgacttcaagccacaggacttcctccggctgcagcaagtctccagacccaccttcttcgcccggaagttcgagtcgactgtgaaccaggaggtgctggaaatcctggacttccacctgtatggcagctacccccccggcacgccagccctcaaggcctactgggagaacacctacgacgcggctgatggccccagtgggctcagtgatgtcatgctcactgcttacacagccttcgcccgcctcagcctgcaccatgccgccactgctgcacccccaatgggcaccccactctgcaggttggcactgattgggaccccaaagagcgtcttttccggaactttggggggttactggggccgctggacgagcctgtggccgtgcagcgctgggcccggggccccaacctcacagccacagtggtctggatcgacccaacctatgtggtggccacatcttatgacatcacagtagatacggagactgaggtcacgcaatacaagcccccactgagccggcccctgcggccagggccctggactgttcgactccttcagttctgggaaccgctgggtgagacccgcttccttgtgctgcccttgaccttcaaccgcaaactacctctcaggaaagatgatgccagctggctgcacgcagggccaccccacaacgagtacatggagcagagtttccagggcctgagtagcatcctgaacctgcctcagccggagctcgcggaggaggctgcccagcggcacacacagctcacaggccctgcgctcgaggcctggacagacagggaactgagcagcttctggtccgtggctggactgtgtgccataggcccctctccctgcccctccctggagccctgcagactgaccagctggagctctctgtcccccgaccccaaatcagagctggggcctgtcaaagcagacgggcgactcaggtagcagggccccagccagtacccgtggaggacccgggaaattgcaccttacagacagtggaggggtgtcccctcccacaggcaagaaccagaggcccaggctgcacacccatttcagccatcaagaacccacacagacggcagggaaggtggacacagtatgaactactgctgatgtctctgttggggatcagagggctggcgggaacgcgagaagggcaccagcagcattccacacccagctcttcctcaccttcctgtctagtttgaatttcttttttttctttttttttttttttttttaatttaaaaaggaaaatgggtggttgggagagaaactagaacagaagatgtgcaatagggctcagagcagccccaggaagtgggccatgtctgtggggagcaggggcttgctgagcccacctgctattgttctgcacgaggctgggcctgcctcactctccagggcctcatgccccattctgggcctgtggtgctcgtggctgaggctccacagggctgcaagtgccctgccaggctctaaggcccgaagaacaggtgatatcgggggcgctgcagagctgggctctagcaggacagttcttttgtagccaggggaccctagaagtggggtggggcggctccagggctttccagcataccctgcccctggatgggaaaggcagggtcagggcccactgagacccatgcagagtttccaggtgtgcactggaagtgaggtcacatgagcagcgtgggaagaagactctgtcaagactctcagaagaacctggagtaattgtgcctgaagctcagcgtgaagtctgaaatatgcaacagaagaaatatatctctatctctcta

SEQ ID NO: 200550 - DNA, 145 bp, Homo sapiens
  Payload ID: 19579
  Gene Name: xylosyltransferase II
  ENST ID: ENST00000509778
  CDS Start-End: 11-145
gggcaggaagatggtggcgagcgcgcgagtgcagaagctggtgcggcgctacaagctggcgattgccacggcgctggccatcctgctgctgcagggcctgaaaggaaggcagaggaagccacggccactggaccctggcgagggt

SEQ ID NO: 200551 - DNA, 2107 bp, Homo sapiens
  Payload ID: 19579
  Gene Name: xylosyltransferase II
  ENST ID: ENST00000507602
  CDS Start-End: 7-2037
aggaagatggtggcgagcgcgcgagtgcagaagctggtgcggcgctacaagctggcgattgccacggcgctggccatcctgctgctgcagggcctggtagtgtggagcttcagcggcctggaggaggacgaggcgggcgagaaaggaaggcagaggaagccacggccactggaccctggcgagggttccaaggacacagacagttcagcagggcgacggggcagcacaggcagaaggcatgggcgctggcggggccgtgctgagagcccaggagtgcccgtggccaaggtggtacgggcagtaaccagccggcagagagccagccggcgggtcccacctgccccacccccggaagccccaggccgccagaacctgagtggggcagcagctggggaggcgctggtaggggcagctggcttcccaccacacggagatacagggagcgtggagggcgccccccagcccacggacaatggcttcacccccaagtgcgagatcgtgggcaaggacgcactgtctgcactggcccgggccagcaccaagcagtgccagcaggagatcgccaatgtggtgtgcctgcaccaggctgggagcctcatgcccaaggctgtgccccggcactgtcagctgactgggaagatgagccccggcatccagtgggatgagagccaagcccagcagcccatggatggccccccggtgcgaatcgcctacatgctggtggttcacggccgcgccatccgccagctgaagcgtctcctcaaggccgtttatcacgagcagcacttcttttacatccatgtggacaagcgttccgactacctgcaccgggaggtggtggagctggcccagggctatgataacgtgcgggtgacgccctggcgcatggttaccatctggggcggggccagcctcctgaggatgtacctgcggagcatgcgggacctgctagaggtgcctggctgggcctgggacttcttcatcaacctcagtgccactgactatccaaccaggaccaatgaggagctggtggcattcctatccaagaaccgggacaagaatttcctcaagtcacatggccgggacaactccaggttcatcaagaaacagggcctggaccggctcttccatgagtgcgactcacacatgtggcgcctgggcgagcggcagatcccagcaggcattgtggtggatggcggttctgactggttcgtgctgacacgcagctttgtggagtatgtggtgtacacagatgacccgcttgtggcccagctgcgccagttctacacatacacactgctcccagccgagtccttcttccacacggtgctggagaacagcctggcctgtgagaccctcgtggacaacaacctgcgggtcaccaactggaaccgcaagctgggctgcaagtgccagtacaagcacattgtggactggtgtggctgctcccccaacgacttcaagccacaggacttcctccggctgcagcaagtctccagacccaccttcttcgcccggaagttcgagtcgactgtgaaccaggaggtgctggaaatcctggacttccacctgtatggcagctacccccccggcacgccagccctcaaggcctactgggagaacacctacgacgcggctgatggccccagtgggctcagtgatgtcatgctcactgcttacacagccttcgcccgcctcagcctgcaccatgccgccactgctgcacccccaatgggcaccccactctgcaggtttgagcccaggggcttgccgtccagcgtgcacctgtatttctatgacgaccatttccagggctacctggtgacgcaggcggtgcagccctcagcccaggggccggcagagacgcttgagatgtggctgatgccccaagggtcgctgaagctgttggggcgcagtgaccaggccagccggctccagagtctggagaacaggggtctctccatgttgcccaggctggtctcaaactcctggcctcaagcagtcctcccgctccaacctcccaaagcgttgggatgacaggcatcagccactactcctggcctcaaagtaccattaaaaaaaaaaaaaaatcttaggtaacacatgc

SEQ ID NO: 200552 - DNA, 587 bp, Homo sapiens
  Payload ID: 19579
  Gene Name: xylosyltransferase II
  ENST ID: ENST00000511654
  CDS Start-End: 1-354
tgccagtacaagcacattgtggactggtgtggctgctcccccaacgacttcaagccacaggacttcctccggctgcagcaagtctccagacccaccttcttcgcccggaagttcgagtcgactgtgaaccaggaggtgctggaaatcctggacttccacctgtatggcagctacccccccggcacgccagccctcaaggcctactgggagaacacctacgacgcggctgatggccccagtgggctcagtgatgtcatgctcactgcttacacagccttcgcccgcctcagcctgcaccatgccgccactgctgcacccccaatgggcaccccactctgcagggctacctggtgacgcaggcggtgcagccctcagcccaggggccggcagagacgcttgagatgtggctgatgccccaagggtcgctgaagctgttggggcgcagtgaccaggccagccggctccagagtctggaggttggcactgattgggaccccaaagagcgtcttttccggaactttggggggttactggggccgctggacgagcctgtggccgtgcagcgctgggcccggggccccaacctc

SEQ ID NO: 200553 - DNA, 901 bp, Homo sapiens
  Payload ID: 19579
  Gene Name: xylosyltransferase II
  ENST ID: ENST00000574840
  CDS Start-End: 1-141
gagacgcttgagatgtggctgatgccccaagggtcgctgaagctgttggggcgcagtgaccaggccagccggctccagagtctggaggtgggacaggtcccccacttgctttctcccaacccccacccagacttggggtagtgggaagagagggacagacaccaagggaggggtaaggttatttttcccagtcatggcagccatggtgatgcccccatgcagacatcctgtgtcaccccccagcctgtgcacactgaggagcacctcctggttggggtatgcagaggacatgcagggagcagggagggaattatcagttccactacaacacaagcccaatcttccagactacagagatttcgcctagaggggcagggacattcgagttgggccatgaaactacacttctgagtggctcctcatagtctttttttttttttttttgagacagtctcactctgtcgcagtggcacaatctcggctcactgcaacctctgcctcccaggttcaagcgattctcctacctcagcctcccgcgtagctgggactacaggcgcgcgccaccacgcccagctaatttttttttttgtatttttaatagagacggggtttcaccatgttgaccaggatgatctcgatctcctgaccttgtgatccacccgcctcggcctcccagagtgctgggaatacaagcgcaagccaccgcgcctggcccctcctcatagtctctttctcagaggctttggcttcatgtgggaatggtctctgggcaggactttgaacctcatccctgccgtattgtccccaataagggggactgacctccactgcctagcagtcagaatggaagcctagaacgaatctcagagctgggagagatattaaaggtctcctagtctga

SEQ ID NO: 200554 - DNA, 3664 bp, Homo sapiens
  Payload ID: 19580
  Gene Name: xylulokinase homolog (H. influenzae)
  Uniprot ID: O75191
  ENST ID: ENST00000207870
  CDS Start-End: 91-1701
ccctgcgtctctgggcgctggagcgcggcgactatcacgccgcgtggcggacggacggactgacggacgcgcagccttacccgaaaggccatggcggagcacgcccctcgccgctgctgcctgggctgggacttcagcacgcagcaggtaaaggttgttgctgttgatgcagagttgaatgtcttctatgaggaaagtgtgcattttgacagagatcttccagaatttgggactcagggtggtgttcatgtgcacaaggatgggctgacggtcacttctccagtactaatgtgggtccaggcactggatatcatcttggagaagatgaaggcttcgggcttcgacttctctcaagtcctagccttgtccggggcgggccagcaacacggaagtatatactggaaggctggagcccagcaggcactgacaagcttatcaccagacctccggctacaccagcagctgcaggactgtttctccatcagcgactgcccggtgtggatggactccagcaccacagcccagtgccgccagctggaggctgctgtgggtggtgctcaggctctcagctgcctcacggggtcccgtgcctatgagcgttttacagggaaccaaattgcaaaaatttaccagcagaaccccgaggcctactcacatacggagagaatttctttggtcagtagctttgctgcttccctgttccttggctcttactcccctattgactacagtgatggttctggaatgaatttgttgcagatacaggataaagtctggtcccaggcttgccttggtgcctgtgcacctcatttagaggagaagcttagcccaccagtaccatcatgctcagttgtgggagccatttcttcctactacgtccagcgctacggatttcctccaggatgcaaagtggtggccttcactggggacaacccagcgtcgctggcaggcatgagactggaggaaggtgacattgcggtcagcctgggcaccagtgacaccctgtttctctggctccaagagcccatgcctgccctggaaggccacatcttctgcaacccggttgactcccagcactacatggcactcctgtgctttaaaaatggctccctcatgagagagaagatccgcaacgagtctgtatcccgttcctggagcgatttctctaaggcactgcagtccacagagatgggcaacggtggaaacctgggtttttattttgatgtaatggagatcacccctgaaattattggacgtcataggtttaacacagaaaaccacaaggttgcagcattccctggggatgtggaggttcgagcactaattgaaggacaattcatggccaagaggattcacgcagaaggcctgggctatcgagtcatgtccaagacaaagattttggccacaggaggagcatctcacaatagagaaatcttacaggtgcttgcagatgtgtttgatgccccggtgtatgttatagacactgccaactcggcctgtgtgggttctgcataccgagcttttcatggtcttgcaggtggaacagatgtgcccttttcagaggttgtgaagttagctccaaatcccagactagctgctaccccaagcccgggagcttctcaggtctacgaggcccttctcccccagtatgccaaactcgagcagagaatcttgtctcagacccgggggcctccggagtgaacaggcatccctgttgcccctgcctgcccagatttactgaccccatttgtcgacatggccccagacaggagggatccacttctctgttctgaacagctcttcctgcccctactgactccttggagtgtccaggaccatcttaaagccgccctcagcacatctgcatgaagatagataggcactcctgtccctgtgcccgtgtgccccagggcaggaaagcatctctcttttcctgtcttttatcccaggaggcaggacaacactgagactgggatatgtccaataaaaactatgacttttccccttgcagaggcagaattaaagctaatctagggactcaaatcagcagaatgggggagacaaagcccggtctcaccccctaacctcatcctatctctttctccaaccctgactgcccactcctccacaaaccgtgacccatagccgcccccaccccataccttgatctaccatccatcctcttccccaatccaaaccccacagtctcttctctcccacaccctgccctccttgtttcagctgtctgaggtgcctcgcagggcctctcttacttgccccatgctcaccctttccatgctgtccccattctctcctttcaccatctctcctctccccctccttcatctctcctccctccccaaactcacttggcataattcacaacctcccacccaaacaatgggcctggtggacgtgcttcctgtgccctccctttagctatgcccacagatcactgagagggaccatctcccaagtggtgcagtttagaacttctctccctttttctccctcattccctctctcttcttgcagtccacttgctgaagaagttgtgtcatttctctggaagaatttccaaaattctggatttcttttttattttggagtatttcatcagctgaaaagtgattctcactttgagttttcttcctatatttgtatagtgagttcctttttccttcctctttatccctcctgttttactttatacctctctattccttgctcaaattattgcaaaagcctctatagaaagtcctctgtgatctgactcctgcagactcttccagatttttctgcccaaggcctttactgagctcaggactccagctaaatcaaaatacgcatgttctcacccagagtgacaaaatcctgcagataggtttaagacctagtggctcagagcagtagctactgggaagttaaaaggaaggggcttagaaaatgaatgggaccaaaggcatcacttctgatggagatgaagccatcttgaaagtgagtggtgtcctttggaggcatggtggatgaaaggcgcaaaggaagcaagaggttaaagataatggcccattagatacaacagcaagcccaagattccgaagaagacagacaactccccctagtaccacctagacattactttttaaagacattttacattattgtccagcagaaaaaggctgtcttggaccatgaaacagtaaactgtaactaaacacttcaacatgaatttgaaaataaataattgtggatataaaagaacaccagagatcagaaattcaaaaactcagaataaaaatgaaaaagctacaagcatatatgagaagagaactgactgaacttgggaaataatttgaacaaaaagataaatcttcacagatatgaatactaaattatatcttaatgaaaatagatatggtcacaagtacattaaggcacgtagaaggtaggagtaagaaaagctaagagaagcaaaacaaacaaagcaatattaaaggaagagccaaaaagacccagaaataaaatgacagataaagaagattgtcaaagaaaagatgatacaggtaagattggaactcatgaagacaaaagataagacagtggcatagagttaatatttaaaattcaaatattaaaactcaaataaaccccaaagaacttttgg

SEQ ID NO: 200555 - DNA, 3484 bp, Homo sapiens
  Payload ID: 19580
  Gene Name: xylulokinase homolog (H. influenzae)
  ENST ID: ENST00000424034
  CDS Start-End: 62-247
gactatcacgccgcgtggcggacggacggactgacggacgcgcagccttacccgaaaggccatggcggagcacgcccctcgccgctgctgcctgggctgggacttcagcacgcagcaggtaaaggttgttgctgttgatgcagagttgaatgtcttctatgaggaaagtgtgcattttgacagagatcttccagaatttggcaacacggaagtatatactggaaggctggagcccagcaggcactgacaagcttatcaccagacctccggctacaccagcagctgcaggactgtttctccatcagcgactgcccggtgtggatggactccagcaccacagcccagtgccgccagctggaggctgctgtgggtggtgctcaggctctcagctgcctcacggggtcccgtgcctatgagcgttttacagggaaccaaattgcaaaaatttaccagcagaaccccgaggcctactcacatacggagagaatttctttggtcagtagctttgctgcttccctgttccttggctcttactcccctattgactacagtgatggttctggaatgaatttgttgcagatacaggataaagtctggtcccaggcttgccttggtgcctgtgcacctcatttagaggagaagcttagcccaccagtaccatcatgctcagttgtgggagccatttcttcctactacgtccagcgctacggatttcctccaggatgcaaagtggtggccttcactggggacaacccagcgtcgctggcaggcatgagactggaggaaggtgacattgcggtcagcctgggcaccagtgacaccctgtttctctggctccaagagcccatgcctgccctggaaggccacatcttctgcaacccggttgactcccagcactacatggcactcctgtgctttaaaaatggctccctcatgagagagaagatccgcaacgagtctgtatcccgttcctggagcgatttctctaaggcactgcagtccacagagatgggcaacggtggaaacctgggtttttattttgatgtaatggagatcacccctgaaattattggacgtcataggtttaacacagaaaaccacaaggttgcagcattccctggggatgtggaggttcgagcactaattgaaggacaattcatggccaagaggattcacgcagaaggcctgggctatcgagtcatgtccaagacaaagattttggccacaggaggagcatctcacaatagagaaatcttacaggtgcttgcagatgtgtttgatgccccggtgtatgttatagacactgccaactcggcctgtgtgggttctgcataccgagcttttcatggtcttgcaggtggaacagatgtgcccttttcagaggttgtgaagttagctccaaatcccagactagctgctaccccaagcccgggagcttctcaggtctacgaggcccttctcccccagtatgccaaactcgagcagagaatcttgtctcagacccgggggcctccggagtgaacaggcatccctgttgcccctgcctgcccagatttactgaccccatttgtcgacatggccccagacaggagggatccacttctctgttctgaacagctcttcctgcccctactgactccttggagtgtccaggaccatcttaaagccgccctcagcacatctgcatgaagatagataggcactcctgtccctgtgcccgtgtgccccagggcaggaaagcatctctcttttcctgtcttttatcccaggaggcaggacaacactgagactgggatatgtccaataaaaactatgacttttccccttgcagaggcagaattaaagctaatctagggactcaaatcagcagaatgggggagacaaagcccggtctcaccccctaacctcatcctatctctttctccaaccctgactgcccactcctccacaaaccgtgacccatagccgcccccaccccataccttgatctaccatccatcctcttccccaatccaaaccccacagtctcttctctcccacaccctgccctccttgtttcagctgtctgaggtgcctcgcagggcctctcttacttgccccatgctcaccctttccatgctgtccccattctctcctttcaccatctctcctctccccctccttcatctctcctccctccccaaactcacttggcataattcacaacctcccacccaaacaatgggcctggtggacgtgcttcctgtgccctccctttagctatgcccacagatcactgagagggaccatctcccaagtggtgcagtttagaacttctctccctttttctccctcattccctctctcttcttgcagtccacttgctgaagaagttgtgtcatttctctggaagaatttccaaaattctggatttcttttttattttggagtatttcatcagctgaaaagtgattctcactttgagttttcttcctatatttgtatagtgagttcctttttccttcctctttatccctcctgttttactttatacctctctattccttgctcaaattattgcaaaagcctctatagaaagtcctctgtgatctgactcctgcagactcttccagatttttctgcccaaggcctttactgagctcaggactccagctaaatcaaaatacgcatgttctcacccagagtgacaaaatcctgcagataggtttaagacctagtggctcagagcagtagctactgggaagttaaaaggaaggggcttagaaaatgaatgggaccaaaggcatcacttctgatggagatgaagccatcttgaaagtgagtggtgtcctttggaggcatggtggatgaaaggcgcaaaggaagcaagaggttaaagataatggcccattagatacaacagcaagcccaagattccgaagaagacagacaactccccctagtaccacctagacattactttttaaagacattttacattattgtccagcagaaaaaggctgtcttggaccatgaaacagtaaactgtaactaaacacttcaacatgaatttgaaaataaataattgtggatataaaagaacaccagagatcagaaattcaaaaactcagaataaaaatgaaaaagctacaagcatatatgagaagagaactgactgaacttgggaaataatttgaacaaaaagataaatcttcacagatatgaatactaaattatatcttaatgaaaatagatatggtcacaagtacattaaggcacgtagaaggtaggagtaagaaaagctaagagaagcaaaacaaacaaagcaatattaaaggaagagccaaaaagacccagaaataaaatgacagataaagaagattgtcaaagaaaagatgatacaggtaagattggaactcatgaagacaaaagataagacagtggcatagagttaatatttaaaattcaaatattaaaactcaaataaaccccaaagaacttttgg

SEQ ID NO: 200556 - DNA, 1666 bp, Homo sapiens
  Payload ID: 19580
  Gene Name: xylulokinase homolog (H. influenzae)
  ENST ID: ENST00000427323
  CDS Start-End: 110-310
ggcggagctaggggcgggcccctgcgtctctgggcgctggagcgcggcgactatcacgccgcgtggcggacggacggactgacggacgcgcagccttacccgaaaggccatggcggagcacgcccctcgccgctgctgcctgggctgggacttcagcacgcagcaggtaaaggttgttgctgttgatgcagagttgaatgtcttctatgaggaaagtgtgcattttgacagagatcttccagaatttggagcaaccttggaagcacatgtggaacatgacagagccaccatcaacctggttcctgaatgactgcatggagcagaactccccactccccactcatgttcctaaccacctactgattgtgctttacatgaggagaaagaaacttcagctgtatcaagccatagaaatgtgtttttccttaactaatataattttttccctcatatcctttttttaaagaaaatactggggccaggtgtggtcgctcacgcctgtaatcccagcactttgggattacagaggcgggcacatcacgaggtcaggagatcgagaccatcctggctaatgcagtgaaaccccgtctctactaaaaatacaaaaatttagccaggcttggtgccgggcgcctgtagtcccagctactcgggaggctgaggcaggagaatggcgtgaacctgggaggcagagtttgtagtgagccgagataatgccactgcactccagcctgggtgacagagcaagactctgtctcaaaaaaaaaaaaaaaagaaagagaaaatactgtttctattgaaatgtaattcacataccataaaattcaccttttaaaatgtacaatttgatggttttagtatattcaaagaacaatatcactatcaccactatgtaatcttagaacattttcaccacctggaaaggaaaccctgtattaattagcatccactgtatagtccccctcctgccagtagtggcaaccacaatcaactctctatctctggatttgctgattctggacatttcgtagacatgaatatatataatatgtgacagccttcttttacttagcataatgctttctttttaaaaaattttcatagctttttgtttatttcaaataccaacttgaaccagatacctggcataatgttttcaaagttcatccatgtcatagcgtgtgtcagtacttcattcctttttgtggttcagtaatattccattgcattgatatatcagagtttgtttttccattcaacttttagacatttgagttgttctgcttttttgctattgtgagttattctgctatgaacatccacatatgttatggattgaattgtggccccccagaattcatatgttggaagcctaccctcatcatgacagtatatttggaggtgaggcctttaggtagataattaaggttaaatgaggttgtaagggtggggctctaatttgataggacctgtttccttataagaaggagagacaccagtgctatcccacttcatgcgcagatgcacagaggaaaggccttgtgagaaggcggctgtctgcaagctggaaagagagccctaaccagaaactgaatttgctggcaccttaattgtggacttctagcctccagaactgtgagaaaataaatgcctgttgtttaaacca

SEQ ID NO: 200557 - DNA, 1514 bp, Homo sapiens
  Payload ID: 19581
  Gene Name: Y box binding protein 1
  Uniprot ID: P67809
  ENST ID: ENST00000321358
  CDS Start-End: 140-1114
agttcgatcggtagcgggagcggagagcggaccccagagagccctgagcagccccaccgccgccgccggcctagttaccatcacaccccgggaggagccgcagctgccgcagccggccccagtcaccatcaccgcaaccatgagcagcgaggccgagacccagcagccgcccgccgccccccccgccgcccccgccctcagcgccgccgacaccaagcccggcactacgggcagcggcgcagggagcggtggcccgggcggcctcacatcggcggcgcctgccggcggggacaagaaggtcatcgcaacgaaggttttgggaacagtaaaatggttcaatgtaaggaacggatatggtttcatcaacaggaatgacaccaaggaagatgtatttgtacaccagactgccataaagaagaataaccccaggaagtaccttcgcagtgtaggagatggagagactgtggagtttgatgttgttgaaggagaaaagggtgcggaggcagcaaatgttacaggtcctggtggtgttccagttcaaggcagtaaatatgcagcagaccgtaaccattatagacgctatccacgtcgtaggggtcctccacgcaattaccagcaaaattaccagaatagtgagagtggggaaaagaacgagggatcggagagtgctcccgaaggccaggcccaacaacgccggccctaccgcaggcgaaggttcccaccttactacatgcggagaccctatgggcgtcgaccacagtattccaaccctcctgtgcagggagaagtgatggagggtgctgacaaccagggtgcaggagaacaaggtagaccagtgaggcagaatatgtatcggggatatagaccacgattccgcaggggccctcctcgccaaagacagcctagagaggacggcaatgaagaagataaagaaaatcaaggagatgagacccaaggtcagcagccacctcaacgtcggtaccgccgcaacttcaattaccgacgcagacgcccagaaaaccctaaaccacaagatggcaaagagacaaaagcagccgatccaccagctgagaattcgtccgctcccgaggctgagcagggcggggctgagtaaatgccggcttaccatctctaccatcatccggtttagtcatccaacaagaagaaatatgaaattccagcaataagaaatgaacaaaagattggagctgaagacctaaagtgcttgctttttgcccgttgaccagataaatagaactatctgcattatctatgcagcatggggtttttattatttttacctaaagacgtctctttttggtaataacaaacgtgttttttaaaaaagcctggtttttctcaatacgcctttaaaggtttttaaattgtttcatatctggtcaagttgagatttttaagaacttcatttttaatttgtaataaaagtttacaacttgattttttcaaaaaagtcaacaaactgcaagcacctgttaataaaggtcttaaataat

SEQ ID NO: 200558 - DNA, 1524 bp, Homo sapiens
  Payload ID: 19581
  Gene Name: Y box binding protein 1
  ENST ID: ENST00000436427
  CDS Start-End: 1-1124
cgcgtgtgcgacggggtcccctccccgccgaccggcctcgtgcgctcgggcccgcacgccgttgttcgcgtcacccccacccagctcccttccgcgtgtgctcggagggcgcggcgcaccgcctacgcaggccggagcggcttccccttccctcacgtgctctccgtccgcggcctgcgcacacacccatcctggggcccgcgccccgggcctgccctggagcgccccgcgcttcagactcacccacgtgtgcggcggcggcggcgactgcgtggccccgcacccgggcggtggagagaaagggctgtcaggtggccgcggcggccggcgtgcgagggaccggatgcccaagccgggcggatttggaaaaggatagctggaatgacaccaaggaagatgtatttgtacaccagactgccataaagaagaataaccccaggaagtaccttcgcagtgtaggagatggagagactgtggagtttgatgttgttgaaggagaaaagggtgcggaggcagcaaatgttacaggtcctggtggtgttccagttcaaggcagtaaatatgcagcagaccgtaaccattatagacgctatccacgtcgtaggggtcctccacgcaattaccagcaaaattaccagaatagtgagagtggggaaaagaacgagggatcggagagtgctcccgaaggccaggcccaacaacgccggccctaccgcaggcgaaggttcccaccttactacatgcggagaccctatgggcgtcgaccacagtattccaaccctcctgtgcagggagaagtgatggagggtgctgacaaccagggtgcaggagaacaaggtagaccagtgaggcagaatatgtatcggggatatagaccacgattccgcaggggccctcctcgccaaagacagcctagagaggacggcaatgaagaagataaagaaaatcaaggagatgagacccaaggtcagcagccacctcaacgtcggtaccgccgcaacttcaattaccgacgcagacgcccagaaaaccctaaaccacaagatggcaaagagacaaaagcagccgatccaccagctgagaattcgtccgctcccgaggctgagcagggcggggctgagtaaatgccggcttaccatctctaccatcatccggtttagtcatccaacaagaagaaatatgaaattccagcaataagaaatgaacaaaagattggagctgaagacctaaagtgcttgctttttgcccgttgaccagataaatagaactatctgcattatctatgcagcatggggtttttattatttttacctaaagacgtctctttttggtaataacaaacgtgttttttaaaaaagcctggtttttctcaatacgcctttaaaggtttttaaattgtttcatatctggtcaagttgagatttttaagaacttcatttttaatttgtaataaaagtttacaacttgattttttcaaaaaagtcaacaaactgcaagcacctgttaataaaggtcttaaataat

SEQ ID NO: 200559 - DNA, 776 bp, Homo sapiens
  Payload ID: 19581
  Gene Name: Y box binding protein 1
  ENST ID: ENST00000332220
  CDS Start-End: 127-776
gcgggagcggagagcggaccccagagagccctgagcagccccaccgccgccgccggcctagttaccatcacaccccgggaggagccgcagctgccgcagccggccccagtcaccatcaccgcaaccatgagcagcgaggccgagacccagcagccgcccgccgccccccccgccgcccccgccctcagcgccgccgacaccaagcccggcactacgggcagcggcgcagggagcggtggcccgggcggcctcacatcggcggcgcctgccggcggggacaagaaggtcatcgcaacgaaggttttgggaacagtaaaatggttcaatgtaaggaacggatatggtttcatcaacaggaatgacaccaaggaagatgtatttgtacaccagggtgcggaggcagcaaatgttacaggtcctggtggtgttccagttcaaggcagtaaatatgcagcagaccgtaaccattatagacgctatccacgtcgtaggggtcctccacgcaattaccagcaaaattaccagaatagtgagagtggggaaaagaacgagggatcggagagtgctcccgaaggccaggcccaacaacgccggccctaccgcaggcgaaggttcccaccttactacatgcggagaccctatgggcgtcgaccacagtattccaaccctcctgtgcagggagaagtgatggagggtgctgacaaccagggtgcaggagaacaaggtagaccagtgaggcagaatatgtatcggggatatagaccacgattccgcag

SEQ ID NO: 200560 - DNA, 1369 bp, Homo sapiens
  Payload ID: 19581
  Gene Name: Y box binding protein 1
  ENST ID: ENST00000616651
  CDS Start-End: 140-1102
agttcgatcggtagcgggagcggagagcggaccccagagagccctgagcagccccaccgccgccgccggcctagttaccatcacaccccgggaggagccgcagctgccgcagccggccccagtcaccatcaccgcaaccatgagcagcgaggccgagacccagcagccgcccgccgccccccccgccgcccccgccctcagcgccgccgacaccaagcccggcactacgggcgcggcgcagggagcggtggcccgggcggcccacatcggcggcgccggcggggacaagaaggtcatcgcaacgaaggttttgggaacagtaaaatggttcaatgtaaggaacggatatggtttcatcaacaggaatgacaccaaggaagatgtatttgtacaccagactgccataaagaagaataaccccaggaagtaccttcgcagtgtaggagatggagagactgtggagtttgatgttgttgaaggagaaaagggtgcggaggcagcaaatgttacaggtcctggtggtgttccagttcaaggcagtaaatatgcagcagaccgtaaccattatagacgctatccacgtcgtaggggtcctccacgcaattaccagcaaaattaccagaatagtgagagtggggaaaagaacgagggatcggagagtgctcccgaagccaggcccaacaacgccggccctacccaggcgaaggttcccaccttactacatgcggagacctatgggcgtcgaccacagtattccaaccctcctgtgcagggagaagtgatggagggtgctgacaaccagggtgcaggagaacaaggtagaccagtgaggcagatatgtatcggggatatagaccacgattccgcaggggccctccgccaaagacagcctagagaggacggcaatgaagaagataaagaaaatcaaggagatgagacccaaggtcagcagccacctcaacgtcggtaccgccgcaacttcaattaccgacgcagacgcccagaaaaccctaaaccacaagatggcaaagagacaaaagcagccgatccaccagctgagaattcgtccgctcccgaggctgagcagggcggggctgagtaaatgccggcttaccatctctaccatcatccggtttagtcatccaacaagaagaaatatgaaattccagcaataagaaatgaacaaaagattggagctgaagacctaaagtgcttgctttttgcccgttgaccagataaatagaactatctgcattatctatgcagcatggggtttttattatttttacctaaagacgtctctttttggtaataacaaacgtgttttttaaaaaagcctggtttttctcaatacgcctttaaaggtttt

SEQ ID NO: 200561 - DNA, 1590 bp, Homo sapiens
  Payload ID: 19582
  Gene Name: Y box binding protein 2
  Uniprot ID: Q9Y2T7
  ENST ID: ENST00000007699
  CDS Start-End: 65-1159
ggttcgcgagccggggggaggggccggggcggtggcggctgtggccggtactggacccggcgggatgagcgaggtggaggcggcagcgggggctacagcggtccccgcggcgacggtgcccgcgacggcggcaggggtggtagcggtggtggtaccggtgcccgcaggggagccgcagaaaggcggcggggcgggcggcgggggcggagccgcctcgggccccgctgctgggaccccctcggcgccgggctcccgcacccctggcaatccggcgacggcggtctcgggaacccccgcccccccggcccggagtcaggcggacaagccggtgctggcaatccaagtcctgggcactgtcaaatggttcaacgtccggaatggttacggattcatcaacaggaatgacaccaaggaagatgtctttgttcaccagacagctattaaaagaaacaaccccaggaagtttctgcgcagcgttggagatggggagactgtggaatttgatgtcgtggaaggagagaagggcgcagaagccactaatgtaactgggcctgggggagtacccgtgaagggcagccgttatgcccccaaccgacgtaagtcccgccgattcatcccccggcctccctcagttgccccaccacccatggtggcagagatcccctcggcggggacaggacctggcagtaaaggggagcgggctgaagactctgggcaacggccccgacgatggtgccccccacccttcttctaccgacggcggtttgtgcgaggcccccggcctcccaaccagcagcagcctatagagggcactgacagggtagaacccaaagagacagccccattggaggggcaccaacagcagggagatgagcgagtccccccgcccagattccggcccaggtaccgaaggcctttccgccccaggccacgccagcagcctaccacagaaggtggggatggtgagaccaagcccagccaaggtcccgctgatggttcccggcctgagccccagcgcccacgaaaccgcccctacttccagcggagacggcagcaggcccctggcccccagcaggcccctggcccccggcagcccgcagcccctgagacctcagcccctgtcaacagtggggaccccaccaccaccatcctggagtgattccaactcaactcagaggacacccagagctgccatctggtatctgccagtttttccaaatgacctgtaccctacccagtaccctgctccccctttcccataattcatgacatcaaaacaccagcttttcaccttttccttgagactcaggaggaccaaagcagcagccttttgctttttcttttttcttccctccccttatcaagggttgaaggaagggagccatccttactgttcagagacagcaactccctcccgtaactcaggctgagaaggaaccagccagctcttacctcctcctggttgcttttcttgcccccaccccaagtttatttttgttttcccccggccccctacctctgaagccattttatgatctgtcatgtgccacctgagcctccagtaaaaacaaaaacaggctttcctgtggt

SEQ ID NO: 200562 - DNA, 640 bp, Homo sapiens
  Payload ID: 19582
  Gene Name: Y box binding protein 2
  ENST ID: ENST00000571464
  CDS Start-End: 1-493
ggcggggacaggacctggcagtaaaggggagcgggctgaagactctgggcaacggccccgacgatggtgccccccacccttcttctaccgacggcggtttgtgcgaggcccccggcctcccaaccagcagcagcctatagagggcactgacagggtagaacccaaagagacagccccattggaggggcaccaacagcagggagatgagcgagtccccccgcccagattccggcccaggtaccgaaggcctttccgccccaggccacgccagcagcctaccacagaaggtggggatggtgagaccaagcccagccaaggtcccgctgatggttcccggcctgagccccagcgcccacgaaaccgcccctacttccagcggagacggcagcaggcccctggcccccagcaggcccctggcccccggcagcccgcagcccctgagacctcagcccctgtcaacagtggggaccccaccaccaccatcctggagtgattccaactcaactcagaggacacccagagctgccatctgggttgaaggaagggagccatccttactgttcagagacagcaactccctcccgtaactcaggctgagaaggaaccagccagctcttacctcctcctggttgcttttctt

SEQ ID NO: 200563 - DNA, 1796 bp, Homo sapiens
  Payload ID: 19583
  Gene Name: Y box binding protein 3
  Uniprot ID: P16989
  ENST ID: ENST00000228251
  CDS Start-End: 202-1320
gcgaggagcccaagagagagcgcgcagcacgaagctcgagccgcctccgccgcgcgaccccacctcggccgccgccgcctgcgccgcgagatccgccccggcctccccgagagcgagccccggccgccgcgaccaccagccgcgctaaccgccgaccaaccgccaccgaggcgcctgagcgagagcagaggaggaggaggcatgagtgaggcgggcgaggccaccaccaccaccaccaccaccctcccgcaggctccgacggaggcggccgccgcggctccccaggaccccgcgcccaagagcccggtgggcagcggtgcgccccaggccgcggccccggcgcccgccgcccacgtcgcaggaaaccccggtggggacgcggcccccgcagccacgggcaccgcggccgccgcctctttagccaccgccgccggcagcgaagacgcggagaaaaaagttctcgccaccaaagtccttggcactgtcaaatggttcaacgtcagaaatggatatggatttataaatcgaaatgacaccaaagaagatgtatttgtacatcagactgccatcaagaagaataacccacggaaatatctgcgcagtgtaggagatggagaaactgtagagtttgatgtggttgaaggagagaagggtgcagaagctgccaatgtgactggcccggatggagttcctgtggaagggagtcgttacgctgcagatcggcgccgttacagacgtggctactatggaaggcgccgtggccctccccggaattacgctggggaggaggaggaggaagggagcggcagcagtgaaggatttgacccccctgccactgataggcagttctctggggcccggaatcagctgcgccgcccccagtatcgccctcagtaccggcagcggcggttcccgccttaccacgtgggacagacctttgaccgtcgctcacgggtcttaccccatcccaacagaatacaggctggtgagattggagagatgaaggatggagtcccagagggagcacaacttcagggaccggttcatcgaaatccaacttaccgcccaaggtaccgtagcaggggacctcctcgcccacgacctgccccagcagttggagaggctgaagataaagaaaatcagcaagccaccagtggtccaaaccagccgtctgttcgccgtggataccggcgtccctacaattaccggcgtcgcccgcgtcctcctaacgctccttcacaagatggcaaagaggccaaggcaggtgaagcaccaactgagaaccctgctccacccacccagcagagcagtgctgagtaacaccaggctcctcaggcaccttcaccatcggcaggtgacctaaagaattaatgaccattcagaaataaagcaaaaagcaggccacaaccttaaccaacaccaaagaaacatccaagcaataaagtggaagactaaccaagatttggacattggaatgtttactgttattctttaagaaacaactacaaaaagaaaatgtcaacaaatttttccagcaagctgagaacctgggaattcctgcacggaagacaagagagtagcctctccagtttcagcaaccgctaggtttctattttttttcctggtttttactgttttggtaatatatatattgaaacaagaaatattaataccacatggggagaaccccaaccaaagaaatctgaaatatatagtaaatgcttttttttccgtttttgttcattttggatgctggtgctaaacctccaagtgtcatgatttaaaaaaaaaaaaaa

SEQ ID NO: 200564 - DNA, 1708 bp, Homo sapiens
  Payload ID: 19583
  Gene Name: Y box binding protein 3
  Uniprot ID: P16989
  ENST ID: ENST00000279550
  CDS Start-End: 197-1108
gagcccaagagagagcgcgcagcacgaagctcgagccgcctccgccgcgcgaccccacctcggccgccgccgcctgcgccgcgagatccgccccggcctccccgagagcgagccccggccgccgcgaccaccagccgcgctaaccgccgaccaaccgccaccgaggcgcctgagcgagagcagaggaggaggaggcatgagtgaggcgggcgaggccaccaccaccaccaccaccaccctcccgcaggctccgacggaggcggccgccgcggctccccaggaccccgcgcccaagagcccggtgggcagcggtgcgccccaggccgcggccccggcgcccgccgcccacgtcgcaggaaaccccggtggggacgcggcccccgcagccacgggcaccgcggccgccgcctctttagccaccgccgccggcagcgaagacgcggagaaaaaagttctcgccaccaaagtccttggcactgtcaaatggttcaacgtcagaaatggatatggatttataaatcgaaatgacaccaaagaagatgtatttgtacatcagactgccatcaagaagaataacccacggaaatatctgcgcagtgtaggagatggagaaactgtagagtttgatgtggttgaaggagagaagggtgcagaagctgccaatgtgactggcccggatggagttcctgtggaagggagtcgttacgctgcagatcggcgccgttacagacgtggctactatggaaggcgccgtggccctccccggaatgctggtgagattggagagatgaaggatggagtcccagagggagcacaacttcagggaccggttcatcgaaatccaacttaccgcccaaggtaccgtagcaggggacctcctcgcccacgacctgccccagcagttggagaggctgaagataaagaaaatcagcaagccaccagtggtccaaaccagccgtctgttcgccgtggataccggcgtccctacaattaccggcgtcgcccgcgtcctcctaacgctccttcacaagatggcaaagaggccaaggcaggtgaagcaccaactgagaaccctgctccacccacccagcagagcagtgctgagtaacaccaggctcctcaggcaccttcaccatcggcaggtgacctaaagaattaatgaccattcagaaataaagcaaaaagcaggccacaaccttaaccaacaccaaagaaacatccaagcaataaagtggaagactaaccaagatttggacattggaatgtttactgttattctttaagaaacaactacaaaaagaaaatgtcaacaaatttttccagcaagctgagaacctgggaattcctgcacggaagacaagagagtagcctctccagtttcagcaaccgctaggtttctattttttttcctggtttttactgttttggtaatatatatattgaaacaagaaatattaataccacatggggagaaccccaaccaaagaaatctgaaatatatagtaaatgcttttttttccgtttttgttcattttggatgctggtgctaaacctccaagtgtcatgatttaaaaaaaaaaaaaatttatgtccttcttatttatttctaggatgaggggaggataacatttttgctttcttatgtgactctctttgaaaatgtgcagtaagaaattcctcaaaaataaaatttttacccttcagagga

SEQ ID NO: 200565 - DNA, 685 bp, Homo sapiens
  Payload ID: 19583
  Gene Name: Y box binding protein 3
  ENST ID: ENST00000544622
  CDS Start-End: 1-277
aaatgacaccaaagaagatgtatttgtacatcagactgccatcaagaagaataacccacggaaatatctgcgcagtgtaggagatggagaaactgtagagtttgatgtggttgaaggagagaagggtgcagaagctgccaatgtgactggcccggatggagttcctgtggaagggagtcgttacgctgcagatcggcgccgttacagacgtggctactatggaaggcgccgtggccctccccggaatatctctgatgtatggtttaatagaagatagctggattctcacatctgtttctgcattcagtctgctgagagaccacatgtcattgtagcctttgggagaccccaccatatacttctgagagaatgcctgggaaaggcaaatagcatcttagtaatattatggcaatagtttgacctcgctgaccccctggaagttttcagaaatcccatccacactttacagacttgtaggaagaataccacttgggtcaaatatgttggtaacatcataaaatgtattcttttttggcttttccctgacattgcctcagtggatggtaaatgctgggagacacgcatttgatggagcaaaaattataaaccttgcagatactcttcgggtggttggttagctgatacgagttctaatgagatgactattaaattgattgtagattga

SEQ ID NO: 200566 - DNA, 899 bp, Homo sapiens
  Payload ID: 19584
  Gene Name: Yae1 domain containing 1
  Uniprot ID: Q9NRH1
  ENST ID: ENST00000223273
  CDS Start-End: 44-724
gttggcgcttccggtggcctgcgaccccgtaattgcctcggtgatgtcgtgggttcaagcagcctccttgatccagggccctggagacaaaggggacgtgtttgacgaagaagcagacgagtcgctcctggcgcagcgggaatggcagagtaacatgcaaagacgagtcaaagaaggttatagagatggaatagatgctggcaaagcagttactcttcaacagggcttcaatcaaggttataagaaaggtgcagaagtcattttaaactatggacgactccgaggaacattgagtgctttgctctcctggtgtcaccttcataataataattcaactttgatcaataaaataaacaatcttctggatgcagttggccagtgtgaagagtatgtgctcaaacatctgaaatcaatcactccaccgtcccatgttgtagatttattggactccattgaggatatggacctttgtcatgtagttccagctgagaaaaagattgatgaagctaaagatgaaagactctgtgaaaataatgctgagtttaacaaaaactgtagcaagagccatagtgggatagattgttcatatgtagaatgttgtagaacacaggagcatgcacattcagaaaacccaagccccacatggattttggaacagacagccagtttagttaaacagctgggcctatcagtagatgtattacaacacctcaaacaactataaaattaccttcccttttctaatgaaaataatgttcagaacatttggtttcctaacaatcgaaatttgtactggtttctgcatcaaacacctcaactgtagggttaccctttatggaagtttgaaattaacactattgtcttcaaaattaacactattaaatgtaatataagccttt

SEQ ID NO: 200567 - DNA, 968 bp, Homo sapiens
  Payload ID: 19584
  Gene Name: Yae1 domain containing 1
  Uniprot ID: Q9NRH1
  ENST ID: ENST00000432096
  CDS Start-End: 14-634
aattgcctcggtgatgtcgtgggttcaagcagcctccttgatccagggccctggagacaaaggggacgtgtttgacgaagaagcagacgagtcgctcctggcgcagcgggaatggcagagtaacatgcaaagacgagtcaaagaaggttatagagatggaatagatgctggcaaagcagttactcttcaacagggcttcaatcaaggttataagaaaggtgcagaagtcattttaaactatggacgactccgaggaacattgaggaactcaacggattggagcctactgggcttgagagccccgctgaggagtccggaggttgggacgcaactactgccgcgtcccctcccggtccccggccacatggcgagcggggcgacaccgaagcagcccacggagctcgaggcgacgctgctgagcctggttccccaaagcggccgcgccactccccgcttccccgcccggctccgggccccaggccctgggacgccgagccaccgccggcgtttcagacgcaaaccccaccgcgaccctgcagcagcctgccccgcctggccgccagaggcaccttccaactccgaaacacatttttcaacatataatagaatcattatcagaggtggacacatttagaagttgttcttaatcagagggcagcttgtgcttaggaaagccagcctcagtcctcagcacccagcacccagtgctgcaggtttctcctgggtgaagatggaccagcccaccttggccctccggcaagctagaacaatatgtacacgtctctcaaactatgaagagaagatttgggaggagtatgagaaaatcctcaataccaaactagcagagcaatacgagtcgtttgtgaaattcacacatgagcagattatgcgaccatgtgggacaagcccaacaaactatgtgtcttgaagctttttgttgcagatctcggtaccaggtttgacctcaa

SEQ ID NO: 200568 - DNA, 425 bp, Homo sapiens
  Payload ID: 19584
  Gene Name: Yae1 domain containing 1
  ENST ID: ENST00000448268
  CDS Start-End: 26-289
ctgcgaccccgtaattgcctcggtgatgtcgtgggttcaagcagcctccttgatccagggccctggagacaaaggggacgtgtttgacgaagaagcagacgagtcgctcctggcgcagcgggaatggcagagtaacatgcaaagacgagtcaaagaaggttatagagatggaatagatgctggcaaagcagttactcttcaacagggcttcaatcaaggttataagaaaggtgcagaagtcattttaaactatggacgactccgaggaacattgagttggccagtgtgaagagtatgtgctcaaacatctgaaatcaatcactccaccgtcccatgttgtagatttattggactccattgaggatatggacctttgtcatgtagttccagctgagaaaaagattgatgaagctaaagatgaaaga

SEQ ID NO: 200569 - DNA, 1019 bp, Homo sapiens
  Payload ID: 19585
  Gene Name: ybeY metallopeptidase (putative)
  Uniprot ID: P58557
  ENST ID: ENST00000329319
  CDS Start-End: 399-902
gctctcgcgtcctttgctgggtccagacaccggtacgtccgggcgggtttttagtctcccaagcgagagcgtcgcattcacccgcgtgggtctgcgggcgccccagaccccagaggacccggcccccaacgcttacctgtcccctctcctgtccctcccccattccagccccttctctccccagccgttgcccctccccgcaccccgccgcgtccgcgcgcctctctccgcgcgcacccccaacccgcccccttttctctgggaaccgctccttccgctccgcccgcctggagtccttctggccggattccgcggcatccttccatagaccctcgttgttgcttcctccttgtggttccgttgcaaacatttttaaagggctggttattcttcctgaaatgagtttggtgattagaaatctgcagcgagtcatccccatcaggagagcgccacttcgcagtaagatcgagattgtaaggaggattttaggagtgcagaaatttgacctggggatcatctgtgttgacaacaagaatattcagcacattaatagaatctacagagatagaaatgtcccaaccgatgtgctttcttttccatttcatgagcatctgaaagcaggtgaatttccccagcctgattttccagatgactacaatttgggagacattttcctaggagtggagtatatcttccatcagtgtaaagaaaatgaagattacaatgacgtcctgactgtgacggccacccacggactctgtcacttgctgggattcacacacggcacggaggcagagtggcagcagatgttccagaaggagaaggcggtgctggacgagctgggccgacgcacggggacccggctgcagcccctgacccggggcctcttcggagggagctgagggccgcgttccttctgaaagcgggacgcgggaggggtggaggctgcggggagccggggtcgcacacgaataaataacgaatgaacgtacgaggggaacctcctcttatttccttca

SEQ ID NO: 200570 - DNA, 890 bp, Homo sapiens
  Payload ID: 19585
  Gene Name: ybeY metallopeptidase (putative)
  Uniprot ID: P58557
  ENST ID: ENST00000339195
  CDS Start-End: 399-773
gctctcgcgtcctttgctgggtccagacaccggtacgtccgggcgggtttttagtctcccaagcgagagcgtcgcattcacccgcgtgggtctgcgggcgccccagaccccagaggacccggcccccaacgcttacctgtcccctctcctgtccctcccccattccagccccttctctccccagccgttgcccctccccgcaccccgccgcgtccgcgcgcctctctccgcgcgcacccccaacccgcccccttttctctgggaaccgctccttccgctccgcccgcctggagtccttctggccggattccgcggcatccttccatagaccctcgttgttgcttcctccttgtggttccgttgcaaacatttttaaagggctggttattcttcctgaaatgagtttggtgattagaaatctgcagcgagtcatccccatcaggagagcgccacttcgcagtaagatcgagattgtaaggaggattttaggagtgcagaaatttgacctggggatcatctgtgttgacaacaagaatattcagcacattaatagaatctacagagatagaaatgtcccaaccgatgtgctttcttttccatttcatgaggtgacggccacccacggactctgtcacttgctgggattcacacacggcacggaggcagagtggcagcagatgttccagaaggagaaggcggtgctggacgagctgggccgacgcacggggacccggctgcagcccctgacccggggcctcttcggagggagctgagggccgcgttccttctgaaagcgggacgcgggaggggtggaggctgcggggagccggggtcgcacacgaataaataacgaatgaacgtacgaggggaacctcctcttatttccttca

SEQ ID NO: 200571 - DNA, 764 bp, Homo sapiens
  Payload ID: 19585
  Gene Name: ybeY metallopeptidase (putative)
  Uniprot ID: P58557
  ENST ID: ENST00000397691
  CDS Start-End: 144-647
ggaaccgctccttccgctccgcccgcctggagtccttctggccggattccgcggcatccttccatagaccctcgttgttgcttcctccttgtggtaaatgttccgttgcaaacatttttaaagggctggttattcttcctgaaatgagtttggtgattagaaatctgcagcgagtcatccccatcaggagagcgccacttcgcagtaagatcgagattgtaaggaggattttaggagtgcagaaatttgacctggggatcatctgtgttgacaacaagaatattcagcacattaatagaatctacagagatagaaatgtcccaaccgatgtgctttcttttccatttcatgagcatctgaaagcaggtgaatttccccagcctgattttccagatgactacaatttgggagacattttcctaggagtggagtatatcttccatcagtgtaaagaaaatgaagattacaatgacgtcctgactgtgacggccacccacggactctgtcacttgctgggattcacacacggcacggaggcagagtggcagcagatgttccagaaggagaaggcggtgctggacgagctgggccgacgcacggggacccggctgcagcccctgacccggggcctcttcggagggagctgagggccgcgttccttctgaaagcgggacgcgggaggggtggaggctgcggggagccggggtcgcacacgaataaataacgaatgaacgtacgaggggaacctcctcttatttccttca

SEQ ID NO: 200572 - DNA, 433 bp, Homo sapiens
  Payload ID: 19585
  Gene Name: ybeY metallopeptidase (putative)
  Uniprot ID: P58557
  ENST ID: ENST00000397692
  CDS Start-End: 77-316
gctctcgcgtcctttgctgggtccagacaccggttccgttgcaaacatttttaaagggctggttattcttcctgaaatgagtttggtgattagaaatctgcagcgagtcatccccatcaggagagcgccacttcgcagtaagatcgagattgtgacggccacccacggactctgtcacttgctgggattcacacacggcacggaggcagagtggcagcagatgttccagaaggagaaggcggtgctggacgagctgggccgacgcacggggacccggctgcagcccctgacccggggcctcttcggagggagctgagggccgcgttccttctgaaagcgggacgcgggaggggtggaggctgcggggagccggggtcgcacacgaataaataacgaatgaacgtacgaggggaacctcctcttatttccttca

SEQ ID NO: 200573 - DNA, 534 bp, Homo sapiens
  Payload ID: 19585
  Gene Name: ybeY metallopeptidase (putative)
  Uniprot ID: P58557
  ENST ID: ENST00000397694
  CDS Start-End: 77-445
gctctcgcgtcctttgctgggtccagacaccggttccgttgcaaacatttttaaagggctggttattcttcctgaaatgagtttggtgattagaaatctgcagcgagtcatccccatcaggagagcgccacttcgcagtaagatcgagattcatctgaaagcaggtgaatttccccagcctgattttccagatgactacaatttgggagacattttcctaggagtggagtatatcttccatcagtgtaaagaaaatgaagattacaatgacgtcctgactgtgacggccacccacggactctgtcacttgctgggattcacacacggcacggaggcagagtggcagcagatgttccagaaggagaaggcggtgctggacgagctgggccgacgcacggggacccggctgcagcccctgacccggggcctcttcggagggagctgagggccgcgttccttctgaaagcgggacgcgggaggggtggaggctgcggggagccggggtcgcacacgaataaataacgaatgaacgta

SEQ ID NO: 200574 - DNA, 744 bp, Homo sapiens
  Payload ID: 19585
  Gene Name: ybeY metallopeptidase (putative)
  Uniprot ID: P58557
  ENST ID: ENST00000397701
  CDS Start-End: 124-627
cccacaacccgctctgtggcggggcttccggtcgggagggtccgcccgctctcgcgtcctttgctgggtccagacaccggttccgttgcaaacatttttaaagggctggttattcttcctgaaatgagtttggtgattagaaatctgcagcgagtcatccccatcaggagagcgccacttcgcagtaagatcgagattgtaaggaggattttaggagtgcagaaatttgacctggggatcatctgtgttgacaacaagaatattcagcacattaatagaatctacagagatagaaatgtcccaaccgatgtgctttcttttccatttcatgagcatctgaaagcaggtgaatttccccagcctgattttccagatgactacaatttgggagacattttcctaggagtggagtatatcttccatcagtgtaaagaaaatgaagattacaatgacgtcctgactgtgacggccacccacggactctgtcacttgctgggattcacacacggcacggaggcagagtggcagcagatgttccagaaggagaaggcggtgctggacgagctgggccgacgcacggggacccggctgcagcccctgacccggggcctcttcggagggagctgagggccgcgttccttctgaaagcgggacgcgggaggggtggaggctgcggggagccggggtcgcacacgaataaataacgaatgaacgtacgaggggaacctcctcttatttccttca

SEQ ID NO: 200575 - DNA, 1351 bp, Homo sapiens
  Payload ID: 19586
  Gene Name: YdjC homolog (bacterial)
  Uniprot ID: A8MPS7
  ENST ID: ENST00000292778
  CDS Start-End: 51-1022
ggctgtccggcccactcccctgggagcgcgagcggtggacccaggcggccatgtcccgccctcgcatgcgcctggtggtcaccgcggacgactttggttactgcccgcgacgcgatgagggtatcgtggaggcctttctggccggggctgtgaccagcgtgtccctgctggtcaacggtgcggccacggagagcgcggcggagctggcccgcaggcacagcatccccacgggcctccacgccaacctgtccgagggccgccccgtgggtccggcccgccgtggcgcctcatcgctgctcggcccggaaggcttcttccttggcaagatgggattccgggaggcggtggcggccggagacgtggatttgcctcaggtgcgggaggagctcgaggcccaactaagctgcttccgggagctgctgggcagggcccccacgcacgcggacgggcaccagcacgtgcacgtgctcccaggcgtgtgccaggtgttcgccgaggcgctgcaggcctatggggtgcgctttacgcgactgccgctggagcgcggtgtgggtggctgcacttggctggaggcccccgcgcgtgccttcgcctgcgccgtggagcgcgacgcccgggccgccgtgggccccttctcccgccacggcctgcggtggacagacgccttcgtgggcctgagcacttgcggccggcacatgtccgctcaccgcgtgtccggggccctggcgcgggtcctggaaggtaccctagcgggccacaccctgacagccgagctgatggcgcaccccggctaccccagtgtgcctcccaccggcggctgcggtgaaggccccgacgctttctcttgctcttgggagcggctgcatgagctgcgcgtcctcaccgcgcccacgctgcgggcccagcttgcccaggatggcgtgcagctttgcgccctcgacgacctggactccaagaggccaggggaggaggtcccctgtgagcccactctggaacccttcctggaaccctccctactctgaccccctacagacaaccaagcactaatccccttagtaccaagaaaggggagccaggatttagtcctggcccagcccagagctgggacctggagcacgatctgttgacttccctgggtaggacactgccacctctgggctcaggtcctcatgcctccaaatggcatctagagtttgagcagccttcttggctgcaggcaggcctagcctgtggcagcgggctagggcccgcagagcatttggtgcccctccatgttgcaatgcaaacaccttcaccactggggcagtggggagagatggctatattaataaaataacgtgtgtctttcaaa

SEQ ID NO: 200576 - DNA, 1066 bp, Homo sapiens
  Payload ID: 19586
  Gene Name: YdjC homolog (bacterial)
  Uniprot ID: A8MPS7
  ENST ID: ENST00000398873
  CDS Start-End: 22-471
gagcggtggacccaggcggccatgtcccgccctcgcatgcgcctggtggtcaccgcggacgactttggttactgcccgcgacgcgatgagggtatcgtggaggcctttctggccggggctgtgaccagcgtgtccctgctggtcaacggtgcggccacggagagcgcggcggagctggcccgcaggcacagcatccccacgggcctccacgccaacctgtccgagggccgccccgtgggtccggcccgccgtggcgcctcatcgctgctcggcccggaaggcttcttccttggcaagatgggattccgggaggcggtggcggccggagacgtggatttgcctcaggtgcgggaggagctcgaggcccaactaagctgcttccgggagctgctgggcagggcccccacgcacgcggacgggcaccagcacgtgcacgtgctcccaggtggacagacgccttcgtgggcctgagcacttgcggccggcacatgtccgctcaccgcgtgtccggggccctggcgcgggtcctggaaggtaccctagcgggccacaccctgacagccgagctgatggcgcaccccggctaccccagtgtgcctcccaccggcggctgcggtgaaggccccgacgctttctcttgctcttgggagcggctgcatgagctgcgcgtcctcaccgcgcccacgctgcgggcccagcttgcccaggatggcgtgcagctttgcgccctcgacgacctggactccaagaggccaggggaggaggtcccctgtgagcccactctggaacccttcctggaaccctccctactctgaccccctacagacaaccaagcactaatccccttagtaccaagaaaggggagccaggatttagtcctggcccagcccagagctgggacctggagcacgatctgttgacttccctgggtaggacactgccacctctgggctcaggtcctcatgcctccaaatggcatctagagtttgagcagccttcttggctgcaggcaggcctagcctgtggcagcgggctagggcccgcagagcatttggtgcccctccat

SEQ ID NO: 200577 - DNA, 1410 bp, Homo sapiens
  Payload ID: 19586
  Gene Name: YdjC homolog (bacterial)
  Uniprot ID: A8MPS7
  ENST ID: ENST00000415762
  CDS Start-End: 51-461
ggctgtccggcccactcccctgggagcgcgagcggtggacccaggcggccatgtcccgccctcgcatgcgcctggtggtcaccgcggacgactttggttactgcccgcgacgcgatgagggtatcgtggaggcctttctggccggggctgtgaccagcgtgtccctgctggtcaacggtgcggccacggagagcgcggcggagctggcccgcaggcacagcatccccacgggcctccacgccaacctgtccgagggccgccccgtgggtccggcccgccgtggcgcctcatcgctgctcggcccggaaggcttcttccttggcaagatgggattccgggaggcggtggcggccggagacgtggatttgcctcaggtgcggagccgcagctacaggaggatgctcgcgaggacccccagagctccgcccggagggtgcgggaggagctcgaggcccaactaagctgcttccgggagctgctgggcagggcccccacgcacgcggacgggcaccagcacgtgcacgtgctcccaggcgtgtgccaggtgttcgccgaggcgctgcaggcctatggggtgcgctttacgcgactgccgctggagcgcggtgtgggtggctgcacttggctggaggcccccgcgcgtgccttcgcctgcgccgtggagcgcgacgcccgggccgccgtgggccccttctcccgccacggcctgcggtggacagacgccttcgtgggcctgagcacttgcggccggcacatgtccgctcaccgcgtgtccggggccctggcgcgggtcctggaaggtaccctagcgggccacaccctgacagccgagctgatggcgcaccccggctaccccagtgtgcctcccaccggcggctgcggtgaaggccccgacgctttctcttgctcttgggagcggctgcatgagctgcgcgtcctcaccgcgcccacgctgcgggcccagcttgcccaggatggcgtgcagctttgcgccctcgacgacctggactccaagaggccaggggaggaggtcccctgtgagcccactctggaacccttcctggaaccctccctactctgaccccctacagacaaccaagcactaatccccttagtaccaagaaaggggagccaggatttagtcctggcccagcccagagctgggacctggagcacgatctgttgacttccctgggtaggacactgccacctctgggctcaggtcctcatgcctccaaatggcatctagagtttgagcagccttcttggctgcaggcaggcctagcctgtggcagcgggctagggcccgcagagcatttggtgcccctccatgttgcaatgcaaacaccttcaccactggggcagtggggagagatggctatattaataaaataacgtgtgtctttcaaa

SEQ ID NO: 200578 - DNA, 6506 bp, Homo sapiens
  Payload ID: 19587
  Gene Name: YEATS domain containing 2
  Uniprot ID: Q9ULM3
  ENST ID: ENST00000305135
  CDS Start-End: 196-4464
gcggggcggaacgcgccgggcgggctccaccgcgccgtgtgcttccgcaggttgcgggggtcgctggggccttgtggcggggcagctccgcggggcttcgcccgctctctcacctcgccgtgctctctcgcggcggccggcggggcccgcgctgcagccggagacccggagaaaggtgaagaactgaatgtcatcatgtctggaatcaagcgaaccatcaaagaaaccgaccctgattacgaggatgtatctgtggcccttccaaataagcggcataaagcaattgagaattcagctcgagatgctgctgtgcagaagattgagactattatcaaagaacagtttgctcttgaaatgaagaataaggaacatgaaattgaagtcattgaccagcgactgattgaagcaagaaggatgatggataaactgcgtgcctgcattgtagcaaactactatgcttctgcaggtcttctaaaagtttctgagggatcaaagacatgtgatacaatggtttttaatcatcctgctatcaagaaatttttggaatcaccatctaggtcatcatctcctgccaatcagagagcagaaacaccatcagccaatcattcagaaagtgattctttatctcagcacaatgacttcttatctgacaaagataataacagcaatatggatatagaggaaagactctcaaacaacatggagcagagaccaagccgaaatactggaagggatacttctagaattactggctcccataaaacagaacagcggaatgctgatctcacagatgagacttcacgactttttgtaaagaaaacaatagtagtgggcaatgtgtccaagtatatacctccggataagagggaagaaaatgaccagtcaactcataagtggatggtatatgtccgagggtcccgtagagaacccagcattaatcattttgtcaagaaggtttggttcttccttcatcctagctataaaccaaatgaccttgtggaagttagagagcctccttttcacctgaccagaagaggctggggtgagtttcccgtcagagttcaagttcattttaaggacagccagaacaagcggatagatatcatacataatctgaagctggatagaacttatactggcttgcagactcttggagcagagacggtagtggatgttgaactccatcgccattctctcggagaagactgtatctatcctcagtcctcggagtctgacatctctgatgcccctccatctttgcctttgaccattccagccccagtgaaagcttcttcaccaataaagcagtcacatgagccagtacccgatacctctgtggagaaaggattcccagctagcactgaagctgaacgacacactccgttttatgctttgccatcttcattggaaagaacacccaccaaaatgactacatcccagaaagttaccttttgttcccatggcaattcagctttccagccaatagcatcaagctgcaaaattgttccacaaagtcaggttcctaatcctgagtcacctggaaaatccttccagcccatcaccatgagctgcaagattgtgtcaggttccccaatatcaactccaagcccatcaccattgcctcgaaccccgacttccactccagtccacgtgaagcaaggcactgccggctctgttattaataatccttatgttatcatggacaagcagccggggcaggtgattggagccaccactcccagtacaggaagtcctacaaacaagatctccacggcttctcaggtctcccaaggaacaggttcccctgttcctaaaattcatggaagtagttttgtaacatctactgtcaagcaggaggattctttgtttgcatctatgccacctctttgcccaattgggagtcaccctaaggttcaaagccccaaacctataacaggaggacttggagctttcacaaaagtgatcatcaaacaggaacctggtgaagcccctcacgtgcccgcaacaggagctgccagccagtcaccactcccgcagtatgtgactgtgaaagggggtcacatgatagctgtgtcccctcaaaaacaggtcataactcctggagaagggattgcccagtcagcaaaggttcagccctccaaggttgtcggggtaccagttgggtctgctttaccttcaacagtgaagcaggctgtggcgatcagtggtggccagatcctggtagccaaggccagctcttctgtctccaaagcagttgggccaaagcaagttgtaacccaaggagttgccaaagcaattgtgagtggaggtggaggaaccattgttgctcagccagtgcagaccttaaccaaggcccaggttactgccgctggtcctcagaagagtggatcccagggttcagtaatggcaacgttgcagctaccagccactaatttggccaacttggcaaatttgcctcctggcactaaactctacctaactacaaacagcaagaacccttcaggaaaaggaaaactgctgctgatccctcaaggagccatcctgcgagctacgaacaatgctaatctccagtctggctcagctgccagtggtgggagtggtgccggaggaggaggaggaggaggaggaggaggcggcagtggcagcggtggaggcggcagcacaggaggaggaggaggaacagcaggaggaggaactcaaagtactgctggccctggagggatatctcagcacctgacttacacatcttacatcctcaagcaaactccccagggcacatttttagttggccagccatcaccccagacttctggaaaacaactcaccactgggtcagtggtccaaggaacactgggagtcagcacatcttctgcacaaggacaacaaacgctaaaagtcatctctggacagaaaaccacattgtttacacaggcagcccatggaggacaggcatctctaatgaaaatatccgatagcaccttgaagactgtgccagccacctcacagctctcgaagcctggaaccacaatgctgagagtagcaggaggggttatcacaactgccacttcccctgccgtggccctctcagcaaacggtcctgcacaacagtctgaaggaatggctcccgtgtcttcatctacggtcagttctgtaacgaaaacttctgggcagcagcaagtgtgtgtgagccaggccaccgtgggaacctgcaaggctgccacccccaccgtcgtcagcgccacgtccctcgtgcctacaccaaaccccatctctgggaaagccacagtatccggactgttaaagattcactccagtcagtccagtccgcagcaggccgtcctgacgattcccagccagctcaaaccactcagcgtaaacacatctggaggggtgcagacgatcctgatgcctgtgaataaagtggttcagtcattttctaccagcaagccacctgccattctgcctgtagctgccccaactccagttgtccccagctctgctccagcagctgttgcaaaagtgaagactgaaccagaaacacctggaccgagttgcctctctcaggagggtcagacagcagtgaaaacagaagaaagttctgagctgggaaactatgtcattaagatagaccatttagaaactatccagcaactcctaactgcagtagtaaagaagattccattaatcactgcaaaaagtgaagatgccagctgcttttctgcaaagtctgtggagcagtactatggctggaacattggaaaaaggagagccgctgagtggcaaagagcaatgacaatgcgaaaagtcttacaagaaatcctggagaagaatccgagatttcaccacctgactcccctcaaaaccaagcacatcgctcactggtgccgctgtcatggctacaccccaccggaccctgagagcctgaggaatgacggggactccatcgaggacgtgctgacccagatcgacagcgagcccgagtgcccatcatcattctcctctgctgacaacctctgccgcaaactggaggacctgcaacagttccagaaaagggaacccgagaatgaggaggaggtggacatcctcagcctctccgagccagtgaagataaacatcaagaaggagcaggaagagaaacaagaggaagtcaagttctacctgccaccaaccccagggtctgaatttattggggatgtcacacagaagattgggatcaccctgcagcccgtggcactccacaggaacgtgtatgcgtccgtggtggaggacatgatcctgaaggctacagaacagctggtgaatgatatcctgagacaggctttggcagttggataccagacagcttctcacaacaggattcccaaagaaattacagtgagtaatattcaccaggccatttgcaacattccttttctggacttcctcacaaacaaacacatgggaatattgaatgaggaccagtgagcggagtgaggtgccctggagaagcaggctttgaaggcacagcgaagctgtaactgaggaccctgctgctcgggaaggaggtggtttccagtgtgactcggcatgtcatggctacccaacctttgccgctgcctgttcccacgtgtcaccagcacgctgcactccagatgaaatcctcctaggacaggagtttgtttcctgagtgtggagtgaggctgtcagtggatccgtgctttgtcggccagcgtttctgcagtctttgtaaaggccccacgagagcgggccaggccgtgtgcctcaggcccttctccctgggtgtgcttaagggggctccttgggcccgcctccccaggaggtagaaaatgagtggcaggctagagatttcacccattttgtgggctggagttaccagtagctccagcagttaccctgaagagagattgggcttcagccttcagcaggtggttctctcccatgcctggccttggtgtggaggggctgtactctgagcccaagtgagtcagctataggaagaggccatacctagagccaagaaccatgaaggcctgagagacggcagactgagcagaattccttttttgagcacgagagcattactagaaccattgtcaaagcagtggcaagggacggagaggtcccaacaggagtcaggaagaggtttgattataaccaagaaaactcactatgctaggaatagactgtgtgcaccagtcccagacacttggcagaagtgtagcagcgttacacatgtgtgcgaagcagatcgcaggttccacgccatctgcatggcctgcaggagcttctgctgctgaccccatgctgagtggccagtggggagcggcgcccggcaggctcttctggggtcgtctgtcctatccgtggattgtatatactcttctctgttaaggagtttttcccaagaagaaaagtatttaaaagaaataccagtgagtgccttaaagttggagaagtaactgcccatgcccagaaataaggatgccagtgcccagaagcagtgagattagtctgtgtccacaagcagaggccccctcgatgggagggagtggcaggcaggagaaggtggcgctgccaggtgcccgggtctattggaggcgccccatctcagacttcctaacacagcctgtgtggaaggcagaacaaagaatgcatgcccagtcagaaatctgttctattctgctccaggaaaatcggaaacctgtgagtcagagtcagagaaacttacccaagcaacgtaattcctgttttcatgggtcctgtagatgtttgagtcaggaaggtaaggcggggagtgactgaataaactctgccttttaaattgagcatctgggccgggcatggtggctcacgcctgtaatcccagcactctgggaggtcgaggtgggtgggtcacctgaggttgggagttcgagaccagcccgaccaacatggtgaaaccccgtctctactaaaaatacagaaaattagctgggcatggtggtgtgtgcctgtaattccagctactcgggaggctgaggcaggaagaatcacttgaacccaggaggcggaggttgcagtgtgccaagatcataccactgcactccagccctggtgacagaggagaccccgtctcaaaaattgattgatcaattcagcatctgagggctgcaagtacagaaggaatctattctcagcagggcatagggcacgcactggcttaacagtttagtatataaggctcaaatagtctatacctgaactgctataagcaaggtcgatagggaagtggatagattgcttcagcaaagtgaactgtgagatctccaggacagagggagaaagatctgatccaaatgagaacagattggttattgcaggtatcacagcctaaagaaattatctttttgcaaaagaaatattaaatgatttagcagtctccacgtgtgttaatgtttcaaacgtgtatcataatgtgtataattgtgtaacaaaattgtctacaataaatcttttggtatttgtgg

SEQ ID NO: 200579 - DNA, 1024 bp, Homo sapiens
  Payload ID: 19587
  Gene Name: YEATS domain containing 2
  ENST ID: ENST00000432781
  CDS Start-End: 1-658
tggcagcggtggaggcggcagcacaggaggaggaggaggaacagcaggaggaggaactcaaagtactgctggccctggagggatatctcagcacctgacttacacatcttacatcctcaagcaaactccccagggcacatttttagttggccagccatcaccccagacttctggaaaacaactcaccactgggtcagtggtccaaggaacactgggagtcagcacatcttctgcacaaggacaacaaacgctaaaagtcatctctggacagaaaaccacattgtttacacaggcagcccatggaggacaggcatctctaatgaaaatatccgatagcaccttgaagactgtgccagccacctcacagctctcgaagcctggaaccacaatgctgagagtagcaggaggggttatcacaactgccacttcccctgccgtggccctctcagcaaacggtcctgcacaacagtctgaaggaatggctcccgtgtcttcatctacggtcagttctgtaacgaaaacttctgggcagcagcaagtgtgtgtgagccaggccaccgtgggaacctgcaaggctgccacccccaccgtcgtcagcgccacgtccctcgtgcctacaccaaaccccatctctgggaaagccacagtatccgattgataccagccagcatacggctggcactggtctaccggaaaaactgaatatcaccgagatacacacacacactcacgcatgcagacaacaccccttactgcctttggataagaggctgtggatgttgttgttgtcattactattattacttcattcatatgtagctccacaccaggccccttgtgtcttgtttggatagagaacaaaaaattaaggctgattatatttttctcttgatttctacctccctgttaaaattgaccaacttctagtatagggagtacttgttctctactaactgttttatttgaggccctgtgttggatactggagtagaaattgtagaaataaaaggaattattataataa

SEQ ID NO: 200580 - DNA, 1434 bp, Homo sapiens
  Payload ID: 19588
  Gene Name: YEATS domain containing 4
  Uniprot ID: O95619
  ENST ID: ENST00000247843
  CDS Start-End: 271-954
cgcgagcccgttgcgcctgcgcgcggtgcggccgtcgcccctcttttcgcggcgttctccacctgcgcgggcctgaatggccttcaggagcacagtcggcctgaggagttgacggttactcaccgccgtgagcccaagtaactcgccctccttcggctagaaaccctccgcctgggcccgcgcgacaggagcgcggtctctgaggggagcggcgaccccgccagccccggtctctttccctggcggcggcggcttcttccgtgggacaatatgttcaagagaatggccgaatttgggcctgactccggcgggagagtaaagggtgttactatcgttaaaccaatagtttacggtaatgttgctcggtattttggaaagaaaagagaagaagatgggcacactcatcagtggacagtatatgtgaaaccatatagaaatgaggatatgtcagcatatgtgaagaaaatccagtttaaattacatgaaagctatggcaatcctttaagagttgttactaaacctccatatgaaattactgaaacaggatggggtgaattcgaaataatcatcaaaatatttttcattgaccctaatgaaagacctgtaaccctgtatcatttgctaaagctgtttcaatcagacaccaatgcaatgctggggaaaaagacagtggtttcagagttctatgatgaaatgatatttcaagacccaacagcaatgatgcaacaattattgacaacatctcgtcagctaacattaggagcctataagcatgaaacagaatttgcagagcttgaagtgaaaaccagagaaaaattagaagctgctaagaaaaaaacaagctttgagattgcagagcttaaggagagattaaaagcaagtcgtgaaactataaattgtttaaaaaatgaaatcagaaaacttgaagaagatgaccaagcaaaagacatataaacagttctcatgagaacttggtagtaagctaaactgaaaataaggtgggcttcactggagaaatggacttactgcaaatgctgtgatgtttcttagaggaacttcatatacagctgttgaccatgaatttcttagcaataggaatttgtactatttaagcaatctttaatggaaaatatgtgtgtaagaatggatgctatataggtattttaccaacccattttaagaaaattctatgatattaagcacagtttttaaaaatgtttattgtagtatatgtatagcttattacccttttgacaggcatcaaaatttcattataaagtattacttgtacaaattttgtacttctttagtggctagaattagtgaagaaacttaatgtgtatatttaatttcttcaagttcttacctgcccccatccttttttgtatatgatgtgtccagtaagtattcaataaatgtagtttacagatccta

SEQ ID NO: 200581 - DNA, 827 bp, Homo sapiens
  Payload ID: 19588
  Gene Name: YEATS domain containing 4
  ENST ID: ENST00000552955
  CDS Start-End: 195-827
atggccttcaggagcacagtcggcctgaggagttgacggttactcaccgccgtgagcccaagtaactcgccctccttcggctagaaaccctccgcctgggcccgcgcgacaggagcgcggtctctgaggggagcggcgaccccgccagccccggtctctttccctggcggcggcggcttcttccgtgggacaatatgttcaagagaatggccgaatttgggcctgactccggcgggagagtaaagggtgttactatcgttaaaccaatagtttacggtaatgttgctcggtattttggaaagaaaagagaagaagatgggcacactcatcagtggacagtatatgtgaaaccatatagaaatgaggcaaaatggctcattcctgtaatctcagcactatgggaggcccaagcgggaggatcgcttgagcccaggagtttgagaccagactggcaacatagtaagactccatctctacagaaaaaaaaggatatgtcagcatatgtgaagaaaatccagtttaaattacatgaaagctatggcaatcctttaagagttgttactaaacctccatatgaaattactgaaacaggatggggtgaattcgaaataatcatcaaaatatttttcattgaccctaatgaaagacctgtaaccctgtatcatttgctaaagctgtttcaatcagacaccaatgcaatgctggggaaaaagacagtggtttcagagttctatgatgaaatgatatttcaagacccaacagcaatgatgcaacaattattgacaacatctcgtcagctaacattaggagcctataagcatgaaaca

SEQ ID NO: 200582 - DNA, 1100 bp, Homo sapiens
  Payload ID: 19588
  Gene Name: YEATS domain containing 4
  ENST ID: ENST00000548020
  CDS Start-End: 264-785
ccgttgcgcctgcgcgcggtgcggccgtcgcccctcttttcgcggcgttctccacctgcgcgggcctgaatggccttcaggagcacagtcggcctgaggagttgacggttactcaccgccgtgagcccaagtaactcgccctccttcggctagaaaccctccgcctgggcccgcgcgacaggagcgcggtctctgaggggagcggcgaccccgccagccccggtctctttccctggcggcggcggcttcttccgtgggacaatatgttcaagagaatggccgaatttgggcctgactccggcgggagagtaaagggtgttactatcgttaaaccaatagtttacggtaatgttgctcggtattttggaaagaaaagagaagaagatgggcacactcatcagtggacagtatatgtgaaaccatatagaaatgaggtaaccctgtatcatttgctaaagctgtttcaatcagacaccaatgcaatgctggggaaaaagacagtggtttcagagttctatgatgaaatgatatttcaagacccaacagcaatgatgcaacaattattgacaacatctcgtcagctaacattaggagcctataagcatgaaacagaatttgcagagcttgaagtgaaaaccagagaaaaattagaagctgctaagaaaaaaacaagctttgagattgcagagcttaaggagagattaaaagcaagtcgtgaaactataaattgtttaaaaaatgaaatcagaaaacttgaagaagatgaccaagcaaaagacatataaacagttctcatgagaacttggtagtaagctaaactgaaaataaggtgggcttcactggagaaatggacttactgcaaatgctgtgatgtttcttagaggaacttcatatacagctgttgaccatgaatttcttagcaataggaatttgtactatttaagcaatctttaatggaaaatatgtgtgtaagaatggatgctatataggtattttaccaacccattttaagaaaattctatgatattaagcacagtttttaaaaatgtttattgtagtatatgtatagcttattacccttttgacaggcatcaaaattt

SEQ ID NO: 200583 - DNA, 884 bp, Homo sapiens
  Payload ID: 19588
  Gene Name: YEATS domain containing 4
  ENST ID: ENST00000549685
  CDS Start-End: 545-884
tgcgcgcggtgcggccgtcgcccctcttttcgcggcgttctccacctgcgcgggcctgaatggccttcaggagcacagtcggcctgaggagttgacggttactcaccgccgtgagcccaagtaactcgccctccttcggctagaaaccctccgcctgggcccgcgcgacaggagcgcggtctctgaggggagcggcgaccccgccagccccggtctctttccctggcggcggcggcttcttccgtgggacaatatgttcaagagaatggccgaatttgggcctgactccggcgggagagtaaaggctggagtgcactagcgcaatctcggctctccgcaacctccacctcctggattcaagcgattctcctgcctccaagcgattctcctgcctcagcctcctgaatagctggaattacagggtgttactatcgttaaaccaatagtttacggtaatgttgctcggtattttggaaagaaaagagaagaagatgggcacactcatcagtggacagtatatgtgaaaccatatagaaatgaggatatgtcagcatatgtgaagaaaatccagtttaaattacatgaaagctatggcaatcctttaagagttgttactaaacctccatatgaaattactgaaacaggatggggtgaattcgaaataatcatcaaaatatttttcattgaccctaatgaaagacctgtaaccctgtatcatttgctaaagctgtttcaatcagacaccaatgcaatgctggggaaaaagacagtggtttcagagttctatgatgaaatgatatttcaagacccaacagcaatgatgcaacaattattgacaacatctcgtcagctaacattaggagcctataagcatgaaacagaat

SEQ ID NO: 200584 - DNA, 4441 bp, Homo sapiens
  Payload ID: 19589
  Gene Name: YES proto-oncogene 1, Src family tyrosine kinase
  Uniprot ID: P07947
  ENST ID: ENST00000314574
  CDS Start-End: 134-1765
ttgctgccgccgggcgccccgggacgaggaggtggaggagggagagggcccgcgggcctcgcctccgccctccgccacctcgagctgcggtagcagcgactcatgagagcgcggccggaggacagatttgataatgggctgcattaaaagtaaagaaaacaaaagtccagccattaaatacagacctgaaaatactccagagcctgtcagtacaagtgtgagccattatggagcagaacccactacagtgtcaccatgtccgtcatcttcagcaaagggaacagcagttaatttcagcagtctttccatgacaccatttggaggatcctcaggggtaacgccttttggaggtgcatcttcctcattttcagtggtgccaagttcatatcctgctggtttaacaggtggtgttactatatttgtggccttatatgattatgaagctagaactacagaagacctttcatttaagaagggtgaaagatttcaaataattaacaatacggaaggagattggtgggaagcaagatcaatcgctacaggaaagaatggttatatcccgagcaattatgtagcgcctgcagattccattcaggcagaagaatggtattttggcaaaatggggagaaaagatgctgaaagattacttttgaatcctggaaatcaacgaggtattttcttagtaagagagagtgaaacaactaaaggtgcttattccctttctattcgtgattgggatgagataaggggtgacaatgtgaaacactacaaaattaggaaacttgacaatggtggatactatatcacaaccagagcacaatttgatactctgcagaaattggtgaaacactacacagaacatgctgatggtttatgccacaagttgacaactgtgtgtccaactgtgaaacctcagactcaaggtctagcaaaagatgcttgggaaatccctcgagaatctttgcgactagaggttaaactaggacaaggatgtttcggcgaagtgtggatgggaacatggaatggaaccacgaaagtagcaatcaaaacactaaaaccaggtacaatgatgccagaagctttccttcaagaagctcagataatgaaaaaattaagacatgataaacttgttccactatatgctgttgtttctgaagaaccaatttacattgtcactgaatttatgtcaaaaggaagcttattagatttccttaaggaaggagatggaaagtatttgaagcttccacagctggttgatatggctgctcagattgctgatggtatggcatatattgaaagaatgaactatattcaccgagatcttcgggctgctaatattcttgtaggagaaaatcttgtgtgcaaaatagcagactttggtttagcaaggttaattgaagacaatgaatacacagcaagacaaggtgcaaaatttccaatcaaatggacagctcctgaagctgcactgtatggtcggtttacaataaagtctgatgtctggtcatttggaattctgcaaacagaactagtaacaaagggccgagtgccatatccaggtatggtgaaccgtgaagtattagaacaagtggagcgaggatacaggatgccgtgccctcagggctgtccagaatccctccatgaattgatgaatctgtgttggaagaaggaccctgatgaaagaccaacatttgaatatattcagtccttcttggaagactacttcactgctacagagccacagtaccagccaggagaaaatttataattcaagtagcctattttatatgcacaaatctgccaaaatataaagaacttgtgtagattttctacaggaatcaaaagaagaaaatcttctttactctgcatgtttttaatggtaaactggaatcccagatatggttgcacaaaaccacttttttttccccaagtattaaactctaatgtaccaatgatgaatttatcagcgtatttcagggtccaaacaaaatagagctaagatactgatgacagtgtgggtgacagcatggtaatgaaggacagtgaggctcctgcttatttataaatcatttcctttctttttttccccaaagtcagaattgctcaaagaaaattatttattgttacagataaaacttgagagataaaaagctataccataataaaatctaaaattaaggaatatcatgggaccaaataattccattccagttttttaaagtttcttgcatttattattctcaaaagttttttctaagttaaacagtcagtatgcaatcttaatatatgctttcttttgcatggacatgggccaggtttttcaaaaggaatataaacaggatctcaaacttgattaaatgttagaccacagaagtggaatttgaaagtataatgcagtacattaatattcatgttcatggaactgaaagaataagaactttttcacttcagtccttttctgaagagtttgacttagaataatgaaggtaactagaaagtgagttaatcttgtatgaggttgcattgattttttaaggcaatatataattgaaactactgtccaatcaaaggggaaatgttttgatctttagatagcatgcaaagtaagacccagcattttaaaagccctttttaaaaactagacttcgtactgtgagtattgcttatatgtccttatggggatgggtgccacaaatagaaaatatgaccagatcagggacttgaatgcacttttgctcatggtgaatatagatgaacagagaggaaaatgtatttaaaagaaatacgagaaaagaaagtgaaagttttacaagttagagggatggaaggtaatgtttaatgttgatgtcatggagtgacagaatggctttgctggcactcagagctcctcacttagctatattctgagactttgaagagttataaagtataactataaaactaatttttcttacacactaaatgggtatttgttcaaaataatgaagttatggcttcacattcattgcagtgggatatggtttttatgtaaaacatttttagaactccagttttcaaatcatgtttgaatctacattcacttttttttgttttcttttttgagacggagtctcgctctgtcgcccaggctggagtgcagtggcgcgatctcggctcactgcaagctctgcctcccaggttcacaccattctcctgcctcagcctcccgagtagctgggactacaggtgcccaccaccacgcctggctagttttttgtatttttagtagagacgcagtttcaccgtgttagccaggatagtctcgatctcctgaccttgtgatctgcccgcctcggcctcccaaagtgctgggattacaggcgtgagccaccgcgcccagcctacattcacttctaaagtctatgtaatggtggtcattttttcccttttagaatacattaaatggttgatttggggaggaaaacttattctgaatattaacggtggtgaaaaggggacagtttttaccctaaagtgcaaaagtgaaacatacaaaataagactaatttttaagagtaactcagtaatttcaaaatacagatttgaatagcagcattagtggtttgagtgtctagcaaaggaaaaattgatgaataaaatgaaggtctggtgtatatgttttaaaatactctcatatagtcacactttaaattaagccttatattaggcccctctattttcaggatataattcttaactatcattatttacctgattttaatcatcagattcgaaattctgtgccatggcatatatgttcaaattcaaaccatttttaaaatgtgaagatggacttcatgcaagttggcagtggttctggtactaaaaattgtggttgttttttctgtttacgtaacctgcttagtattgacactctctaccaagagggtcttcctaagaagagtgctgtcattatttcctcttatcaacaacttgtgacatgagattttttaagggctttatgtgaactatgatattgtaatttttctaagcatattcaaaagggtgacaaaattacgtttatgtactaaatctaatcaggaaagtaaggcaggaaaagttgatggtattcattaggttttaactgaatggagcagttccttatataataacaattgtatagtagggataaaacactaacttaatgtgtattcattttaaattgttctgtatttttaaattgccaagaaaaacaactttgtaaatttggagatattttccaacagcttttcgtcttcagtgtcttaatgtggaagttaacccttaccaaaaaaggaagttggcaaaaacagccttctagcacacttttttaaatgaataatggtagcctaaacttaatatttttataaagtattgtaatattgttttgtggataattgaaataaaaagttctcattgaatgcac

SEQ ID NO: 200585 - DNA, 4639 bp, Homo sapiens
  Payload ID: 19589
  Gene Name: YES proto-oncogene 1, Src family tyrosine kinase
  Uniprot ID: P07947
  ENST ID: ENST00000584307
  CDS Start-End: 172-1803
ggtcgggagaagtgacacggaccggtcgcctatcctgaccacagcaaagcggcccggagcccgcggaggggacctgacgggggcgtaggcgccggaaggctgggggccccggagccgggccggcgtggcccgagttccggtgagcggacggcggcgcgcgcagatttgataatgggctgcattaaaagtaaagaaaacaaaagtccagccattaaatacagacctgaaaatactccagagcctgtcagtacaagtgtgagccattatggagcagaacccactacagtgtcaccatgtccgtcatcttcagcaaagggaacagcagttaatttcagcagtctttccatgacaccatttggaggatcctcaggggtaacgccttttggaggtgcatcttcctcattttcagtggtgccaagttcatatcctgctggtttaacaggtggtgttactatatttgtggccttatatgattatgaagctagaactacagaagacctttcatttaagaagggtgaaagatttcaaataattaacaatacggaaggagattggtgggaagcaagatcaatcgctacaggaaagaatggttatatcccgagcaattatgtagcgcctgcagattccattcaggcagaagaatggtattttggcaaaatggggagaaaagatgctgaaagattacttttgaatcctggaaatcaacgaggtattttcttagtaagagagagtgaaacaactaaaggtgcttattccctttctattcgtgattgggatgagataaggggtgacaatgtgaaacactacaaaattaggaaacttgacaatggtggatactatatcacaaccagagcacaatttgatactctgcagaaattggtgaaacactacacagaacatgctgatggtttatgccacaagttgacaactgtgtgtccaactgtgaaacctcagactcaaggtctagcaaaagatgcttgggaaatccctcgagaatctttgcgactagaggttaaactaggacaaggatgtttcggcgaagtgtggatgggaacatggaatggaaccacgaaagtagcaatcaaaacactaaaaccaggtacaatgatgccagaagctttccttcaagaagctcagataatgaaaaaattaagacatgataaacttgttccactatatgctgttgtttctgaagaaccaatttacattgtcactgaatttatgtcaaaaggaagcttattagatttccttaaggaaggagatggaaagtatttgaagcttccacagctggttgatatggctgctcagattgctgatggtatggcatatattgaaagaatgaactatattcaccgagatcttcgggctgctaatattcttgtaggagaaaatcttgtgtgcaaaatagcagactttggtttagcaaggttaattgaagacaatgaatacacagcaagacaaggtgcaaaatttccaatcaaatggacagctcctgaagctgcactgtatggtcggtttacaataaagtctgatgtctggtcatttggaattctgcaaacagaactagtaacaaagggccgagtgccatatccaggtatggtgaaccgtgaagtattagaacaagtggagcgaggatacaggatgccgtgccctcagggctgtccagaatccctccatgaattgatgaatctgtgttggaagaaggaccctgatgaaagaccaacatttgaatatattcagtccttcttggaagactacttcactgctacagagccacagtaccagccaggagaaaatttataattcaagtagcctattttatatgcacaaatctgccaaaatataaagaacttgtgtagattttctacaggaatcaaaagaagaaaatcttctttactctgcatgtttttaatggtaaactggaatcccagatatggttgcacaaaaccacttttttttccccaagtattaaactctaatgtaccaatgatgaatttatcagcgtatttcagggtccaaacaaaatagagctaagatactgatgacagtgtgggtgacagcatggtaatgaaggacagtgaggctcctgcttatttataaatcatttcctttctttttttccccaaagtcagaattgctcaaagaaaattatttattgttacagataaaacttgagagataaaaagctataccataataaaatctaaaattaaggaatatcatgggaccaaataattccattccagttttttaaagtttcttgcatttattattctcaaaagttttttctaagttaaacagtcagtatgcaatcttaatatatgctttcttttgcatggacatgggccaggtttttcaaaaggaatataaacaggatctcaaacttgattaaatgttagaccacagaagtggaatttgaaagtataatgcagtacattaatattcatgttcatggaactgaaagaataagaactttttcacttcagtccttttctgaagagtttgacttagaataatgaaggtaactagaaagtgagttaatcttgtatgaggttgcattgattttttaaggcaatatataattgaaactactgtccaatcaaaggggaaatgttttgatctttagatagcatgcaaagtaagacccagcattttaaaagccctttttaaaaactagacttcgtactgtgagtattgcttatatgtccttatggggatgggtgccacaaatagaaaatatgaccagatcagggacttgaatgcacttttgctcatggtgaatatagatgaacagagaggaaaatgtatttaaaagaaatacgagaaaagaaagtgaaagttttacaagttagagggatggaaggtaatgtttaatgttgatgtcatggagtgacagaatggctttgctggcactcagagctcctcacttagctatattctgagactttgaagagttataaagtataactataaaactaatttttcttacacactaaatgggtatttgttcaaaataatgaagttatggcttcacattcattgcagtgggatatggtttttatgtaaaacatttttagaactccagttttcaaatcatgtttgaatctacattcacttttttttgttttcttttttgagacggagtctcgctctgtcgcccaggctggagtgcagtggcgcgatctcggctcactgcaagctctgcctcccaggttcacaccattctcctgcctcagcctcccgagtagctgggactacaggtgcccaccaccacgcctggctagttttttgtatttttagtagagacgcagtttcaccgtgttagccaggatagtctcgatctcctgaccttgtgatctgcccgcctcggcctcccaaagtgctgggattacaggcgtgagccaccgcgcccagcctacattcacttctaaagtctatgtaatggtggtcattttttcccttttagaatacattaaatggttgatttggggaggaaaacttattctgaatattaacggtggtgaaaaggggacagtttttaccctaaagtgcaaaagtgaaacatacaaaataagactaatttttaagagtaactcagtaatttcaaaatacagatttgaatagcagcattagtggtttgagtgtctagcaaaggaaaaattgatgaataaaatgaaggtctggtgtatatgttttaaaatactctcatatagtcacactttaaattaagccttatattaggcccctctattttcaggatataattcttaactatcattatttacctgattttaatcatcagattcgaaattctgtgccatggcatatatgttcaaattcaaaccatttttaaaatgtgaagatggacttcatgcaagttggcagtggttctggtactaaaaattgtggttgttttttctgtttacgtaacctgcttagtattgacactctctaccaagagggtcttcctaagaagagtgctgtcattatttcctcttatcaacaacttgtgacatgagattttttaagggctttatgtgaactatgatattgtaatttttctaagcatattcaaaagggtgacaaaattacgtttatgtactaaatctaatcaggaaagtaaggcaggaaaagttgatggtattcattaggttttaactgaatggagcagttccttatataataacaattgtatagtagggataaaacactaacttaatgtgtattcattttaaattgttctgtatttttaaattgccaagaaaaacaactttgtaaatttggagatattttccaacagcttttcgtcttcagtgtcttaatgtggaagttaacccttaccaaaaaaggaagttggcaaaaacagccttctagcacacttttttaaatgaataatggtagcctaaacttaatatttttataaagtattgtaatattgttttgtggataattgaaataaaaagttctcattgaatgcacctattaatcgttttagttgctattcatattctcattcgttttttaaaaactgatatattctgaatttattcttccattgagaaaaaaatgttcagttacttgtaactactgagcagaatttaatcaatcctttattaaattcagaacattattgaactca

SEQ ID NO: 200586 - DNA, 4554 bp, Homo sapiens
  Payload ID: 19589
  Gene Name: YES proto-oncogene 1, Src family tyrosine kinase
  ENST ID: ENST00000577961
  CDS Start-End: 72-1718
gctgtggaagagagccaccattatcaaaatgatcacagttgcaaacattcgtgcttcaaataccagccactatgttagatttgataatgggctgcattaaaagtaaagaaaacaaaagtccagccattaaatacagacctgaaaatactccagagcctgtcagtacaagtgtgagccattatggagcagaacccactacagtgtcaccatgtccgtcatcttcagcaaagggaacagcagttaatttcagcagtctttccatgacaccatttggaggatcctcaggggtaacgccttttggaggtgcatcttcctcattttcagtggtgccaagttcatatcctgctggtttaacaggtggtgttactatatttgtggccttatatgattatgaagctagaactacagaagacctttcatttaagaagggtgaaagatttcaaataattaacaatacggaaggagattggtgggaagcaagatcaatcgctacaggaaagaatggttatatcccgagcaattatgtagcgcctgcagattccattcaggcagaagaatggtattttggcaaaatggggagaaaagatgctgaaagattacttttgaatcctggaaatcaacgaggtattttcttagtaagagagagtgaaacaactaaaggtgcttattccctttctattcgtgattgggatgagataaggggtgacaatgtgaaacactacaaaattaggaaacttgacaatggtggatactatatcacaaccagagcacaatttgatactctgcagaaattggtgaaacactacacagaacatgctgatggtttatgccacaagttgacaactgtgtgtccaactgtgaaacctcagactcaaggtctagcaaaagatgcttgggaaatccctcgagaatctttgcgactagaggttaaactaggacaaggatgtttcggcgaagtgtggatgggaacatggaatggaaccacgaaagtagcaatcaaaacactaaaaccaggtacaatgatgccagaagctttccttcaagaagctcagataatgaaaaaattaagacatgataaacttgttccactatatgctgttgtttctgaagaaccaatttacattgtcactgaatttatgtcaaaaggaagcttattagatttccttaaggaaggagatggaaagtatttgaagcttccacagctggttgatatggctgctcagattgctgatggtatggcatatattgaaagaatgaactatattcaccgagatcttcgggctgctaatattcttgtaggagaaaatcttgtgtgcaaaatagcagactttggtttagcaaggttaattgaagacaatgaatacacagcaagacaaggtgcaaaatttccaatcaaatggacagctcctgaagctgcactgtatggtcggtttacaataaagtctgatgtctggtcatttggaattctgcaaacagaactagtaacaaagggccgagtgccatatccaggtatggtgaaccgtgaagtattagaacaagtggagcgaggatacaggatgccgtgccctcagggctgtccagaatccctccatgaattgatgaatctgtgttggaagaaggaccctgatgaaagaccaacatttgaatatattcagtccttcttggaagactacttcactgctacagagccacagtaccagccaggagaaaatttataattcaagtagcctattttatatgcacaaatctgccaaaatataaagaacttgtgtagattttctacaggaatcaaaagaagaaaatcttctttactctgcatgtttttaatggtaaactggaatcccagatatggttgcacaaaaccacttttttttccccaagtattaaactctaatgtaccaatgatgaatttatcagcgtatttcagggtccaaacaaaatagagctaagatactgatgacagtgtgggtgacagcatggtaatgaaggacagtgaggctcctgcttatttataaatcatttcctttctttttttccccaaagtcagaattgctcaaagaaaattatttattgttacagataaaacttgagagataaaaagctataccataataaaatctaaaattaaggaatatcatgggaccaaataattccattccagttttttaaagtttcttgcatttattattctcaaaagttttttctaagttaaacagtcagtatgcaatcttaatatatgctttcttttgcatggacatgggccaggtttttcaaaaggaatataaacaggatctcaaacttgattaaatgttagaccacagaagtggaatttgaaagtataatgcagtacattaatattcatgttcatggaactgaaagaataagaactttttcacttcagtccttttctgaagagtttgacttagaataatgaaggtaactagaaagtgagttaatcttgtatgaggttgcattgattttttaaggcaatatataattgaaactactgtccaatcaaaggggaaatgttttgatctttagatagcatgcaaagtaagacccagcattttaaaagccctttttaaaaactagacttcgtactgtgagtattgcttatatgtccttatggggatgggtgccacaaatagaaaatatgaccagatcagggacttgaatgcacttttgctcatggtgaatatagatgaacagagaggaaaatgtatttaaaagaaatacgagaaaagaaagtgaaagttttacaagttagagggatggaaggtaatgtttaatgttgatgtcatggagtgacagaatggctttgctggcactcagagctcctcacttagctatattctgagactttgaagagttataaagtataactataaaactaatttttcttacacactaaatgggtatttgttcaaaataatgaagttatggcttcacattcattgcagtgggatatggtttttatgtaaaacatttttagaactccagttttcaaatcatgtttgaatctacattcacttttttttgttttcttttttgagacggagtctcgctctgtcgcccaggctggagtgcagtggcgcgatctcggctcactgcaagctctgcctcccaggttcacaccattctcctgcctcagcctcccgagtagctgggactacaggtgcccaccaccacgcctggctagttttttgtatttttagtagagacgcagtttcaccgtgttagccaggatagtctcgatctcctgaccttgtgatctgcccgcctcggcctcccaaagtgctgggattacaggcgtgagccaccgcgcccagcctacattcacttctaaagtctatgtaatggtggtcattttttcccttttagaatacattaaatggttgatttggggaggaaaacttattctgaatattaacggtggtgaaaaggggacagtttttaccctaaagtgcaaaagtgaaacatacaaaataagactaatttttaagagtaactcagtaatttcaaaatacagatttgaatagcagcattagtggtttgagtgtctagcaaaggaaaaattgatgaataaaatgaaggtctggtgtatatgttttaaaatactctcatatagtcacactttaaattaagccttatattaggcccctctattttcaggatataattcttaactatcattatttacctgattttaatcatcagattcgaaattctgtgccatggcatatatgttcaaattcaaaccatttttaaaatgtgaagatggacttcatgcaagttggcagtggttctggtactaaaaattgtggttgttttttctgtttacgtaacctgcttagtattgacactctctaccaagagggtcttcctaagaagagtgctgtcattatttcctcttatcaacaacttgtgacatgagattttttaagggctttatgtgaactatgatattgtaatttttctaagcatattcaaaagggtgacaaaattacgtttatgtactaaatctaatcaggaaagtaaggcaggaaaagttgatggtattcattaggttttaactgaatggagcagttccttatataataacaattgtatagtagggataaaacactaacttaatgtgtattcattttaaattgttctgtatttttaaattgccaagaaaaacaactttgtaaatttggagatattttccaacagcttttcgtcttcagtgtcttaatgtggaagttaacccttaccaaaaaaggaagttggcaaaaacagccttctagcacacttttttaaatgaataatggtagcctaaacttaatatttttataaagtattgtaatattgttttgtggataattgaaataaaaagttctcattgaatgcacctattaatcgttttagttgctattcatattctcattcgttttttaaaaactgatatattctgaatttattcttccattgagaaaaaaatgttcagttacttgtaactactgagcagaatttaatcaatcctttattaaattcagaacattattgaactca

SEQ ID NO: 200587 - DNA, 5386 bp, Homo sapiens
  Payload ID: 19590
  Gene Name: Yes-associated protein 1
  Uniprot ID: P46937
  ENST ID: ENST00000282441
  CDS Start-End: 389-1903
gccgccgccagggaaaagaaagggaggaaggaaggaacaagaaaaggaaataaagagaaaggggaggcggggaaaggcaacgagctgtccggcctccgtcaagggagttggagggaaaaagttctcaggcgccgcaggtccgagtgcctcgcagcccctcccgaggcgcagccgccagaccagtggagccggggcgcagggcgggggcggaggcgccggggcgggggatgcggggccgcggcgcagccccccggccctgagagcgaggacagcgccgcccggcccgcagccgtcgccgcttctccacctcggcccgtggagccggggcgtccgggcgtagccctcgctcgcctgggtcagggggtgcgcgtcgggggaggcagaagccatggatcccgggcagcagccgccgcctcaaccggccccccagggccaagggcagccgccttcgcagcccccgcaggggcagggcccgccgtccggacccgggcaaccggcacccgcggcgacccaggcggcgccgcaggcaccccccgccgggcatcagatcgtgcacgtccgcggggactcggagaccgacctggaggcgctcttcaacgccgtcatgaaccccaagacggccaacgtgccccagaccgtgcccatgaggctccggaagctgcccgactccttcttcaagccgccggagcccaaatcccactcccgacaggccagtactgatgcaggcactgcaggagccctgactccacagcatgttcgagctcattcctctccagcttctctgcagttgggagctgtttctcctgggacactgacccccactggagtagtctctggcccagcagctacacccacagctcagcatcttcgacagtcttcttttgagatacctgatgatgtacctctgccagcaggttgggagatggcaaagacatcttctggtcagagatacttcttaaatcacatcgatcagacaacaacatggcaggaccccaggaaggccatgctgtcccagatgaacgtcacagcccccaccagtccaccagtgcagcagaatatgatgaactcggcttcaggtcctcttcctgatggatgggaacaagccatgactcaggatggagaaatttactatataaaccataagaacaagaccacctcttggctagacccaaggcttgaccctcgttttgccatgaaccagagaatcagtcagagtgctccagtgaaacagccaccacccctggctccccagagcccacagggaggcgtcatgggtggcagcaactccaaccagcagcaacagatgcgactgcagcaactgcagatggagaaggagaggctgcggctgaaacagcaagaactgcttcggcaggcaatgcggaatatcaatcccagcacagcaaattctccaaaatgtcaggagttagccctgcgtagccagttaccaacactggagcaggatggtgggactcaaaatccagtgtcttctcccgggatgtctcaggaattgagaacaatgacgaccaatagctcagatcctttccttaacagtggcacctatcactctcgagatgagagtacagacagtggactaagcatgagcagctacagtgtccctcgaaccccagatgacttcctgaacagtgtggatgagatggatacaggtgatactatcaaccaaagcaccctgccctcacagcagaaccgtttcccagactaccttgaagccattcctgggacaaatgtggaccttggaacactggaaggagatggaatgaacatagaaggagaggagctgatgccaagtctgcaggaagctttgagttctgacatccttaatgacatggagtctgttttggctgccaccaagctagataaagaaagctttcttacatggttatagagccctcaggcagactgaattctaaatctgtgaaggatctaaggagacacatgcaccggaaatttccataagccagttgcagttttcaggctaatacagaaaaagatgaacaaacgtccagcaagatactttaatcctctattttgctcttccttgtccattgctgctgttaatgtattgctgacctctttcacagttggctctaaagaatcaaaagaaaaaaactttttatttcttttgctattaaaactactgttcattttgggggctgggggaagtgagcctgtttggatgatggatgccattccttttgcccagttaaatgttcaccaatcattttaactaaatactcagacttagaagtcagatgcttcatgtcacagcatttagtttgttcaacagttgtttcttcagcttcctttgtccagtggaaaaacatgatttactggtctgacaagccaaaaatgttatatctgatattaaatacttaatgctgatttgaagagatagctgaaaccaaggctgaagactgttttactttcagtattttcttttcctcctagtgctatcattagtcacataatgaccttgattttattttaggagcttataaggcatgagacaatttccatataaatatattaattattgccacatactctaatatagattttggtggataattttgtgggtgtgcattttgttctgttttgttgggttttttgttttttttgtttttggcagggtcggtgggggggttggttggttggttggttttgtcggaacctaggcaaatgaccatattagtgaatctgttaatagttgtagcttgggatggttattgtagttgttttggtaaaatcttcatttcctggttttttttaccaccttatttaaatctcgattatctgctctctcttttatatacatacacacacccaaacataacatttataatagtgtggtagtggaatgtatccttttttaggtttccctgctttccagttaatttttaaaatggtagcgctttgtatgcatttagaatacatgactagtagtttatatttcactggtagtttaaatctggttggggcagtctgcagatgtttgaagtagtttagtgttctagaaagagctattactgtggatagtgcctaggggagtgctccacgccctctgggcatacggtagatattatctgatgaattggaaaggagcaaaccagaaatggctttattttctcccttggactaatttttaagtctcgattggaattcagtgagtaggttcataatgtgcatgacagaaataagctttatagtggtttaccttcatttagctttggaagttttctttgccttagttttggaagtaaattctagtttgtagttctcatttgtaatgaacacattaacgactagattaaaatattgccttcaagattgttcttacttacaagacttgctcctacttctatgctgaaaattgaccctggatagaatactataaggttttgagttagctggaaaagtgatcagattaataaatgtatattggtagttgaatttagcaaagaaatagagataatcatgattatacctttatttttacaggaagagatgatgtaactagagtatgtgtctacaggagtaataatggtttccaaagagtattttttaaaggaacaaaacgagcatgaattaactcttcaatataagctatgaagtaatagttggttgtgaattaaagtggcaccagctagcacctctgtgttttaagggtctttcaatgtttctagaataagcccttattttcaagggttcataacaggcataaaatctcttctcctggcaaaagctgctatgaaaagcctcagcttgggaagatagatttttttccccccaattacaaaatctaagtattttggcccttcaatttggaggagggcaaaagttggaagtaagaagttttattttaagtactttcagtgctcaaaaaaatgcaatcactgtgttgtatataatagttcataggttgatcactcataataattgactctaaggcttttattaagaaaacagcagaaagattaaatcttgaattaagtctggggggaaatggccactgcagatggagttttagagtagtaatgaaattctacctagaatgcaaaattgggtatatgaattacatagcatgttgttgggattttttttaatgtgcagaagatcaaagctacttggaaggagtgcctataatttgccagtagccacagattaagattatatcttatatatcagcagattagctttagcttagggggagggtgggaaagtttggggggggggttgtgaagatttagggggaccttgatagagaactttataaacttctttctctttaataaagacttgtcttacaccgtgctgccattaaaggcagctgttctagagtttcagtcacctaagtacacccacaaaacaatatgaatatggagatcttcctttacccctcaactttaatttgcccagttatacctcagtgttgtagcagtactgtgatacctggcacagtgctttgatcttacgatgccctctgtactgacctgaaggagacctaagagtcctttccctttttgagtttgaatcatagccttgatgtggtctcttgttttatgtccttgttcctaatgtaaaagtgcttaactgcttcttggttgtattgggtagcattgggataagattttaactgggtattcttgaattgcttttacaataaaccaattttataatctttaaatttatcaactttttacatttgtgttattttcagtcagggcttcttagatctacttatggttgatggagcacattgatttggagtttcagatcttccaaagcactatttgttgtaataacttttctaaatgtagtgcctttaaaggaaaaatgaacacagggaagtgactttgctacaaataatgttgctgtgttaagtattcatattaaatacatgccttctatatggaacatggcagaaagactgaaaaataacagtaattaattgtgtaattcagaattcataccaatcagtgttgaaactcaaacattgcaaaagtgggtggcaatattcagtgcttaacacttttctagcgttggtacatctgagaaatgagtgctcaggtggattttatcctcgcaagcatgttgttataagaattgtgggtgtgcctatcataacaattgttttctgtatcttgaaaaagtattctccacattttaaatgttttatattagagaattctttaatgcacacttgtcaaatatatatatatagtaccaatgttacctttttattttttgttttagatgtaagagcatgctcatatgttaggtacttacataaattgttacattattttttcttatgtaatacctttttgtttgtttatgtggttcaaatatattctttccttaaactctt

SEQ ID NO: 200588 - DNA, 5284 bp, Homo sapiens
  Payload ID: 19590
  Gene Name: Yes-associated protein 1
  Uniprot ID: P46937
  ENST ID: ENST00000345877
  CDS Start-End: 389-1801
gccgccgccagggaaaagaaagggaggaaggaaggaacaagaaaaggaaataaagagaaaggggaggcggggaaaggcaacgagctgtccggcctccgtcaagggagttggagggaaaaagttctcaggcgccgcaggtccgagtgcctcgcagcccctcccgaggcgcagccgccagaccagtggagccggggcgcagggcgggggcggaggcgccggggcgggggatgcggggccgcggcgcagccccccggccctgagagcgaggacagcgccgcccggcccgcagccgtcgccgcttctccacctcggcccgtggagccggggcgtccgggcgtagccctcgctcgcctgggtcagggggtgcgcgtcgggggaggcagaagccatggatcccgggcagcagccgccgcctcaaccggccccccagggccaagggcagccgccttcgcagcccccgcaggggcagggcccgccgtccggacccgggcaaccggcacccgcggcgacccaggcggcgccgcaggcaccccccgccgggcatcagatcgtgcacgtccgcggggactcggagaccgacctggaggcgctcttcaacgccgtcatgaaccccaagacggccaacgtgccccagaccgtgcccatgaggctccggaagctgcccgactccttcttcaagccgccggagcccaaatcccactcccgacaggccagtactgatgcaggcactgcaggagccctgactccacagcatgttcgagctcattcctctccagcttctctgcagttgggagctgtttctcctgggacactgacccccactggagtagtctctggcccagcagctacacccacagctcagcatcttcgacagtcttcttttgagatacctgatgatgtacctctgccagcaggttgggagatggcaaagacatcttctggtcagagatacttcttaaatcacatcgatcagacaacaacatggcaggaccccaggaaggccatgctgtcccagatgaacgtcacagcccccaccagtccaccagtgcagcagaatatgatgaactcggcttcagccatgaaccagagaatcagtcagagtgctccagtgaaacagccaccacccctggctccccagagcccacagggaggcgtcatgggtggcagcaactccaaccagcagcaacagatgcgactgcagcaactgcagatggagaaggagaggctgcggctgaaacagcaagaactgcttcggcaggtgaggccacaggcaatgcggaatatcaatcccagcacagcaaattctccaaaatgtcaggagttagccctgcgtagccagttaccaacactggagcaggatggtgggactcaaaatccagtgtcttctcccgggatgtctcaggaattgagaacaatgacgaccaatagctcagatcctttccttaacagtggcacctatcactctcgagatgagagtacagacagtggactaagcatgagcagctacagtgtccctcgaaccccagatgacttcctgaacagtgtggatgagatggatacaggtgatactatcaaccaaagcaccctgccctcacagcagaaccgtttcccagactaccttgaagccattcctgggacaaatgtggaccttggaacactggaaggagatggaatgaacatagaaggagaggagctgatgccaagtctgcaggaagctttgagttctgacatccttaatgacatggagtctgttttggctgccaccaagctagataaagaaagctttcttacatggttatagagccctcaggcagactgaattctaaatctgtgaaggatctaaggagacacatgcaccggaaatttccataagccagttgcagttttcaggctaatacagaaaaagatgaacaaacgtccagcaagatactttaatcctctattttgctcttccttgtccattgctgctgttaatgtattgctgacctctttcacagttggctctaaagaatcaaaagaaaaaaactttttatttcttttgctattaaaactactgttcattttgggggctgggggaagtgagcctgtttggatgatggatgccattccttttgcccagttaaatgttcaccaatcattttaactaaatactcagacttagaagtcagatgcttcatgtcacagcatttagtttgttcaacagttgtttcttcagcttcctttgtccagtggaaaaacatgatttactggtctgacaagccaaaaatgttatatctgatattaaatacttaatgctgatttgaagagatagctgaaaccaaggctgaagactgttttactttcagtattttcttttcctcctagtgctatcattagtcacataatgaccttgattttattttaggagcttataaggcatgagacaatttccatataaatatattaattattgccacatactctaatatagattttggtggataattttgtgggtgtgcattttgttctgttttgttgggttttttgttttttttgtttttggcagggtcggtgggggggttggttggttggttggttttgtcggaacctaggcaaatgaccatattagtgaatctgttaatagttgtagcttgggatggttattgtagttgttttggtaaaatcttcatttcctggttttttttaccaccttatttaaatctcgattatctgctctctcttttatatacatacacacacccaaacataacatttataatagtgtggtagtggaatgtatccttttttaggtttccctgctttccagttaatttttaaaatggtagcgctttgtatgcatttagaatacatgactagtagtttatatttcactggtagtttaaatctggttggggcagtctgcagatgtttgaagtagtttagtgttctagaaagagctattactgtggatagtgcctaggggagtgctccacgccctctgggcatacggtagatattatctgatgaattggaaaggagcaaaccagaaatggctttattttctcccttggactaatttttaagtctcgattggaattcagtgagtaggttcataatgtgcatgacagaaataagctttatagtggtttaccttcatttagctttggaagttttctttgccttagttttggaagtaaattctagtttgtagttctcatttgtaatgaacacattaacgactagattaaaatattgccttcaagattgttcttacttacaagacttgctcctacttctatgctgaaaattgaccctggatagaatactataaggttttgagttagctggaaaagtgatcagattaataaatgtatattggtagttgaatttagcaaagaaatagagataatcatgattatacctttatttttacaggaagagatgatgtaactagagtatgtgtctacaggagtaataatggtttccaaagagtattttttaaaggaacaaaacgagcatgaattaactcttcaatataagctatgaagtaatagttggttgtgaattaaagtggcaccagctagcacctctgtgttttaagggtctttcaatgtttctagaataagcccttattttcaagggttcataacaggcataaaatctcttctcctggcaaaagctgctatgaaaagcctcagcttgggaagatagatttttttccccccaattacaaaatctaagtattttggcccttcaatttggaggagggcaaaagttggaagtaagaagttttattttaagtactttcagtgctcaaaaaaatgcaatcactgtgttgtatataatagttcataggttgatcactcataataattgactctaaggcttttattaagaaaacagcagaaagattaaatcttgaattaagtctggggggaaatggccactgcagatggagttttagagtagtaatgaaattctacctagaatgcaaaattgggtatatgaattacatagcatgttgttgggattttttttaatgtgcagaagatcaaagctacttggaaggagtgcctataatttgccagtagccacagattaagattatatcttatatatcagcagattagctttagcttagggggagggtgggaaagtttggggggggggttgtgaagatttagggggaccttgatagagaactttataaacttctttctctttaataaagacttgtcttacaccgtgctgccattaaaggcagctgttctagagtttcagtcacctaagtacacccacaaaacaatatgaatatggagatcttcctttacccctcaactttaatttgcccagttatacctcagtgttgtagcagtactgtgatacctggcacagtgctttgatcttacgatgccctctgtactgacctgaaggagacctaagagtcctttccctttttgagtttgaatcatagccttgatgtggtctcttgttttatgtccttgttcctaatgtaaaagtgcttaactgcttcttggttgtattgggtagcattgggataagattttaactgggtattcttgaattgcttttacaataaaccaattttataatctttaaatttatcaactttttacatttgtgttattttcagtcagggcttcttagatctacttatggttgatggagcacattgatttggagtttcagatcttccaaagcactatttgttgtaataacttttctaaatgtagtgcctttaaaggaaaaatgaacacagggaagtgactttgctacaaataatgttgctgtgttaagtattcatattaaatacatgccttctatatggaacatggcagaaagactgaaaaataacagtaattaattgtgtaattcagaattcataccaatcagtgttgaaactcaaacattgcaaaagtgggtggcaatattcagtgcttaacacttttctagcgttggtacatctgagaaatgagtgctcaggtggattttatcctcgcaagcatgttgttataagaattgtgggtgtgcctatcataacaattgttttctgtatcttgaaaaagtattctccacattttaaatgttttatattagagaattctttaatgcacacttgtcaaatatatatatatagtaccaatgttacctttttattttttgttttagatgtaagagcatgctcatatgttaggtacttacataaattgttacattattttttcttatgtaatacctttttgtttgtttatgtggttcaaatatattctttccttaaactctt

SEQ ID NO: 200589 - DNA, 1490 bp, Homo sapiens
  Payload ID: 19590
  Gene Name: Yes-associated protein 1
  Uniprot ID: P46937
  ENST ID: ENST00000531439
  CDS Start-End: 1-1467
atggatcccgggcagcagccgccgcctcaaccggccccccagggccaagggcagccgccttcgcagcccccgcaggggcagggcccgccgtccggacccgggcaaccggcacccgcggcgacccaggcggcgccgcaggcaccccccgccgggcatcagatcgtgcacgtccgcggggactcggagaccgacctggaggcgctcttcaacgccgtcatgaaccccaagacggccaacgtgccccagaccgtgcccatgaggctccggaagctgcccgactccttcttcaagccgccggagcccaaatcccactcccgacaggccagtactgatgcaggcactgcaggagccctgactccacagcatgttcgagctcattcctctccagcttctctgcagttgggagctgtttctcctgggacactgacccccactggagtagtctctggcccagcagctacacccacagctcagcatcttcgacagtcttcttttgagatacctgatgatgtacctctgccagcaggttgggagatggcaaagacatcttctggtcagagatacttcttaaatcacatcgatcagacaacaacatggcaggaccccaggaaggccatgctgtcccagatgaacgtcacagcccccaccagtccaccagtgcagcagaatatgatgaactcggcttcaggtcctcttcctgatggatgggaacaagccatgactcaggatggagaaatttactatataaaccataagaacaagaccacctcttggctagacccaaggcttgaccctcgttttgccatgaaccagagaatcagtcagagtgctccagtgaaacagccaccacccctggctccccagagcccacagggaggcgtcatgggtggcagcaactccaaccagcagcaacagatgcgactgcagcaactgcagatggagaaggagaggctgcggctgaaacagcaagaactgcttcggcaggagttagccctgcgtagccagttaccaacactggagcaggatggtgggactcaaaatccagtgtcttctcccgggatgtctcaggaattgagaacaatgacgaccaatagctcagatcctttccttaacagtggcacctatcactctcgagatgagagtacagacagtggactaagcatgagcagctacagtgtccctcgaaccccagatgacttcctgaacagtgtggatgagatggatacaggtgatactatcaaccaaagcaccctgccctcacagcagaaccgtttcccagactaccttgaagccattcctgggacaaatgtggaccttggaacactggaaggagatggaatgaacatagaaggagaggagctgatgccaagtctgcaggaagctttgagttctgacatccttaatgacatggagtctgttttggctgccaccaagctagataaagaaagctttcttacatggttatagagccctcaggcagactgaattct

SEQ ID NO: 200590 - DNA, 1415 bp, Homo sapiens
  Payload ID: 19590
  Gene Name: Yes-associated protein 1
  ENST ID: ENST00000529029
  CDS Start-End: 1-776
ataagaacaagaccacctcttggctagacccaaggcttgaccctcgttttgccatgaaccagagaatcagtcagagtgctccagtgaaacagccaccacccctggctccccagagcccacagggaggcgtcatgggtggcagcaactccaaccagcagcaacagatgcgactgcagcaactgcagatggagaaggagaggctgcggctgaaacagcaagaactgcttcggcaggtgaggccacaggcaatgcggaatatcaatcccagcacagcaaattctccaaaatgtcaggagttagccctgcgtagccagttaccaacactggagcaggatggtgggactcaaaatccagtgtcttctcccgggatgtctcaggaattgagaacaatgacgaccaatagctcagatcctttccttaacagtggcacctatcactctcgagatgagagtacagacagtggactaagcatgagcagctacagtgtccctcgaaccccagatgacttcctgaacagtgtggatgagatggatacaggtgatactatcaaccaaagcaccctgccctcacagcagaaccgtttcccagactaccttgaagccattcctgggacaaatgtggaccttggaacactggaaggagatggaatgaacatagaaggagaggagctgatgccaagtctgcaggaagctttgagttctgacatccttaatgacatggagtctgttttggctgccaccaagctagataaagaaagctttcttacatggttatagagccctcaggcagactgaattctaaatctgtgaaggatctaaggagacacatgcaccggaaatttccataagccagttgcagttttcaggctaatacagaaaaagatgaacaaacgtccagcaagatactttaatcctctattttgctcttccttgtccattgctgctgttaatgtattgctgacctctttcacagttggctctaaagaatcaaaagaaaaaaactttttatttcttttgctattaaaactactgttcattttgggggctgggggaagtgagcctgtttggatgatggatgccattccttttgcccagttaaatgttcaccaatcattttaactaaatactcagacttagaagtcagatgcttcatgtcacagcatttagtttgttcaacagttgtttcttcagcttcctttgtccagtggaaaaacatgatttactggtctgacaagccaaaaatgttatatctgatattaaatacttaatgctgatttgaagagatagctgaaaccaaggctgaagactgttttactttcagtattttcttttcctcctagtgctatcattagtcacataatgaccttgattttattttaggagcttataaggcatgagacaatttccatataaata

SEQ ID NO: 200591 - DNA, 2393 bp, Homo sapiens
  Payload ID: 19590
  Gene Name: Yes-associated protein 1
  Uniprot ID: P46937
  ENST ID: ENST00000526343
  CDS Start-End: 389-1741
gccgccgccagggaaaagaaagggaggaaggaaggaacaagaaaaggaaataaagagaaaggggaggcggggaaaggcaacgagctgtccggcctccgtcaagggagttggagggaaaaagttctcaggcgccgcaggtccgagtgcctcgcagcccctcccgaggcgcagccgccagaccagtggagccggggcgcagggcgggggcggaggcgccggggcgggggatgcggggccgcggcgcagccccccggccctgagagcgaggacagcgccgcccggcccgcagccgtcgccgcttctccacctcggcccgtggagccggggcgtccgggcgtagccctcgctcgcctgggtcagggggtgcgcgtcgggggaggcagaagccatggatcccgggcagcagccgccgcctcaaccggccccccagggccaagggcagccgccttcgcagcccccgcaggggcagggcccgccgtccggacccgggcaaccggcacccgcggcgacccaggcggcgccgcaggcaccccccgccgggcatcagatcgtgcacgtccgcggggactcggagaccgacctggaggcgctcttcaacgccgtcatgaaccccaagacggccaacgtgccccagaccgtgcccatgaggctccggaagctgcccgactccttcttcaagccgccggagcccaaatcccactcccgacaggccagtactgatgcaggcactgcaggagccctgactccacagcatgttcgagctcattcctctccagcttctctgcagttgggagctgtttctcctgggacactgacccccactggagtagtctctggcccagcagctacacccacagctcagcatcttcgacagtcttcttttgagatacctgatgatgtacctctgccagcaggttgggagatggcaaagacatcttctggtcagagatacttcttaaatcacatcgatcagacaacaacatggcaggaccccaggaaggccatgctgtcccagatgaacgtcacagcccccaccagtccaccagtgcagcagaatatgatgaactcggcttcagccatgaaccagagaatcagtcagagtgctccagtgaaacagccaccacccctggctccccagagcccacagggaggcgtcatgggtggcagcaactccaaccagcagcaacagatgcgactgcagcaactgcagatggagaaggagaggctgcggctgaaacagcaagaactgcttcggcaggagttagccctgcgtagccagttaccaacactggagcaggatggtgggactcaaaatccagtgtcttctcccgggatgtctcaggaattgagaacaatgacgaccaatagctcagatcctttccttaacagtggcacctatcactctcgagatgagagtacagacagtggactaagcatgagcagctacagtgtccctcgaaccccagatgacttcctgaacagtgtggatgagatggatacaggtgatactatcaaccaaagcaccctgccctcacagcagaaccgtttcccagactaccttgaagccattcctgggacaaatgtggaccttggaacactggaaggagatggaatgaacatagaaggagaggagctgatgccaagtctgcaggaagctttgagttctgacatccttaatgacatggagtctgttttggctgccaccaagctagataaagaaagctttcttacatggttatagagccctcaggcagactgaattctaaatctgtgaaggatctaaggagacacatgcaccggaaatttccataagccagttgcagttttcaggctaatacagaaaaagatgaacaaacgtccagcaagatactttaatcctctattttgctcttccttgtccattgctgctgttaatgtattgctgacctctttcacagttggctctaaagaatcaaaagaaaaaaactttttatttcttttgctattaaaactactgttcattttgggggctgggggaagtgagcctgtttggatgatggatgccattccttttgcccagttaaatgttcaccaatcattttaactaaatactcagacttagaagtcagatgcttcatgtcacagcatttagtttgttcaacagttgtttcttcagcttcctttgtccagtggaaaaacatgatttactggtctgacaagccaaaaatgttatatctgatattaaatacttaatgctgatttgaagagatagctgaaaccaaggctgaagactgttttactttcagtattttcttttcctcctagtgctatcattagtcacataatgaccttgattttattttaggagcttataaggcatgagacaatttccatataaatatattaattattgc

SEQ ID NO: 200592 - DNA, 1638 bp, Homo sapiens
  Payload ID: 19590
  Gene Name: Yes-associated protein 1
  Uniprot ID: P46937
  ENST ID: ENST00000524575
  CDS Start-End: 446-1426
ctgcaatgtagttagcccactcgggatgtaacttgagtggaaagaagagttaccgcccccactcccattccctctcctatttgcaggcctgttgtatagtctcctgtcggagaccaaagggttttggaactcagaaaaaatcacttaacctgatgacaaaaacccgggttaaggaggaggaaagaaggaaaaacaatttagctgcttgcctaaacacttcaatttgtcttaggccagtactgatgcaggcactgcaggagccctgactccacagcatgttcgagctcattcctctccagcttctctgcagttgggagctgtttctcctgggacactgacccccactggagtagtctctggcccagcagctacacccacagctcagcatcttcgacagtcttcttttgagatacctgatgatgtacctctgccagcaggttgggagatggcaaagacatcttctggtcagagatacttcttaaatcacatcgatcagacaacaacatggcaggaccccaggaaggccatgctgtcccagatgaacgtcacagcccccaccagtccaccagtgcagcagaatatgatgaactcggcttcaggtcctcttcctgatggatgggaacaagccatgactcaggatggagaaatttactatataaaccataagaacaagaccacctcttggctagacccaaggcttgaccctcgttttgccatgaaccagagaatcagtcagagtgctccagtgaaacagccaccacccctggctccccagagcccacagggaggcgtcatgggtggcagcaactccaaccagcagcaacagatgcgactgcagcaactgcagatggagaaggagaggctgcggctgaaacagcaagaactgcttcggcaggcaatgcggaatatcaatcccagcacagcaaattctccaaaatgtcaggagttagccctgcgtagccagttaccaacactggagcaggatggtgggactcaaaatccagtgtcttctcccgggatgtctcaggaattgagaacaatgacgaccaatagctcagatcctttccttaacagtggcacctatcactctcgagatgagagtacagacagtggactaagcatgagcagctacagtgtccctcgaaccccagatgacttcctgaacagtgtggatgagatggatacaggtgatactatcaaccaaagcaccctgccctcacagcagaaccgtttcccagactaccttgaagccattcctgggacaaatgtggaccttggaacactggaaggagatggaatgaacatagaaggagaggagctgatgccaagtctgcaggaagctttgagttctgacatccttaatgacatggagtctgttttggctgccaccaagctagataaagaaagctttcttacatggttatagagccctcaggcagactgaattctaaatctgtgaaggatctaaggagacacatgcaccggaaatttccataagccagttgcagttttcaggctaatacagaaaaagatgaacaaacgtccagcaagatactttaatcctctattttgctcttccttgtccattgctgctgttaatgtattgctgacctctttcacagttggctctaaagaatc

SEQ ID NO: 200593 - DNA, 5350 bp, Homo sapiens
  Payload ID: 19590
  Gene Name: Yes-associated protein 1
  Uniprot ID: P46937
  ENST ID: ENST00000537274
  CDS Start-End: 389-1867
gccgccgccagggaaaagaaagggaggaaggaaggaacaagaaaaggaaataaagagaaaggggaggcggggaaaggcaacgagctgtccggcctccgtcaagggagttggagggaaaaagttctcaggcgccgcaggtccgagtgcctcgcagcccctcccgaggcgcagccgccagaccagtggagccggggcgcagggcgggggcggaggcgccggggcgggggatgcggggccgcggcgcagccccccggccctgagagcgaggacagcgccgcccggcccgcagccgtcgccgcttctccacctcggcccgtggagccggggcgtccgggcgtagccctcgctcgcctgggtcagggggtgcgcgtcgggggaggcagaagccatggatcccgggcagcagccgccgcctcaaccggccccccagggccaagggcagccgccttcgcagcccccgcaggggcagggcccgccgtccggacccgggcaaccggcacccgcggcgacccaggcggcgccgcaggcaccccccgccgggcatcagatcgtgcacgtccgcggggactcggagaccgacctggaggcgctcttcaacgccgtcatgaaccccaagacggccaacgtgccccagaccgtgcccatgaggctccggaagctgcccgactccttcttcaagccgccggagcccaaatcccactcccgacaggccagtactgatgcaggcactgcaggagccctgactccacagcatgttcgagctcattcctctccagcttctctgcagttgggagctgtttctcctgggacactgacccccactggagtagtctctggcccagcagctacacccacagctcagcatcttcgacagtcttcttttgagatacctgatgatgtacctctgccagcaggttgggagatggcaaagacatcttctggtcagagatacttcttaaatcacatcgatcagacaacaacatggcaggaccccaggaaggccatgctgtcccagatgaacgtcacagcccccaccagtccaccagtgcagcagaatatgatgaactcggcttcaggtcctcttcctgatggatgggaacaagccatgactcaggatggagaaatttactatataaaccataagaacaagaccacctcttggctagacccaaggcttgaccctcgttttgccatgaaccagagaatcagtcagagtgctccagtgaaacagccaccacccctggctccccagagcccacagggaggcgtcatgggtggcagcaactccaaccagcagcaacagatgcgactgcagcaactgcagatggagaaggagaggctgcggctgaaacagcaagaactgcttcggcaggtgaggccacaggagttagccctgcgtagccagttaccaacactggagcaggatggtgggactcaaaatccagtgtcttctcccgggatgtctcaggaattgagaacaatgacgaccaatagctcagatcctttccttaacagtggcacctatcactctcgagatgagagtacagacagtggactaagcatgagcagctacagtgtccctcgaaccccagatgacttcctgaacagtgtggatgagatggatacaggtgatactatcaaccaaagcaccctgccctcacagcagaaccgtttcccagactaccttgaagccattcctgggacaaatgtggaccttggaacactggaaggagatggaatgaacatagaaggagaggagctgatgccaagtctgcaggaagctttgagttctgacatccttaatgacatggagtctgttttggctgccaccaagctagataaagaaagctttcttacatggttatagagccctcaggcagactgaattctaaatctgtgaaggatctaaggagacacatgcaccggaaatttccataagccagttgcagttttcaggctaatacagaaaaagatgaacaaacgtccagcaagatactttaatcctctattttgctcttccttgtccattgctgctgttaatgtattgctgacctctttcacagttggctctaaagaatcaaaagaaaaaaactttttatttcttttgctattaaaactactgttcattttgggggctgggggaagtgagcctgtttggatgatggatgccattccttttgcccagttaaatgttcaccaatcattttaactaaatactcagacttagaagtcagatgcttcatgtcacagcatttagtttgttcaacagttgtttcttcagcttcctttgtccagtggaaaaacatgatttactggtctgacaagccaaaaatgttatatctgatattaaatacttaatgctgatttgaagagatagctgaaaccaaggctgaagactgttttactttcagtattttcttttcctcctagtgctatcattagtcacataatgaccttgattttattttaggagcttataaggcatgagacaatttccatataaatatattaattattgccacatactctaatatagattttggtggataattttgtgggtgtgcattttgttctgttttgttgggttttttgttttttttgtttttggcagggtcggtgggggggttggttggttggttggttttgtcggaacctaggcaaatgaccatattagtgaatctgttaatagttgtagcttgggatggttattgtagttgttttggtaaaatcttcatttcctggttttttttaccaccttatttaaatctcgattatctgctctctcttttatatacatacacacacccaaacataacatttataatagtgtggtagtggaatgtatccttttttaggtttccctgctttccagttaatttttaaaatggtagcgctttgtatgcatttagaatacatgactagtagtttatatttcactggtagtttaaatctggttggggcagtctgcagatgtttgaagtagtttagtgttctagaaagagctattactgtggatagtgcctaggggagtgctccacgccctctgggcatacggtagatattatctgatgaattggaaaggagcaaaccagaaatggctttattttctcccttggactaatttttaagtctcgattggaattcagtgagtaggttcataatgtgcatgacagaaataagctttatagtggtttaccttcatttagctttggaagttttctttgccttagttttggaagtaaattctagtttgtagttctcatttgtaatgaacacattaacgactagattaaaatattgccttcaagattgttcttacttacaagacttgctcctacttctatgctgaaaattgaccctggatagaatactataaggttttgagttagctggaaaagtgatcagattaataaatgtatattggtagttgaatttagcaaagaaatagagataatcatgattatacctttatttttacaggaagagatgatgtaactagagtatgtgtctacaggagtaataatggtttccaaagagtattttttaaaggaacaaaacgagcatgaattaactcttcaatataagctatgaagtaatagttggttgtgaattaaagtggcaccagctagcacctctgtgttttaagggtctttcaatgtttctagaataagcccttattttcaagggttcataacaggcataaaatctcttctcctggcaaaagctgctatgaaaagcctcagcttgggaagatagatttttttccccccaattacaaaatctaagtattttggcccttcaatttggaggagggcaaaagttggaagtaagaagttttattttaagtactttcagtgctcaaaaaaatgcaatcactgtgttgtatataatagttcataggttgatcactcataataattgactctaaggcttttattaagaaaacagcagaaagattaaatcttgaattaagtctggggggaaatggccactgcagatggagttttagagtagtaatgaaattctacctagaatgcaaaattgggtatatgaattacatagcatgttgttgggattttttttaatgtgcagaagatcaaagctacttggaaggagtgcctataatttgccagtagccacagattaagattatatcttatatatcagcagattagctttagcttagggggagggtgggaaagtttggggggggggttgtgaagatttagggggaccttgatagagaactttataaacttctttctctttaataaagacttgtcttacaccgtgctgccattaaaggcagctgttctagagtttcagtcacctaagtacacccacaaaacaatatgaatatggagatcttcctttacccctcaactttaatttgcccagttatacctcagtgttgtagcagtactgtgatacctggcacagtgctttgatcttacgatgccctctgtactgacctgaaggagacctaagagtcctttccctttttgagtttgaatcatagccttgatgtggtctcttgttttatgtccttgttcctaatgtaaaagtgcttaactgcttcttggttgtattgggtagcattgggataagattttaactgggtattcttgaattgcttttacaataaaccaattttataatctttaaatttatcaactttttacatttgtgttattttcagtcagggcttcttagatctacttatggttgatggagcacattgatttggagtttcagatcttccaaagcactatttgttgtaataacttttctaaatgtagtgcctttaaaggaaaaatgaacacagggaagtgactttgctacaaataatgttgctgtgttaagtattcatattaaatacatgccttctatatggaacatggcagaaagactgaaaaataacagtaattaattgtgtaattcagaattcataccaatcagtgttgaaactcaaacattgcaaaagtgggtggcaatattcagtgcttaacacttttctagcgttggtacatctgagaaatgagtgctcaggtggattttatcctcgcaagcatgttgttataagaattgtgggtgtgcctatcataacaattgttttctgtatcttgaaaaagtattctccacattttaaatgttttatattagagaattctttaatgcacacttgtcaaatatatatatatagtaccaatgttacctttttattttttgttttagatgtaagagcatgctcatatgttaggtacttacataaattgttacattattttttcttatgtaatacctttttgtttgtttatgtggttcaaatatattctttccttaaactctt

SEQ ID NO: 200594 - DNA, 5398 bp, Homo sapiens
  Payload ID: 19590
  Gene Name: Yes-associated protein 1
  Uniprot ID: P46937
  ENST ID: ENST00000615667
  CDS Start-End: 389-1915
gccgccgccagggaaaagaaagggaggaaggaaggaacaagaaaaggaaataaagagaaaggggaggcggggaaaggcaacgagctgtccggcctccgtcaagggagttggagggaaaaagttctcaggcgccgcaggtccgagtgcctcgcagcccctcccgaggcgcagccgccagaccagtggagccggggcgcagggcgggggcggaggcgccggggcgggggatgcggggccgcggcgcagccccccggccctgagagcgaggacagcgccgcccggcccgcagccgtcgccgcttctccacctcggcccgtggagccggggcgtccgggcgtagccctcgctcgcctgggtcagggggtgcgcgtcgggggaggcagaagccatggatcccgggcagcagccgccgcctcaaccggccccccagggccaagggcagccgccttcgcagcccccgcaggggcagggcccgccgtccggacccgggcaaccggcacccgcggcgacccaggcggcgccgcaggcaccccccgccgggcatcagatcgtgcacgtccgcggggactcggagaccgacctggaggcgctcttcaacgccgtcatgaaccccaagacggccaacgtgccccagaccgtgcccatgaggctccggaagctgcccgactccttcttcaagccgccggagcccaaatcccactcccgacaggccagtactgatgcaggcactgcaggagccctgactccacagcatgttcgagctcattcctctccagcttctctgcagttgggagctgtttctcctgggacactgacccccactggagtagtctctggcccagcagctacacccacagctcagcatcttcgacagtcttcttttgagatacctgatgatgtacctctgccagcaggttgggagatggcaaagacatcttctggtcagagatacttcttaaatcacatcgatcagacaacaacatggcaggaccccaggaaggccatgctgtcccagatgaacgtcacagcccccaccagtccaccagtgcagcagaatatgatgaactcggcttcaggtcctcttcctgatggatgggaacaagccatgactcaggatggagaaatttactatataaaccataagaacaagaccacctcttggctagacccaaggcttgaccctcgttttgccatgaaccagagaatcagtcagagtgctccagtgaaacagccaccacccctggctccccagagcccacagggaggcgtcatgggtggcagcaactccaaccagcagcaacagatgcgactgcagcaactgcagatggagaaggagaggctgcggctgaaacagcaagaactgcttcggcaggtgaggccacaggcaatgcggaatatcaatcccagcacagcaaattctccaaaatgtcaggagttagccctgcgtagccagttaccaacactggagcaggatggtgggactcaaaatccagtgtcttctcccgggatgtctcaggaattgagaacaatgacgaccaatagctcagatcctttccttaacagtggcacctatcactctcgagatgagagtacagacagtggactaagcatgagcagctacagtgtccctcgaaccccagatgacttcctgaacagtgtggatgagatggatacaggtgatactatcaaccaaagcaccctgccctcacagcagaaccgtttcccagactaccttgaagccattcctgggacaaatgtggaccttggaacactggaaggagatggaatgaacatagaaggagaggagctgatgccaagtctgcaggaagctttgagttctgacatccttaatgacatggagtctgttttggctgccaccaagctagataaagaaagctttcttacatggttatagagccctcaggcagactgaattctaaatctgtgaaggatctaaggagacacatgcaccggaaatttccataagccagttgcagttttcaggctaatacagaaaaagatgaacaaacgtccagcaagatactttaatcctctattttgctcttccttgtccattgctgctgttaatgtattgctgacctctttcacagttggctctaaagaatcaaaagaaaaaaactttttatttcttttgctattaaaactactgttcattttgggggctgggggaagtgagcctgtttggatgatggatgccattccttttgcccagttaaatgttcaccaatcattttaactaaatactcagacttagaagtcagatgcttcatgtcacagcatttagtttgttcaacagttgtttcttcagcttcctttgtccagtggaaaaacatgatttactggtctgacaagccaaaaatgttatatctgatattaaatacttaatgctgatttgaagagatagctgaaaccaaggctgaagactgttttactttcagtattttcttttcctcctagtgctatcattagtcacataatgaccttgattttattttaggagcttataaggcatgagacaatttccatataaatatattaattattgccacatactctaatatagattttggtggataattttgtgggtgtgcattttgttctgttttgttgggttttttgttttttttgtttttggcagggtcggtgggggggttggttggttggttggttttgtcggaacctaggcaaatgaccatattagtgaatctgttaatagttgtagcttgggatggttattgtagttgttttggtaaaatcttcatttcctggttttttttaccaccttatttaaatctcgattatctgctctctcttttatatacatacacacacccaaacataacatttataatagtgtggtagtggaatgtatccttttttaggtttccctgctttccagttaatttttaaaatggtagcgctttgtatgcatttagaatacatgactagtagtttatatttcactggtagtttaaatctggttggggcagtctgcagatgtttgaagtagtttagtgttctagaaagagctattactgtggatagtgcctaggggagtgctccacgccctctgggcatacggtagatattatctgatgaattggaaaggagcaaaccagaaatggctttattttctcccttggactaatttttaagtctcgattggaattcagtgagtaggttcataatgtgcatgacagaaataagctttatagtggtttaccttcatttagctttggaagttttctttgccttagttttggaagtaaattctagtttgtagttctcatttgtaatgaacacattaacgactagattaaaatattgccttcaagattgttcttacttacaagacttgctcctacttctatgctgaaaattgaccctggatagaatactataaggttttgagttagctggaaaagtgatcagattaataaatgtatattggtagttgaatttagcaaagaaatagagataatcatgattatacctttatttttacaggaagagatgatgtaactagagtatgtgtctacaggagtaataatggtttccaaagagtattttttaaaggaacaaaacgagcatgaattaactcttcaatataagctatgaagtaatagttggttgtgaattaaagtggcaccagctagcacctctgtgttttaagggtctttcaatgtttctagaataagcccttattttcaagggttcataacaggcataaaatctcttctcctggcaaaagctgctatgaaaagcctcagcttgggaagatagatttttttccccccaattacaaaatctaagtattttggcccttcaatttggaggagggcaaaagttggaagtaagaagttttattttaagtactttcagtgctcaaaaaaatgcaatcactgtgttgtatataatagttcataggttgatcactcataataattgactctaaggcttttattaagaaaacagcagaaagattaaatcttgaattaagtctggggggaaatggccactgcagatggagttttagagtagtaatgaaattctacctagaatgcaaaattgggtatatgaattacatagcatgttgttgggattttttttaatgtgcagaagatcaaagctacttggaaggagtgcctataatttgccagtagccacagattaagattatatcttatatatcagcagattagctttagcttagggggagggtgggaaagtttggggggggggttgtgaagatttagggggaccttgatagagaactttataaacttctttctctttaataaagacttgtcttacaccgtgctgccattaaaggcagctgttctagagtttcagtcacctaagtacacccacaaaacaatatgaatatggagatcttcctttacccctcaactttaatttgcccagttatacctcagtgttgtagcagtactgtgatacctggcacagtgctttgatcttacgatgccctctgtactgacctgaaggagacctaagagtcctttccctttttgagtttgaatcatagccttgatgtggtctcttgttttatgtccttgttcctaatgtaaaagtgcttaactgcttcttggttgtattgggtagcattgggataagattttaactgggtattcttgaattgcttttacaataaaccaattttataatctttaaatttatcaactttttacatttgtgttattttcagtcagggcttcttagatctacttatggttgatggagcacattgatttggagtttcagatcttccaaagcactatttgttgtaataacttttctaaatgtagtgcctttaaaggaaaaatgaacacagggaagtgactttgctacaaataatgttgctgtgttaagtattcatattaaatacatgccttctatatggaacatggcagaaagactgaaaaataacagtaattaattgtgtaattcagaattcataccaatcagtgttgaaactcaaacattgcaaaagtgggtggcaatattcagtgcttaacacttttctagcgttggtacatctgagaaatgagtgctcaggtggattttatcctcgcaagcatgttgttataagaattgtgggtgtgcctatcataacaattgttttctgtatcttgaaaaagtattctccacattttaaatgttttatattagagaattctttaatgcacacttgtcaaatatatatatatagtaccaatgttacctttttattttttgttttagatgtaagagcatgctcatatgttaggtacttacataaattgttacattattttttcttatgtaatacctttttgtttgtttatgtggttcaaatatattctttccttaaactctt

SEQ ID NO: 200595 - DNA, 1365 bp, Homo sapiens
  Payload ID: 19590
  Gene Name: Yes-associated protein 1
  Uniprot ID: P46937
  ENST ID: ENST00000629586
  CDS Start-End: 1-1365
atggatcccgggcagcagccgccgcctcaaccggccccccagggccaagggcagccgccttcgcagcccccgcaggggcagggcccgccgtccggacccgggcaaccggcacccgcggcgacccaggcggcgccgcaggcaccccccgccgggcatcagatcgtgcacgtccgcggggactcggagaccgacctggaggcgctcttcaacgccgtcatgaaccccaagacggccaacgtgccccagaccgtgcccatgaggctccggaagctgcccgactccttcttcaagccgccggagcccaaatcccactcccgacaggccagtactgatgcaggcactgcaggagccctgactccacagcatgttcgagctcattcctctccagcttctctgcagttgggagctgtttctcctgggacactgacccccactggagtagtctctggcccagcagctacacccacagctcagcatcttcgacagtcttcttttgagatacctgatgatgtacctctgccagcaggttgggagatggcaaagacatcttctggtcagagatacttcttaaatcacatcgatcagacaacaacatggcaggaccccaggaaggccatgctgtcccagatgaacgtcacagcccccaccagtccaccagtgcagcagaatatgatgaactcggcttcagccatgaaccagagaatcagtcagagtgctccagtgaaacagccaccacccctggctccccagagcccacagggaggcgtcatgggtggcagcaactccaaccagcagcaacagatgcgactgcagcaactgcagatggagaaggagaggctgcggctgaaacagcaagaactgcttcggcaggtgaggccacaggagttagccctgcgtagccagttaccaacactggagcaggatggtgggactcaaaatccagtgtcttctcccgggatgtctcaggaattgagaacaatgacgaccaatagctcagatcctttccttaacagtggcacctatcactctcgagatgagagtacagacagtggactaagcatgagcagctacagtgtccctcgaaccccagatgacttcctgaacagtgtggatgagatggatacaggtgatactatcaaccaaagcaccctgccctcacagcagaaccgtttcccagactaccttgaagccattcctgggacaaatgtggaccttggaacactggaaggagatggaatgaacatagaaggagaggagctgatgccaagtctgcaggaagctttgagttctgacatccttaatgacatggagtctgttttggctgccaccaagctagataaagaaagctttcttacatggttatag

SEQ ID NO: 200596 - DNA, 1851 bp, Homo sapiens
  Payload ID: 19591
  Gene Name: Yip1 domain family, member 1
  Uniprot ID: Q9Y548
  ENST ID: ENST00000072644
  CDS Start-End: 372-1292
ccccggatctccggcttccggcaactgggctggaccgaaaccggcgcggagcaactgaggcccgagccttctcgggacccgggggacgcctaaccccgcgagatgaggaaactgaggccgcgaggagcgcgcatacagcagagaagcagcagaatcgggaatcaaacccagctctgtctgaccccagagcctgtgcctttaaccactggctaggctgaactgcctttgttcttcactgtccccatcacctctttcaaacctcagcctctccttcctcatcgttacatctctaggctgcacctgctctctaaacattcacacaaaccctgcaaattttcttcctcataattgggagaagactcactggccgaatggcagcagtagatgacttgcaatttgaagaatttggcaatgcagccacttctctgacagcaaacccagatgccaccacagtaaacattgaggatcctggtgaaaccccaaaacatcagccaggatccccaagaggctcaggaagagaagaagatgatgagttactgggaaatgatgactctgacaaaactgagttacttgctggacagaagaaaagctcccccttctggacatttgaatactaccaaacattctttgatgtggacacctaccaggtctttgacagaattaaaggatctcttttgccaatacccgggaaaaactttgtgaggttatatatccgcagcaatccagatctctatggccccttttggatatgtgccacgttggtctttgccatagcaattagtgggaatctttccaacttcttgatccatctgggagagaagacgtaccattatgtgcccgaattccgaaaagtgtccatagcagctaccatcatctatgcctatgcctggctggttcctcttgcactctggggtttcctcatgtggagaaacagcaaagttatgaacatcgtctcctattcatttctggagattgtgtgtgtctatggatattccctcttcatttatatccccaccgcaatactgtggattatcccccagaaagctgttcgttggattctagtcatgattgccctgggcatctcaggatctctcttggcaatgacattttggccagctgttcgtgaggataaccgacgcgttgcattggccacaattgtgacaattgtgttgctccatatgctgctttctgtgggctgcttggcatacttttttgatgcaccagagatggaccatctcccaacaactacagctactccaaaccaaacagttgctgcagccaagtccagctaatgaggaaattctcttttgttttttggagcatggttctttgggaagtggcatccactgcaggaaagcagaatgagcagagccagcagaactgatggagtggcacaaattcccagtgtctggatggtgccacactggcgcctaatcacccgtttaacaagcagaaattaaatgttgctcagcacatgtgtctttcagctcttccttttcacccatggatgatcattgcgagcatgcgctgattggactgaaatgccagggaataggttaggcatgctcagtgccgtccctttgccaccacagtcaaatgacatgcttcactgtggtaccttaatacctgaaatagaaccatggaaaattctgatgtcctctctctgaattatgtacagactacctgggggatcctcttctctccaaatgttagccatcctgaagtagccgaacagtagaaactttggtggggattaaccgggagcttgaaaatttgtctttggtaacctgatactggacagctgaactgaatggctgcaaaataaatacctcacatgatgtctgtgtctgc

SEQ ID NO: 200597 - DNA, 1503 bp, Homo sapiens
  Payload ID: 19591
  Gene Name: Yip1 domain family, member 1
  Uniprot ID: Q9Y548
  ENST ID: ENST00000371399
  CDS Start-End: 586-957
cgaaaccggcgcggagcaactgaggcccgagccttctcgggacccgggggacgcctaaccccgcgagaatttggcaatgcagccacttctctgacagcaaacccagatgccaccacagtaaacattgaggatcctggtgaaaccccaaaacatcagccaggatccccaagaggctcaggaagagaagaagatgatgagttactgggaaatgatgactctgacaaaactgagttacttgctggacagaagaaaagctcccccttctggacatttgaatactaccaaacattctttgatgtggacacctaccaggtctttgacagaattaaaggatctcttttgccaatacccgggaaaaactttgtgaggttatatatccgcagcaatccagatctctatggccccttttggatatgtgccacgttggtctttgccatagcaattagtgggaatctttccaacttcttgatccatctgggagagaagacgtaccattatgtgcccgaattccgaaaagtgtccatagcagctaccatcatctatgcctatgcctggctggttcctcttgcactctggggtttcctcatgtggagaaacagcaaagttatgaacatcgtctcctattcatttctggagattgtgtgtgtctatggatattccctcttcatttatatccccaccgcaatactgtggattatcccccagaaagctgttcgttggattctagtcatgattgccctgggcatctcaggatctctcttggcaatgacattttggccagctgttcgtgaggataaccgacgcgttgcattggccacaattgtgacaattgtgttgctccatatgctgctttctgtgggctgcttggcatacttttttgatgcaccagagatggaccatctcccaacaactacagctactccaaaccaaacagttgctgcagccaagtccagctaatgaggaaattctcttttgttttttggagcatggttctttgggaagtggcatccactgcaggaaagcagaatgagcagagccagcagaactgatggagtggcacaaattcccagtgtctggatggtgccacactggcgcctaatcacccgtttaacaagcagaaattaaatgttgctcagcacatgtgtctttcagctcttccttttcacccatggatgatcattgcgagcatgcgctgattggactgaaatgccagggaataggttaggcatgctcagtgccgtccctttgccaccacagtcaaatgacatgcttcactgtggtaccttaatacctgaaatagaaccatggaaaattctgatgtcctctctctgaattatgtacagactacctgggggatcctcttctctccaaatgttagccatcctgaagtagccgaacagtagaaactttggtggggattaaccgggagcttgaaaatttgtctttggtaacctgatactggacagctgaactgaatggctgcaaaataaatacctcacatga

SEQ ID NO: 200598 - DNA, 1042 bp, Homo sapiens
  Payload ID: 19591
  Gene Name: Yip1 domain family, member 1
  ENST ID: ENST00000412288
  CDS Start-End: 392-1042
ggaggcggagaggttccgccccccggatctccggcttccggcaactgggctggaccgaaaccggcgcggagcaactgaggcccgagccttctcgggacccgggggacgcctaaccccgcgagatgaggaaactgaggccgcgaggagcgcgcatacagcagagaagcagcagaatcgggaatcaaacccagctctgtctgaccccagagcctgtgcctttaaccactggctaggctgaactgcctttgttcttcactgtccccatcacctctttcaaacctcagcctctccttcctcatcgttacatctctaggctgcacctgctctctaaacattcacacaaaccctgcaaattttcttcctcataattgggagaagactcactggccgaatggcagcagtagatgacttgcaatttgaagaatttggcaatgcagccacttctctgacagcaaacccagatgccaccacagtaaacattgaggatcctggtgaaaccccaaaacatcagccaggatccccaagaggctcaggaagagaagaagatgatgagttactgggaaatgatgactctgacaaaactgagttacttgctggacagaagaaaagctcccccttctggacatttgaatactaccaaacattctttgatgtggacacctaccaggtctttgacagaattaaaggatctcttttgccaatacccgggaaaaactttgtgaggttatatatccgcagcaatccagatctctatggccccttttggatatgtgccacgttggtctttgccatagcaattagtgggaatctttccaacttcttgatccatctgggagagaagacgtaccattatgtgcccgaattccgaaaagtgtccatagcagctaccatcatctatgcctatgcctggctggttcctcttgcactctggggtttcctcatgtggagaaacagcaaagttatgaacatcgtctcctattcatttctggagattgtgtgtgtctatggatattccctcttcatttatatccccaccgcagta

SEQ ID NO: 200599 - DNA, 1602 bp, Homo sapiens
  Payload ID: 19591
  Gene Name: Yip1 domain family, member 1
  Uniprot ID: Q9Y548
  ENST ID: ENST00000464950
  CDS Start-End: 71-991
ggggacgcctaaccccgcgagaaccctgcaaattttcttcctcataattgggagaagactcactggccgaatggcagcagtagatgacttgcaatttgaagaatttggcaatgcagccacttctctgacagcaaacccagatgccaccacagtaaacattgaggatcctggtgaaaccccaaaacatcagccaggatccccaagaggctcaggaagagaagaagatgatgagttactgggaaatgatgactctgacaaaactgagttacttgctggacagaagaaaagctcccccttctggacatttgaatactaccaaacattctttgatgtggacacctaccaggtctttgacagaattaaaggatctcttttgccaatacccgggaaaaactttgtgaggttatatatccgcagcaatccagatctctatggccccttttggatatgtgccacgttggtctttgccatagcaattagtgggaatctttccaacttcttgatccatctgggagagaagacgtaccattatgtgcccgaattccgaaaagtgtccatagcagctaccatcatctatgcctatgcctggctggttcctcttgcactctggggtttcctcatgtggagaaacagcaaagttatgaacatcgtctcctattcatttctggagattgtgtgtgtctatggatattccctcttcatttatatccccaccgcaatactgtggattatcccccagaaagctgttcgttggattctagtcatgattgccctgggcatctcaggatctctcttggcaatgacattttggccagctgttcgtgaggataaccgacgcgttgcattggccacaattgtgacaattgtgttgctccatatgctgctttctgtgggctgcttggcatacttttttgatgcaccagagatggaccatctcccaacaactacagctactccaaaccaaacagttgctgcagccaagtccagctaatgaggaaagactcacttgagataccctctccttgctgaagtttttcttgacttctccagttctcttttgttttttggagcatggttctttgggaagtggcatccactgcaggaaagcagaatgagcagagccagcagaactgatggagtggcacaaattcccagtgtctggatggtgccacactggcgcctaatcacccgtttaacaagcagaaattaaatgttgctcagcacatgtgtctttcagctcttccttttcacccatggatgatcattgcgagcatgcgctgattggactgaaatgccagggaataggttaggcatgctcagtgccgtccctttgccaccacagtcaaatgacatgcttcactgtggtaccttaatacctgaaatagaaccatggaaaattctgatgtcctctctctgaattatgtacagactacctgggggatcctcttctctccaaatgttagccatcctgaagtagccgaacagtagaaactttggtggggattaaccgggagcttgaaaatttgtctttggtaacctgatactggacagctgaactgaatggctgcaaaataaatacctcacatgatgtctgtgtctgca

SEQ ID NO: 200600 - DNA, 2087 bp, Homo sapiens
  Payload ID: 19592
  Gene Name: Yip1 domain family, member 2
  Uniprot ID: Q9BWQ6
  ENST ID: ENST00000253031
  CDS Start-End: 128-1078
ggatgttgctgtcaggtctgagtcggttggagtctgacgggtaggcgagacgcgcaggcgcagagagccccagccacgccggcccaggtggcctcagcgagggatgcggagacgcccctgaacgaccatggcatcggccgacgagctgaccttccatgaattcgaggaggccactaatcttctggctgacaccccagatgcagccaccaccagcagaagcgatcagctgaccccacaagggcacgtggctgtggccgtgggctcaggtggcagctatggagccgaggatgaggtggaggaggagagtgacaaggccgcgctcctgcaggagcagcagcagcagcagcagccgggattctggaccttcagctactatcagagcttctttgacgtggacacctcacaggtcctggaccggatcaaaggctcactgctgccccggcctggccacaactttgtgcggcaccatctgcggaatcggccggatctgtatggccccttctggatctgtgccacgttggcctttgtcctggccgtcactggcaacctgacgctggtgctggcccagaggagggacccctccatccactacagcccccagttccacaaggtgaccgtggcaggcatcagcatctactgctatgcgtggctggtgcccctggccctgtggggcttcctgcggtggcgcaagggtgtccaggagcgcatggggccctacaccttcctggagactgtgtgcatctacggctactccctctttgtcttcatccccatggtggtcctgtggctcatccctgtgccttggctgcagtggctctttggggcgctggccctgggcctgtcagccgccgggctggtattcaccctctggcccgtggtccgtgaggacaccaggctggtggccacagtgctgctgtccgtggtcgtgctgctccacgccctcctggccatgggctgtaagttgtacttcttccagtcgctgcctccggagaacgtggctcctccaccccaaatcacatctctgccctcaaacatcgcgctgtcccctaccttgccgcagtccctggccccctcctaggaaggcccgggtcccacaggcaacacctaagtggaccaacccctctgcctgtcctgccccccagacgatgactgaaggctcctttgacaccttgagatgattctgctactttccagacttttcttacaaagcaaacacttttattttctatgcaaaggtgattcagagaatttatataaaggcgggcgaggggcagccgagcagggagctttgggacagggctggggcccccatatcccccccgggccacctgctttccctcctatggctcccctggaacaggagggagagccaagggggcggcccagcctggacagcgcccgctcctgcctgggtgcacacacggcgggcctgagctccagcatctgagtttgggggtatgagaaacaggggagcagaaggagaagaaaactgcctgtgctgcaacacgtttcctcatttattttttctttctttttctttttttctttttttggagggagaggtccctgcaaggtcccttcccgggcaggggagggatggaaatgccgtcacagtagtagggactggagcgtctacaaggatggaggggagctactcaggcctaacgttagctacaaggaaaaaggacgccttccgtgacagatccttgaggtgtctgtgtctgccccaagtggccggcagtggccttccctccgggcccaaggcctgcagccacctgctctaactcttgagtgggggggcggggggggacctgcaggggctcggggacaggacagcagcaagaggcaggggccgaggacggaggccttcccgacagtggggtgggttgtacattcaagtgtgaggtgaaccctttggtggggagggggcccctgaagcctcggcggggccacccctccccgcggcgcctctgagtctagggagaggggctgctggctcggcccggccggcctggcttcacagagggtctgcggattgacactggttcttttcataaaaaaataaaattaaaaaaagcagcatgtca

SEQ ID NO: 200601 - DNA, 656 bp, Homo sapiens
  Payload ID: 19592
  Gene Name: Yip1 domain family, member 2
  ENST ID: ENST00000585858
  CDS Start-End: 97-656
gtctgacgggtaggcgagacgcgcaggcgcagagagccccagccacgccggcccaggtggcctcagcgagggatgcggagacgcccctgaacgaccatggcatcggccgacgagctgaccttccatgaattcgaggaggccactaatcttctggctgacaccccagatgcagccaccaccagcagaagcgatcagctgaccccacaagggcacgtggctgtggccgtgggctcaggtggcagctatggagccgaggatgaggtggaggaggagagtgacaaggccgcggtcctggaccggatcaaaggctcactgctgccccggcctggccacaactttgtgcggcaccatctgcggaatcggccggatctgtatggccccttctggatctgtgccacgttggcctttgtcctggccgtcactggcaacctgacgctggtgctggcccagaggagggacccctccatccactacagcccccagttccacaaggtgaccgtggcaggcatcagcatctactgctatgcgtggctggtgcccctggccctgtggggcttcctgcggtggcgcaagggtgtccaggagcgcatggggccctacaccttcctggagactgtgtgcatctacggctactccctctttgtcttcatccccat

SEQ ID NO: 200602 - DNA, 430 bp, Homo sapiens
  Payload ID: 19592
  Gene Name: Yip1 domain family, member 2
  ENST ID: ENST00000591872
  CDS Start-End: 1-240
ctgtcagccgccgggctggtattcaccctctggcccgtggtccgtgaggacaccaggctggtggccacagtgctgctgtccgtggtcgtgctgctccacgccctcctggccatgggctgtaagttgtacttcttccagtcgctgcctccggagaacgtggctcctccaccccaaatcacatctctgccctcaaacatcgcgctgtcccctaccttgccgcagtccctggccccctcctaggaaggcccgggtcccacaggtaaggactattcccagctgggctaagggggctgccctcccactcccagtcaaggcgagaggttctggggccactcccagacaattctttctttcaggcaacacctaagtggaccaacccctctgcctgtcctgccccccagacgatgactgaaggctcctttgacacctt

SEQ ID NO: 200603 - DNA, 796 bp, Homo sapiens
  Payload ID: 19592
  Gene Name: Yip1 domain family, member 2
  ENST ID: ENST00000587943
  CDS Start-End: 543-796
ggcgcagagagccccagccacgccggcccaggtggcctcagcgagggatgcggagacgcccctgaacgaccatggcatcggccgacgagctgaccttccatgcccccagctgacccaggctctccgggcaggcactgaatgcccgcaatgtgcagctcctgcaggagcagcagcagcagcagcagccgggattctggaccttcagctactatcagagcttctttgacgtggacacctcacaggtcctggaccggatcaaaggctcactgctgccccggcctggccacaactttgtgcggcaccatctgcggaatcggccggatctgtatggccccttctggatctgtgccacgttggcctttgtcctggccgtcactggcaacctgacgctggtgctggcccagaggagggacccctccatccactacagcccccagttccacaaggtgaccgtggcaggcatcagcatctactgctatgcgtggctggtgcccctggccctgtggggcttcctgcggtggcgcaagggtgtccaggagcgcatggggccctacaccttcctggagactgtgtgcatctacggctactccctctttgtcttcatccccatggtggtcctgtggctcatccctgtgccttggctgcagtggctctttggggcgctggccctgggcctgtcagccgccgggctggtattcaccctctggcccgtggtccgtgaggacaccaggctggtggccacagtgctgctgtccgtggtcgtgctgctccacgccctcctggccatgggctgtaa

SEQ ID NO: 200604 - DNA, 1550 bp, Homo sapiens
  Payload ID: 19592
  Gene Name: Yip1 domain family, member 2
  Uniprot ID: Q9BWQ6
  ENST ID: ENST00000586748
  CDS Start-End: 174-1124
ggagtctgacgggtaggcgagacgcgcaggcgcagagagccccagccacgccggcccaggtggcctcaggtgagggggggcggagcgcacctgtggggacgggacgacgagttcaagcctccgtgggtgcagttggtcgccagcgagggatgcggagacgcccctgaacgaccatggcatcggccgacgagctgaccttccatgaattcgaggaggccactaatcttctggctgacaccccagatgcagccaccaccagcagaagcgatcagctgaccccacaagggcacgtggctgtggccgtgggctcaggtggcagctatggagccgaggatgaggtggaggaggagagtgacaaggccgcgctcctgcaggagcagcagcagcagcagcagccgggattctggaccttcagctactatcagagcttctttgacgtggacacctcacaggtcctggaccggatcaaaggctcactgctgccccggcctggccacaactttgtgcggcaccatctgcggaatcggccggatctgtatggccccttctggatctgtgccacgttggcctttgtcctggccgtcactggcaacctgacgctggtgctggcccagaggagggacccctccatccactacagcccccagttccacaaggtgaccgtggcaggcatcagcatctactgctatgcgtggctggtgcccctggccctgtggggcttcctgcggtggcgcaagggtgtccaggagcgcatggggccctacaccttcctggagactgtgtgcatctacggctactccctctttgtcttcatccccatggtggtcctgtggctcatccctgtgccttggctgcagtggctctttggggcgctggccctgggcctgtcagccgccgggctggtattcaccctctggcccgtggtccgtgaggacaccaggctggtggccacagtgctgctgtccgtggtcgtgctgctccacgccctcctggccatgggctgtaagttgtacttcttccagtcgctgcctccggagaacgtggctcctccaccccaaatcacatctctgccctcaaacatcgcgctgtcccctaccttgccgcagtccctggccccctcctaggaaggcccgggtcccacaggcaacacctaagtggaccaacccctctgcctgtcctgccccccagacgatgactgaaggctcctttgacaccttgagatgattctgctactttccagacttttcttacaaagcaaacacttttattttctatgcaaaggtgattcagagaatttatataaaggcgggcgaggggcagccgagcagggagctttgggacagggctggggcccccatatcccccccgggccacctgctttccctcctatggctcccctggaacaggagggagagccaagggggcggcccagcctggacagcgcccgctcctgcctgggtgcacacacggcgggcctgagctccagcatctgagtttgggggtatgagaaacaggggagcagaaggagaagaaaactgcctgtgctgcaa

SEQ ID NO: 200605 - DNA, 932 bp, Homo sapiens
  Payload ID: 19592
  Gene Name: Yip1 domain family, member 2
  ENST ID: ENST00000586575
  CDS Start-End: 622-932
ggttggagtctgacgggtaggcgagacgcgcaggcgcagagagccccagccacgccggcccaggtggcctcagaattcgaggaggccactaatcttctggctgacaccccagatgcagccaccaccagcagaagcgatcagctgaccccacaagggcacgtggctgtggccgtgggctcaggtggcagctatggagccgaggatgaggtggaggaggagagtgacaaggccgcgctcctgcaggagcagcagcagcagcagcagccgggattctggaccttcagctactatcagagcttctttgacgtggacacctcacaggtcctggaccggatcaaaggctcactgctgccccggcctggccacaactttgtgcggcaccatctgcggaatcggccggatctgtatggccccttctggatctgtgccacgttggcctttgtcctggccgtcactggcaacctgacgctggtgctggcccagaggagggacccctccatccactacagcccccagttccacaaggtgaccgtggcaggcatcagcatctactgctatgcgtggctggtgcccctggccctgtggggcttcctgcggtggcgcaagggtgtccaggagcgcatggggccctacaccttcctggagactgtgtgcatctacggctactccctctttgtcttcatccccatggtggtcctgtggctcatccctgtgccttggctgcagtggctctttggggcgctggccctgggcctgtcagccgccgggctggtattcaccctctggcccgtggtccgtgaggacaccaggctggtggccacagtgctgctgtccgtggtcgtgctgctccacgccctcctggccatgggctgtaagttgtacttcttccagtcgctgcctccggagaacgtggctcctccaccccaaatcac

SEQ ID NO: 200606 - DNA, 958 bp, Homo sapiens
  Payload ID: 19592
  Gene Name: Yip1 domain family, member 2
  ENST ID: ENST00000590329
  CDS Start-End: 106-939
ggtgagggggggcggagcgcacctgtggggacgggacgacgagttcaagcctccgtgggtgcagttggtcgccagcgagggatgcggagacgcccctgaacgaccatggcatcggccgacgagctgaccttccatgaattcgaggaggccactaatcttctggctgacaccccagatgcagccaccaccagcagaagcgatcagctgaccccacaagggcacgtggctgtggccgtgggctcaggtggcagctatggagccgaggatgaggtggaggaggagagtgacaaggccgcgctcctgcaggagcagcagcagcagcagcagccgggattctggaccttcagctactatcagagcttctttgacgtggacacctcacaggtcctggaccggatcaaaggctcactgctgccccggcctggccacaactttgtgcggcaccatctgcggaatcggccggatctgtatgtgaccgtggcaggcatcagcatctactgctatgcgtggctggtgcccctggccctgtggggcttcctgcggtggcgcaagggtgtccaggagcgcatggggccctacaccttcctggagactgtgtgcatctacggctactccctctttgtcttcatccccatggtggtcctgtggctcatccctgtgccttggctgcagtggctctttggggcgctggccctgggcctgtcagccgccgggctggtattcaccctctggcccgtggtccgtgaggacaccaggctggtggccacagtgctgctgtccgtggtcgtgctgctccacgccctcctggccatgggctgtaagttgtacttcttccagtcgctgcctccggagaacgtggctcctccaccccaaatcacatctctgccctcaaacatcgcgctgtcccctaccttgccgcagtccctggccccctcctaggaaggcccgggtcccacag

SEQ ID NO: 200607 - DNA, 879 bp, Homo sapiens
  Payload ID: 19592
  Gene Name: Yip1 domain family, member 2
  ENST ID: ENST00000589971
  CDS Start-End: 1-620
ctggcaacctgacgctggtgctggcccagaggagggacccctccatccactacagcccccagttccacaaggcatctactgctatgcgtggctggtgcccctggccctgtggggcttcctgcggtggcgcaagggtgtccaggagcgcatggggccctacaccttcctggagactgtgtgcatctacggctactccctctttgtcttcatccccatggtggtcctgtggctcatccctgtgccttggctgcagtggctctttggggcgctggccctgggcctgtcagccgccgggctggtattcaccctctggcccgtggtccgtgaggacaccaggctggtggccacagtgctgctgtccgtggtcgtgctgctccacgccctcctggccatgggctgtaagttgtacttcttccagtcgctgcctccggagaacgtggctcctccaccccaaatcacatctctgccctcaaacatcgcgctgtcccctaccttgccgcagtccctggccccctcctaggaaggcccgggtcccacaggcaacacctaagtggaccaacccctctgcctgtcctgccccccagacgatgactgaaggctcctttgacaccttgagatgattctgctactttccagacttttcttacaaagcaaacacttttattttctatgcaaaggtgattcagagaatttatataaaggcgggcgaggggcagccgagcagggagctttgggacagggctggggcccccatatcccccccgggccacctgctttccctcctatggctcccctggaacaggagggagagccaagggggcggcccagcctggacagcgcccgctcctgcctgggtgcacacacggcgggcctgagctc

SEQ ID NO: 200608 - DNA, 950 bp, Homo sapiens
  Payload ID: 19592
  Gene Name: Yip1 domain family, member 2
  ENST ID: ENST00000592646
  CDS Start-End: 1-509
ggagggacccctccatccactacagcccccagttccacaaggtgaccgtggcaggcatcagcatctactgctatgcgtggctggtgcccctggccctgtggggcttcctgcggtggcgcaagggtgtccaggagcgcatggggccctacaccttcctggagactgtgtgcatctacggctactccctctttgtcttcatccccatggtggtcctgtggctcatccctgtgccttggctgcagtggctctttggggcgctggccctgggcctgtcagccgccgggctggtattcaccctctggcccgtggtccgtgaggacaccaggctggtggccacagtgctgctgtccgtggtcgtgctgctccacgccctcctggccatgggctgtaagttgtacttcttccagtcgctgcctccggagaacgtggctcctccaccccaaatcacatctctgccctcaaacatcgcgctgtcccctaccttgccgcagtccctggccccctcctaggaaggcccgggtcccacagacaattctttctttcaggcaacacctaagtggaccaacccctctgcctgtcctgccccccagacgatgactgaaggctcctttgacaccttgagatgattctgctactttccagacttttcttacaaagcaaacacttttattttctatgcaaaggtgattcagagaatttatataaaggcgggcgaggggcagccgagcagggagctttgggacagggctggggcccccatatcccccccgggccacctgctttccctcctatggctcccctggaacaggagggagagccaagggggcggcccagcctggacagcgcccgctcctgcctgggtgcacacacggcgggcctgagctccagcatctgagtttgggggtatgagaaacaggggagcagaaggagaagaaaactgcctgtgctgc

SEQ ID NO: 200609 - DNA, 753 bp, Homo sapiens
  Payload ID: 19592
  Gene Name: Yip1 domain family, member 2
  ENST ID: ENST00000588347
  CDS Start-End: 103-753
aggtagggctgggggccgagggaccggctcgggggcgggggggaagtgtgcctgaccggtctctgtcctcagcgagggatgcggagacgcccctgaacgaccatggcatcggccgacgagctgaccttccatgaattcgaggaggccactaatcttctggctgacaccccagatgcagccaccaccagcagaagcgatcagctgaccccacaagggcacgtggctgtggccgtgggctcaggtggcagctatggagccgaggatgaggtggaggaggagagtgacaaggccgcgctcctgcaggagcagcagcagcagcagcagccgggattctggaccttcagctactatcagagcttctttgacgtggacacctcacaggtcctggaccggatcaaaggctcactgctgccccggcctggccacaactttgtgcggcaccatctgcggaatcggccggatctgtatggccccttctggatctgtgccacgttggcctttgtcctggccgtcactggcaacctgacgctggtgctggcccagaggagggacccctccatccactacagcccccagttccacaaggtgaccgtggcaggcatcagcatctactgctatgcgtggctggtgcccctggccctgtggggcttcctgcggtggcgcaagggtgtccaggagcgcatggggccctacaccttcctggagactgtgtgcatctacggctactccctctttgtcttcatccccatggtg

SEQ ID NO: 200610 - DNA, 1576 bp, Homo sapiens
  Payload ID: 19593
  Gene Name: Yip1 domain family, member 3
  Uniprot ID: Q9GZM5
  ENST ID: ENST00000372422
  CDS Start-End: 184-1236
cccccgtccacgtccccagcttccggaagttgcttttgtccaaacatccgggcttctcctttttgtgttccggccgatcccacctctcctcgaccctggacgtctaccttccggaggcccacatcttgcccactccgcgcgcggggctagcgcgggtttcagcgacgggagccctcaagggacatggcaactacagcggcgccggcgggcggcgcccgaaatggagctggcccggaatggggagggttcgaagaaaacatccagggcggaggctcagctgtgattgacatggagaacatggatgatacctcaggctctagcttcgaggatatgggtgagctgcatcagcgcctgcgcgaggaagaagtagacgctgatgcagctgatgcagctgctgctgaagaggaggatggagagttcctgggcatgaagggctttaagggacagctgagccggcaggtggcagatcagatgtggcaggctgggaaaagacaagcctccagggccttcagcttgtacgccaacatcgacatcctcagaccctactttgatgtggagcctgctcaggtgcgaagcaggctcctggagtccatgatccctatcaagatggtcaacttcccccagaaaattgcaggtgaactctatggacctctcatgctggtcttcactctggttgctatcctactccatgggatgaagacgtctgacactattatccgggagggcaccctgatgggcacagccattggcacctgcttcggctactggctgggagtctcatccttcatttacttccttgcctacctgtgcaacgcccagatcaccatgctgcagatgttggcactgctgggctatggcctctttgggcattgcattgtcctgttcatcacctataatatccacctccacgccctcttctacctcttctggctgttggtgggtggactgtccacactgcgcatggtagcagtgttggtgtctcggaccgtgggccccacacagcggctgctcctctgtggcaccctggctgccctacacatgctcttcctgctctatctgcattttgcctaccacaaagtggtagaggggatcctggacacactggagggccccaacatcccgcccatccagagggtccccagagacatccctgccatgctccctgctgctcggcttcccaccaccgtcctcaacgccacagccaaagctgttgcggtgaccctgcagtcacactgaccccacctgaaattcttggccagtcctctttcccgcagctgcagagaggaggaagactattaaaggacagtcctgatgacatgtttcgtagatggggtttgcagctgccactgagctgtagctgcgtaagtacctccttgatgcctgtcggcacttctgaaaggcacaaggccaagaactcctggccaggactgcaaggctctgcagccaatgcagaaaatgggtcagctcctttgagaacccctccccacctaccccttccttcctctttatctctcccacattgtcttgctaaatatagacttggtaattaaaatgttgattgaagtctggaactgca

SEQ ID NO: 200611 - DNA, 1005 bp, Homo sapiens
  Payload ID: 19593
  Gene Name: Yip1 domain family, member 3
  ENST ID: ENST00000416380
  CDS Start-End: 136-327
cgggcttctcctttttgtgttccggccgatcccacctctcctcgaccctggacgtctaccttccggaggcccacatcttgcccactccgcgcgcggggctagcgcgggtttcagcgacgggagccctcaagggacatggcaactacagcggcgccggcgggcggcgcccgaaatggagctggcccggaatggggagggttcgaagaaaacatccagtggaagaacaaagccctaaaccctgggatgagcagaggacttaatggatggaacagaaaagtcctgcactctaggagccattgtcttcacagggcggaggctcagctgtgattgacatggagaacatggatgatacctcaggctctagcttcgaggatatgggtgagctgcatcagcgcctgcgcgaggaagaagtagacgctgatgcagctgatgcagctgctgctgaagaggaggatggagagttcctgggcatgaagggctttaagggacagctgagccggcaggtggcagatcagatgtggcaggctgggaaaagacaagcctccagggccttcagcttgtacgccaacatcgacatcctcagaccctactttgatgtggagcctgctcaggtgcgaagcaggctcctggagtccatgatccctatcaagatggtcaacttcccccagaaaattgcaggtgaactctatggacctctcatgctggtcttcactctggttgctatcctactccatgggatgaagacgtctgacactattatccgggagggcaccctgatgggcacagccattggcacctgcttcggctactggctgggagtctcatccttcatttacttccttgcctacctgtgcaacgcccagatcaccatgctgcagatgttggcactgctgggctatggcctctttgggcattgcattgtcctgttcatcacctataatatccacctccacgccctcttctacctcttctggctgttggtgggtggactgtccacactgcgca

SEQ ID NO: 200612 - DNA, 843 bp, Homo sapiens
  Payload ID: 19593
  Gene Name: Yip1 domain family, member 3
  ENST ID: ENST00000455768
  CDS Start-End: 113-250
ggccgatcccacctctcctcgaccctggacgtctaccttccggaggcccacatcttgcccactccgcgcgcggggctagcgcgggtttcagcgacgggagccctcaagggacatggcaactacagcggcgccggcgggcggcgcccgaaatggagctggcccggaatggggagggttcgaagaaaacatccaggctctagcttcgaggatatgggtgagctgcatcagcgcctgcgcgaggaagaagtagacgctgatgcagctgatgcagctgctgctgaagaggaggatggagagttcctgggcatgaagggctttaagggacagctgagccggcaggtggcagatcagatgtggcaggctgggaaaagacaagcctccagggccttcagcttgtacgccaacatcgacatcctcagaccctactttgatgtggagcctgctcaggtgcgaagcaggctcctggagtccatgatccctatcaagatggtcaacttcccccagaaaattgcaggtgaactctatggacctctcatgctggtcttcactctggttgctatcctactccatgggatgaagacgtctgacactattatccgggagggcaccctgatgggcacagccattggcacctgcttcggctactggctgggagtctcatccttcatttacttccttgcctacctgtgcaacgcccagatcaccatgctgcagatgttggcactgctgggctatggcctctttgggcattgcattgtcctgttcatcacctataatatccacctccacgccctcttctacctcttctggctgttggtgggtggactgtccacactgcgcatg

SEQ ID NO: 200613 - DNA, 1674 bp, Homo sapiens
  Payload ID: 19593
  Gene Name: Yip1 domain family, member 3
  ENST ID: ENST00000460547
  CDS Start-End: 127-318
cctttttgtgttccggccgatcccacctctcctcgaccctggacgtctaccttccggaggcccacatcttgcccactccgcgcgcggggctagcgcgggtttcagcgacgggagccctcaagggacatggcaactacagcggcgccggcgggcggcgcccgaaatggagctggcccggaatggggagggttcgaagaaaacatccagtggaagaacaaagccctaaaccctgggatgagcagaggacttaatggatggaacagaaaagtcctgcactctaggagccattgtcttcacagggcggaggctcagctgtgattgacatggagaacatggatgatacctcaggctctagcttcgaggatatgggtgagctgcatcagcgcctgcgcgaggaagaagtagacgctgatgcagctgatgcagctgctgctgaagaggaggatggagagttcctgggcatgaagggctttaagggacagctgagccggcaggtggcagatcaggctcctggagtccatgatccctatcaagatggtcaacttcccccaggtgaatagagggtggcatgtctggagagccgggggaagcaccagggcagagggtgggaccaccaggcaaatcctgggaagccataaacagatgagctgttgtaccctccagcctgaatgaattggtatattgacagaaaattgcaggtgaactctatggacctctcatgctggtcttcactctggttgctatcctactccatgggatgaagacgtctgacactattatcgtaagcaggacagacaactttgggggggtggctgcactaggttgaaagctgcctgaggatacaatggtggagtgagacaggaacagcccctgcggaaggccctaggtgaggctgagatcagaggcctcctaggactaaatagagccttcaccccacagcgggagggcaccctgatgggcacagccattggcacctgcttcggctactggctgggagtctcatccttcatttacttccttgcctacctgtgcaacgcccagatcaccatgctgcagatgttggcactgctggtaaggagccaggtgtggtgggcaagagtgatgttaaaaagagtagccaggccttggtcggcatctgtcctggggccccaaagcctggaatgggaggagtaggccaatggaccatgtgtttcccagggtccccatgaggggccagaaagcagcccaacctgaatgattttcctctccaccatcctccttcccagggctatggcctctttgggcattgcattgtcctgttcatcacctataatatccacctccacgccctcttctacctcttctggctgttggtgggtggactgtccacactgcgcatggtaagctgggcaagaggcttccaggggtgggctgtcctcccagggagttggggaagacagcctggagctgtccatctcacaaagagccctaaatgggagggaagagcccaaagatggttctgccctgggtgggggtgtcttgtccccactcctcactttggagccaggccctttgagctgtattctcatggtcctaggtagcagtgttggtgtctcggaccgtgggccccacacagcggctgctcctctgtggcaccctggctgccctacacatgctcttcctgctctatctgca

SEQ ID NO: 200614 - DNA, 566 bp, Homo sapiens
  Payload ID: 19593
  Gene Name: Yip1 domain family, member 3
  ENST ID: ENST00000511831
  CDS Start-End: 239-566
tctttgggtcttcgtgcacactaaagtcagtgggattaacattgacctgaaagggccagactactactccagcctgaggatctcgggtttcagggcccgcccgaggcattaggaagaagcagtggaagaacaaagccctaaaccctgggatgagcagaggacttaatggatggaacagaaaagtcctgcactctaggagccattgtcttcacagggcggaggctcagctgtgattgacatggagaacatggatgatacctcaggctctagcttcgaggatatgggtgagctgcatcagcgcctgcgcgaggaagaagtagacgctgatgcagctgatgcagctgctgctgaagaggaggatggagagttcctgggcatgaagggctttaagggacagctgagccggcaggtggcagatcagatgtggcaggctgggaaaagacaagcctccagggccttcagcttgtacgccaacatcgacatcctcagaccctactttgatgtggagcctgctcaggtgcgaagcaggctcctggagtccatgatccctatcaagatggtcaact

SEQ ID NO: 200615 - DNA, 933 bp, Homo sapiens
  Payload ID: 19593
  Gene Name: Yip1 domain family, member 3
  ENST ID: ENST00000503972
  CDS Start-End: 147-933
gtccaaacatccgggcttctcctttttgtgttccggccgatcccacctctcctcgaccctggacgtctaccttccggaggcccacatcttgcccactccgcgcgcggggctagcgcgggtttcagcgacgggagccctcaagggacatggcaactacagcggcgccggcgggcggcgcccgaaatggagctggcccggaatggggagggttcgaagaaaacatccagggcggaggctcagctgtgattgacatggagaacatggatgatacctcaggctctagcttcgaggatatgggtgagctgcatcagcgcctgcgcgaggaagaagtagacgctgatgcagctgatgcagctgctgctgaagaggaggatggagagttcctgggcatgaagggctttaagggacagctgagccggcaggtggcagatcagatgtggcaggctgggaaaagacaagcctccagggccttcagcttgtacgccaacatcgacatcctcagaccctactttgatgtggagcctgctcaggtgcgaagcaggctcctggagtccatgatccctatcaagatggtcaacttcccccagaaaattgcaggtgaactctatggacctctcatgctggtcttcactctggttgctatcctactccatgggatgaagacgtctgacactattatcatcaccatgctgcagatgttggcactgctgggctatggcctctttgggcattgcattgtcctgttcatcacctataatatccacctccacgccctcttctacctcttctggctgttggtgggtggactgtccacactgcgcatggtagcagtgttggtgtctcggaccgtgggccccacacagcggctgctcctctgtggcaccctggctgccctacacatgctcttcctgctctatctgcattttgcctacc

SEQ ID NO: 200616 - DNA, 406 bp, Homo sapiens
  Payload ID: 19593
  Gene Name: Yip1 domain family, member 3
  ENST ID: ENST00000500090
  CDS Start-End: 1-406
ggaaaagacaagcctccagggccttcagcttgtacgccaacatcgacatcctcagaccctactttgatgtggagcctgctcaggtgcgaagcagaactctgtgcttgccagccgggcatggtggctcacgcctggaatcccagcactttgggaggccgaggcgggcggatcacaaggtcaggagatcgagaccatcctggctaacacggctcctggagtccatgatccctatcaagatggtcaacttcccccagaaaattgcaggtgaactctatggacctctcatgctggtcttcactctggttgctatcctactccatgggatgaagacgtctgacactattatccgggagggcaccctgatgggcacagccattggcacctgcttcggctactggctgggagt

SEQ ID NO: 200617 - DNA, 1321 bp, Homo sapiens
  Payload ID: 19593
  Gene Name: Yip1 domain family, member 3
  ENST ID: ENST00000490447
  CDS Start-End: 166-360
gcttccggaagttgcttttgtccaaacatccgggcttctcctttttgtgttccggccgatcccacctctcctcgaccctggacgtctaccttccggaggcccacatcttgcccactccgcgcgcggggctagcgcgggtttcagcgacgggagccctcaagggacatggcaactacagcggcgccggcgggcggcgcccgaaatggagctggcccggaatggggagggttcgaagaaaacatccagcagtggaagaacaaagccctaaaccctgggatgagcagaggacttaatggatggaacagaaaagtcctgcactctaggagccattgtcttcacagggcggaggctcagctgtgattgacatggagaacatggatgatacctcaggctctagcttcgaggatatgggtgagctgcatcagcgcctgcgcgaggaagaagtagacgctgatgcagctgatgcagctgctgctgaagaggaggatggagagttcctgggcatgaagggctttaagggacagctgagccggcaggtggcagatcagatgtggcaggctgggaaaagacaagcctccagggccttcagcttgtacgccaacatcgacatcctcagaccctactttgatgtggagcctgctcaggtgcgaagcaggctcctggagtccatgatccctatcaagatggtcaacttcccccagaaaattgcaggtgaactctatggacctctcatgctggtcttcactctggttgctatcctactccatgggatgaagacgtctgacactattatccgggagggcaccctgatgggcacagccattggcacctgcttcggctactggctgggagtctcatccttcatttacttccttgcctacctgtgcaacgcccagatcaccatgctgcagatgttggcactgctgggctatggcctctttgggcattgcattgtcctgttcatcacctataatatccacctccacgccctcttctacctcttctggctgttggtgggtggactgtccacactgcgcatggtagcagtgttggtgtctcggaccgtgggccccacacagcggctgctcctctgtggcaccctggctgccctacacatgctcttcctgctctatctgcattttgcctaccacaaagtggtagaggggatcctggacacactggagggccccaacatcccgcccatccagagggtccccagagacatccctgccatgctccctgctgctcggcttcccaccaccgtcctcaacgccacagccaaagctgttgcggtgaccctgcagtcacactgaccccacct

SEQ ID NO: 200618 - DNA, 1444 bp, Homo sapiens
  Payload ID: 19593
  Gene Name: Yip1 domain family, member 3
  ENST ID: ENST00000506469
  CDS Start-End: 135-1205
gggcttctcctttttgtgttccggccgatcccacctctcctcgaccctggacgtctaccttccggaggcccacatcttgcccactccgcgcgcggggctagcgcgggtttcagcgacgggagccctcaagggacatggcaactacagcggcgccggcgggcggcgcccgaaatggagctggcccggaatggggagggttcgaagaaaacatccaggagccattgtcttcacagggcggaggctcagctgtgattgacatggagaacatggatgatacctcaggctctagcttcgaggatatgggtgagctgcatcagcgcctgcgcgaggaagaagtagacgctgatgcagctgatgcagctgctgctgaagaggaggatggagagttcctgggcatgaagggctttaagggacagctgagccggcaggtggcagatcagatgtggcaggctgggaaaagacaagcctccagggccttcagcttgtacgccaacatcgacatcctcagaccctactttgatgtggagcctgctcaggtgcgaagcaggctcctggagtccatgatccctatcaagatggtcaacttcccccagaaaattgcaggtgaactctatggacctctcatgctggtcttcactctggttgctatcctactccatgggatgaagacgtctgacactattatccgggagggcaccctgatgggcacagccattggcacctgcttcggctactggctgggagtctcatccttcatttacttccttgcctacctgtgcaacgcccagatcaccatgctgcagatgttggcactgctgggctatggcctctttgggcattgcattgtcctgttcatcacctataatatccacctccacgccctcttctacctcttctggctgttggtgggtggactgtccacactgcgcatggtagcagtgttggtgtctcggaccgtgggccccacacagcggctgctcctctgtggcaccctggctgccctacacatgctcttcctgctctatctgcattttgcctaccacaaagtggtagaggggatcctggacacactggagggccccaacatcccgcccatccagagggtccccagagacatccctgccatgctccctgctgctcggcttcccaccaccgtcctcaacgccacagccaaagctgttgcggtgaccctgcagtcacactgaccccacctgaaattcttggccagtcctctttcccgcagctgcagagaggaggaagactattaaaggacagtcctgatgacatgtttcgtagatggggtttgcagctgccactgagctgtagctgcgtaagtacctccttgatgcctgtcggcacttctgaaaggcacaaggccaagaactcctggccaggactgcaaggctctgcagccaatgcagaaaatgggtcagctcctttgaga

SEQ ID NO: 200619 - DNA, 1639 bp, Homo sapiens
  Payload ID: 19593
  Gene Name: Yip1 domain family, member 3
  ENST ID: ENST00000510102
  CDS Start-End: 179-370
gtccacgtccccagcttccggaagttgcttttgtccaaacatccgggcttctcctttttgtgttccggccgatcccacctctcctcgaccctggacgtctaccttccggaggcccacatcttgcccactccgcgcgcggggctagcgcgggtttcagcgacgggagccctcaagggacatggcaactacagcggcgccggcgggcggcgcccgaaatggagctggcccggaatggggagggttcgaagaaaacatccagtggaagaacaaagccctaaaccctgggatgagcagaggacttaatggatggaacagaaaagtcctgcactctaggagccattgtcttcacagggcggaggctcagctgtgattgacatggagaacatggatgatacctcaggctctagcttcgaggatatgggtgagctgcatcagcgcctgcgcgaggaagaagtagacgctgatgcagctgatgcagctgctgctgaagaggaggatggagagttcctgggcatgaagggctttaagggacagctgagccggcaggtggcagatcagatgtggcaggctgggaaaagacaagcctccagggccttcagcttgtacgccaacatcgacatcctcagaccctactttgatgtggagcctgctcaggctcctggagtccatgatccctatcaagatggtcaacttcccccagaaaattgcaggtgaactctatggacctctcatgctggtcttcactctggttgctatcctactccatgggatgaagacgtctgacactattatccgggagggcaccctgatgggcacagccattggcacctgcttcggctactggctgggagtctcatccttcatttacttccttgcctacctgtgcaacgcccagatcaccatgctgcagatgttggcactgctgggctatggcctctttgggcattgcattgtcctgttcatcacctataatatccacctccacgccctcttctacctcttctggctgttggtgggtggactgtccacactgcgcatggtagcagtgttggtgtctcggaccgtgggccccacacagcggctgctcctctgtggcaccctggctgccctacacatgctcttcctgctctatctgcattttgcctaccacaaagtggtagaggggatcctggacacactggagggccccaacatcccgcccatccagagggtccccagagacatccctgccatgctccctgctgctcggcttcccaccaccgtcctcaacgccacagccaaagctgttgcggtgaccctgcagtcacactgaccccacctgaaattcttggccagtcctctttcccgcagctgcagagaggaggaagactattaaaggacagtcctgatgacatgtttcgtagatggggtttgcagctgccactgagctgtagctgcgtaagtacctccttgatgcctgtcggcacttctgaaaggcacaaggccaagaactcctggccaggactgcaaggctctgcagccaatgcagaaaatgggtcagctcctttgagaacccctccccacctaccccttccttcctctttatctctcccacattgtcttgctaaatatagacttggtaattaaaatgttgattgaa

SEQ ID NO: 200620 - DNA, 11949 bp, Homo sapiens
  Payload ID: 19594
  Gene Name: Yip1 domain family, member 4
  Uniprot ID: Q9BSR8
  ENST ID: ENST00000238831
  CDS Start-End: 247-981
gttatggtcctgtcagggtgccggcgtcgtggtgcttgggtggtcgccaccaagaagactttggtggggtagtctcggggcagctcagcggcccgctgtgcccgtttctggcctcgctcgcagcttgcacgtcgagactcgtaggccgcaccgtagggcgagcgtgcgggtcgccgccgcggccgcctcggggtctgggcccagccgcagcctcttctaccgcggccggttgggagtcgccgcgagatgcagcctccgggcccgcccccggcctatgcccccactaacggggacttcacctttgtctcctcagcagacgcggaagatctcagtggttcaatagcatccccagatgtcaaattaaatcttggtggagattttatcaaagaatctacagctactacatttctgagacaaagaggttatggctggcttctggaagttgaagatgatgatcctgaagataacaagccactcttggaagaattggacattgatctaaaggatatttactacaaaatccgatgtgttttgatgccaatgccatcacttggttttaatagacaagtggtgagagacaatcctgacttttggggtcctctggctgttgttcttttcttttccatgatatcattatatggacagtttagggtggtctcatggattataaccatttggatatttggttcactaacaattttcttactggccagagttcttggtggagaagttgcatatggccaagtccttggagttataggatattcattacttcctctcattgtaatagcccctgtacttttggtggttggatcatttgaagtggtgtctacacttataaaactgtttggtgtgttttgggctgcctacagtgctgcttcattgttagtgggtgaagaattcaagaccaaaaagcctcttctgatttatccaatctttttattatacatttattttttgtcgttatatactggtgtgtgatccaagttatacatgaatagaaaaagatggtgttaaatttgtgtgtaggctgggaattcttgctgaaggaattggagaaaacctgttgctgcaaaattttacatgttccagatggaaagggaagtctaagcgctttttaaaacaatttttttttgtatttaattaagcaattgcagttatctgggatttttgggtcagaattttaaattctgtttgattctccatattccagtgaataaaatacaaaagcattgtgtttttaagattgtgtcgatattcacctaaaaacttgtgccaaaagcacctggattggtaattatatttcacttaaagggtaaatttgacaatatcttgataatcaaaagtgcaatttttttcttcaaaatgttttctccagcatcacagatcctgcagatatatatttatatttatacatatatatttatgaaataattcttactcacaaaatatatttctgataaacattaagatattaaatctgatgcacaaactttttaatttggccattaatcttttttatttaaaaatttaaatttgtttttaaaattgtatatagtttttaaaatctcacacatgcttcgatacttccttgttaagaattcttaataactactaaaactgatttttaatagttgctgatatatatttggtttgtttgggtatacttttcaaaaccatttttgaatgtccaaacatctgatttaaagtttctgtttatctttctgaccaaaggagcaagaggtataatggatatggcattcattaaaatctttactatgtacaaaaacagtaatatttacagcatcagtaaatatttttaagtggtacttctaaatcataaaagttggggaaagagacctttaaaatcttgtggtgttgaacaatgttatatgaagtagaaaaaataaaatacttcccagttgtgtgttttgttttacagcaccatgtcctgtattacttgatattttaacaagtatcaggtactctctaacaaatgtacagtttttgctaagggaaatattaagaaatttttatcagtgaaatatttgttgcaaataatttcataggtttttagatacacctgtagttaatattactttgtaaagtaggtaaatcattttatttatgtccataaaatatcaaatgtctgttaactattagcaaattattgtattatcctttctggtctcacctggaagagtttcctgctgtcctcagtatgataacatggcgacctcttggtatgtatttctttagcaaacttacccatcaggaaatatccagcacctctgaagcaaacctacaaatgagtgtgttatcaagcccagccgtcttcctttcccctaatcccaaaaggaaagaaagaaaaacttattttaagctgcagaaaaagtgtggagcacttttgagctagaataatgtagaaaattacatgtactgatttttttaaaaacaggtgagaagcaccagagggacaggacttctagaagttagaataatatgaagtaatcaggaaatatctatgcctacagaagcagcaaccgtaagataaacatttgttacacttaagaaattgctgaggttaatactttgttataatggattataatatttgacattcatagtgttgaccctggaatctttcacagaaagcttgggggtcaggaccaggaggtagaattttacaaggcaataaatgaaggtattttaagatcacctctattaaaaaatggtttaatttttaaaaactatcattgctttaaggtatgaattttaaaaatcacttatatggatcatgtttactcctaatgatataagataaaatgaggtatttttgttccaaaaagtattttaaaatagcatttaatcttgggaactatcttacttagggtttctataaatacaaattacaatgtttcgaactcaaccagtatcattttcgtgtgctaatgagcaaagtagttagaacagattgtcagtttaaaaacaggatttgtaggccaggcacagtggctcacgcctgtaatcccagcactttgggaggccaaagtggatgagcagcttgagtcaggagtttgagaccagcctggccaacatggcgaaaccccgtctctactaaaaatacaaaaattagccgggcgtggtggcaggcgcctgtataatcccagctactcaggaggctgaggcagggagaatcgcttgaacccttggaggtggaggttgcagtgagccaagattgtgccattgcactccagcctgggtaacagagcaagactctctcaaaaaaaaaaaaaaaaaaaaaaaaaaccatgatttgtagatgtgtgcaagacacagtactgctatggctaataatggtaagatgaccctaataatgtcctctccttgaatttttatataataatattttctgagtcataactaattttttaaataatgatttccaatctaattattaattagaattttgttgttgttgtttgagacagagtcactctgtcacccaagctggagtgcaatggcacgatctcggctcactgcaagctctgcctcccgggtttgcaccattcttctgcctcagcctcacgagtagctgggactacaggcgcccaccaccatgcctggctaattttttgtatttttagtagagatggggtttcaccgtgttaaccaggatggtctcgatctcctgacctcgtgatccgcccgcctcagcctcccaaagtgccgggattacaggtgtcagccaccgcaccaggccagttcattagaatttttaaaacaggctgggcatggtggcttacgcctgtaatcccagcagtttgggaggccgaggcaggtggatcacctgaggttgggagtttgagaccagcctgaccaatgtggagaaaccccatctctactaagaatacaaaattagccaggcatggtggtgcatacctgtaatctcagctactggggaagctgagacaggagaattgcttgaacccaggaggcagaggttgcggtgagctgagatcgcgccattgcactccagcctgggcaacaggagtgaaactccatctcaagaaaaacacaaaatacaaaacaaaacaaaacaaaaaaacagaactgggccgggcgcggtggctcacgcctgtaatcccagcactttgggaggccgaggcgggtggatcacgagatcaggagatcaagaccatggtgaaaccccgtctctactaaaaatacaataaattagccgggcatggtggcgggcgcctgtagtcccagctacttgggaggctgaggcaggagaatcgcttgaacccgggaggcagaggttgcagtgagccaagatcgtgccactgcactccagcctaggtgacagagtgagactccgtctcaaaaaaaaaaaaaaaaaaaatcaaaatctatataattaagcattgttttttaaaaagtagtttaggaagatttgtaaagcttatgaaccattgtaaaaccttatttctaaggtctgtaagacagttttatatgtaataatgtgtccatttccaggaattccccaaatactcatacagccattgagcaccccaatccaaaattcagaatgcttcagataagaacatttttgagtgccgatgtgacactttaaaggaaatgttcattggagcattttgcatttcagatttttggattaggaaaactcaaccactgtatttctgcacatattccaaaatctgaaaaagtctgaaacctgagaaactctggtcccaagcattttggaaagggtatactcaatctgtattaacatagacttctaaattagtgaaaatttgcattgaattaaaatgtgaagtaaatatttttgtttaaatattgtttaaaatttagtcatttaaaaattttgtgatgtaacaaaatgttgaatgaaataatgcttctacaacttaaaattatttttcatagtgaacaaaactagttgaatacttctaaatattcatttttgttagtgcacattttatccagttttaggctttagggaattgtgaccctttttttttttttttttttttttttggagacggagtcttgctctctcgcccaggctggagtgtgtggcgcaatctcagctcactgcaacctctgattcctgggttcaagcaattctcatgtctcagcctccctaatagctaggattaccggtgcccgccaccacgcccagctaattttttaaatttttaatggagacagggtttcaccatgttggccaggctggtcttaaactcctgacctcaggtgatccacccaccttggcctcccaaagtgctgggattacaggcttaagccaccgtgcccggcacttttgtttttaaaataatatcttactttcatatgattctttcagactgtggtatggcattctgaagcaagtcttaacagagctaaaaatcacccttacccaattctctgcactgacatatgtacacaaagtaatattttattattctccttcataaatggtttctttaattgaacctttgagccttatactatttttaaatttccctttaaaaattgaattacagccaggcatggtggctcatgcctgtaatcccagaactttgggaggccatggcaggaggattgcttgaacccaggagttgtagaccagcctgggcaagatagcgagatcctgcctctgaaaaaatcataataatactttaatttagaaaataccctgaattagaagtgcttcattcctcatttgtgtacagctgttcctctatatacgaaggggattggtaccagaaccactgcataccaaattccacccatactcaagtctcacagtcttccctgcagaatccaagtatacaaaaagtaggcctatcatttatatgggttttgcatcctgacagtactgtattttcaatcctagtttgtttgggaaaaaaaaattgtttgtatgcctgggtacagtatcatacctgtaatcccagcactttggaaggctgaggcgggaggactgttttgtggccaggagttcaaaatcagcctggtcgacgtagtgagaccccatctctacaaaagaaaaattagctgggcatgtggcacctgcctgtggtcccagctactcaggaggctgtgaggcaggagaattgcttgagcctgggaggttgaggctgcagtgagccgcgatcacaccactgcatgccagcctgggcgacagagtgagaccctgtctcagaaaagaaaaaaaaagtaaaaattgcatgtaagttgacccgcactattcaaatttgtggtgttcaaggttcaactgtaatttcctagcagcattttgtgtgtttgagaatctcttgacactcttcaagtaaatccctaaattacaactttgacatcaaaaaagctagacattcctacatttttgcactacaatacataaaaactcccatgctgatcggttgtgggatcgtgcctgtgaataaccactgcactccagcctgggcaacatagtaagtaagaccttgtctcttaaaaaaaatacattctgaagaaagttctacttatgaatacattttatttataacaaactggtgaaaattttagaccaaaccatgtctttctgggttgtagtgattaaaaaatggttaagagaatgttccctatacaaggcatatgttattaaacatgaaatttaggattagttttctctttgaaaattcttttgatatgctgaggttacagtttggaggttacattagagaaagaatatagggaagatggcagtggtaaaacatttccctgctttacatttttatattggcagtatcttggtttcaacttttctattttcagcaagatatttgcaagtttttactttgaagatgtttggtttatagtagtccatgctatactaatgctgttgctgagataattaagttagatactaatatgaaaaagaatatttgtgtaaaatattttgaagttgtaattagtgtatatacaagttgttaatacttacgaaaaaaggaagcattcccacctgtaataattttgttaacactagactatcagtaaattatcaagaataaaaaccttggtttttctgtaatatttgccactgagcaatttttattaaaaaccaaacagaagtatttacacaagaacaagtgaaattacacaaaatgataatggggagaaatttctcatctggtgataaagggaaaaagataatgtaaaagcagattgctgctatttgcataataagcacttgttgaagaataaatgattaagttcaatatttttgctctattttatacctactcactttggtggaattagttctccatgtaaagtatctttttaatagtaagcaccatttaataatgaaacaactcatatgttttgtaatccttatggagaattacttcatgtgataattatagtctcttcatggaaaacagtaaaaatactcacgtttatgatgatgggcctaggtactaaattcctcattcaatctttttttaccaaatggtacttaataaaatcttttaccttataaaaatctattttcggccaggcgcggtggctcacgcctgtaatcccagcactttgggaggccgaggtgggcggaccacgaggtcaggagatcgagaccatcctggctaacacggtgaaaccctgactctactaaaaataccaaaaattagccgggcgtggcagcgggcgcctgtagtctcagctactcgggaggctgaggcaggagaatggcgtgtacccgggaggcggaggttgcagtgagccgagatcgcgccactgcactccagcctgggcgacagagcgagaatccgtctcaaaaaaaaaaaaaaaaaaaaaaaaaaaaaaaattattttcaaaggattgtgctagtggtggcctgaataataaaacattgagaagaaacagcctttgaatttggcaccctgaatgtgaagggacaatagatattaatcacatatttattaaccccttcctgtatgaacctagtactgtgctgagtgtagggatacagtgataatgcaaaaaagacccccaataggccgggcgcggtggctcacgcctgcaatcccagcactttgggagaccgaggcgggtggatcacgaggtcaggggatcgagaccatcctggctaacacggtgaaaccccgtctctactaaaaatacaaaatttagccgggcgtggtagcaggcgcctgtagtcccagctgcttgggaggctgcggcaggagaatggtgtgaacccgggaggcggagcttgcagtaagcagagatcgcgccactgcactcccgcctgggtgacagagcgagactctgtctcaaaaaaaaagaccgccccccccaatatacacacaccctgactttaatgagcttattttgctggggactcagccaattaatttcacaaattgtaaaactatttcaagaaatgagaaaaagaggcctgtggtggtaagcaagtatataaaagaagccttccttgaagcaacgatgcttaagctgaaatcttagggaaaaataaaagttaactaggcaaagaaggtagggaagactctttcagatagaatcgcagtttgtgagtttgcttggggaaaaaaatttaaaaatataaaaagaaaaccagtttgaagtttagtggttaatgaaattgaacaggtatgtcagcaccatacctgacattctaggccattctttctttgtcagagcttttttgttgagatggagtctcgctgtctcgctgaggctggagtgcagtggtgcaatctcggctcactgcaacctctgcctcccaggttcaagtgattctcctgcctcagcctcccaagtagctgggattacaggtgcccatcaccacacccggctaatttttttgtttttagtaaagacggtttctccatgtaggccaagcgggtcttgaactcccaacctccggtgatctgcccacctcaacctcccaaagtgctgggattacaggcgtgagacactgtgcccagcctgtcagagcttttgagtagaaatacggtatcagaaatgtgctttattttattttattagacaaagtcttgctctgttgccaggctggagtgcagtggcgcgatcttggctcactgcaacctctgccttctgggttcaagcgattctcctgcctcagcctcccgagtagctgggattacaggcacccactgccacactcggctaatttttgtatttttagtagagacgggatttcaccatgttggtctcgaactgctaacctcaggtgatctgcccgccttggcctcccaaagtgctgggattataggcatgaaccactgcgcccagccagaaacgtgcttttaatactaaaggccaagatatgcaattatactcttgacatatattcaaccgaaatgcatgtacatgtaccataagagacatatgtacaagaatgtgcacagttaacattattcaaatagccaaaaacgggaacatgtccatcaacacagaatagacaagttggtataattacacaatggaatcttatgcagcaatgaaaataaatgaactaaagccgcatacaaaaacatgaagaatttcacaagtattatgttgagtgaaaaagacaaagaatttgtactgtattacttcatttatatgaagttcaaacacaggcaaaattaagctatagtgtttagggatgcatactgaaatgcagtcttttaaaacagctttagaattccttggccaggtgcggtggcttacgcctgtaatcccagctctttgggaggcagaggctggcagatcacctgaggttgggagtttgagaccagcctgaccaacatggagaaaccccatctctactaaaaatacaaaattagctgggcgtggtgtcgcgtgcctgtaatcccagctactctggaggctgagacaggagaatcgcttgaacctgggaggtggagagtgtggtgagctgagatgtcaccattgcactccagcctgggcaagaagagcaaaacttcgtctcaaaaaaaaataaaaaaataaggctccaagcgctgttgtgagggttaaatgaactagataattaatgtaataaacagaatagttttggcattcaacaaacattggctgttattatattagctattaaaaatttaagtcatttaggtcaatgaaacaggagggtttccagaattatacccaattaattatacatgggaaggtgatgaaggtagcatgtcaaattggtataaaaagatggaatattaaataagtggggatactgtatcagataggaacatatttggttgcaagaaacaaaaattcctgtgattactagcttcactgtgagtttattttttcacgtaataaatccaaggttacataatccataactgatatggcagtttaacagtgttattaagaactcaaggtccatttattgctctattctgccatctttggtgagtggctttcatcctcattgtctcagaaaagttatttcacctctaagtattacatctacatttcaagcaggaagaagatgaagcttaagagaccaaatggagcatgtcagtcaaaggtgtccttatttaaaatctctggaagccccacttagtggcttccatccatgtctcatgggacagaactgaatcacatagccatcccttgctgtaagagagttggggaaagtattttaagctgggacatcccagccctgagtgaagtcagggatctgttaggaagaatggatgctaggtaggtaaatggcaatgtctgacaaagacatggtaggccagtctgaaaaatgtaaagctgggctgcgcgcggtggctcacgcctgaaatcccagcactttgggaggccgaggcgggcggatcctgaggtcaggagatcgagaccatcctggttaacgtggtgaaaccccgtctctactaaacatataaaaaattagccgggcttggtggcgggcgcctgtagtcccagctactgaggcaggagagtggcatgaacccgggaggcggagattgcagtgagccgagatcgcgccactgcactccagcctgggtgacaaggcaagactccgtctcaaaaaaaaaaagaaaaatataaagctggatctatacctcactccttataccaaagtacattacccttgtatcaaatattttaaaaactggaataagcttttcatataatctttgagaagatggggctttcaaagcgttaaatgaaacacagaagccatggccaggcacggtggctcatgcctgtaatcccagctctcagggaggcaagaggcaggagcatagcttgagcccaggcgttcaagacctgcctgggcaatatagcgagaccccgttctccccaaaaaggaaaaaaaaaaaaaaaccaaaaaaaaaaaaaaagtataaagcacagaagcgaaaggaaaagtgatgaagacacttgaagacctgtcatttaaaatgattctacaggaaaaagatgaactacaaattggggaaaaatatttgtaggacttatgtagacaaaggactaattttcttaataaaaacatttatcagtaaatttaaatgggcaaaggaaatacttggacaatcatatcatgtatgtaatattaatatttataaatcaataaaatgggctagggatataaatcagcaattcaaggggagggtaaaaagaccaactaatatatgtaaagatgcacaaattcattcatgattaaatgtgaattaacaacgttggcctctcggattcccaaaactttaaaagattaataatatccagtattggttgggattataagcagatatgatatttcactgatagagaccagcatgactgtctcaattgttaaactattgaaatgcatctgtgtcaatggtaaatagtattattgtaagtacaacactaaaattaataaattgtgtaaattctaa

SEQ ID NO: 200621 - DNA, 728 bp, Homo sapiens
  Payload ID: 19594
  Gene Name: Yip1 domain family, member 4
  ENST ID: ENST00000437765
  CDS Start-End: 1-177
gaagatctcagtggttcaatagcatccccagatgtcaaattaaatcttggtggagattttatcaaagaatctacagctactacatttctgagacaaagaggttatggctggcttctggaagttgaagatgatgatcctgaagataacaagccactcttgtggtctcatggattataaccatttggatatttggttcactaacaattttcttactggccagagttcttggtggagaagttgcatatggccaagtccttggagttataggatattcattacttcctctcattgtaatagcccctgtacttttggtggttggatcatttgaagtggtgtctacacttataaaactgtttggtgtgttttgggctgcctacagtgctgcttcattgttagtgggtgaagaattcaagaccaaaaagcctcttctgatttatccaatctttttattatacatttattttttgtcgttatatactggtgtgtgatccaagttatacatgaatagaaaaagatggtgttaaatttgtgtgtaggctgggaattcttgctgaaggaattggagaaaacctgttgctgcaaaattttacatgttccagatggaaagggaagtctaagcgctttttaaaacaatttttttttgtatttaattaagcaattgcagttatctgggatttttgggtcagaattttaaattctgtttgattctccatattccagtgaataaa

SEQ ID NO: 200622 - DNA, 312 bp, Homo sapiens
  Payload ID: 19594
  Gene Name: Yip1 domain family, member 4
  ENST ID: ENST00000441084
  CDS Start-End: 1-101
cccctgtacttttggtggttggatcatttgaagtggtgtctacacttataaaagtgagaagcaccagagggacaggacttctagaagttagaataatatgaagtaatcaggaaatatctatgcctacagaagcagcaaccgtaagataaacatttgttacacttaagaaattgctgaggttaatactttgttataatggattataatatttgacattcatagtgttgaccctggaatctttcacagaaagcttgggggtcaggaccaggaggtagaattttacaaggcaataaatgaaggtattttaagatc

SEQ ID NO: 200623 - DNA, 3147 bp, Homo sapiens
  Payload ID: 19595
  Gene Name: Yip1 domain family, member 5
  Uniprot ID: Q969M3
  ENST ID: ENST00000274496
  CDS Start-End: 136-909
ggaagccgttctttggccctgtgacacgtagcaacggggctggttcagggtctgaaacagagtttgggggttgtttgggattagtgaagctactgcctttgccgccagcgcagcctcagagtttgattatttgcaatgtcaggctttgaaaacttaaacacggatttctaccagacaagttacagcatcgatgatcagtcacagcagtcctatgattatggaggaagtggaggaccctatagcaaacagtatgctggctatgactattcgcagcaaggcagatttgtccctccagacatgatgcagccacaacagccatacaccgggcagatttaccagccaactcaggcatatactccagcttcacctcagcctttctatggaaacaactttgaggatgagccacctttattagaagagttaggtatcaattttgaccacatctggcaaaaaacactaacagtattacatccgttaaaagtagcagatggcagcatcatgaatgaaactgatttggcaggtccaatggttttttgccttgcttttggagccacattgctactggctggcaaaatccagtttggctatgtatacgggatcagtgcaattggatgtctaggaatgttttgtttattaaacttaatgagtatgacaggtgtttcatttggttgtgtggcaagtgtccttggatattgtcttctgcccatgatcctactttccagctttgcagtgatattttctttgcaaggaatggtaggaatcattctcactgctgggattattggatggtgtagtttttctgcttccaaaatatttatttctgcattagccatggaaggacagcaacttttagtagcatatccttgcgctttgttatatggagtctttgccctgatttccgtcttttgaaaatttatctgggatgtggacatcagtgggccagatgtacaaaaaggaccttgaactcttaaattggaccagcaaactgctgcagcgcaactctcatgcagatttacatttgactgttggagcaatgaaagtaaacgtgtatctcttgttcatttttatagaacttttgcatactatattggatttacctgcggtgtgactagctttaaatgtttgtgtttatacagataagaaatgctatttctttctggttcctgcagccattgaaaaacctttttccttgcaaattataatgtttttgatagatttttatcaactgtgggaaaccaaacacaaagctgataacctttcttaaaaacgacccagtcacagtaaagaagacacaagacggccgggcgtggtagctcacgcctgtaatcccagcactttgggaggccgaggcgggcggatcacaagggcaggagatcgagaccatcctggttaacacggtgaaaccccgactctactaaaactacaaaaaaaattagctgggcgtggtggcgggcgcctgtagtcccagctactcaggaggctgaggcaggagaagtgtgaacccaggaggcggagcttgcagtgagccgagatcacaccactgcactccatccagcctgggtgacagggtgagactctgtctcaaaaaaaaaaaaaaaaggagacacaagacttactgcaaaaatatttttccaaggatttaggaaagaaaaattgccttgtattctcaagtcaggtaactcaaagcaaaaaagtgatccaaatgtagagtatgagtttgcactccaaaaatttgacattactgtaaattatctcatggaatttttgctaaaattcagagatacgggaagttcacaatctaccttattgtagacatgaaatgcgaacacttacttacatattaatgttaactcaaccttagggacctggaatggttgcattaatgctataatcgttggatcgccacatttcccaaaaataataaaaaaatcactaaccttttttaaggaaaatatttaaagttttacaaaattcaatattgcaattatcaatgtaaagtacatttgaatgcttattaaaactttcccaattaattttaactgtgttattgaatttacttttactaaactactgttctctttgtctcttttttaactaggctctgattttgacccctaatttaagctttaagaatagaaatcagctaatatagaatcagacaaaaaggggattaaatgagcagtttgagttacattattttattgtattaaatttatttgatttatattgtcatgttctcttgccagagagaatctgtaggaaaatactgtatcttgtatactgatcattggctttttctagaaaaactgtctctgattctggacaaagctcagttatagttacgagaaagatatggtacagggaggaaaatactgccttttttttttttttaaagagattttcagactaaatagaaatgtcaaaatgatgtatcaatggttcttttttagaacaagttttcaaagcataaaaagaggttgagagaaataacatatttattgattcacataagtatgtttttcttcattaatcgtctggagaaacccacttgtcattaatttgttttgggctaggttttcaaacttaccaaattgctttaaaaaagcaatttggaaggtaatttgataggctttccaacttaaccaaattttttattgtaattcttggatagtatttttgtctttttcaattcatttgtctttttcagtatagtttttgttaaggcaaatgtcttcccttaatatccaaatattgctaataaacggtagaagatgctttggaaattaaaattatctcgctgttggttagacttaacactgttaatcttcagccaaatatcacatatggatcaaattattttcttttttgttgtttaccctatcctcaacaacatttttagtttaaattattgtagagattttttttgtggtggttattttttattttgctccaaaataataaggtgcaaagctattttatgcttaactgttgctctgtcaaaacagctatgcagtggagttgcatttgatgttctagagtttgattacatgcagagttgtatatagccaaaacttctcttatcaaactctgttatgtaggcatatttatatatacattaaagactgttgtactgtgtctcaaaaagta

SEQ ID NO: 200624 - DNA, 2255 bp, Homo sapiens
  Payload ID: 19595
  Gene Name: Yip1 domain family, member 5
  Uniprot ID: Q969M3
  ENST ID: ENST00000448443
  CDS Start-End: 358-1131
agcaacggggctggttcagggtctgaaacagagtttgggggttgtttgggattagtgaagctactgcctttgccgccagcgcagcctcagagtttggtgagtgacccaggcccgtggcacagtgttcagcttctctccacacccgtgcaaatgggcttgttgccgtctttcggcgccgcgccctggtcctttcgctcagaccctcgctctcattcaagcccttgccctgacgcggtcccctgcacctcaggcgcgaccttccagattctgcactttttcctggcaggccgcaggccttattttgcaaggaagcagtcgccttgtcagctgtaaagcccagtcctaagattatttgcaatgtcaggctttgaaaacttaaacacggatttctaccagacaagttacagcatcgatgatcagtcacagcagtcctatgattatggaggaagtggaggaccctatagcaaacagtatgctggctatgactattcgcagcaaggcagatttgtccctccagacatgatgcagccacaacagccatacaccgggcagatttaccagccaactcaggcatatactccagcttcacctcagcctttctatggaaacaactttgaggatgagccacctttattagaagagttaggtatcaattttgaccacatctggcaaaaaacactaacagtattacatccgttaaaagtagcagatggcagcatcatgaatgaaactgatttggcaggtccaatggttttttgccttgcttttggagccacattgctactggctggcaaaatccagtttggctatgtatacgggatcagtgcaattggatgtctaggaatgttttgtttattaaacttaatgagtatgacaggtgtttcatttggttgtgtggcaagtgtccttggatattgtcttctgcccatgatcctactttccagctttgcagtgatattttctttgcaaggaatggtaggaatcattctcactgctgggattattggatggtgtagtttttctgcttccaaaatatttatttctgcattagccatggaaggacagcaacttttagtagcatatccttgcgctttgttatatggagtctttgccctgatttccgtcttttgaaaatttatctgggatgtggacatcagtgggccagatgtacaaaaaggaccttgaactcttaaattggaccagcaaactgctgcagcgcaactctcatgcagatttacatttgactgttggagcaatgaaagtaaacgtgtatctcttgttcatttttatagaacttttgcatactatattggatttacctgcggtgtgactagctttaaatgtttgtgtttatacagataagaaatgctatttctttctggttcctgcagccattgaaaaacctttttccttgcaaattataatgtttttgatagatttttatcaactgtgggaaaccaaacacaaagctgataacctttcttaaaaacgacccagtcacagtaaagaagacacaagacggccgggcgtggtagctcacgcctgtaatcccagcactttgggaggccgaggcgggcggatcacaagggcaggagatcgagaccatcctggttaacacggtgaaaccccgactctactaaaactacaaaaaaaattagctgggcgtggtggcgggcgcctgtagtcccagctactcaggaggctgaggcaggagaagtgtgaacccaggaggcggagcttgcagtgagccgagatcacaccactgcactccatccagcctgggtgacagggtgagactctgtctcaaaaaaaaaaaaaaaaggagacacaagacttactgcaaaaatatttttccaaggatttaggaaagaaaaattgccttgtattctcaagtcaggtaactcaaagcaaaaaagtgatccaaatgtagagtatgagtttgcactccaaaaatttgacattactgtaaattatctcatggaatttttgctaaaattcagagatacgggaagttcacaatctaccttattgtagacatgaaatgcgaacacttacttacatattaatgttaactcaaccttagggacctggaatggttgcattaatgctataatcgttggatcgccacatttcccaaaaataataaaaaaatcactaaccttttttaaggaaaatatttaaagttttacaaaattcaatattgcaattatcaatgtaaagtacatttgaatgcttattaaaactttcccaattaa

SEQ ID NO: 200625 - DNA, 2135 bp, Homo sapiens
  Payload ID: 19595
  Gene Name: Yip1 domain family, member 5
  Uniprot ID: Q969M3
  ENST ID: ENST00000513112
  CDS Start-End: 400-1011
agcaacggggctggttcagggtctgaaacagagtttgggggttgtttgggattagtgaagctactgcctttgccgccagcgcagcctcagagtttggtgagtgacccaggcccgtggcacagtgttcagcttctctccacacccgtgcaaatgggcttgttgccgtctttcggcgccgcgccctggtcctttcgctcagaccctcgctctcattcaagcccttgccctgacgcggtcccctgcacctcaggcgcgaccttccagattctgcactttttcctggcaggccgcaggccttattttgcaaggaagcagtcgccttgtcagctgtaaagcccagtcctaagacagtatgctggctatgactattcgcagcaaggcagatttgtccctccagacatgatgcagccacaacagccatacaccgggcagatttaccagccaactcaggcatatactccagcttcacctcagcctttctatggaaacaactttgaggatgagccacctttattagaagagttaggtatcaattttgaccacatctggcaaaaaacactaacagtattacatccgttaaaagtagcagatggcagcatcatgaatgaaactgatttggcaggtccaatggttttttgccttgcttttggagccacattgctactggctggcaaaatccagtttggctatgtatacgggatcagtgcaattggatgtctaggaatgttttgtttattaaacttaatgagtatgacaggtgtttcatttggttgtgtggcaagtgtccttggatattgtcttctgcccatgatcctactttccagctttgcagtgatattttctttgcaaggaatggtaggaatcattctcactgctgggattattggatggtgtagtttttctgcttccaaaatatttatttctgcattagccatggaaggacagcaacttttagtagcatatccttgcgctttgttatatggagtctttgccctgatttccgtcttttgaaaatttatctgggatgtggacatcagtgggccagatgtacaaaaaggaccttgaactcttaaattggaccagcaaactgctgcagcgcaactctcatgcagatttacatttgactgttggagcaatgaaagtaaacgtgtatctcttgttcatttttatagaacttttgcatactatattggatttacctgcggtgtgactagctttaaatgtttgtgtttatacagataagaaatgctatttctttctggttcctgcagccattgaaaaacctttttccttgcaaattataatgtttttgatagatttttatcaactgtgggaaaccaaacacaaagctgataacctttcttaaaaacgacccagtcacagtaaagaagacacaagacggccgggcgtggtagctcacgcctgtaatcccagcactttgggaggccgaggcgggcggatcacaagggcaggagatcgagaccatcctggttaacacggtgaaaccccgactctactaaaactacaaaaaaaattagctgggcgtggtggcgggcgcctgtagtcccagctactcaggaggctgaggcaggagaagtgtgaacccaggaggcggagcttgcagtgagccgagatcacaccactgcactccatccagcctgggtgacagggtgagactctgtctcaaaaaaaaaaaaaaaaggagacacaagacttactgcaaaaatatttttccaaggatttaggaaagaaaaattgccttgtattctcaagtcaggtaactcaaagcaaaaaagtgatccaaatgtagagtatgagtttgcactccaaaaatttgacattactgtaaattatctcatggaatttttgctaaaattcagagatacgggaagttcacaatctaccttattgtagacatgaaatgcgaacacttacttacatattaatgttaactcaaccttagggacctggaatggttgcattaatgctataatcgttggatcgccacatttcccaaaaataataaaaaaatcactaaccttttttaaggaaaatatttaaagttttacaaaattcaatattgcaattatcaatgtaaagtacatttgaatgcttattaaaactttcccaattaa

SEQ ID NO: 200626 - DNA, 653 bp, Homo sapiens
  Payload ID: 19595
  Gene Name: Yip1 domain family, member 5
  ENST ID: ENST00000522203
  CDS Start-End: 349-653
ctcccgcccaccggtgcccaacctgctaacacgcctgcgcgagcgggcgtgccccggaagccgttctttggccctgtgacacgtagcaacggggctggttcagggtctgaaacagagtttgggggttgtttgggattagtgaagctactgcctttgccgccagcgcagcctcagagtttgattatttgcaatgtcaggctttgaaaacttaaacacggatttctaccagacaagttacagcatcgatgatcagtcacagcagtcctatgattatggaggaagtggaggaccctatagcaatatgctggctatgactattcgcagcaaggcagatttgtccctccagacatgatgcagccacaacagccatacaccgggcagatttaccagccaactcaggcatatactccagcttcacctcagcctttctatggaaacaactttgaggatgagccacctttattagaagagttaggtatcaattttgaccacatctggcaaaaaacactaacagtattacatccgttaaaagtagcagatggcagcatcatgaatgaaactgatttggcaggtccaatggttttttgccttgcttttggagccacattgctactggctggcaaaatccagtttggctatgtatacgggatcag

SEQ ID NO: 200627 - DNA, 684 bp, Homo sapiens
  Payload ID: 19595
  Gene Name: Yip1 domain family, member 5
  ENST ID: ENST00000519064
  CDS Start-End: 154-684
cacgtagcaacggggctggttcagggtctgaaacagagtttgggggttgtttgggattagtgaagctactgcctttgccgccagcgcagcctcagagtttgacagtatgctggctatgactattcgcagcaaggcagatttgtccctccagacatgatgcagccacaacagccatacaccgggcagatttaccagccaactcaggcatatactccagcttcacctcagcctttctatggaaacaactttgaggatgagccacctttattagaagagttaggtatcaattttgaccacatctggcaaaaaacactaacagtattacatccgttaaaagtagcagatggcagcatcatgaatgaaactgatttggcaggtccaatggttttttgccttgcttttggagccacattgctactggctggcaaaatccagtttggctatgtatacgggatcagtgcaattggatgtctaggaatgttttgtttattaaacttaatgagtatgacaggtgtttcatttggttgtgtggcaagtgtccttggatattgtcttctgcccatgatcctactttccagctttgcagtgatattttctttgcaaggaatggtaggaatcattctcactgctgggattattggatggtgtagtttttctgcttccaaaatatttatttctgcatta

SEQ ID NO: 200628 - DNA, 6134 bp, Homo sapiens
  Payload ID: 19596
  Gene Name: Yip1 domain family, member 6
  Uniprot ID: Q96EC8
  ENST ID: ENST00000374622
  CDS Start-End: 286-867
gccgtggtcgcgagagcgaaggagcggtctgagaatccggcttgagtgttaaaggctaagcgtgtctagctggacccgtggccccgaagaagcgagacaaggcgacgcggagctgtccctgacaccccgaggaccgagggacagcgaagggccggggccgccggccattgccaggcgccattaggtgacgcggccgtcacgcgatgacgcgctgaccggcagtggcctccacgtcgcaggttccgcaaagacctgtgggagcgacccgggagaaggagggccaagatggcggaagcggaggagtctccaggagacccggggacagcatcgcccaggcccctgatgcgtgatctaaaagctgttgggaaaaaattcatgcatgttttgtacccaaggaaaagtaatactcttttgagagattgggatttgtggggccctttgatcctttgtgtgacactcgcattaatgctgcaaagagactctgcagatagtgaaaaagatggagggccccaatttgcagaggtgtttgtcattgtctggtttggtgcagttaccatcaccctcaactcaaaacttcttggagggaacatatctttttttcagagcctctgtgtgctgggttactgtatacttcccttgacagtagcaatgctgatttgccggctggtacttttggctgatccaggacctgtaaacttcatggttcggctttttgtggtgattgtgatgtttgcctggtctatagttgcctccacagctttccttgctgatagccagcctccaaaccgcagagccctagctgtttatcctgttttcctgttttactttgtcatcagttggatgattctcacctttactcctcagtaaatcaggaatgggaaattaaaaaccagtgaattgaaagcacatctgaaagatgcaattcaccatggagctttgtctctggcccttatttgtctaattttggaggtatttgataactgagtaggtgaggagattaaaagggagccatatagcactgtcaccccttatttgaggaactgatgtttgaaaggctgttcttttctctcttaatgtcatttctttaaaaatacatgtgcatactacacacagtatataatgcctccttaaggcatgatggagtcaccgtggtccatttgggtgacaaccagtgacttgggaagcacatagatacatcttacaagttgaatagagttgataactattttcagttttgagaataccagttcaggtgcagctcttaaacacattgccttatgactattagaatatgcctctcttttcataaataaaaatacatggtctatatccattttcttttatttctctctcttaagcttaaaaaggcaatgagagaggttaggagtgggttcatacacggagaatgagaaaacatgcattaaccaatattcagattttgatcaggggaaattctacacttgttgcaaaaaaaaaaaaaaaaaaagcaaagggcctctaaagaatcagcctctttggtccctttgtgctgtcacctttttgccatgtttaacagcatcttggttggcactctagtcttaatcttgctccttaactttgaatatgcagtctaaaatgtcagtagtcaacatgtaattttcctttgaaattctgaatattccagtgctggaacttatccaaaaagaagacctcagaaacttagattggtagatctctagtgcatattatcatgtgggcaccttctcttagggtggaatgaggcagtctggatgcagcatagttaaaaggagctgtttaatattctctgtagtctggcctcttaactagaaagtaaagctaaatcagaagcctgtatttaaccatgtgaacagggagggatttagtgttctgatggctgattaatagaacagctagatacttagagcatgacgtgggatgggatgagtttacagctgctgccttttcatggtgagcttagcagttttctcattagatgtgtttttttgggttggggaatagcaatttattttattgattttagactttatcaagctaattagctcccctttagataagtacatgttgcacatgtgcacctacttgtaatctcagatatttatgcacacaagtgtgaaggtttttcagggagcagagcatctgggacaggctgattctgagctaaacagggctcctttaaggcaatatgaactgttgccttctataaattgcacattgaggaactctaatagacaaagattaggtgtcaggcagaaaacactcattgtaaatatactattagttgataaacataggactttcttattccccagtttttctttatcatataatttaaatatttattcattttgtatttaaagactacctacacatagatatatgattccaaagtcatactttctccatccccacattagccaagtgaatacagggccaaatgggttcttggaatgataataacaaagcattacaaagtgggtccccttggttccagccttgtccagagtttttggttatatatttctatttattacaatttaccttttaaattgtaaaataaacctttgtgtggacagagccaatgtttcaatcttgaatgagtaaagaaaatactttggaactgatcctcattttgaaattggttctaaattattatccatttccaatgtctgaaattctcttacttcctgctaaaactctctttctgccaaagttgtttcgtaatctgtctcaatgactataatgtaaaattaaagaagtaaccatgcttctcaagggggaattaaaagtgtttattgaattttactcaggctaattgtttggtcagaaattcctaaggccacagctttggggggttcgtgtagatgtacatggtgggtgggttataaatattgggacttaaggcagcttgttctatgtatttatctttgctcttgggtgacttagggaatgattttatttgatttaaccttctttctgtttgccccgagaatactcgccagtggcgcttgcagttgtagcatttaccccaagataactttgcctacgaaatatttcgcttttattattttcacatcattctagtatatggactttggaaacaaaagacattgttctatttatagcattcttttttttttttagtagcggtatttccatttacaaaatatagtaactcttgattactgaaaatgtcaaatcctagaaaacgtagcatgcctatacatgatgttaacatcattctcgaacagttgttggccgaagattcatttgatgaatccaatttttttgaaatagacaattctgatgttctctttagaaataactcagtttttatcttttttcacattgaaaatcagttagatttgcttaagcctcaaagagaatgtttatgtaaattagcgctggcaatttttttttttctaaacaggaaaagggttaaatgaaggttgataaaatggatgttcaattgtctttctgaaagtgagtggcttgaagggatgaataaatattttcttaatatattcaaaaaagtgcattgctttctgtgatggaagttaagacctaaatgtctggaagttgtaaccctcaacacagcttttcctgatttgctgcaaaggcacatagctgattatagaagtgaagacggcaaggacggggactccaacaaaggaaaccctgttgcaggatttgggaactttcatgcttcagatgaaattcaggcatgtgagcatcactgcagaatgtggtgcatcattgccatcatgagtaatcacttgctgctcctacttctgagaccaagactcttttgtcatattctttagcaataggacgggtaaagactggatttaattgctgttcagagtataaaaactcaattgattccaacatatctgaatgtgcagtaaagtcttaaaagtcaaccgttaatcattaagtcttttgcctctaaagtcttttgcctctgaagaggtttattacatgagttgattttcatattttcattttggtggggttttcctgttgttgggcaaggtggggtcacaggacatgggactagtaagcattttactgtttactatatttgtctttttataaacagtatctcccaaaatgtgattagaaggctaccaagcctgtatttggacatttaattgtgtgctttatataatgtaactactaacagtatttggactgcctgttcattcctggagacaaaaatgaaaatctgtcagttcaagttcttgggtaacatcaagtcattagaatttatctaaagcttatcatgatttgataagacatccattgcatgcagctgttttagctcagtgcaaaacactgaaattgtgattcttagactgtttctgagacatttggatggaaataaatgtataaatgttaattcatgtatataaattagaaacacttttctagattctgtaggcttttgttaaaaatagagaatttcttggggtttacttaggccacagaatggccaaataataataatgacaatgatattactaataataatagctaacctttatttggcacttactgtgtgccaggcactattctatttttttaagaatttttaaaataacagctttattgaaatacactttaccataaacttcacctttttattttttatttttatgagacagggactcacccaggctggagtgcagtggagcagtcatggcacactgtagcctcgacctccctgggctcaagcaatcctcccacttcagtgtcccgagtagttgggactacaggcatgcgtcactacacctaattggctaatttttgtagtttttgtagagatagggtttcgccatgttgcctaggctggtcttgaattcctgggctcaagcgatccacctgctttggcctcccaaaacagtgggattgcaggcgtgagccaccatgcctggctgaaattcaccttttaagatgtacaattcagtggtttttagtatattcacacacaaaattgcacaactatcactaacatctaattttagatcattttgtaacttcaccaagaaaccccaggtctgtcagcagtcagttccattcccccttcatcccagcctctggcaaccactaatctgctttctgtcactattgatttggccagacactattcttctgtgcttctcatgcatctcctgtaataccagtgctacaattctcattttatgtggaaaattgaggcactgagaggttaagtaaattgcccacggtcacacagtaatttgatttacaacagtaataacacattagatgagaacacagtaggacacaattttgaattccatttttatgtacctgaaatgaatacacccctcccccaaggtattttccctattgttagcctttgtaccctaggtacaaatataggtattttccctattgtgttatgtacctgaaatgaatacacccttcccccaaggtattttccctattgttagcctttgtaccctagaactgactggatgtagataacatttgttttcagagtaatggaacactgtatcagcagcatctgagaacataagaacagttggacattggaaagaggtttgttgccctcatccctccttgaacctcttttctctcccgcttccaccaccaccacacatatatacccctttttctcagtcttaagcatcaaacaatttctgcctctttctttttaattctcccagagggatggttaatgcatcacaatttaacttgtctattcaggtattaatagtcaagggatgcatctgtttgcttatagtaccagttatattcctaggaccttagagagcagtagtgtgagaatagaatgcctttctatttgggttaaactatgtgggaggaaaaagtaacagagtaaaggctttgccttaatgaagtcaagtgttctgcctggtgggaagtggccacacgctgcactgcgctgctcttgtttactctgttctttcagagcctttgtactttgccatcactgctagtaatttcttggtccttttcaatactccattttaatcttgatttttttctataaataataaatctgtgaaaaatctgtaaaaagatttgtgactattaaatgtgcaact

SEQ ID NO: 200629 - DNA, 1070 bp, Homo sapiens
  Payload ID: 19596
  Gene Name: Yip1 domain family, member 6
  ENST ID: ENST00000451537
  CDS Start-End: 506-1070
ggcgcagagtcagaggggcaggggcggcggcggagggagcaggaggttggggcttgagcccgtcattccggcgcacgaaaacttgaagtcgctcggtagccggggaagggaaggaagagaggcaggctctttcctagaggtgccgtgatcgagggtctggcactccaagccaactcctgagaacgggaaatgggcgggagtcggtggggtggagagggcagccgtggtcgcgagagcgaaggagcggtctgagaatccggcttgagtgttaaaggctaagcgtgtctagctggacccgtggccccgaagaagcgagacaaggcgacgcggagctgtccctgacaccccgaggaccgagggacagcgaagggccggggccgccggccattgccaggcgccattaggtgacgcggccgtcacgcgatgacgcgctgaccggcagtggcctccacgtcgcaggttccgcaaagacctgtgggagcgacccgggagaaggagggccaagatggcggaagcggaggagtctccaggagacccggggacagcatcgcccaggcccctgatgcgtgatctaaaagctgttgggaaaaaattcatgcatgttttgtacccaaggaaaagtaatactcttttgagagattgggatttgtggggccctttgatcctttgtgtgacactcgcattaatgctgcaaagagactctgcagatagtgaaaaagatggagggccccaatttgcagaggtgtttgtcattgtctggtttggtgcagttaccatcaccctcaactcaaaacttcttggagggaacatatctttttttcagagcctctgtgtgctgggttactgtatacttcccttgacagtagcaatgctgatttgccggctggtacttttggctgatccaggacctgtaaacttcatggttcggctttttgtggtgattgtgatgtttgcctggtctatagttgcctccacagctttccttgctgatagccagcctccaaaccgcagagccctagctgtttatcctgttttcctgttttactttgtcatcagttggatgattctca

SEQ ID NO: 200630 - DNA, 6741 bp, Homo sapiens
  Payload ID: 19596
  Gene Name: Yip1 domain family, member 6
  Uniprot ID: Q96EC8
  ENST ID: ENST00000462683
  CDS Start-End: 745-1455
ttatcttttaagttattgtcacaatagttactctcttttagaccctgaacattttcagtacttgctccaaatggtttagcaacttttgaagtgggattaacaagtttggccaatgaagcttcttccctgcccaccgccagaggtgctggagaaaagtaatcctggagggtcggcgtggaggcagtagagaggtttataaaagtcaaggaagtgggaagaggcttgcgagcagcaggagaggcgcagagtcagaggggcaggggcggcggcggagggagcaggaggttggggcttgagcccgtcattccggcgcacgaaaacttgaagtcgctcggtagccggggaagggaaggaagagaggcaggctctttcctagaggtgccgtgatcgagggtctggcactccaagccaactcctgagaacgggaaatgggcgggagtcggtggggtggagagggcagccgtggtcgcgagagcgaaggagcggtctgagaatccggcttgagtgttaaaggctaagcgtgtctagctggacccgtggccccgaagaagcgagacaaggcgacgcggagctgtccctgacaccccgaggaccgagggacagcgaagggccggggccgccggccattgccaggcgccattaggtgacgcggccgtcacgcgatgacgcgctgaccggcagtggcctccacgtcgcaggttccgcaaagacctgtgggagcgacccgggagaaggagggccaagatggcggaagcggaggagtctccaggagacccggggacagcatcgcccaggcccctgtttgcaggcctttcagatatatccatctcacaagacatccccgtagaaggagaaatcaccattcctatgagatctcgcatccgggagtttgacagctccacattaaatgaatctgttcgcaataccatcatgcgtgatctaaaagctgttgggaaaaaattcatgcatgttttgtacccaaggaaaagtaatactcttttgagagattgggatttgtggggccctttgatcctttgtgtgacactcgcattaatgctgcaaagagactctgcagatagtgaaaaagatggagggccccaatttgcagaggtgtttgtcattgtctggtttggtgcagttaccatcaccctcaactcaaaacttcttggagggaacatatctttttttcagagcctctgtgtgctgggttactgtatacttcccttgacagtagcaatgctgatttgccggctggtacttttggctgatccaggacctgtaaacttcatggttcggctttttgtggtgattgtgatgtttgcctggtctatagttgcctccacagctttccttgctgatagccagcctccaaaccgcagagccctagctgtttatcctgttttcctgttttactttgtcatcagttggatgattctcacctttactcctcagtaaatcaggaatgggaaattaaaaaccagtgaattgaaagcacatctgaaagatgcaattcaccatggagctttgtctctggcccttatttgtctaattttggaggtatttgataactgagtaggtgaggagattaaaagggagccatatagcactgtcaccccttatttgaggaactgatgtttgaaaggctgttcttttctctcttaatgtcatttctttaaaaatacatgtgcatactacacacagtatataatgcctccttaaggcatgatggagtcaccgtggtccatttgggtgacaaccagtgacttgggaagcacatagatacatcttacaagttgaatagagttgataactattttcagttttgagaataccagttcaggtgcagctcttaaacacattgccttatgactattagaatatgcctctcttttcataaataaaaatacatggtctatatccattttcttttatttctctctcttaagcttaaaaaggcaatgagagaggttaggagtgggttcatacacggagaatgagaaaacatgcattaaccaatattcagattttgatcaggggaaattctacacttgttgcaaaaaaaaaaaaaaaaaaagcaaagggcctctaaagaatcagcctctttggtccctttgtgctgtcacctttttgccatgtttaacagcatcttggttggcactctagtcttaatcttgctccttaactttgaatatgcagtctaaaatgtcagtagtcaacatgtaattttcctttgaaattctgaatattccagtgctggaacttatccaaaaagaagacctcagaaacttagattggtagatctctagtgcatattatcatgtgggcaccttctcttagggtggaatgaggcagtctggatgcagcatagttaaaaggagctgtttaatattctctgtagtctggcctcttaactagaaagtaaagctaaatcagaagcctgtatttaaccatgtgaacagggagggatttagtgttctgatggctgattaatagaacagctagatacttagagcatgacgtgggatgggatgagtttacagctgctgccttttcatggtgagcttagcagttttctcattagatgtgtttttttgggttggggaatagcaatttattttattgattttagactttatcaagctaattagctcccctttagataagtacatgttgcacatgtgcacctacttgtaatctcagatatttatgcacacaagtgtgaaggtttttcagggagcagagcatctgggacaggctgattctgagctaaacagggctcctttaaggcaatatgaactgttgccttctataaattgcacattgaggaactctaatagacaaagattaggtgtcaggcagaaaacactcattgtaaatatactattagttgataaacataggactttcttattccccagtttttctttatcatataatttaaatatttattcattttgtatttaaagactacctacacatagatatatgattccaaagtcatactttctccatccccacattagccaagtgaatacagggccaaatgggttcttggaatgataataacaaagcattacaaagtgggtccccttggttccagccttgtccagagtttttggttatatatttctatttattacaatttaccttttaaattgtaaaataaacctttgtgtggacagagccaatgtttcaatcttgaatgagtaaagaaaatactttggaactgatcctcattttgaaattggttctaaattattatccatttccaatgtctgaaattctcttacttcctgctaaaactctctttctgccaaagttgtttcgtaatctgtctcaatgactataatgtaaaattaaagaagtaaccatgcttctcaagggggaattaaaagtgtttattgaattttactcaggctaattgtttggtcagaaattcctaaggccacagctttggggggttcgtgtagatgtacatggtgggtgggttataaatattgggacttaaggcagcttgttctatgtatttatctttgctcttgggtgacttagggaatgattttatttgatttaaccttctttctgtttgccccgagaatactcgccagtggcgcttgcagttgtagcatttaccccaagataactttgcctacgaaatatttcgcttttattattttcacatcattctagtatatggactttggaaacaaaagacattgttctatttatagcattcttttttttttttagtagcggtatttccatttacaaaatatagtaactcttgattactgaaaatgtcaaatcctagaaaacgtagcatgcctatacatgatgttaacatcattctcgaacagttgttggccgaagattcatttgatgaatccaatttttttgaaatagacaattctgatgttctctttagaaataactcagtttttatcttttttcacattgaaaatcagttagatttgcttaagcctcaaagagaatgtttatgtaaattagcgctggcaatttttttttttctaaacaggaaaagggttaaatgaaggttgataaaatggatgttcaattgtctttctgaaagtgagtggcttgaagggatgaataaatattttcttaatatattcaaaaaagtgcattgctttctgtgatggaagttaagacctaaatgtctggaagttgtaaccctcaacacagcttttcctgatttgctgcaaaggcacatagctgattatagaagtgaagacggcaaggacggggactccaacaaaggaaaccctgttgcaggatttgggaactttcatgcttcagatgaaattcaggcatgtgagcatcactgcagaatgtggtgcatcattgccatcatgagtaatcacttgctgctcctacttctgagaccaagactcttttgtcatattctttagcaataggacgggtaaagactggatttaattgctgttcagagtataaaaactcaattgattccaacatatctgaatgtgcagtaaagtcttaaaagtcaaccgttaatcattaagtcttttgcctctaaagtcttttgcctctgaagaggtttattacatgagttgattttcatattttcattttggtggggttttcctgttgttgggcaaggtggggtcacaggacatgggactagtaagcattttactgtttactatatttgtctttttataaacagtatctcccaaaatgtgattagaaggctaccaagcctgtatttggacatttaattgtgtgctttatataatgtaactactaacagtatttggactgcctgttcattcctggagacaaaaatgaaaatctgtcagttcaagttcttgggtaacatcaagtcattagaatttatctaaagcttatcatgatttgataagacatccattgcatgcagctgttttagctcagtgcaaaacactgaaattgtgattcttagactgtttctgagacatttggatggaaataaatgtataaatgttaattcatgtatataaattagaaacacttttctagattctgtaggcttttgttaaaaatagagaatttcttggggtttacttaggccacagaatggccaaataataataatgacaatgatattactaataataatagctaacctttatttggcacttactgtgtgccaggcactattctatttttttaagaatttttaaaataacagctttattgaaatacactttaccataaacttcacctttttattttttatttttatgagacagggactcacccaggctggagtgcagtggagcagtcatggcacactgtagcctcgacctccctgggctcaagcaatcctcccacttcagtgtcccgagtagttgggactacaggcatgcgtcactacacctaattggctaatttttgtagtttttgtagagatagggtttcgccatgttgcctaggctggtcttgaattcctgggctcaagcgatccacctgctttggcctcccaaaacagtgggattgcaggcgtgagccaccatgcctggctgaaattcaccttttaagatgtacaattcagtggtttttagtatattcacacacaaaattgcacaactatcactaacatctaattttagatcattttgtaacttcaccaagaaaccccaggtctgtcagcagtcagttccattcccccttcatcccagcctctggcaaccactaatctgctttctgtcactattgatttggccagacactattcttctgtgcttctcatgcatctcctgtaataccagtgctacaattctcattttatgtggaaaattgaggcactgagaggttaagtaaattgcccacggtcacacagtaatttgatttacaacagtaataacacattagatgagaacacagtaggacacaattttgaattccatttttatgtacctgaaatgaatacacccctcccccaaggtattttccctattgttagcctttgtaccctaggtacaaatataggtattttccctattgtgttatgtacctgaaatgaatacacccttcccccaaggtattttccctattgttagcctttgtaccctagaactgactggatgtagataacatttgttttcagagtaatggaacactgtatcagcagcatctgagaacataagaacagttggacattggaaagaggtttgttgccctcatccctccttgaacctcttttctctcccgcttccaccaccaccacacatatatacccctttttctcagtcttaagcatcaaacaatttctgcctctttctttttaattctcccagagggatggttaatgcatcacaatttaacttgtctattcaggtattaatagtcaagggatgcatctgtttgcttatagtaccagttatattcctaggaccttagagagcagtagtgtgagaatagaatgcctttctatttgggttaaactatgtgggaggaaaaagtaacagagtaaaggctttgccttaatgaagtcaagtgttctgcctggtgggaagtggccacacgctgcactgcgctgctcttgtttactctgttctttcagagcctttgtactttgccatcactgctagtaatttcttggtccttttcaatactccattttaatcttgatttttttctataaataataaatctgtgaaaaatctgtaaaaagatttgtgactattaaatgtgcaactaaaaacactggaaaaagaa

SEQ ID NO: 200631 - DNA, 937 bp, Homo sapiens
  Payload ID: 19597
  Gene Name: Yip1 domain family, member 7
  Uniprot ID: Q8N8F6
  ENST ID: ENST00000332990
  CDS Start-End: 18-860
atgtcatcttttcaccaatggatttgcttaaaatttctcacacaaagctacatttactggaggatctttctataaaaaataaacagaggatgtcaaacttggcacaatttgactctgatttttaccaatctaattttactattgataaccaggagcagagtggtaatgactctaatgcctatggaaatctttatggatctagaaaacaacaagctggtgagcagcctcagcctgcctcctttgttccatcagagatgctcatgtcatcgggttacgcaggacaattttttcagccagcatccaactcagattattattcacaatctccttacattgacagttttgatgaagagcctcctttgctagaagaacttggaatccattttgatcacatatggcaaaaaactttgacagtgttaaacccaatgaagccagtagatggcagcattatgaatgaaacggacctcactggacccattcttttttgcgtagccctgggagccaccttgcttctggcaggaaaagttcagtttggttatgtgtatggcatgagtgccattggctgccttgtgattcatgccttgctgaacctgatgagctcttcaggggtgtcgtacggctgtgtggccagcgtgctgggttactgcctgctccccatggtcatcctgtctggttgcgccatgttcttttcactgcagggcatctttggaatcatgtcatccctggtcatcattggctggtgtagtctctcagcttccaagatcttcattgcagccttgcacatggaaggacagcagcttcttgttgcctacccttgtgccatactttatggactttttgccctcctaacaattttctaaagaatgtttgagatggcatttcaagactctgtttgctgtccagattattttggaaatatattaacattcaaatttgg

SEQ ID NO: 200632 - DNA, 1196 bp, Homo sapiens
  Payload ID: 19597
  Gene Name: Yip1 domain family, member 7
  ENST ID: ENST00000415895
  CDS Start-End: 77-847
accaatggatttgcttaaaatttctcacacaaagctacatttactggaggatctttctataaaaaataaacagaggatgtcaaacttggcacaatttgactctgatttttaccaatctaattttactattgataaccaggagcagagtggtaatgactctaatgcctatggaaatctttatggatctagaaaacaacaagctggtgagcagcctcagcctgcctcctttgttccatcagagatgctcatgtcatcgggttacgcaggacaattttttcagccagcatccaactcagattattattcacaatctccttacattgacagttttgatgaagagcctcctttgctagaagaacttggaatccattttgatcacatatggcaaaaaactttgacagtgttaaacccaatgaagccagtagatggcagcattatgaatgaaacggacctcactggacccattcttttttgcgtagccctgggagccaccttgcttctggcaggaaaagttcagtttggttatgtgtatggcatgagtgccattggctgccttgtgattcatgccttgctgaacctgatgagctcttcaggggtgtcgtacggctgtgtggccagcgtgctgggttactgcctgctccccatggtcatcctgtctggttgcgccatgttcttttcactgcagggcatctttggaatcatgtcatccctggtcatcattggctggtgtagtctctcagcttccaagatcttcattgcagccttgcacatggaaggacagcagcttcttgttgcctacccttgtgccatactttatggactttttgccctcctaacaattttctaaagaatgtttgagatggcatttcaagactctgtttgctgtccagattattttggaaatatattaacattcaaatttggtgatatgatttctgttttattgcttttgagagagtaataagcagagagacaaagcagcacttaagggtggtgctctaatagcctgttggtttgaatgatgttttgcttttgagtttggtgcattaaaacatttcaaaatacttaaaatcaaaagggatacagttgctgtactgatcaaccctgcttttctcaatagaggtatttctgagaaaagtaagtaaataaactcatatgtttactaaaaggaaatctctagtaagccttttgagaaa

SEQ ID NO: 200633 - DNA, 484 bp, Homo sapiens
  Payload ID: 19597
  Gene Name: Yip1 domain family, member 7
  ENST ID: ENST00000508947
  CDS Start-End: 368-484
cgaaggtaccccccgtaggatccggtggacaggactcaaacagatcctgtgaagcgaagacaatgaaccccggggagctctgcccaagtaccagatccggaagcaacccgaagcggcggcgcagcttgccgacgtctgcacgccgcacgctgtcgtgacatcagcgcgtcttggcgccgggtagtggagtggtcactttgggaaagtcaggcaggaatgacttgtttctgtgatgtctgtggcctcaactgggatgactcgaccagctggggacttgaaaatcgggcatctctttctctctcatcttgtagtcacagtctctccatgtggtctccccatacagcctcttcagcatcacaatctcaggatgtcaaacttggcacaatttgactctgatttttaccaatctaattttactattgataaccaggagcagagtggtaatgactctaatgcctatggaaatctttatggatctagaaag

SEQ ID NO: 200634 - DNA, 943 bp, Homo sapiens
  Payload ID: 19598
  Gene Name: Yip1 interacting factor homolog A (S. cerevisiae)
  ENST ID: ENST00000359461
  CDS Start-End: 161-886
atgacgccacggacatggtggccgagaccggcggggtgggggacgtgtcgcgcggccgggtggcctcggtcggtaccctgggcgcggagcagctgcctcattagtattcgtacccacgaggcggcgcagcgggccctcggggacagcgagcgtcgcggccatggcttatcactcgggctacggagcccacggctccaagcacagggcccgggcagccccggatccccctcccctcttcgatgacacaagcggtggttattccagccagcccgggggatacccagccacaggagcagacgtggccttcagtgtcaaccacttgcttggggacccaatggccaatgtggctatggcctatggcagctccatcgcatcccatgggaaggacatggtgcacaaggagctgcaccgttttgtgtctgtgagcaaactcaagtatttttttgctgtggacacagcctacgtggccaagaagctagggctgctggtcttcccctacacacaccagaactgggaagtgcagtacagtcgtgatgctcctctgcccccccggcaagacctcaacgcccctgacctctatatccccacgatggccttcattacttacgtgctcctggctgggatggcactgggcattcagaaaagaatgatcctcagtgtgctcacggggctgctgttcggcagcgatggctactacgtggcgctggcctggacctcatcggcgctcatgtacttcattgtgcgctctttgcggacagcagccctgggccccgacagcatggggggccccgtcccccggcagcgtctccagctctacctgactctgggagctgcagccttccagcccctcatcatatactggctgactttccacctggtccggtgaccccctggccccagatggcactgagtttttcattcattgaagatttgatttccttga

SEQ ID NO: 200635 - DNA, 1124 bp, Homo sapiens
  Payload ID: 19598
  Gene Name: Yip1 interacting factor homolog A (S. cerevisiae)
  Uniprot ID: O95070
  ENST ID: ENST00000376901
  CDS Start-End: 186-1067
gaagagccaatggcaggcgcgggggatgacgccacggacatggtggccgagaccggcggggtgggggacgtgtcgcgcggccgggtggcctcggtcggtaccctgggcgcggagcagctgcctcattagtattcgtacccacgaggcggcgcagcgggccctcggggacagcgagcgtcgcggccatggcttatcactcgggctacggagcccacggctccaagcacagggcccgggcagccccggatccccctcccctcttcgatgacacaagcggtggttattccagccagcccgggggatacccagccacaggagcagacgtggccttcagtgtcaaccacttgcttggggacccaatggccaatgtggctatggcctatggcagctccatcgcatcccatgggaaggacatggtgcacaaggagctgcaccgttttgtgtctgtgagcaaactcaagtatttttttgctgtggacacagcctacgtggccaagaagctagggctgctggtcttcccctacacacaccagaactgggaagtgcagtacagtcgtgatgctcctctgcccccccggcaagacctcaacgcccctgacctctatatccccacgatggccttcattacttacgtgctcctggctgggatggcactgggcattcagaaaaggttctccccggaggtgctgggcctgtgtgcaagcacagcgctggtgtgggtggtgatggaggtgctggccctgctcctgggcctctacctggccaccgtgcgcagtgacctgagcacctttcacctgctggcctacagtggctacaaatacgtgggaatgatcctcagtgtgctcacggggctgctgttcggcagcgatggctactacgtggcgctggcctggacctcatcggcgctcatgtacttcattgtgcgctctttgcggacagcagccctgggccccgacagcatggggggccccgtcccccggcagcgtctccagctctacctgactctgggagctgcagccttccagcccctcatcatatactggctgactttccacctggtccggtgaccccctggccccagatggcactgagtttttcattcattgaagatttgatttccttga

SEQ ID NO: 200636 - DNA, 619 bp, Homo sapiens
  Payload ID: 19598
  Gene Name: Yip1 interacting factor homolog A (S. cerevisiae)
  ENST ID: ENST00000431556
  CDS Start-End: 23-619
ggggacagcgagcgtcgcggccatggcttatcactcgggctacggagcccacggctccaagcacagggcccgggcagccccggatccccctcccctcttcgatgacacaagcggtggttattccagccagcccgggggatacccagccacaggagcagacgtggccttcagtgtcaaccacttgcttggggacccaatggccaatgtggctatggcctatggcagctccatcgcatcccatgggaaggacatggtgcacaaggagctgcaccgttttgtgtctgtgagcaaactcaagtatttttttgctgtggacacagcctacgtggccaagaagctagggctgctggtcttcccctacacacaccagaactgggaagtgcagtacagtcgtgatgctcctctgcccccccggcaagacctcaacgcccctgacctctatatccccacgatggccttcattacttacgtgctcctggctgggatggcactgggcattcagaaaaggatgcctggctctgagccacccctgctttggcgcaggttctccccggaggtgctgggcctgtgtgcaagcacagcgctggtgtgggtggtgatggaggtgctggccctgctc

SEQ ID NO: 200637 - DNA, 541 bp, Homo sapiens
  Payload ID: 19598
  Gene Name: Yip1 interacting factor homolog A (S. cerevisiae)
  ENST ID: ENST00000484814
  CDS Start-End: 144-305
gtggccgagaccggcggggtgggggacgtgtcgcgcggccgggtggcctcggtcggtaccctgggcgcggagcagctgcctcattagtattcgtacccacgaggcggcgcagcgggccctcggggacagcgagcgtcgcggccatggcttatcactcgggctacggagcccacgctgcaccgttttgtgtctgtgagcaaactcaagtatttttttgctgtggacacagcctacgtggccaagaagctagggctgctggtcttcccctacacacaccagaactgggaagtgcagtacagtcgtgatgctcctctgcccccccggcaagacctcaacgcccctgacctctatatccccagctgcccacacatacagctgactcttctctgtcctgttggctgcacagggccaggcccatcgtggacacccaggcgatggccttcattacttacgtgctcctggctgggatggcactgggcattcagaaaagaatgatcctcagtgtgctcacggggctgctgttcggcagcgatggctacta

SEQ ID NO: 200638 - DNA, 532 bp, Homo sapiens
  Payload ID: 19598
  Gene Name: Yip1 interacting factor homolog A (S. cerevisiae)
  ENST ID: ENST00000528575
  CDS Start-End: 53-532
cgtacccacgaggcggcgcagcgggccctcggggacagcgagcgtcgcggccatggcttatcactcgggctacggagcccacggctccaagcacagggcccgggcagccccggatccccctcccctcttcgatgacacaagcggtggttattccagccagcccgggggatacccagccacaggagcagacgtggccttcagtgtcaaccacttgcttggggacccaatggccaatgtggctatggcctatggcagctccatcgcatcccatgggaaggacatggtgcacaaggagctgcaccgttttgtgtctgtgagcaaactcaagtatttttttgctgtggacacagcctacgtggccaagaagctagggctgctggtcttcccctacacacaccagaactgggaagtgcagtacagtcgtgatgctcctctgcccccccggcaagacctcaacgcccctgacctctatatccccagttctccccggaggtgctgggcctgtgtgcaagcacagcgctggtgtgggtgg

SEQ ID NO: 200639 - DNA, 667 bp, Homo sapiens
  Payload ID: 19598
  Gene Name: Yip1 interacting factor homolog A (S. cerevisiae)
  ENST ID: ENST00000496746
  CDS Start-End: 371-610
gcatagctgtagcctcgaactgtgaccctggacatgtctcggcccctagtgacctctagcactgctctgttaagagggagcagctgtctccagcagtctcctgaggatctgcgtgccatgcagaggttggggaggtgttgagagtcactctgcgagtcttggggagagaagggggtctcagatccaggtcctggggctgagtcctgggccttccatatccctttggggtctgggtccctgtggggacagattgagagtaaaaggtgctgtgggaggtggggtctagctgggctctgggcgttgggggtagggccaatctcaggcctagacccctgggggtcaccaaccctttcctcctcccacccccagaatgatcctcagtgtgctcacggggctgctgttcggcagcgatggctactacgtggcgctggcctggacctcatcggcgctcatgtacttcattgtgcgctctttgcggacagcagccctgggccccgacagcatggggggccccgtcccccggcagcgtctccagctctacctgactctgggagctgcagccttccagcccctcatcatatactggctgactttccacctggtccggtgaccccctggccccagatggcactgagtttttcattcattgaagatttgatttccttga

SEQ ID NO: 200640 - DNA, 854 bp, Homo sapiens
  Payload ID: 19598
  Gene Name: Yip1 interacting factor homolog A (S. cerevisiae)
  ENST ID: ENST00000471387
  CDS Start-End: 256-732
gtggccgagaccggcggggtgggggacgtgtcgcgcggccgggtggcctcggtcggtaccctgggcgcggagcagctgcctcattagtattcgtacccacgaggcggcgcagcgggccctcggggacagcgagcgtcgcggccatggcttatcactcgggctacggagcccacgaactgggaagtgcagtacagtcgtgatgctcctctgcccccccggcaagacctcaacgcccctgacctctatatccccacgatggccttcattacttacgtgctcctggctgggatggcactgggcattcagaaaaggttctccccggaggtgctgggcctgtgtgcaagcacagcgctggtgtgggtggtgatggaggtgctggccctgctcctgggcctctacctggccaccgtgcgcagtgacctgagcacctttcacctgctggcctacagtggctacaaatacgtgggaatgatcctcagtgtgctcacggggctgctgttcggcagcgatggctactacgtggcgctggcctggacctcatcggcgctcatgtacttcattgtgagtctggtgcacccccccattcccctgccttcacttgagggcaaacctccccctcctggccaggcttcagttctcctttcttccaggtgcgctctttgcggacagcagccctgggccccgacagcatggggggccccgtcccccggcagcgtctccagctctacctgactctgggagctgcagccttccagcccctcatcatatactggctgactttccacctggtccggtgaccccctggccccagatggcactgagtttttcattcattgaagatttgatttccttga

SEQ ID NO: 200641 - DNA, 354 bp, Homo sapiens
  Payload ID: 19598
  Gene Name: Yip1 interacting factor homolog A (S. cerevisiae)
  ENST ID: ENST00000616458
  CDS Start-End: 1-354
ggctccaagcacagggcccgggcagccccggatccccctcccctcttcgatgacacaagcggtggttattccagccagcccgggggatacccagccacaggagcagacgtggccttcagtgtcaaccacttgcttggggacccaatggccaatgtggctatggcctatggcagctccatcgcatcccatgggaaggacatggtgcacaaggagctgcaccgttttgtgtctgtgagcaaactcaagtatttttttgctgtggacacagcctacgtggccgaagctagggctgctggtcttccctacacacacccagaactgggaagtgcagtacagtcgatgctcctctgcccc

SEQ ID NO: 200642 - DNA, 964 bp, Homo sapiens
  Payload ID: 19599
  Gene Name: Yip1 interacting factor homolog B (S. cerevisiae)
  Uniprot ID: Q5BJH7
  ENST ID: ENST00000329420
  CDS Start-End: 65-964
gtcactgcaggtcagaggtcacgagatcaaggatctggaaccctgaggtgtgcacagcgctgggatgccaggttcggcctcgaagcggaggatccctgtgtcccagccgggcatggccgacccccaccagcttttcgatgacacaagttcagcccagagccggggctatggggcccagcgggcacctggtggcctgagttatcctgcagcctctcccacgccccatgcagccttcctggctgacccggtgtccaacatggccatggcctatgggagcagcctggccgcgcagggcaaggagctggtggataagaacatcgaccgcttcatccccatcaccaagctcaagtattactttgctgtggacaccatgtatgtgggcagaaagctgggcctgctgttcttcccctacctacaccaggactgggaagtgcagtaccaacaggacaccccggtggccccccgctttgacgtcaatgccccggacctctacattccagcaatggctttcatcacctacgttttggtggctggtcttgcgctggggacccaggataggttctccccagacctcctggggctgcaagcgagctcagccctggcctggctgaccctggaggtgctggccatcctgctcagcctctatctggtcactgtcaacaccgacctcaccaccatcgacctggtggccttcttgggctacaaatatgtcgggatgattggcggggtcctcatgggcctgctcttcgggaagattggctactacctggtgctgggctggtgctgcgtagccatctttgtgttcatgatccggacgctgcggctgaagatcttggcagacgcagcagctgagggggtcccggtgcgtggggcccggaaccagctgcgcatgtacctgaccatggcggtggcggcggcgcagcctatgctcatgtactggctcaccttccacctggtgcggtga

SEQ ID NO: 200643 - DNA, 1257 bp, Homo sapiens
  Payload ID: 19599
  Gene Name: Yip1 interacting factor homolog B (S. cerevisiae)
  Uniprot ID: Q5BJH7
  ENST ID: ENST00000337679
  CDS Start-End: 7-882
cgaaggatgcacccggcaggcttggcggcggcggctgcggggacgccccggctgccctcgaagcggaggatccctgtgtcccagccgggcatggccgacccccaccagcttttcgatgacacaagttcagcccagagccggggctatggggcccagcgggcacctggtggcctgagttatcctgcagcctctcccacgccccatgcagccttcctggctgacccggtgtccaacatggccatggcctatgggagcagcctggccgcgcagggcaaggagctggtggataagaacatcgaccgcttcatccccatcaccaagctcaagtattactttgctgtggacaccatgtatgtgggcagaaagctgggcctgctgttcttcccctacctacaccaggactgggaagtgcagtaccaacaggacaccccggtggccccccgctttgacgtcaatgccccggacctctacattccagcaatggctttcatcacctacgttttggtggctggtcttgcgctggggacccaggataggttctccccagacctcctggggctgcaagcgagctcagccctggcctggctgaccctggaggtgctggccatcctgctcagcctctatctggtcactgtcaacaccgacctcaccaccatcgacctggtggccttcttgggctacaaatatgtcgggatgattggcggggtcctcatgggcctgctcttcgggaagattggctactacctggtgctgggctggtgctgcgtagccatctttgtgttcatgtttccccttttgccgggcgcggtggctcatgcttgtaatcccagcactttgggaggccgaggcggtcggatcacgagatccggacgctgcggctgaagatcttggcagacgcagcagctgagggggtcccggtgcgtggggcccggaaccagctgcgcatgtacctgaccatggcggtggcggcggcgcagcctatgctcatgtactggctcaccttccacctggtgcggtgagcgcgcccgctgaacctcccgctgctgctgctgctgctgggggccactgtggccgccgaactcatctcctgcctgcaggccccaaggtccaccctgtctggccacaggcaccgcctccatcccatgtcccgcccagccccgcccccaacccaaggtgctgagagatctccagctgcacaggccaccgccccagggcgtggccgctgttacagaaacaataaaccctgatgggcatggc

SEQ ID NO: 200644 - DNA, 1225 bp, Homo sapiens
  Payload ID: 19599
  Gene Name: Yip1 interacting factor homolog B (S. cerevisiae)
  Uniprot ID: Q5BJH7
  ENST ID: ENST00000339413
  CDS Start-End: 47-991
cgggcgggcacgctccgaaccgcggcttaggtggcggcggcgaaggatgcacccggcaggcttggcggcggcggctgcggggacgccccggctgcgtaagtggccctcgaagcggaggatccctgtgtcccagccgggcatggccgacccccaccagcttttcgatgacacaagttcagcccagagccggggctatggggcccagcgggcacctggtggcctgagttatcctgcagcctctcccacgccccatgcagccttcctggctgacccggtgtccaacatggccatggcctatgggagcagcctggccgcgcagggcaaggagctggtggataagaacatcgaccgcttcatccccatcaccaagctcaagtattactttgctgtggacaccatgtatgtgggcagaaagctgggcctgctgttcttcccctacctacaccaggactgggaagtgcagtaccaacaggacaccccggtggccccccgctttgacgtcaatgccccggacctctacattccagcaatggctttcatcacctacgttttggtggctggtcttgcgctggggacccaggataggttctccccagacctcctggggctgcaagcgagctcagccctggcctggctgaccctggaggtgctggccatcctgctcagcctctatctggtcactgtcaacaccgacctcaccaccatcgacctggtggccttcttgggctacaaatatgtcgggatgattggcggggtcctcatgggcctgctcttcgggaagattggctactacctggtgctgggctggtgctgcgtagccatctttgtgttcatgatccggacgctgcggctgaagatcttggcagacgcagcagctgagggggtcccggtgcgtggggcccggaaccagctgcgcatgtacctgaccatggcggtggcggcggcgcagcctatgctcatgtactggctcaccttccacctggtgcggtgagcgcgcccgctgaacctcccgctgctgctgctgctgctgggggccactgtggccgccgaactcatctcctgcctgcaggccccaaggtccaccctgtctggccacaggcaccgcctccatcccatgtcccgcccagccccgcccccaacccaaggtgctgagagatctccagctgcacaggccaccgccccagggcgtggccgctgttacagaaacaataaaccctgatgggca

SEQ ID NO: 200645 - DNA, 1404 bp, Homo sapiens
  Payload ID: 19599
  Gene Name: Yip1 interacting factor homolog B (S. cerevisiae)
  Uniprot ID: Q5BJH7
  ENST ID: ENST00000392124
  CDS Start-End: 316-1167
gtgggagggtgggtagatggataggtggatggatgggtgggtagatgaatggatgcatagatgaatgtatcagtggatggatagttggctagatgggtgggttggtggatgaatggcagagcttgcacctgccagtccatctgacatcaaagccagtgtctctaatggtgacaccaccctcctctgcagcaggaggcagagctgtgggatgaatgaggttcgccaggtctcccttacctatcctgggtccccagctccttctcactctcttcccttgcagcctcgaagcggaggatccctgtgtcccagccgggcatggccgacccccaccagcttttcgatgacacaagttcagcccagagccggggctatggggcccagcgggcacctggtggcctgagttatcctgcagcctctcccacgccccatgcagccttcctggctgacccggtgtccaacatggccatggcctatgggagcagcctggccgcgcagggcaaggagctggtggataagaacatcgaccgcttcatccccatcaccaagctcaagtattactttgctgtggacaccatgtatgtgggcagaaagctgggcctgctgttcttcccctacctacaccaggactgggaagtgcagtaccaacaggacaccccggtggccccccgctttgacgtcaatgccccggacctctacattccagcaatggctttcatcacctacgttttggtggctggtcttgcgctggggacccaggataggttctccccagacctcctggggctgcaagcgagctcagccctggcctggctgaccctggaggtgctggccatcctgctcagcctctatctggtcactgtcaacaccgacctcaccaccatcgacctggtggccttcttgggctacaaatatgtcgggatgattggcggggtcctcatgggcctgctcttcgggaagattggctactacctggtgctgggctggtgctgcgtagccatctttgtgttcatgatccggacgctgcggctgaagatcttggcagacgcagcagctgagggggtcccggtgcgtggggcccggaaccagctgcgcatgtacctgaccatggcggtggcggcggcgcagcctatgctcatgtactggctcaccttccacctggtgcggtgagcgcgcccgctgaacctcccgctgctgctgctgctgctgggggccactgtggccgccgaactcatctcctgcctgcaggccccaaggtccaccctgtctggccacaggcaccgcctccatcccatgtcccgcccagccccgcccccaacccaaggtgctgagagatctccagctgcacaggccaccgccccagggcgtggccgctgttacagaaacaataaaccctgatgggcatgg

SEQ ID NO: 200646 - DNA, 940 bp, Homo sapiens
  Payload ID: 19599
  Gene Name: Yip1 interacting factor homolog B (S. cerevisiae)
  Uniprot ID: Q5BJH7
  ENST ID: ENST00000591784
  CDS Start-End: 89-940
ggcgaggtcactgcaggtcagaggtcacgagatcaaggatctggaaccctgagcctcgaagcggaggatccctgtgtcccagccgggcatggccgacccccaccagcttttcgatgacacaagttcagcccagagccggggctatggggcccagcgggcacctggtggcctgagttatcctgcagcctctcccacgccccatgcagccttcctggctgacccggtgtccaacatggccatggcctatgggagcagcctggccgcgcagggcaaggagctggtggataagaacatcgaccgcttcatccccatcaccaagctcaagtattactttgctgtggacaccatgtatgtgggcagaaagctgggcctgctgttcttcccctacctacaccaggactgggaagtgcagtaccaacaggacaccccggtggccccccgctttgacgtcaatgccccggacctctacattccagcaatggctttcatcacctacgttttggtggctggtcttgcgctggggacccaggataggttctccccagacctcctggggctgcaagcgagctcagccctggcctggctgaccctggaggtgctggccatcctgctcagcctctatctggtcactgtcaacaccgacctcaccaccatcgacctggtggccttcttgggctacaaatatgtcgggatgattggcggggtcctcatgggcctgctcttcgggaagattggctactacctggtgctgggctggtgctgcgtagccatctttgtgttcatgatccggacgctgcggctgaagatcttggcagacgcagcagctgagggggtcccggtgcgtggggcccggaaccagctgcgcatgtacctgaccatggcggtggcggcggcgcagcctatgctcatgtactggctcaccttccacctggtgcggtga

SEQ ID NO: 200647 - DNA, 466 bp, Homo sapiens
  Payload ID: 19599
  Gene Name: Yip1 interacting factor homolog B (S. cerevisiae)
  ENST ID: ENST00000587039
  CDS Start-End: 158-466
cttccaccactatgttttcctgagataagtcggggagtctgagagggagagaaggggggagactgagagtcagagagaggagagactaaggacgctaggtgggcagggctcttcacttgcagcctcgaagcggaggatccctgtgtcccagccgggcatggccgacccccaccagcttttcgatgacacaagttcagcccagagccggggctatggggcccagcgggcacctggtggcctgagttatcctgcagcctctcccacgccccatgcagccttcctggctgacccggtgtccaacatggccatggcctatgggagcagcctggccgcgcagggcaaggagctggtggataagaacatcgaccgcttcatccccatcaccaagctcaagtattactttgctgtggacaccatgtatgtgggcagaaagctgggcctgctgttcttcccctacctacaccag

SEQ ID NO: 200648 - DNA, 1077 bp, Homo sapiens
  Payload ID: 19599
  Gene Name: Yip1 interacting factor homolog B (S. cerevisiae)
  Uniprot ID: Q5BJH7
  ENST ID: ENST00000591755
  CDS Start-End: 4-888
aggatgcacccggcaggcttggcggcggcggctgcggggacgccccggctgccctcgaagcggaggatccctgtgtcccagccgggcatggccgacccccaccagcttttcgatgacacaagttcagcccagagccggggctatggggcccagcgggcacctggtggcctgagttatcctgcagcctctcccacgccccatgcagccttcctggctgacccggtgtccaacatggccatggcctatgggagcagcctggccgcgcagggcaaggagctggtggataagaacatcgaccgcttcatccccatcaccaagctcaagtattactttgctgtggacaccatgtatgtgggcagaaagctgggcctgctgttcttcccctacctacaccaggactgggaagtgcagtaccaacaggacaccccggtggccccccgctttgacgtcaatgccccggacctctacattccagcaatggctttcatcacctacgttttggtggctggtcttgcgctggggacccaggataggttctccccagacctcctggggctgcaagcgagctcagccctggcctggctgaccctggaggtgctggccatcctgctcagcctctatctggtcactgtcaacaccgacctcaccaccatcgacctggtggccttcttgggctacaaatatgtcgggatgattggcggggtcctcatgggcctgctcttcgggaagattggctactacctggtgctgggctggtgctgcgtagccatctttgtgttcatgtttccccttttgccgggcgcggtggctcatgcttgtaatcccagcactttgggaggccgaggcggtcggatcacgaggtcaggagatcaagaccatcctggctaacacggtgaaaccccatctctactaaaaatacaaaaaattagctgggtgtggtggtgtgtgcctgtagtcccagctactcaggaggctgaggcaggagaatcgcttgaacccaggaggtggaggttgcagtgagccgagatcgcacacctgcgctccagcctgggtgacagagcgagactccgtctcaaa

SEQ ID NO: 200649 - DNA, 1181 bp, Homo sapiens
  Payload ID: 19599
  Gene Name: Yip1 interacting factor homolog B (S. cerevisiae)
  Uniprot ID: Q5BJH7
  ENST ID: ENST00000592694
  CDS Start-End: 82-933
cacccggcaggcttggcggcggcggctgcggggacgccccggctgccctcgaagcggaggatccctgtgtcccagccgggcatggccgacccccaccagcttttcgatgacacaagttcagcccagagccggggctatggggcccagcgggcacctggtggcctgagttatcctgcagcctctcccacgccccatgcagccttcctggctgacccggtgtccaacatggccatggcctatgggagcagcctggccgcgcagggcaaggagctggtggataagaacatcgaccgcttcatccccatcaccaagctcaagtattactttgctgtggacaccatgtatgtgggcagaaagctgggcctgctgttcttcccctacctacaccaggactgggaagtgcagtaccaacaggacaccccggtggccccccgctttgacgtcaatgccccggacctctacattccagcaatggctttcatcacctacgttttggtggctggtcttgcgctggggacccaggataggttctccccagacctcctggggctgcaagcgagctcagccctggcctggctgaccctggaggtgctggccatcctgctcagcctctatctggtcactgtcaacaccgacctcaccaccatcgacctggtggccttcttgggctacaaatatgtcgggatgattggcggggtcctcatgggcctgctcttcgggaagattggctactacctggtgctgggctggtgctgcgtagccatctttgtgttcatgatccggacgctgcggctgaagatcttggcagacgcagcagctgagggggtcccggtgcgtggggcccggaaccagctgcgcatgtacctgaccatggcggtggcggcggcgcagcctatgctcatgtactggctcaccttccacctggtgcggtgagcgcgcccgctgaacctcccgctgctgctgctgctgctgggggccactgtggccgccgaactcatctcctgcctgcaggccccaaggtccaccctgtctggccacaggcaccgcctccatcccatgtcccgcccagccccgcccccaacccaaggtgctgagagatctccagctgcacaggccaccgccccagggcgtggccgctgttacagaaacaataaaccctgatgggcatggcgtggacagcc

SEQ ID NO: 200650 - DNA, 936 bp, Homo sapiens
  Payload ID: 19599
  Gene Name: Yip1 interacting factor homolog B (S. cerevisiae)
  ENST ID: ENST00000592246
  CDS Start-End: 36-782
cctcgaagcggaggatccctgtgtcccagccgggcatggccgacccccaccagcttttcgatgacacaagttcagcccagagccggggctatggggcccagcgggcacctggtggcctgagttatcctgcagcctctcccacgccccatgcagccttcctggctgacccggtgtccaacatggccatggcctatgggagcagcctggccgcgcagggcaaggagctggtggataagaacgactgggaagtgcagtaccaacaggacaccccggtggccccccgctttgacgtcaatgccccggacctctacattccagcaatggctttcatcacctacgttttggtggctggtcttgcgctggggacccaggataggttctccccagacctcctggggctgcaagcgagctcagccctggcctggctgaccctggaggtgctggccatcctgctcagcctctatctggtcactgtcaacaccgacctcaccaccatcgacctggtggccttcttgggctacaaatatgtcgggatgattggcggggtcctcatgggcctgctcttcgggaagattggctactacctggtgctgggctggtgctgcgtagccatctttgtgttcatgatccggacgctgcggctgaagatcttggcagacgcagcagctgagggggtcccggtgcgtggggcccggaaccagctgcgcatgtacctgaccatggcggtggcggcggcgcagcctatgctcatgtactggctcaccttccacctggtgcggtgagcgcgcccgctgaacctcccgctgctgctgctgctgctgggggccactgtggccgccgaactcatctcctgcctgcaggccccaaggtccaccctgtctggccacaggcaccgcctccatcccatgtcccgcccagccccgcccccaacccaag

SEQ ID NO: 200651 - DNA, 575 bp, Homo sapiens
  Payload ID: 19599
  Gene Name: Yip1 interacting factor homolog B (S. cerevisiae)
  ENST ID: ENST00000588002
  CDS Start-End: 1-575
cctcgaagcggaggatccctgtgtcccagccgggcatggccgacccccaccagcttttcgatgacacaagttcagcccagagccggggctatggggcccagcgggcacctggtggcctgagttatcctgcagcctctcccacgccccatgcagccttcctggctgacccggtgtccaacatggccatggcctatgggagcagcctggccgcgcagggcaaggagctggtggataagaacatcgaccgcttcatccccatcaccaagctcaagtattactttgctgtggacaccatgtatgtgggcagaaagctgggcctgctgttcttcccctacctacaccaggactgggaagtgcagtaccaacaggacaccccggtggccccccgctttgacgtcaatgccccggacctctacattccagcaatggctttcatcacctacgttttggtggctggtcttgcgctggggacccaggataggatgattggcggggtcctcatgggcctgctcttcgggaagattggctactacctggtgctgggctggtgctgcgtagccatctttgtgttcatg

SEQ ID NO: 200652 - DNA, 734 bp, Homo sapiens
  Payload ID: 19599
  Gene Name: Yip1 interacting factor homolog B (S. cerevisiae)
  ENST ID: ENST00000589247
  CDS Start-End: 40-734
atcaaggatctggaaccctgaggtgtgcacagcgctgggatgccagcctcgaagcggaggatccctgtgtcccagccgggcatggccgacccccaccagcttttcgatgacacaagttcagcccagagccggggctatggggcccagcgggcacctggtggcctgagttatcctgcagcctctcccacgccccatgcagccttcctggctgacccggtgtccaacatggccatggcctatgggagcagcctggccgcgcagggcaaggagctggtggataagaacatcgaccgcttcatccccatcaccaagctcaagtattactttgctgtggacaccatgtatgtgggcagaaagctgggcctgctgttcttcccctacctacaccaggactgggaagtgcagtaccaacaggacaccccggtggccccccgctttgacgtcaatgccccggacctctacattccagcaatggctttcatcacctacgttttggtggctggtcttgcgctggggacccaggataggttctccccagacctcctggggctgcaagcgagctcagccctggcctggctgaccctggaggtgctggccatcctgctcagcctctatctggtcactgtcaacaccgacctcaccaccatcgacctggtggccttcttgggctacaaatatgtcgggatgattggcggggtcctcatgggcctgctcttcgggaagattggctacta

SEQ ID NO: 200653 - DNA, 4329 bp, Homo sapiens
  Payload ID: 19600
  Gene Name: yippee-like 1
  Uniprot ID: O60688
  ENST ID: ENST00000339468
  CDS Start-End: 385-744
ctccaaggctgttaacggcgtctgggccgggctacggctccaaaacaaagggcaggcggcccgcggggcggcggcgggaggatgcctcgcgccctgcctaggcgttaacggcctcagcgcgtcccgggccgcgccgggaacgcctgagagccgagcccgcgctgaccggggcccgggccggatgggcgctgcgggccggggcgcggaccgcggagcggccgttacgtttttctctcgtcccagctgtgtggacagtgccacacgccctcctggacaacgacggctcttgcgtgcattttccagtgttgcttttgtcagagaggccagcagagccacggttcttccagaaccagccctgagctgagtgaggagtgcccaggagagatggtgaaaatgacaaagtccaaaactttccaagcgtatctgccgaactgtcaccgaacgtacagctgtatccactgcagagcacacctggccaatcatgacgagctcatctccaagtcctttcaggggagccagggacgcgcctacctcttcaattccgtggtgaacgtgggctgcggccctgcagaggagagggtccttctcaccgggctgcatgcggttgccgacatctactgcgagaactgcaagaccacgctcgggtggaaatacgagcatgcctttgagagcagtcagaaatataaggaaggaaaattcatcattgagcttgctcatatgatcaaagacaatggctgggagtaatgtgcgaactttcccttctcctttgaatgctgttttgtgaaagaaactgtgaatgtaatggaaacgtaggagcatctggtgacagcctttcttgccctctgacctcaaaggctagctgcgcatagctcttgacactctcggccatctctgtgggtaaggtgtccctcggatctgtcctcttcgtgtacacagttgtttctgaaaattttcaatgagctttttctaacttctcaagttctagagaaagaattaaccaactgatgacttacctgcctagttaatatcttcctttcacctttgtcttcaatatagttgggctctgcttttttaaggttcagttgaaaaccaaactggggccgggtgcggtggctcacgcctgtaatcccagcactttgggaggccaagatgggtggatcacctgaggtcaggagttctagatcagcctggccaacatggtgaaaccccatctctactaaaaatacgaaaattagccgggcatggtggcgagtgcctgtaatcttagctactcaggaggctaaggcaggagaatcacttgaacctgggacacggaggttgcagtgagctaagatcatgccatcgcactccagcctgggggacaaaagtgagacatcgtctcaaaaaaaaaaaaaaaagctgggtatggtggcgcatgcctttaatcccagctactcgggaggctgaggcacgagaatcacttgaacccaggaggcggaggttgcagtgagccaagatcgcgccactgcactccagcctggcaatagggcgagactccgtctcaatttaaaacaagagagaaccagactgagtctctgaagaccacagggacagggtctctttagatagcaagtctcaccattcccttttttagagaaaaggtattgtagcccaccctccaccccgctgtttttcttaaatttgcagaacttcaaattggctattcctcttgcaaatgaacccttaaagtacagtgttatttaagaatcttccagaggcagtcaacagacttatacactaagggcatttttggtttttagcttgttcaaaaacagaggccagcacagatgacattttagatacactctaaattgagaatggtgtctagtggaacatgtttatttaagccagtagattccttatctagaaagcaggtgagctagcccttagagaaggctgtcccggggcccgcagaggtgcccttactgaggtgacagcctcacagggtctggtaccaggggttgtgccctcagcagtgacagcagcttaggtgtcaggcagttgctgagtggctggtccatgtctatagagtaacacactggaccgaggaaaagtcagatttcattttctaccctggatgtacttgaagaaaaagaattatttttgcatatgaaagaggccagaacccacaggaaaaacttcaaaacttgacatttgccagaatgtttaaaatttgttcagaaaaggttaaagcaacaagtttagcctttgtgcatgaagacgcctggcctgctagacgcgttgcccgtccctgcgtggtgctgtcccatgtcacttgaactgatagaggggcctgtgcaatctcctaaggcctgtgtttctgccatatattttattataaattacaatccactcatccacctgccctccaccaggagtgggcaccccataagggtttaggccactttgcagaggatggaggtcaaaaaccactcccagataagtttggttttcaacatttagtaacttgtctcagggcagagggcaggcagggggaccgaggggcagcagataggagagcactgagcccggatagttctcagcctggcaagtggctctgaagctgccttcagacaaggctagtctaggggcaagagtgcgagctggctgacaataagaacgtggccacctgcccagcttcacacctcccccgacttcagcccttcctaaacccagacctgcggtccaggcaggcactgggctgtgcccactcgagctcactgcccacacacagcatgcctttgggtgccatctctttgcccaagcctggaagccttggcaggtgggaaatgccgctgccctggtgggcatggcactgagatgcatccactcagcaggagtgacagaggcagaagttcctttaaagcacatcttccacttaggaaaggaaggaaatctttgtactgtcttggaagcctccacatccggctatggccctgcaagctgctttatccctgcgctagtctcccccgagggtttaggctggcccagcacatcctgtcctcctgagctcgcgtgcagccacccagagcgcaggggtcactgcacgctgcagggctcttgctgccatggtctcaagcctgaagaggctccgcccacaagctggcccatgaagttagcaatgcctgtggcttcagtcaattgtcttgagactgtgaagaggctgaaagacaccttcccgggtggaagaaggagttcactgaaaacttatcttaaactgacccttccctttgagtgagtcttcattcctctcccatgtgggaacccagcctccgatgccccggggactaggggaaacagttggaggttcgtgccgtccccagcctgccacgggtgcgaggacagccaagtcctgagtgactcaagatgcttcacttacatggaagaaacttctaaaactctaccgagtggtttttgtatatactaaagttctatttagagcttttctgttttgggcaagttcgctgctccttctatttgggcactttggtttttgtactgtcttttgtgacggcattgattgaacattttttactagtagtcttatgacttttgtatttttttttttttttgtaatttataccaacaacacttttatcactttttttttgttgggcttctgcaaaatacaagctcatttttaaaccaaatgaacagaccatgagctggcttcaggggaagtgctattcacaggaccatatccaccaccctcttaaattcctaaacaatatcatctaggacttctatttaagttatttaaaataaatcttccttgagagccttgggaggtgatgtcagggttataaatggcacagtgcatttgctgtaggaatgtggtttggcattgttttatacacacagtattttttataccttaatgcttattcttgatggcatctgtcagatattagaattgaaaataagaatcttcccaaaatcctttaatttacctgatgccctcatcaggtcgttaaaaattcaaatggttttaatagctaaaaaactacaaattaagctctaaaacaaacaaactacagaaatgtaaaccttcatttgccaaaggtccttggtggcctgtcccctgccctgggagcagatggccctgaagcccttccctcactgtgcaggccaccgggtgaggctggacggtcacccatggtggcttcactgcaaggagcaggactgccgagctcaagcacggggccttcagcttcccctgtcctctggccacaccgccagcccttggtccttatctgtgtgaggtttacaaataaagcttctgatgtcaaa

SEQ ID NO: 200654 - DNA, 466 bp, Homo sapiens
  Payload ID: 19600
  Gene Name: yippee-like 1
  ENST ID: ENST00000403503
  CDS Start-End: 306-440
ggatgcctcgcgccctgcctaggcgttaacggcctcagcgcgtcccgggccgcgccgggaacgcctgagagccgagcccgcgctgaccggggcccgggccggatgggcgctgcgggccggggcgcggaccgcggagcggccgttacgtttttctctcgtcccagctgtgtggacagtgccacacgccctcctggacaacgacggctcttgcgtgcattttccagtgttgcttttgtcagagaggccagcagagccacggttcttccagaaccagccctgagctgagtgaggagtgcccaggagagatggtgaaaatgacaaagtccaaaactttccaagcgtatctgccgaactgtcaccgaacgtacagctgtatccactgcagagcacacctggccaatcatgacgagctcatctccaagtcacttgcagaatgttgacgcagcagaatcagccactcctgtct

SEQ ID NO: 200655 - DNA, 5217 bp, Homo sapiens
  Payload ID: 19601
  Gene Name: yippee-like 2
  Uniprot ID: Q96QA6
  ENST ID: ENST00000312655
  CDS Start-End: 319-678
tggcggagactgtggctttaagagcgtgccgggagcccgagccccagccgggccgcgcttcgccgctgcgcaccccagcggagccaagccccacgctggccggacagggccgcctgtcgccgggctgctgagaactagccctagacctctgcgtgagggttcttctgccgaagacatcaccagtgtgtggagcctgccacacccacccgctgccaaaccacggcctttacctgtgtcttccggtgtttcccgtgcgacccatcctgtgggagtgcctcgtgggctgccccagagttcaccccacactcagcagcaccaatggtgaagatgacaagatcgaagactttccaggcatatctgccctcctgccaccggacctacagctgcattcactgcagagctcacttggccaatcatgatgaactaatttccaagtcattccaaggaagtcaaggacgagcatacctctttaactcagtagttaatgtgggctgtgggcctgcagaagagcgagtgttgctaacaggactgcatgcagtcgcagacatttactgtgaaaactgcaaaaccactctgggctggaaatacgaacatgcttttgaaagcagccagaaatataaagaaggcaaatacatcattgaactagcacacatgatcaaggacaatggctgggactgattggacagcatctacccaacccagtgtccacgtgaacgccattcaaccgaacattcttcccaagcgtgagagagtgactgacacttggttccatccatttaggggccttgccatccggggcatcctcccaccctgacgccatctttctggtgaccggcctctaaatcgctgtctctctgtctctttgctttgtatctgtttgtgagttgatcctggcttctctctctgttctagttttggctgaaaacaaaacaacaaaaggaacagatccttgaccgcatggcggcagcccaccttggtaagggccccagggcccatgcgagagctgcctgatggcctcttgtcaggagagcagtggcacgggggcgtgaggaagagggaaaggggaaactctaagggtcctggcgcggggaaggggtggaagggtggaggtaggaacaaaattgcgccgctcctggagacctgataacttaggcttgaaataattgacttgtctaaaaggacaaagagaaaaaaaaaatacctcatgactgcattctctctgactagaagcttctgttcctgacaccaaatgtgccaggttagcaaatgagcacaagatgtggccctgattctagttggtggggcaagggcctggttctcctgggctgagtgggggagtgtcctggcagcagcgagtgacctgggcagtggccaggtgggtgcgatgactctgatgcctcactcagtctctgggcaatcatcatctttgcctctagccaccgtagataaggtgtgaagggactgctgtttgcaatgggcttaccatccaaatatcccaaaggctttgaccagcaaccaagtaaaatcagtaattgaggagagcagggcacaaaggggctgcagtttgggagctcctgaagaaatggctcagatattgagtcagagaaataaaaagtaggatcagttagcaattctaactgcccttccttctgacccctcataagaggagtgtggtgagggaggggactgggtaggggtcatcccaggaggaggggtttacattggaaccagttcaggttcggtgcatctttcctcttcggttttacagtggcttccgtgggatcgtcaatttcttgttcttagagtttcgggtgtttttctccagtcttgttactgtagactgtagaaagcacgggccccaggctctgagcttagtaataacctggctggtagattcctcatgcccctaattgtcccacttaggcctgaatgtcttgcatggagagaaatctcctgtcagtgtggtccagcagcagggaggagttctgcccaaattccgatatcaccccttcccccatccaagcatccttcgattagggaagtggagagcacatccctgtaaggcccataagagaaagaggagtttgttacatttaatcaacactgtgaagtctgttctacagcaattcagccattacacagtatatgactgaaactcatttaactgggttaatttcatttcttagactgaatatattattgttaagatacgtgtgcgtgttaggtaattctcagcatctcctccaagtaggccgaccttctcggaaaattcaccctaaaagtctcacaaaagaatgagttcatggggagattctgtaaagtgatgaactgagatgaaagcagccaacagcccaggagcttttcagaatagcgtctgcagcagaaccagtttccattcagagcgcgtccttggtggaaatgcttttttgtgtgtctccacgcgctgatggtggaatgggagccccaagacgtgtgggcttagaaatcaacttttgttccccaaggcttcttgtccagatctttccagtgctttcatagccctgggagatcaagttgttctccccactttactgcaaggtagactgaagttcagaagaaatactgaatttctgctcccagaagaatagtttctctggctcacaggcccaagttctcaatgaaatcgttttttaactttcacattcctaagctggcttcccggcacagaagccatggatttcccctctctcccttccccctcctcaaggaaatagtcttcctttatggattttcattggactctttcctcagcgattgtcctggctgtttattgatagtccttcccataagaaaatggggttaaacatggggtaggtattttgtctttcaaactacaaatggaatgtggtgacataaactagacatggggtgccctcaagtttccaaggggaccaatgtgccactgttcttccttggggatgaggcctttgactgttggatggatcagagcaggctccagtcagaccctggttctgaatgttttttttttcggtgactatccagtgagccttcagtgggtgcaaggcgccatacttgctgtgagagagctgagtagagtgttggtttttccataactacagggggaaaaaaagtcattaggctttccctttgtgtcagtgaaaccaaaagtgcttcttacaacgttcgctctgttcatgggttgtctatctaacattgagcagcattggagaggccacagctgagctatggagatgctaaattaactcatggcctcagtcagttcattctttaatttcctcaccaaattattgacttagagcataaccaaagacctcattcattcaccccaggtgggttggggtaattggagtttgttggtgaagtttgggggcggggtgttgggagtagagacagggtaaggggacgtgagaaaggaaaaggcatgaagttctatacctcagccagcagctgccttcgtttggaactgaagtccagccagcagactctctagctccatctcccctgtgccaccctaggtcatatgaccttggccaccttggagtagacccagacccctcgggacccgggacattagtctcaggctgctgatggattgatttgacatgaaccaaacacagccaaactcgatacccacaagctgtcagctgaacctgactgagtgttcttcctgagttcacgaggataggctagagtgcatttttactggtggatcagtgtgtgcgaaagagatgaccctttataaagagattttcaagtggatatatataaaagaaacagttgcttgtaaaatatacttttgtaaataatatttaattttttaaataatatatttggtgctgttttctcagatcccctgagagcactttttattttccttttaaattctatggtttcctttgcatttcttgaagtatattttaagggaaacagtgatcaccaatacatgttttcagttttttttttttttaaggtctctatcactttaatctggatcaaggctttgaagcaatgcctctctgcattttttccccagtggaacagactctgcagtacattaatcaggttgagaattgaaatattttcttgcatcagtattggctagaaaagaaaataaataaaaccaagttaatttagtagtaacaacttacagtgattcttcctgttggaagaatttccaacaaatcagaatcacgtttttagttgtgcgtgtgcgcgcacacgtgtgtaaaaagcactttcgattgtgcctcctgttttctcgagtggggacactttaactacagtttacacctcgggcgcataaagtttttcttctctttctctctggttgtttctgtttctgagtggaccaacagcagaacccacgaggatttgttttgagtatggagctgttgcgggtttgctcctttttcttgctttgcgtgctcagtttttacagactgtaaaggagatgtgttgtttgtgaagatggagcagagtcaaatctgtgcttctaactgagatgagagtgtattaatcacgtatcgcagggctccagctgttttagaagccacatcatgttaaacattaactggtttggattaaaagaacattaatattataatacacatatcttagtggtaaacagctttttttttttaaggtcagattgcctcaggtttagaaagaggctgagaaatcaaatcttgaacacaatcaacttacatattttaaaggaatctgcctcaaatgagaaaatatgctagttatctagatagaggaaagagatatttacttttttaaaaattaaaatagttatgaaatctggcagaaaaggtaaagcctagaagaaactatgaaagctattctcatgttaccaaattctatctgcgcatatgtttttgtataacatttcggtgacagtgggagtcggttccctttcccaacctgcagagactatcttccaatacagaatctgtctatttatgcttgtgtttacaaactgtatttgttgggtttgggtttttgttttctttggtggcatttttcaggtcactttgcttctataacaaaggtaattgttttcaaataatttgtcttcaccttttcctgtatttgtacatagtgattcagtattagagaaaagtgcattgtttctgtcatatttccaatctgtgttggtgctcatttgagaaaataaaagttttcaaatattaa

SEQ ID NO: 200656 - DNA, 881 bp, Homo sapiens
  Payload ID: 19601
  Gene Name: yippee-like 2
  Uniprot ID: Q96QA6
  ENST ID: ENST00000585166
  CDS Start-End: 336-695
ttcggcaggcagagcatcactactacatggaaccaggactttaaaggctgagagaattctagagatcatgtaggattatcatctgacgtataagcccccgaaaccaagactagaccctgcatccagggttgagatgaatggctgctgagaactagccctagacctctgcgtgagggttcttctgccgaagacatcaccagtgtgtggagcctgccacacccacccgctgccaaaccacggcctttacctgtgtcttccggtgtttcccgtgcgacccatcctgtgggagtgcctcgtgggctgccccagagttcaccccacactcagcagcaccaatggtgaagatgacaagatcgaagactttccaggcatatctgccctcctgccaccggacctacagctgcattcactgcagagctcacttggccaatcatgatgaactaatttccaagtcattccaaggaagtcaaggacgagcatacctctttaactcagtagttaatgtgggctgtgggcctgcagaagagcgagtgttgctaacaggactgcatgcagtcgcagacatttactgtgaaaactgcaaaaccactctgggctggaaatacgaacatgcttttgaaagcagccagaaatataaagaaggcaaatacatcattgaactagcacacatgatcaaggacaatggctgggactgattggacagcatctacccaacccagtgtccacgtgaacgccattcaaccgaacattcttcccaagcgtgagagagtgactgacacttggttccatccatttaggggccttgccatccggggcatcctcccaccctgacgccatctttctggtgaccggcctctaaatcgctgtctctctgtctcttt

SEQ ID NO: 200657 - DNA, 935 bp, Homo sapiens
  Payload ID: 19602
  Gene Name: yippee-like 3
  Uniprot ID: P61236
  ENST ID: ENST00000398838
  CDS Start-End: 215-574
cgccgcagcggcggcagcagctgggctcggtgtaaacaagtccaggcgcctgcgaacccgggcccgggggggacggcgcccgccaggagcgccccccactcccaggccagcccaccccggcggaccgggccccgcgcgcccaggcgaggcactgggctccctctgctccccgtgggccgctccccgcgtggggccactgcccccggcccccgccatggtgcggatttcaaagcccaagacgtttcaggcctacttggatgattgtcaccggaggtatagctgtgcccactgccgcgctcacctggccaaccacgacgacctcatctccaagtccttccagggcagtcaggggcgtgcctacctcttcaactcagtggtgaacgtgggctgcgggccagccgaggagcgggtgctgctgaccggcctccatgctgtcgccgacatccactgcgagaactgcaagaccactttgggctggaaatatgaacaggcctttgagagcagccagaagtacaaagaggggaagtacatcattgaactcaaccacatgatcaaagacaacggctgggactgacccccgctcccccgacgcatgtggctccagcccggcctggccgccagggagcgccactggcttcccgccacccgaagggagctctggaccctcagagcccctgcagaggacggatctagctcctgtatatatattttattgcatgcactgtgaccttggggggagaacagaagggggacgacgcccccgcacctcctgcgatctggctggcttggatctcgtttttaacccgttcctgccccacctgccctatagttatggcctgtgttctgctctcctggtcccagtgcaccgtctgctctgtgaactcctcccaccaggcccttcttaccccacgcgtgtctgtccccctcgttctgta

SEQ ID NO: 200658 - DNA, 1588 bp, Homo sapiens
  Payload ID: 19602
  Gene Name: yippee-like 3
  Uniprot ID: P61236
  ENST ID: ENST00000398841
  CDS Start-End: 719-1192
ggcgcctgcgaacccgggcccgggggggacggcgcccgccaggagcgccccccactcccaggccagcccaccccggcggaccgggccccgcgcgcccaggcgaggtgaggcccgcgccgtcagggctgcgtgtcgccccgcgcccctgcccagcccgcgaggactgccccctcccccggcgcccgcccccacccccgcgccccaggtgagccccggagtccaggtaaggctccgcgttgcaggtaagagcccctgagcgtagaggaggccttggcgcccgcaggtgagagcccctcccctcctaggtgaccctcaaccttcacggcgaggcctcctacctcctccaggtgggggaccctctccccgatgaaccccctaaaccaccagtgaaccccactgctctccagatgaggtcgcaaggaccaaccagtgcctacccgcccatgctcccccgaaactgggaactgacagcccagcccctccaaagccccttcctccagcttcagctgccaggtcagcaagggtgaggccggaagcaggcgggtgactcaccctgggcacctccgagcctcagtttccccatggatgcaacctgaggcctcctcactgagtcaaaaccgagacgcctctggtccccggagaggctgctggctctggggaaaggagagagcagcccagtgtgacagagcgagtccccacggctctgggagtgcctcgcatgtgtgtggcccaggtcctgacagcccacctactccctccccggcaggcactgggctccctctgctccccgtgggccgctccccgcgtggggccactgcccccggcccccgccatggtgcggatttcaaagcccaagacgtttcaggcctacttggatgattgtcaccggaggtatagctgtgcccactgccgcgctcacctggccaaccacgacgacctcatctccaagtccttccagggcagtcaggggcgtgcctacctcttcaactcagtggtgaacgtgggctgcgggccagccgaggagcgggtgctgctgaccggcctccatgctgtcgccgacatccactgcgagaactgcaagaccactttgggctggaaatatgaacaggcctttgagagcagccagaagtacaaagaggggaagtacatcattgaactcaaccacatgatcaaagacaacggctgggactgacccccgctcccccgacgcatgtggctccagcccggcctggccgccagggagcgccactggcttcccgccacccgaagggagctctggaccctcagagcccctgcagaggacggatctagctcctgtatatatattttattgcatgcactgtgaccttggggggagaacagaagggggacgacgcccccgcacctcctgcgatctggctggcttggatctcgtttttaacccgttcctgccccacctgccctatagttatggcctgtgttctgctctcctggtcccagtgcaccgtctgctctgtgaactcctcccaccaggcccttcttaccccacgcgtgtctgtccccctcgttctgtagcgtttgtacataataaaacaatggagtggagaca

SEQ ID NO: 200659 - DNA, 575 bp, Homo sapiens
  Payload ID: 19602
  Gene Name: yippee-like 3
  ENST ID: ENST00000565110
  CDS Start-End: 267-575
ctgcgaacccgggcccgggggggacggcgcccgccaggagcgccccccactcccaggccagcccaccccggcggaccgggccccgcgcgcccaggcgaggtgaggcccgcgccgtcagggctgcgtgtcgccccgcgcccctgcccagcccgcgaggactgccccctcccccggcgcccgcccccacccccgcgccccaggcactgggctccctctgctccccgtgggccgctccccgcgtggggccactgcccccggcccccgccatggtgcggatttcaaagcccaagacgtttcaggcctacttggatgattgtcaccggaggtatagctgtgcccactgccgcgctcacctggccaaccacgacgacctcatctccaagtccttccagggcagtcaggggcgtgcctacctcttcaactcagtggtgaacgtgggctgcgggccagccgaggagcgggtgctgctgaccggcctccatgctgtcgccgacatccactgcgagaactgcaagaccactttgggctggaaatatgaacaggcctttgagagcagccagaagtacaaagagggg

SEQ ID NO: 200660 - DNA, 669 bp, Homo sapiens
  Payload ID: 19602
  Gene Name: yippee-like 3
  ENST ID: ENST00000570099
  CDS Start-End: 1-95
ggccagccgaggagcgggtgctgctgaccggcctccatgctgtcgccgacatccactgcgagaactgcaagaccactttgggctggaaatattgatcctctaggtagaagctattattatctctacagaagaagacagggaggcccagagatgttaggtaacttgcccaagatcacccaactggaacaggcctttgagagcagccagaagtacaaagaggggaagtacatcattgaactcaaccacatgatcaaagacaacggctgggactgacccccgctcccccgacgcatgtggctccagcccggcctggccgccagggagcgccactggcttcccgccacccgaagggagctctggaccctcagagcccctgcagaggacggatctagctcctgtatatatattttattgcatgcactgtgaccttggggggagaacagaagggggacgacgcccccgcacctcctgcgatctggctggcttggatctcgtttttaacccgttcctgccccacctgccctatagttatggcctgtgttctgctctcctggtcccagtgcaccgtctgctctgtgaactcctcccaccaggcccttcttaccccacgcgtgtctgtccccctcgttctgtagcgtttgtacataataaaacaatggagtggagaca

SEQ ID NO: 200661 - DNA, 522 bp, Homo sapiens
  Payload ID: 19602
  Gene Name: yippee-like 3
  ENST ID: ENST00000566401
  CDS Start-End: 212-376
cgcagcggcggcagcagctgggctcggtgtaaacaagtccaggcgcctgcgaacccgggcccgggggggacggcgcccgccaggagcgccccccactcccaggccagcccaccccggcggaccgggccccgcgcgcccaggcgaggcactgggctccctctgctccccgtgggccgctccccgcgtggggccactgcccccggcccccgccatggtgcggatttcaaagcccaagacgtttcaggcctacttggatgattgtcaccggaggtatagctgtgcccactgccgcgctcacctggccaaccacgacgacctcatctccaagtccttccagggcagtcaggggcgtgcctacctcttcaactcagtgtgagtatctggcctcccttcttgctttccctgacctctgttgtgacctgtgacccctggcatcctgctgagactcccagagttccccggtgcaggcaggaaattggtgaacgtgggctgcgggccagccgaggagcgggtgctgctgac

SEQ ID NO: 200662 - DNA, 796 bp, Homo sapiens
  Payload ID: 19602
  Gene Name: yippee-like 3
  Uniprot ID: P61236
  ENST ID: ENST00000566595
  CDS Start-End: 364-723
atctgtttacagcttatgaccaggaaattgagtctttgaagaggaacttagctgtcccaacagaggcatccgagaggcctggaggaggtgatgctggacagtaggaattgcctggtccgacgccctggctgccaggggcgcgcatctttgggtcttccctgctagaaggtgaactgagtgtgtccctggcgctctggcaaaagccatggaatgggcccacagtgagaattccagcttcgcctcttactagctggataacctagggagccgcgagacctccctgggcctcagcccccggcactgggctccctctgctccccgtgggccgctccccgcgtggggccactgcccccggcccccgccatggtgcggatttcaaagcccaagacgtttcaggcctacttggatgattgtcaccggaggtatagctgtgcccactgccgcgctcacctggccaaccacgacgacctcatctccaagtccttccagggcagtcaggggcgtgcctacctcttcaactcagtggtgaacgtgggctgcgggccagccgaggagcgggtgctgctgaccggcctccatgctgtcgccgacatccactgcgagaactgcaagaccactttgggctggaaatatgaacaggcctttgagagcagccagaagtacaaagaggggaagtacatcattgaactcaaccacatgatcaaagacaacggctgggactgacccccgctcccccgacgcatgtggctccagcccggcctggccgccagggagcgccactggcttcccgccaccc

SEQ ID NO: 200663 - DNA, 1941 bp, Homo sapiens
  Payload ID: 19602
  Gene Name: yippee-like 3
  ENST ID: ENST00000562641
  CDS Start-End: 531-944
ccacccccgcgccccaggtgagccccggagtccaggtaaggctccgcgttgcaggtaagagcccctgagcgtagaggaggccttggcgcccgcaggtgagagcccctcccctcctaggtgaccctcaaccttcacggcgaggcctcctacctcctccaggtgggggaccctctccccgatgaaccccctaaaccaccagtgaaccccactgctctccagatgaggtcgcaaggaccaaccagtgcctacccgcccatgctcccccgaaactgggaactgacagcccagcccctccaaagccccttcctccagcttcagctgccaggtcagcaagggtgaggccggaagcaggcgggtgactcaccctgggcacctccgagcctcagtttccccatggatgcaacctgaggcctcctcactgagtcaaaaccgagacgcctctggtccccggagaggctgctggctctggggaaaggagagagcagcccagtgtgacagagcgagtccccacggctctgggagtgcctcgcatgtgtgtggcccaggtcctgacagcccacctactccctccccggcaggcactgggctccctctgctccccgtgggccgctccccgcgtggggccactgcccccggcccccgccatggtgcggatttcaaagcccaagacgtttcaggcctacttggatgattgtcaccggaggtatagctgtgcccactgccgcgctcacctggccaaccacgacgacctcatctccaagtccttccagggcagtcaggggcgtgcctacctcttcaactcagtggtgaacgtgggctgcgggccagccgaggagcgggtgctgctgaccggcctccatgctgtcgccgacatccactgcgagaactgcaagaccactttgggctggaaatatgtgagtcacccacctctgaccccaggctagcctttgacctgaccttccaacacctcctcctgacaagctgtcaccctatagcctttcagattgcataggccgagctcacacaagtcagcatccctgaccacattctctttatcttgcaccttgcaaggggtgtagaacttttctcttaacccatcccttctctcccaggcacttggatccccattagagagttaggatataatcagagtcaccatttatggaatgtttatgtgccttgcactgttgtgtgcctggcgtctattatctcattcaatcattgcagtgatcctctaggtagaagctattattatctctacagaagaagacagggaggcccagagatgttaggtaacttgcccaagatcacccaactggtaagtaacagaatagggaccagaatctgagttggttggttggtttttttttttcactccaaacccttggtcaccagcttatattgtcatttagagtatcagaaaaattgccccagactctgcaacaacatggagcttgggttcaccagcctccctttccatagtcctcattgccactgctgctgtccagggtctgatttcactaccctgagtctcatttccttatctctcagtggaagataaagccactgcctagcacccaggattgttacagggatcagattagatgctcaggaagatgctcttgggacactgcaagggacaggattcttcaggcgtcgcttggaactgtggtgcctctgtgaggtggatgtcccaggcagagccagccagccagccctgacctgagctcgctgctgaccctgccacagattggctgtgtgtctctggacaggtggcttggccactctggacctctaccaaataaagagctggccggccaggcacagtggctcacacctgtaatcccagcactttgggaggccgaggcgggtggatcacaaggtcaggagattgagaccatcctggctaacacggtgaaaccccatctctaccaaaaatac

SEQ ID NO: 200664 - DNA, 761 bp, Homo sapiens
  Payload ID: 19602
  Gene Name: yippee-like 3
  ENST ID: ENST00000566134
  CDS Start-End: 141-368
ggcgcccgccaggagcgccccccactcccaggccagcccaccccggcggaccgggccccgcgcgcccaggcgaggcactgggctccctctgctccccgtgggccgctccccgcgtggggccactgcccccggcccccgccatggtgcggatttcaaagcccaagacgtttcaggcctacttggatgattgtcaccggaggtatagctgtgcccactgccgcgctcacctggccaaccacgacgacctcatctccaagtccttccagggcagtcaggggcgtgcctacctcttcaactcagtgaacaggcctttgagagcagccagaagtacaaagaggggaagtacatcattgaactcaaccacatgatcaaagacaacggctgggactgacccccgctcccccgacgcatgtggctccagcccggcctggccgccagggagcgccactggcttcccgccacccgaagggagctctggaccctcagagcccctgcagaggacggatctagctcctgtatatatattttattgcatgcactgtgaccttggggggagaacagaagggggacgacgcccccgcacctcctgcgatctggctggcttggatctcgtttttaacccgttcctgccccacctgccctatagttatggcctgtgttctgctctcctggtcccagtgcaccgtctgctctgtgaactcctcccaccaggcccttcttaccccacgcgtgtctgtccccctcgttctgtagcgtttgta

SEQ ID NO: 200665 - DNA, 730 bp, Homo sapiens
  Payload ID: 19602
  Gene Name: yippee-like 3
  Uniprot ID: P61236
  ENST ID: ENST00000563788
  CDS Start-End: 238-597
agaatctgtttacagcttatgaccaggaaattgagtctttgaagaggaacttagctgtcccaacagaggcatccgagaggcctggaggaggtgatgctggacagtaggaattgcctggtccgacgccctggctgccaggggcgcgcatctttgggtcttccctgctagaaggcactgggctccctctgctccccgtgggccgctccccgcgtggggccactgcccccggcccccgccatggtgcggatttcaaagcccaagacgtttcaggcctacttggatgattgtcaccggaggtatagctgtgcccactgccgcgctcacctggccaaccacgacgacctcatctccaagtccttccagggcagtcaggggcgtgcctacctcttcaactcagtggtgaacgtgggctgcgggccagccgaggagcgggtgctgctgaccggcctccatgctgtcgccgacatccactgcgagaactgcaagaccactttgggctggaaatatgaacaggcctttgagagcagccagaagtacaaagaggggaagtacatcattgaactcaaccacatgatcaaagacaacggctgggactgacccccgctcccccgacgcatgtggctccagcccggcctggccgccagggagcgccactggcttcccgccacccgaagggagctctggaccctcagagcccctgcagaggacggatctagctcctgtatatata

SEQ ID NO: 200666 - DNA, 1721 bp, Homo sapiens
  Payload ID: 19603
  Gene Name: yippee-like 4
  Uniprot ID: Q96NS1
  ENST ID: ENST00000300022
  CDS Start-End: 445-828
agtgttatgatgcagttccacaacacacagccacattcacccacagaccgaggtacagaacgagagacaacctctgcccccccagcagctggccagctttgcagccccagtcttgagcccccaactaccctccccccacccacccccatccccttcccaattgaaggagcggaaagagaagagagaagagtgagcagagagattgagagattgagagagagagagagagatagacggagatctctggagcagacctcaaggtgacttctatttctatctggttctcgtctgggggggccctggccgggcagccccccaacacttctcctgccctgaaacacggctctagccaacctgctccgctgcttcacctgcgaccgtctctgcgggggctgcacggcgccagcccctccagcccaccagggcattgtcctccagcccgtcatgcccagctgtgaccccggtccgggccctgcctgcctccccaccaagactttccgcagctatctgccccgctgtcaccgcacttacagctgtgtccactgccgtgcacacctggccaaacacgatgagcttatttccaagtccttccaagggagccatggccgagcctacctgtttaactccgtggtcaacgtgggttgcgggccagctgaacagcgcctcttgctcacggggctccactcggtagctgacattttctgtgagagctgcaaaaccacactgggctggaaatatgagcaagcttttgagacgagccagaagtacaaggaagggaaatacatcattgaaatgtcacacatggtgaaggacaacggctgggactgaggggctcaggcagggtgtgcccttcctccgcatgcccctccctccccacggccctgccaagcagtctataccagcatgagtactgccccacccctgggggaaacctggctccaaccaacccctcccctgcctccaccatatccactaccaggcaccctttagaacaggggtctgggggtaccccaggggtgttaaggctcaggagtgggcagcagtcagggagagacagaactgggggaaagggatggttgtgggtctttctgttcccaagatcctgaacatggaagcgatggcagggcatagactcaggcagagaggattgtgggaggaatccgtttttgctccacctctttttgagtgaacagaggacaaaccttgggtcacagggcaagtagatcatggaccacagaacagcagatgagaaaagacttgggttggagtgaaattctggtctcagacaccaggagaccagagtctctgaggatgaagtttcctacccctatttgtagggaaaaggacttgagtgcagggaaaactcaaatcccaggccctgggaaatagtaaaataatcaaagggttttccatttcactccacttgttagtttatcttggcactgaagaggcactttcgagtatctaacttttgccattgggtggggtggggacagctgctcgcggaacagcccctagtcggctgcttccagagtaagcagtctttatgggctttctctgaggcccagtcactgctcctgggacccagtcccctggaggggaggtggaaaatcagtgctacggggccagtctttcccgtggctgccaccagcgaatgaaacttttgtatgatacataaagtgcttgagtctatttttaataaaaagggaaaaagcaacttg

SEQ ID NO: 200667 - DNA, 889 bp, Homo sapiens
  Payload ID: 19603
  Gene Name: yippee-like 4
  Uniprot ID: Q96NS1
  ENST ID: ENST00000534711
  CDS Start-End: 318-701
ccgactccctggctttggcgccagaagcctggatcggctgccaggtttgccagagcagaatggggatccaggggacagggcgacaatgcaactggatgctgtgggggggtcgatggtgatggggaaagtagaggtgacttctatttctatctggttctcgtctgggggggccctggccgggcagccccccaacacttctcctgccctgaaacacggctctagccaacctgctccgctgcttcacctgcgaccgtctctgcgggggctgcacggcgccagcccctccagcccaccagggcattgtcctccagcccgtcatgcccagctgtgaccccggtccgggccctgcctgcctccccaccaagactttccgcagctatctgccccgctgtcaccgcacttacagctgtgtccactgccgtgcacacctggccaaacacgatgagcttatttccaagtccttccaagggagccatggccgagcctacctgtttaactccgtggtcaacgtgggttgcgggccagctgaacagcgcctcttgctcacggggctccactcggtagctgacattttctgtgagagctgcaaaaccacactgggctggaaatatgagcaagcttttgagacgagccagaagtacaaggaagggaaatacatcattgaaatgtcacacatggtgaaggacaacggctgggactgaggggctcaggcagggtgtgcccttcctccgcatgcccctccctccccacggccctgccaagcagtctataccagcatgagtactgccccacccctgggggaaacctggctccaaccaacccctcccctgcctccaccatatccactaccaggcaccctttagaacaggggtctgggggtaccccaggg

SEQ ID NO: 200668 - DNA, 4000 bp, Homo sapiens
  Payload ID: 19603
  Gene Name: yippee-like 4
  Uniprot ID: Q96NS1
  ENST ID: ENST00000524669
  CDS Start-End: 2724-3107
agtgttatgatgcagttccacaacacacagccacattcacccacagaccgaggagcggaaagagaagagagaagagtgagcagagagattgagagattgagagagagagagagagatagacggagatctctggagcagacctcaaggtgagggggcagcccttctccaaatgaatttttttctctttgcaaatttcctcctcctgctgcgtgttgctttctcccctttgcaaaagcattattcatccaccctttgtcctcccttccccctccccgctgcctccgctcctctctctcggttcctccatccctctccaagctctgacgattcccgcacttatttcccggcaactttggctgcagcatcaggcatcactgtttattgttttgctgctggtgcagacccccaaagcctgccctgggagctggcggtgctgctaattatttggaccataccatactgagaataccagcctggggggtgccaaaacctcagagcagatgagaaaatccattgtgagcaggtgtccccccccttttcttttcccccctgagaagcacgagattcgcacctggttcctccagcctccgcctcggcgcctctgctgtcagctgtcagttgcccccgccagccctccctctcccctttctcctacggtccagccccgtctcacttcaggggaacatctctccccagcactcggcttgcctttgttttttctccagtcatttgcccaacttgcttctccctgtgatccgagatgggtgaaaaaatgacccctactcccctttgtgattctctggccttctgtgcagcctttccttggcttgactgggaattaggggagagggagggaggcgtgacggccggaggctggagaaggagctcaggattggggacccaagctgccccattctccatgccccttgaagaaggtgtttcaaggtggtgcatgtcagaggggaactcgctggcaaagttgaaggcaaacctgtgaagcagagactgaaaggtggtctcttggcaaggagggcccgtttcctgcagccggagcccaatgtcaccctgaactcagcccaaggtgtcttcctgggacccagcccggaggagaggacctgaaactgaagatagtctctatggaggttttgcggagagactgcctggcggccttcagagagagtggaacagctgggtgcctgtggccactgcggaggacaggacgaggagagcctgtatgccctggctaaccagagccaacactgcctcttctctgcttagtgctctagcattgccagagtgcccagctggcatctctgaaccagacttaggctaaccacccacagtgggctgggaagccctatgaaggagaaagcagcagctcacctgcttatcggagccaacaggggccacctcccttcttatcctctgcctccagcaccttcagccactcggaggctggcgcgtgggcagaaggcaatcttcctctattcctaatcagaacccagcaattacttcatcttcagtcacccacagagtcactgctgtttgtccctgcccctgggagaaggtagaaagaaacattttctgccttgtgccccaaagcacagctgttaaaaataagagtcccccttctgctgttcgttgtggccgttgctctcaccctaccacacagccctgcccagcccaggaatcaggctcctctgacatgctacccatttcccattggctccagctgtcagattgcctgaagaaaatgtattttctgcctaagtctttaaccaagggctaaggcaacagttagtaaagactaggagagagaaagaccaaggggcccacaggctgggaagacaggcaggtgcttattctgggccagaatgagtgaaccaaggtgcgagaatgggcggccacacgtgagggctttggtactgttggaaacatctataaagttctagtgaagagtcccagagcacaggaccctgacctcaggagagaaccgaatcagggtttgtatacctgcctgcatgctctccctcccctcaccttacacctcctgcccccctccccaaaatgtataaaggaccaattgtattgcaaacaaagaccatgtaaaagaaagaccttcaggcatccccaactcttaaaaggctctgatcccctgagacacagtgcctgtgcgatgcagagcctcacgaagaactgaaaaccaaggagagggcacttgcagatgacgttgctcccatggcagcgtctgtgcccgtgggcttctctctgtggaaaatggtggaggctgcttctgccccaggagggagaaacaccgactccctggctttggcgccagaagcctggatcggctgccaggtttgccagagcagaatggggatccaggggacagggcgacaatgcaactggatgctgtgggggggtcgatggtgatggggaaagtagaggtatgggtgagctgattcccttttcctccattccctcaggaggggtcctcctgaggtcgcagctcccctgatgtcctttcccctcttcccaggtgacttctatttctatctggttctcgtctgggggggccctggccgggcagccccccaacacttctcctgccctgaaacacggctctagccaacctgctccgctgcttcacctgcgaccgtctctgcgggggctgcacggcgccagcccctccagcccaccagggcattgtcctccagcccgtcatgcccagctgtgaccccggtccgggccctgcctgcctccccaccaagactttccgcagctatctgccccgctgtcaccgcacttacagctgtgtccactgccgtgcacacctggccaaacacgatgagcttatttccaagtccttccaagggagccatggccgagcctacctgtttaactccgtggtcaacgtgggttgcgggccagctgaacagcgcctcttgctcacggggctccactcggtagctgacattttctgtgagagctgcaaaaccacactgggctggaaatatgagcaagcttttgagacgagccagaagtacaaggaagggaaatacatcattgaaatgtcacacatggtgaaggacaacggctgggactgaggggctcaggcagggtgtgcccttcctccgcatgcccctccctccccacggccctgccaagcagtctataccagcatgagtactgccccacccctgggggaaacctggctccaaccaacccctcccctgcctccaccatatccactaccaggcaccctttagaacaggggtctgggggtaccccaggggtgttaaggctcaggagtgggcagcagtcagggagagacagaactgggggaaagggatggttgtgggtctttctgttcccaagatcctgaacatggaagcgatggcagggcatagactcaggcagagaggattgtgggaggaatccgtttttgctccacctctttttgagtgaacagaggacaaaccttgggtcacagggcaagtagatcatggaccacagaacagcagatgagaaaagacttgggttggagtgaaattctggtctcagacaccaggagaccagagtctctgaggatgaagtttcctacccctatttgtagggaaaaggacttgagtgcagggaaaactcaaatcccaggccctgggaaatagtaaaataatcaaagggttttccatttcactccacttgttagtttatcttggcactgaagaggcactttcgagtatctaacttttgccattgggtggggtggggacagctgctcgcggaacagcccctagtcggctgcttccagagtaagcagtctttatgggctttctctgaggcccagtcactgctcctgggacccagtcccctggaggggaggtggaaaatcagtgctacggggccagtctttcccgtggctgccaccagcgaatgaaacttttgtatgatacataaagtgcttgagtctatttttaataaaaagggaaaaagcaacttg

SEQ ID NO: 200669 - DNA, 561 bp, Homo sapiens
  Payload ID: 19603
  Gene Name: yippee-like 4
  ENST ID: ENST00000534810
  CDS Start-End: 321-561
ttcacccacagaccgaggtacagaacgagagacaacctctgcccccccagcagctggccagctttgcagccccagtcttgagcccccaactaccctccccccacccacccccatccccttcccaattgaaggagcggaaagagaagagagaagagtgagcagagagattgagagattgagagagagagagagagatagacggagatctctggagcagacctcaagccaacctgctccgctgcttcacctgcgaccgtctctgcgggggctgcacggcgccagcccctccagcccaccagggcattgtcctccagcccgtcatgcccagctgtgaccccggtccgggccctgcctgcctccccaccaagactttccgcagctatctgccccgctgtcaccgcacttacagctgtgtccactgccgtgcacacctggccaaacacgatgagcttatttccaagtccttccaagggagccatggccgagcctacctgtttaactccgtggtcaacgtgggttgcgggccagctgaacagcgcctcttgctcacggggctccact

SEQ ID NO: 200670 - DNA, 1638 bp, Homo sapiens
  Payload ID: 19603
  Gene Name: yippee-like 4
  ENST ID: ENST00000532314
  CDS Start-End: 405-572
ccacagaccgaggtacagaacgagagacaacctctgcccccccagcagctggccagctttgcagccccagtcttgagcccccaactaccctccccccacccacccccatccccttcccaattgaaggagcggaaagagaagagagaagagtgagcagagagattgagagattgagagagagagagagagatagacggagatctctggagcagacctcaaggtgacttctatttctatctggttctcgtctgggggggccctggccgggcagccccccaacacttctcctgccctgaaacacggctctagccaacctgctccgctgcttcacctgcgaccgtctctgcgggggctgcacggcgccagcccctccagcccaccagggcattgtcctccagcccgtcatgcccagctgtgaccccggtccgggccctgcctgcctccccaccaagactttccgcagctatctgccccgctgtcaccgcacttacagctgtgtccactgccgtgcacacctggccaaacacgatgagcttatttccaagggtcaacgtgggttgcgggccagctgaacagcgcctcttgctcacggggctccactcggtagctgacattttctgtgagagctgcaaaaccacactgggctggaaatatgagcaagcttttgagacgagccagaagtacaaggaagggaaatacatcattgaaatgtcacacatggtgaaggacaacggctgggactgaggggctcaggcagggtgtgcccttcctccgcatgcccctccctccccacggccctgccaagcagtctataccagcatgagtactgccccacccctgggggaaacctggctccaaccaacccctcccctgcctccaccatatccactaccaggcaccctttagaacaggggtctgggggtaccccaggggtgttaaggctcaggagtgggcagcagtcagggagagacagaactgggggaaagggatggttgtgggtctttctgttcccaagatcctgaacatggaagcgatggcagggcatagactcaggcagagaggattgtgggaggaatccgtttttgctccacctctttttgagtgaacagaggacaaaccttgggtcacagggcaagtagatcatggaccacagaacagcagatgagaaaagacttgggttggagtgaaattctggtctcagacaccaggagaccagagtctctgaggatgaagtttcctacccctatttgtagggaaaaggacttgagtgcagggaaaactcaaatcccaggccctgggaaatagtaaaataatcaaagggttttccatttcactccacttgttagtttatcttggcactgaagaggcactttcgagtatctaacttttgccattgggtggggtggggacagctgctcgcggaacagcccctagtcggctgcttccagagtaagcagtctttatgggctttctctgaggcccagtcactgctcctgggacccagtcccctggaggggaggtggaaaatcagtgctacggggccagtctttcccgtggctgccaccagcgaatgaaacttttgtatgatacataaagtgcttgagtctatttttaataaaaagggaaaaagcaacttga

SEQ ID NO: 200671 - DNA, 2182 bp, Homo sapiens
  Payload ID: 19604
  Gene Name: yippee-like 5
  Uniprot ID: P62699
  ENST ID: ENST00000261353
  CDS Start-End: 127-492
gccagggcctgactaaacctggagactcgggtggccgaggggcttcataccagctgaagagcgacaagccgctggcagccgcggatctcaccgccgctcagggtttttagaacttcagccataaaaatgggcagaattttccttgatcatatcggtggtacccgtctgttttcttgtgcaaactgtgatacgatcctgaccaaccgctcagaactcatctccactcgtttcacaggcgccactggcagagcatttctttttaacaaggtagttaacctgcagtacagtgaagttcaagatcgggtcatgctcactggccgccacatggttcgagatgtgagctgcaaaaactgcaatagcaaactgggatggatctatgagtttgccactgaagacagccagcgatataaggaaggccgcgtgatcctggaacgtgctctagttcgagagagtgagggctttgaggagcatgtaccatctgataactcttgaagatacagagagaaatccatcttttcccaggtctccttcactgaaaacaaaaatctacttacatacactgtcaccttagcatcagagtcggattaatgaactgcggaacaagaggttgtgagaatctaagatggaacctttctttctttctttctttttttttaaattttgtattttccatccaacagcagtgtgtagagagaatattatgcagatgccgttaattttttaccctatgtttacatcttgaggcagcagagtctgtctgcagctatgtggtgagctatgtaaggaaaaaaatctgggctgttagagtgaaaaagtgtgttttatgtcaattgtgaaaggaaaatgttaggagtatggtttttaaacttgggcttcattttaaacttttttttttaaacccagttatttcacttgatttgctagcttcagagaagagatccgaatctgtgcccagcgctaaaggctcagtgttagcatggcttgtgctggccggtgtgccatattcttgttggagatgaaccgtagcaccagagcccattcttccttgtcagtcttggcccaaagatgtcaccattcctagttatttgtcaccacataattggtgttgattggaaactttttctgagatgggacagaactgctgggttgtctttttccatgtaacttaagcatagtaatataaataaagtaatagttggatgcttttggtcctgtgttgcttttaaaaacaccttataaaagaggagagtatttgataagcaattttcatagtagtaaagttttttttcatctcttaaactaaattgaccatgcatataatattctttgtttaaatgaaagcatactgttgaaacccgcagtgttgcatttagaaaacagttgaacagaatgtcaatgtgcattcatgcaaaaaaacatttaatctgcatctgttttagaaaagggggaaatgaagcaacttgtctaaaaatactgctttacaaagcatttcagcctttccccctcagttttgcattgattttttgacaagtctgtagagcctaatagtttccatcaaaggcctagatctcttatttagcatttttttcagctcttctctcagaagttcagctgttgaaacgaaaactgtactttgtaccctcacatacaaagggatcaaatttgacctggtgttattttagccccaaatttatgacattacacaatattaaaatgtaaatgtttctttacccaaactacttctagatattctagtatttgcttctggtggaattaaatgacggtaaaattggctaattatttgaatgaatgaatggatggatgttttgcatgctcaatttctaggtcctttgtctagaaaggaaatttgcctcagttgaattagtgaaatatttctgtcgttgatattaaaagtgacttctgagtacagttaagttcctcctatttgccactgggctgttggttagaagcataggtaactgattaagtaggtatgatactgcatttgaaataagtggacacaaactatcctttctccaccatggactcaatctgagaacaacagcattcatttccattcatttccatactggcttttgattatatgcagattcctagtagcatgccttacctacagcactatgtgcatttgctgtcacaataaagtatattttgtcttgca

SEQ ID NO: 200672 - DNA, 2499 bp, Homo sapiens
  Payload ID: 19604
  Gene Name: yippee-like 5
  Uniprot ID: P62699
  ENST ID: ENST00000379519
  CDS Start-End: 444-809
cagggagaggcggggccaaggccagggcctgactaaacctggagactcgggtggccgaggggcttcataccagctgaagagcgacaagccgctggcagccgcggatctcaccgccgctcaggagatctgttggtaatctgaggatttttattctacgtcgtcttgacagatggaaaacctgaagtaacttcgggctaaccttgtgtttttggaaaattagtagacttggtggtgaagaaactgggaggagtaggatattagctaactttgcatagccacatatagagcgtcgcagctgcattccaccaaagaggaaccaaaaggcctgtggtgttcccagggtacatattcatgccagaagtgaagtgctttggtgaattcgtttcctgaaagtttatcgcatacttgtactgggttaggtttttagaacttcagccataaaaatgggcagaattttccttgatcatatcggtggtacccgtctgttttcttgtgcaaactgtgatacgatcctgaccaaccgctcagaactcatctccactcgtttcacaggcgccactggcagagcatttctttttaacaaggtagttaacctgcagtacagtgaagttcaagatcgggtcatgctcactggccgccacatggttcgagatgtgagctgcaaaaactgcaatagcaaactgggatggatctatgagtttgccactgaagacagccagcgatataaggaaggccgcgtgatcctggaacgtgctctagttcgagagagtgagggctttgaggagcatgtaccatctgataactcttgaagatacagagagaaatccatcttttcccaggtctccttcactgaaaacaaaaatctacttacatacactgtcaccttagcatcagagtcggattaatgaactgcggaacaagaggttgtgagaatctaagatggaacctttctttctttctttctttttttttaaattttgtattttccatccaacagcagtgtgtagagagaatattatgcagatgccgttaattttttaccctatgtttacatcttgaggcagcagagtctgtctgcagctatgtggtgagctatgtaaggaaaaaaatctgggctgttagagtgaaaaagtgtgttttatgtcaattgtgaaaggaaaatgttaggagtatggtttttaaacttgggcttcattttaaacttttttttttaaacccagttatttcacttgatttgctagcttcagagaagagatccgaatctgtgcccagcgctaaaggctcagtgttagcatggcttgtgctggccggtgtgccatattcttgttggagatgaaccgtagcaccagagcccattcttccttgtcagtcttggcccaaagatgtcaccattcctagttatttgtcaccacataattggtgttgattggaaactttttctgagatgggacagaactgctgggttgtctttttccatgtaacttaagcatagtaatataaataaagtaatagttggatgcttttggtcctgtgttgcttttaaaaacaccttataaaagaggagagtatttgataagcaattttcatagtagtaaagttttttttcatctcttaaactaaattgaccatgcatataatattctttgtttaaatgaaagcatactgttgaaacccgcagtgttgcatttagaaaacagttgaacagaatgtcaatgtgcattcatgcaaaaaaacatttaatctgcatctgttttagaaaagggggaaatgaagcaacttgtctaaaaatactgctttacaaagcatttcagcctttccccctcagttttgcattgattttttgacaagtctgtagagcctaatagtttccatcaaaggcctagatctcttatttagcatttttttcagctcttctctcagaagttcagctgttgaaacgaaaactgtactttgtaccctcacatacaaagggatcaaatttgacctggtgttattttagccccaaatttatgacattacacaatattaaaatgtaaatgtttctttacccaaactacttctagatattctagtatttgcttctggtggaattaaatgacggtaaaattggctaattatttgaatgaatgaatggatggatgttttgcatgctcaatttctaggtcctttgtctagaaaggaaatttgcctcagttgaattagtgaaatatttctgtcgttgatattaaaagtgacttctgagtacagttaagttcctcctatttgccactgggctgttggttagaagcataggtaactgattaagtaggtatgatactgcatttgaaataagtggacacaaactatcctttctccaccatggactcaatctgagaacaacagcattcatttccattcatttccatactggcttttgattatatgcagattcctagtagcatgccttacctacagcactatgtgcatttgctgtcacaataaagtatattttgtcttgca

SEQ ID NO: 200673 - DNA, 2560 bp, Homo sapiens
  Payload ID: 19604
  Gene Name: yippee-like 5
  Uniprot ID: P62699
  ENST ID: ENST00000379520
  CDS Start-End: 505-870
cagggagaggcggggccaaggccagggcctgactaaacctggagactcgggtggccgaggggcttcataccagctgaagagcgacaagccgctggcagccgcggatctcaccgccgctcaggagatctgttggtaatctgaggatttttattctacgtcgtcttgacagatggaaaacctgaagtaacttcgggctaaccttgtgtttttggaaaattagtagacttggtggtgaagaaactgggaggagtaggatattagctaactttgcatagccacatatagagcgtcgcagctgcattccaccaaagaggaaccaaaaggcctgtggtgttcccagggtacatattcatgccagaagtgaagtgctttggtgaattcgtttcctgaaagtttatcgcatacttgtactgggttagccttatgccagcctggaccatcttggaggcagtgtaggatcatggaagaactttgaattaggtttttagaacttcagccataaaaatgggcagaattttccttgatcatatcggtggtacccgtctgttttcttgtgcaaactgtgatacgatcctgaccaaccgctcagaactcatctccactcgtttcacaggcgccactggcagagcatttctttttaacaaggtagttaacctgcagtacagtgaagttcaagatcgggtcatgctcactggccgccacatggttcgagatgtgagctgcaaaaactgcaatagcaaactgggatggatctatgagtttgccactgaagacagccagcgatataaggaaggccgcgtgatcctggaacgtgctctagttcgagagagtgagggctttgaggagcatgtaccatctgataactcttgaagatacagagagaaatccatcttttcccaggtctccttcactgaaaacaaaaatctacttacatacactgtcaccttagcatcagagtcggattaatgaactgcggaacaagaggttgtgagaatctaagatggaacctttctttctttctttctttttttttaaattttgtattttccatccaacagcagtgtgtagagagaatattatgcagatgccgttaattttttaccctatgtttacatcttgaggcagcagagtctgtctgcagctatgtggtgagctatgtaaggaaaaaaatctgggctgttagagtgaaaaagtgtgttttatgtcaattgtgaaaggaaaatgttaggagtatggtttttaaacttgggcttcattttaaacttttttttttaaacccagttatttcacttgatttgctagcttcagagaagagatccgaatctgtgcccagcgctaaaggctcagtgttagcatggcttgtgctggccggtgtgccatattcttgttggagatgaaccgtagcaccagagcccattcttccttgtcagtcttggcccaaagatgtcaccattcctagttatttgtcaccacataattggtgttgattggaaactttttctgagatgggacagaactgctgggttgtctttttccatgtaacttaagcatagtaatataaataaagtaatagttggatgcttttggtcctgtgttgcttttaaaaacaccttataaaagaggagagtatttgataagcaattttcatagtagtaaagttttttttcatctcttaaactaaattgaccatgcatataatattctttgtttaaatgaaagcatactgttgaaacccgcagtgttgcatttagaaaacagttgaacagaatgtcaatgtgcattcatgcaaaaaaacatttaatctgcatctgttttagaaaagggggaaatgaagcaacttgtctaaaaatactgctttacaaagcatttcagcctttccccctcagttttgcattgattttttgacaagtctgtagagcctaatagtttccatcaaaggcctagatctcttatttagcatttttttcagctcttctctcagaagttcagctgttgaaacgaaaactgtactttgtaccctcacatacaaagggatcaaatttgacctggtgttattttagccccaaatttatgacattacacaatattaaaatgtaaatgtttctttacccaaactacttctagatattctagtatttgcttctggtggaattaaatgacggtaaaattggctaattatttgaatgaatgaatggatggatgttttgcatgctcaatttctaggtcctttgtctagaaaggaaatttgcctcagttgaattagtgaaatatttctgtcgttgatattaaaagtgacttctgagtacagttaagttcctcctatttgccactgggctgttggttagaagcataggtaactgattaagtaggtatgatactgcatttgaaataagtggacacaaactatcctttctccaccatggactcaatctgagaacaacagcattcatttccattcatttccatactggcttttgattatatgcagattcctagtagcatgccttacctacagcactatgtgcatttgctgtcacaataaagtatattttgtcttgca

SEQ ID NO: 200674 - DNA, 2197 bp, Homo sapiens
  Payload ID: 19604
  Gene Name: yippee-like 5
  Uniprot ID: P62699
  ENST ID: ENST00000402003
  CDS Start-End: 142-507
ataccagctgaagagcgacaagccgctggcagccgcggatctcaccgccgctcaggagatctgttggtaatctgaggatttttattctacgtcgtcttgacagatggaaaacctgaagtttttagaacttcagccataaaaatgggcagaattttccttgatcatatcggtggtacccgtctgttttcttgtgcaaactgtgatacgatcctgaccaaccgctcagaactcatctccactcgtttcacaggcgccactggcagagcatttctttttaacaaggtagttaacctgcagtacagtgaagttcaagatcgggtcatgctcactggccgccacatggttcgagatgtgagctgcaaaaactgcaatagcaaactgggatggatctatgagtttgccactgaagacagccagcgatataaggaaggccgcgtgatcctggaacgtgctctagttcgagagagtgagggctttgaggagcatgtaccatctgataactcttgaagatacagagagaaatccatcttttcccaggtctccttcactgaaaacaaaaatctacttacatacactgtcaccttagcatcagagtcggattaatgaactgcggaacaagaggttgtgagaatctaagatggaacctttctttctttctttctttttttttaaattttgtattttccatccaacagcagtgtgtagagagaatattatgcagatgccgttaattttttaccctatgtttacatcttgaggcagcagagtctgtctgcagctatgtggtgagctatgtaaggaaaaaaatctgggctgttagagtgaaaaagtgtgttttatgtcaattgtgaaaggaaaatgttaggagtatggtttttaaacttgggcttcattttaaacttttttttttaaacccagttatttcacttgatttgctagcttcagagaagagatccgaatctgtgcccagcgctaaaggctcagtgttagcatggcttgtgctggccggtgtgccatattcttgttggagatgaaccgtagcaccagagcccattcttccttgtcagtcttggcccaaagatgtcaccattcctagttatttgtcaccacataattggtgttgattggaaactttttctgagatgggacagaactgctgggttgtctttttccatgtaacttaagcatagtaatataaataaagtaatagttggatgcttttggtcctgtgttgcttttaaaaacaccttataaaagaggagagtatttgataagcaattttcatagtagtaaagttttttttcatctcttaaactaaattgaccatgcatataatattctttgtttaaatgaaagcatactgttgaaacccgcagtgttgcatttagaaaacagttgaacagaatgtcaatgtgcattcatgcaaaaaaacatttaatctgcatctgttttagaaaagggggaaatgaagcaacttgtctaaaaatactgctttacaaagcatttcagcctttccccctcagttttgcattgattttttgacaagtctgtagagcctaatagtttccatcaaaggcctagatctcttatttagcatttttttcagctcttctctcagaagttcagctgttgaaacgaaaactgtactttgtaccctcacatacaaagggatcaaatttgacctggtgttattttagccccaaatttatgacattacacaatattaaaatgtaaatgtttctttacccaaactacttctagatattctagtatttgcttctggtggaattaaatgacggtaaaattggctaattatttgaatgaatgaatggatggatgttttgcatgctcaatttctaggtcctttgtctagaaaggaaatttgcctcagttgaattagtgaaatatttctgtcgttgatattaaaagtgacttctgagtacagttaagttcctcctatttgccactgggctgttggttagaagcataggtaactgattaagtaggtatgatactgcatttgaaataagtggacacaaactatcctttctccaccatggactcaatctgagaacaacagcattcatttccattcatttccatactggcttttgattatatgcagattcctagtagcatgccttacctacagcactatgtgcatttgctgtcacaataaagtatattttgtcttgca

SEQ ID NO: 200675 - DNA, 1735 bp, Homo sapiens
  Payload ID: 19604
  Gene Name: yippee-like 5
  Uniprot ID: P62699
  ENST ID: ENST00000402708
  CDS Start-End: 662-1027
tcgcatagtcgggggcgcgcccggtctccgccccgaatccaagtcggaacttgaccgagttgtttgggccgcgatgaccgcacggcgtgaaccgtcctgagcagggcccacgcccggcccaagcggcccagccaccgggctggggcggtgtctccctttgccccctcccccccatgaacgtccgcctcccccgccctcctgcccagaggacccgggactgacagcgcagggtgacggttgggcagcccgccgggtgtcgggaccaagagagccccccggccacccgctcagctgtttcctgctcgtgtttgttgtgccgagggaggccccgccgccaccgccgccgccgcgctctgccgccccggtccctcccgattggccggctggcgtcacgtggcctccatcagctgggccggcgggggcgctcgcgggccccactgcggctgccgggtgagcccacccgggggtcgcccgggccggcccagctccgccagcttcgggctgcggccttccctccgcttgcagtcgggagggtgggcgtgcccttgcaacccctttcctgtaccttctctgcagccttatgccagcctggaccatcttggaggcagtgtaggatcatggaagaactttgaattaggtttttagaacttcagccataaaaatgggcagaattttccttgatcatatcggtggtacccgtctgttttcttgtgcaaactgtgatacgatcctgaccaaccgctcagaactcatctccactcgtttcacaggcgccactggcagagcatttctttttaacaaggtagttaacctgcagtacagtgaagttcaagatcgggtcatgctcactggccgccacatggttcgagatgtgagctgcaaaaactgcaatagcaaactgggatggatctatgagtttgccactgaagacagccagcgatataaggaaggccgcgtgatcctggaacgtgctctagttcgagagagtgagggctttgaggagcatgtaccatctgataactcttgaagatacagagagaaatccatcttttcccaggtctccttcactgaaaacaaaaatctacttacatacactgtcaccttagcatcagagtcggattaatgaactgcggaacaagaggttgtgagaatctaagatggaacctttctttctttctttctttttttttaaattttgtattttccatccaacagcagtgtgtagagagaatattatgcagatgccgttaattttttaccctatgtttacatcttgaggcagcagagtctgtctgcagctatgtggtgagctatgtaaggaaaaaaatctgggctgttagagtgaaaaagtgtgttttatgtcaattgtgaaaggaaaatgttaggagtatggtttttaaacttgggcttcattttaaacttttttttttaaacccagttatttcacttgatttgctagcttcagagaagagatccgaatctgtgcccagcgctaaaggctcagtgttagcatggcttgtgctggccggtgtgccatattcttgttggagatgaaccgtagcaccagagcccattcttccttgtcagtcttggcccaaagatgtcaccattcctagttatttgtcaccacataattggtgttgattggaaactttttctgagatgggacagaactgctgggttgtctttttccatgtaacttaagcatagtaatataaataaagtaatagttgga

SEQ ID NO: 200676 - DNA, 878 bp, Homo sapiens
  Payload ID: 19605
  Gene Name: YjeF N-terminal domain containing 3
  Uniprot ID: A6XGL0
  ENST ID: ENST00000436027
  CDS Start-End: 73-822
cctccctccacggatgcgcttaaaaggcggtggcggtggcggcagcgcccggcgcccgggctcacctcggccatgagcagcgcagccggcccagacccgtcggaggcgcccgaagagcggcatttcctcagcaccgcggaggcagccgccctggagcgggagctgctggaggattatcgctttgggcggcagcagctcgtggagctgtgcggtcatgctagtgccgtggctgtgaccaaggcgttcccgttgcccgctctctcccggaagcagaggacggtgctggtcgtgtgtggcccggagcagaacggggcagtggggctggtctgtgcccggcacctgcgggtgtttgagtatgaacccaccatcttctaccccacacgctcgctggacctgctgcatcgggacctgaccacccagtgcgagaagatggacatccccttcctgagctacctgcccactgaggtgcagctcattaacgaagcctatgggctggtggtggatgccgtactgggccccggcgtggagccgggcgaggtcgggggcccctgcacccgcgcgctggccacgctcaagctgctgtccatccccctcgtgagcctggacatcccctcaggctgggacgcagagaccggcagcgattcggaggacgggctgcggcctgacgtgctggtgtctctcgcggcgcccaagcgctgcgctggccgcttctccgggcgccaccacttcgtggccggcaggttcgtgcccgatgacgtgcgccgcaagttcgctctgcgcctgccgggatacacgggcaccgactgcgtcgcggcactgtgaccgccacccgcggccacaccgcagggaccctcgccaataaacagccctcccaccac

SEQ ID NO: 200677 - DNA, 995 bp, Homo sapiens
  Payload ID: 19605
  Gene Name: YjeF N-terminal domain containing 3
  Uniprot ID: A6XGL0
  ENST ID: ENST00000514277
  CDS Start-End: 39-938
ggtggcggcagcgcccggcgcccgggctcacctcggccatgagcagcgcagccggcccagacccgtcggaggcgcccgaagagcggcatttcctcagggccttggagctgcagcccccacttgccgacatgggaagagcggagcttagctcaaatgctaccacctcccttgtccagaggaggaaacaggcctggggaaggcagtcatggctagagcagatttggaacgcagggcctgtttgccagagcaccgcggaggcagccgccctggagcgggagctgctggaggattatcgctttgggcggcagcagctcgtggagctgtgcggtcatgctagtgccgtggctgtgaccaaggcgttcccgttgcccgctctctcccggaagcagaggacggtgctggtcgtgtgtggcccggagcagaacggggcagtggggctggtctgtgcccggcacctgcgggtgtttgagtatgaacccaccatcttctaccccacacgctcgctggacctgctgcatcgggacctgaccacccagtgcgagaagatggacatccccttcctgagctacctgcccactgaggtgcagctcattaacgaagcctatgggctggtggtggatgccgtactgggccccggcgtggagccgggcgaggtcgggggcccctgcacccgcgcgctggccacgctcaagctgctgtccatccccctcgtgagcctggacatcccctcaggctgggacgcagagaccggcagcgattcggaggacgggctgcggcctgacgtgctggtgtctctcgcggcgcccaagcgctgcgctggccgcttctccgggcgccaccacttcgtggccggcaggttcgtgcccgatgacgtgcgccgcaagttcgctctgcgcctgccgggatacacgggcaccgactgcgtcgcggcactgtgaccgccacccgcggccacaccgcagggaccctcgccaataaacagccctcccaccacc

SEQ ID NO: 200678 - DNA, 2785 bp, Homo sapiens
  Payload ID: 19605
  Gene Name: YjeF N-terminal domain containing 3
  ENST ID: ENST00000458210
  CDS Start-End: 52-348
aaaaggcggtggcggtggcggcagcgcccggcgcccgggctcacctcggccatgagcagcgcagccggcccagacccgtcggaggcgcccgaagagcggcatttcctcagcaccgcggaggcagccgccctggagcgggagctgctggaggattatcgctttgggcggcagcagctcgtggagctgtgcggtcatgctagtgccgtggctgtgaccaaggtggggaaactgaagctcagaggtggcgaggggcctgccctgggtcagagggggatggaagcagagctgcaacccaggtgtgtctggctctggagtaaacccccacacctcgaggggccaggaggatgacacaagggtgatagcaataatcatactatggagtgcttcaccgtgcagccagcagtgctgggcatcagtttcctctgcaacagcataataaatggtactgacgagtcagtccctaaacgtgaacgcctcagaaaactgtcccatacagtcgaggctctagcgtgactgcctcctcttcctcccctgccctcctcatccccctcgcctttctcctccttcctcctcctcctgccccctcctcttaccctcctcctcctttctctctccctcctcctccccttccgcccctttcttctctcctttctccttcctctccctcctcctccccctcctcctgttctccttcctccttcccacttaccctacctcctccccatcctcctcctccccattctctccctcctcacccctcctcctctttttcttcttattaccacggtatactttttaaaaactcaatgtttttcttcatgtggacttaaatgtttgtatttccaaatgaaatagatcccgggtgaggcgcccaaaggagaaggaaaatcaaaaccccagaaagaaacccagtagtcactactcgcctggcgctcagtggccaactgtctggtttttgcactgaaagccccttgtctgtccagaagcccctcagtcccagtcttgggtcttgggctctgggcccggtgtggctgggatcgcaggcatgttcatggcaggtcaggactgcgctaagcctttggggaggatacttgaaaggggagtaatctgctgtctgtgtggttggagcttaaagtacagctggggctcaagagacacccagagtgcctgtcaggcggtggcactgtcatcgcatttgataaaggccaaactgagtctgggagagaaggggctggggccacgcagaatcagggcagggctggggccaaaatgcctggagagacagagtctgagagatacagagatggccagagacagatggagagagacagataacagagagatacagagacagccagagacaaatggagagagagacaaatggagaaagagagccagagacatacagaaagacagagacactagagtctgagagatacagacagacacagagacagccagagacagatggagagagacagagacacaaagagagccagagacacagagagtctgagagatacagacagacacagagacggccagagacggagagagacagagacagacagacagagacacagagagtctgagagatacagaaacagccagagacaggtggggagagagacatgaagagagccagagacatacagagagacagagacacacagagagacagagacacggagagtctgagagatacagagagacacagagacagccagagagagacagagaggccccagggcatcgtggctaaggttgggctcccctactccacagcctccaggaggggctgaggtctggaaacatgggcgggggtgggcccgcggtgagaaaggtggaagaatgtctgcaactcaggcggagaataaacaaaccgcactccgggcgacgggcagtggctggatgcacgtttttcctgcaccgacctggcagagcctgagaccgggcctctgcatctccagcggggaaactgaggccccaagaggcccaacccctcatccagaacagctcacctcctgtcctatcctgttgcctccaggcccaagccccatcccttcccctactccgggcctcagtttcctctccaggcaaggaggaatctggactgtgcctgtgcctttgctgtgtcccctaccaccaggcgttcccgttgcccgctctctcccggaagcagaggacggtgctggtcgtgtgtggcccggagcagaacggggcagtggggctggtctgtgcccggcacctgcgggtgtttgagtatgaacccaccatcttctaccccacacgctcgctggacctgctgcatcgggacctgaccacccagtgcgagaagatggacatccccttcctgagctacctgcccactgaggtgcagctcattaacgaagcctatgggctggtggtggatgccgtactgggccccggcgtggagccgggcgaggtcgggggcccctgcacccgcgcgctggccacgctcaagctgctgtccatccccctcgtgagcctggacatcccctcaggctgggacgcagagaccggcagcgattcggaggacgggctgcggcctgacgtgctggtgtctctcgcggcgcccaagcgctgcgctggccgcttctccgggcgccaccacttcgtggccggcaggttcgtgcccgatgacgtgcgccgcaagttcgctctgcgcctgccgggatacacgggcaccgactgcgtcgcggcactgtgaccgccacccgcggccacaccgcagggaccctcgccaataaacagccctcccacc

SEQ ID NO: 200679 - DNA, 2696 bp, Homo sapiens
  Payload ID: 19606
  Gene Name: YKT6 v-SNARE homolog (S. cerevisiae)
  Uniprot ID: O15498
  ENST ID: ENST00000223369
  CDS Start-End: 88-684
gcggcggtcccgaggggcggcggccgcgctgctccctgagaacgggtcccgcagctgggcaggcgggcggcctgagggcgcggagccatgaagctgtacagcctcagcgtcctctacaaaggcgaggccaaggtggtgctgctcaaagccgcatacgatgtgtcttccttcagctttttccagagatccagcgttcaggaattcatgaccttcacgagtcaactgattgtggagcgctcatcgaaaggcactagagcttctgtcaaagaacaagactatctgtgccacgtctacgtccggaatgatagtcttgcaggtgtggtcattgctgacaatgaatacccatcccgggtggcctttaccttgctggagaaggtactagatgaattctccaagcaagtcgacaggatagactggccagtaggatcccctgctacaatccattacccagccctggatggtcacctcagtagataccagaacccacgagaagctgatcccatgactaaagtgcaggccgaactagatgagaccaaaatcattctgcacaacaccatggagtctctgttagagcgaggtgagaagctagatgacttggtgtccaaatccgaggtgctgggaacacagtctaaagccttctataaaactgcccggaaacaaaactcatgctgtgccatcatgtgatgcagcctgccagaggcccaatgctggaatggcaccatcattcacatcagaactgcagcccctggaaaagaagagacagccatagacgaggagccagagtgggggcagactggccatttttattttgaagttcctgcgagaaatggatggtggaagggtggcgaatgttcaaattcatatgtgtggtagtgattcttggaaagaatttgaggtccccaaaggtgtatttttgggcaaatgaaaccataaactccgactggcttctgtagatgccaaagggctctttttcagctaaccctgggaaggctctgtgggagggaggtcggagccagctgtttctcgatctttggtatatctttggatcttatttgtacattaatgatattaacactccagtggggggtggggagtccctgatgctagggctggggtgggtggagtttgaagactcttgggaaagcctctcctggggccactgttgggggtgggagtgagcccaccacagaggccacaggcaggcccccacttcaggcccaaggcctggggcggggggaacagtcactgggtctcagattctgagactgttgtttagcttacctttctgctaggattggcttcccgcagagggcagggcccatcctaagcagcttccaagtcccacaaaggtggcttgtgggaggatttggaaggagctgcattgtgggcggggagtgtgtgggttgggttcgtaccagcaagtagactaggaactgagcccaggaaagggggatgttttcctggtgtttggatggtcagctgggagtgtccatcatcaggggaagatcaaacacaggtgcactcagctgcccagggcctctgggacacttgccttgacttgcaacttgccttgaacatcacgatcaaagcagcaggtgctgtggtctctcaaaattgatttttatttgactctgtggctctaagactgccttgaaccgcctgaggcctatgcatctgaacaagtgggtctctcccttgagcaccaggagtgggtgccagccggccccgaggattcccagcaccccacctatggtcttgccagcataggcttgctagttccttcttggtcagaggtagctgcagaggggggaggccaagggtttggtctaagctgtgccctgccacctggcaggaggcccactcactgcccaagtcatggcaacaggctggagcagcccaggagatgggcctaaaatgttctggatcccttgggtcctagtgttatgttccagtctgcccacctgtgctcaggatgcagccctgggatccagcacccatggaagcttctgctgggatggtgtcacctatgggttttgaaccagtgtggtatggtccttgggagctctgctctgagcttgccacactgctgagagcacccactgtcctgaccagagtctcagtggtcctgacccccaatgtgggcaggggctgggcaggagggtggggtctgctgtgggttcagaggactccacctcctggctggtttacctgctgctgcccattttctctgggtactgctggccagaggactttagcctacccctgaagagcctgtccatgtcattttcctactgccatagataccctaagcccagggccccttgaggcccagactcagcctgcccactggtgccggagacggagtggagtgggcctggatccgagggatgctacctctccctttcccacttgaggaccctggggagagatgggggcggggaaaatggaggtatgaatttggggtaagaggaagtgagatctccgcttgcaggtcagcccctgccttgcagggcgggctggcttgactcaggccctgtgagatagagggcccagcccagccccacccacagatcccctgctcctgttgtgttctgttgtaaatcatttggcgagactgtattttagtaactgctgcctaacttccctgtgttctatttgagaggcgcctgtctggataaagttgtcttgaaatttca

SEQ ID NO: 200680 - DNA, 673 bp, Homo sapiens
  Payload ID: 19606
  Gene Name: YKT6 v-SNARE homolog (S. cerevisiae)
  ENST ID: ENST00000424864
  CDS Start-End: 1-90
ccacgagaagctgatcccatgactaaagtgcaggccgaactagatgagaccaaaatcattctggttctgttccatccacttggacagtaactattcttggaccgagtctcgacacctagaggtgaagtttgtgtgtgttggagaggaacccagcacaacaccatggagtctctgttagagcgaggtgagaagctagatgacttggtgtccaaatccgaggtgctgggaacacagtctaaagccttctataaaactaaaatatttaattgacaaggatgggtgctgctgactgccgctttctctcaggcccggaaacaaaactcatgctgtgccatcatgtgatgcagcctgccagaggcccaatgctggaatggcaccatcattcacatcagaactgcagcccctggaaaagaagagacagccatagacgaggagccagagtgggggcagactggccatttttattttgaagttcctgcgagaaatggatggtggaagggtggcgaatgttcaaattcatatgtgtggtagtgattcttggaaagaatttgaggtccccaaaggtgtatttttgggcaaatgaaaccataaactccgactggcttctgtagatgccaaagggctctttttcagctaaccctgggaaggctctgtgggagggaggtcggagcca

SEQ ID NO: 200681 - DNA, 1270 bp, Homo sapiens
  Payload ID: 19606
  Gene Name: YKT6 v-SNARE homolog (S. cerevisiae)
  Uniprot ID: O15498
  ENST ID: ENST00000496112
  CDS Start-End: 169-663
atccggaagtggattgcgagccaggaggaggaagccggcggtggccccgtcagcagccggctgctgagaggccggtaggcggcggcggtcccgaggggcggcggccgcgctgctccctgagaacgggtcccgcagctgggcaggcgggcggcctgagggcgcggagccatgaagctgtacagcctcagcgtcctctacaaaggcgaggccaaggtggtgctgctcaaagccgcatacgatgtgtcttccttcagctttttccagagatccagcgttcaggaattcatgaccttcacgagtcaactgattgtggagcgctcatcgaaaggcactagagcttctgtcaaagaacaagactatctgtgccacgtctacgtccggaatgatagtcttgcaggtgtggtcattgctgacaatgaatacccatcccgggtggcctttaccttgctggagaaggtactagatgaattctccaagcaagtcgacaggatagactggccagtaggatcccctgctacaatccattacccagccctggatggtcacctcagtagataccagaacccacgagaagctgatcccatgactaaagtgcaggccgaactagatgagaccaaaatcattctggcccggaaacaaaactcatgctgtgccatcatgtgatgcagcctgccagaggcccaatgctggaatggcaccatcattcacatcagaactgcagcccctggaaaagaagagacagccatagacgaggagccagagtgggggcagactggccatttttattttgaagttcctgcgagaaatggatggtggaagggtggcgaatgttcaaattcatatgtgtggtagtgattcttggaaagaatttgaggtccccaaaggtgtatttttgggcaaatgaaaccataaactccgactggcttctgtagatgccaaagggctctttttcagctaaccctgggaaggctctgtgggagggaggtcggagccagctgtttctcgatctttggtatatctttggatcttatttgtacattaatgatattaacactccagtggggggtggggagtccctgatgctagggctggggtgggtggagtttgaagactcttgggaaagcctctcctggggccactgttgggggtgggagtgagcccaccacagaggccacaggcaggcccccacttcaggcccaaggcctggggcggggggaacagtcactgggtctcagattctgagactgttgtttagcttacctttctgcta

SEQ ID NO: 200682 - DNA, 7108 bp, Homo sapiens
  Payload ID: 19607
  Gene Name: YLP motif containing 1
  Uniprot ID: P49750
  ENST ID: ENST00000325680
  CDS Start-End: 125-6565
gtttacacgctccggggcctgtaggcgccgcgagttccggctgtcgccgtcgccgccgcggctcctggaggtcggttgcgacgagtaacggcgccaggacgagccctgcgccttctttttcgatatgtacccgaattggggccggtatggcgggagcagccactatccgccgccaccggtcccaccgccgccgccagtggcgcttcctgaggcctcgccggggcccgggtactcgagctcgacgactcccgcggccccctcctcctcgggcttcatgagcttccgcgaacagcacttggcgcagctccagcagctgcagcagatgcaccagaagcaaatgcagtgcgtgcttcagccccaccaccttcctccgccccctctgccgcccccgccagtgatgccggggggcggctacggagactggcagccgccaccgccaccgatgcccccgccacccgggccggccctcagctatcagaagcagcagcagtacaaacaccagatgctccaccaccaacgagacgggcctcctggtttggttccaatggagctggaatccccccctgaatctccccctgtgccgcctgggtcctatatgcccccatctcagtcttacatgcccccacctcagccgccaccctcttactaccccccgacctcatctcagccctacctgcctcctgctcagccgtccccttcgcagtccccaccttcccaatcctacctggcgcccaccccttcttactcatcctcctcctcttcctcgcaatcctatttgagccattcccagtcctacttgccctcttctcaggcatctccttcccgcccctcccagggccattctaaatcccaactactagctccaccaccaccgtccgccccccctggaaataagacaactgtccagcaagagcctttggagagtggggccaaaaacaagagtactgaacagcagcaagccgcccctgagccagatccctctacgatgactccacaggaacagcagcagtattggtatcgacagcacttgcttagtttgcaacagaggacaaaagttcatttgccaggacacaaaaagggtcctgtggtagcaaaggatacaccagagccggtaaaagaagaagttacagtacctgccaccagtcaagttccagaatctccttcttctgaggagcccccattgccacctccaaatgaggaagtgccacctcctctcccacctgaggaaccccagtctgaggacccagaagaagatgccaggttaaagcagttgcaggctgcagcagcacactggcagcagcaccagcagcatcgagtcggtttccagtatcagggaataatgcagaagcacactcagttacagcagattctacaacagtatcagcagattatacagcccccaccacatatacagaccatgtctgtagatatgcagctgcggcattatgagatgcagcagcaacagtttcaacatctttaccaagaatgggagcgagagtttcagctatgggaggaacaactccattcctatcctcataaagatcagcttcaggagtatgagaagcagtggaaaacatggcagggacatatgaaagccactcagagctatctccaggagaaagtcaattcatttcagaacatgaagaaccagtatatggggaacatgtcaatgccacctccttttgttccatattctcagatgcctccacctctacctacaatgccccctccagtgttgcctccttcattgccaccaccagtgatgccccctgccctccctgctacagtgccaccacctggcatgcccccacctgttatgccaccttctctaccaacctctgttcccccaccagggatgcctccttctctctcttctgcagggccaccaccagttctccccccaccttccctgtcttctgcagggccaccaccagttcttcccccaccatctctctcttcaacagcacctccacctgtcatgcccctcccaccattgtcttcagctacacctcctccaggaatacctccccctggagttccacaagggatacctcctcagttaacagcagccccagttccaccagcctccagttcacagagctcgcaagttccagagaaacctagaccagcactgcttcctactcctgtgtcttttggttctgccccaccgacaacttaccatcctccgttgcaatcagctggtccatcagaacaagtgaattcaaaagctcctttgagcaagtctgctctgccatacagttcattctcatctgatcaaggacttggggagtcttcagctgctccatctcagccaatcactgcagtgaaggacatgccagtgagatcaggtggcctgcttccagatcctcctagaagtagttacttggaaagtccaagaggcccaagatttgatggtcctcgaagatttgaggatttagggtcaaggtgtgaaggaccgagacccaaagggcctcgttttgaaggaaatcgccccgatgggccaagacccagatatgaaggtcacccagcagagggcactaaaagcaagtggggaatgattccccgggggccagcatctcaattttatattacccccagtacatccctaagtcctcgacagagtggaccacagtggaaaggccccaaaccagcttttggacagcagcatcagcagcaacctaagtcacaagcagaacctctttcaggaaacaaagaaccattagcagacaccagtagtaaccagcagaagaattttaaaatgcaatcagctgcattttccattgctgcagatgtaaaggatgtcaaggcggctcagtcaaatgagaatctaagcgactctcaacaagagccacctaaaagtgaagtctcggaagggcccgtagagccctctaattgggaccagaatgttcaaagtatggagactcaaatcgacaaagcccaagctgttactcagcctgtaccccttgcgaataagcctgtacctgctcaatctacttttccttcaaaaacaggggggatggagggaggaacagcagtagcaacatcatcattaacagcagataatgattttaaacctgtgggtattggtctaccccattcagaaaacaaccaagataaaggcctgcctcggccagataatagagataatagattagaaggcaatagaggcaacagctcatcttacagaggtcctgggcaaagcagaatggaagacacacgggataaaggtctagtaaacagaggtcgcggccaggcaatcagtcgaggcccaggattggtcaagcaagaagactttcgggataagatgatgggtagaagagaagatagtcgagagaagatgaacagaggagaaggtagccgggacagagggttggtgaggcctggaagcagtcgggagaaagtgccaggtggtcttcaagggagccaggacaggggtgcagctggcagccgagaaaggggaccacctcggagggctggcagtcaggagaggggacctcttcgaagggctgggagtagagagagaataccaccccgaagagctgggagcagggagagaggaccacctcgagggcctggcagtcgagaaaggggactgggaagatcagattttggtcgtgatagaggtccattcagaccagaaccaggagatggtggggaaaaaatgtatccatatcaccgggatgagcctcctagggctccatggaaccatggagaagagcgagggcatgaagagtttccattagatggtagaaatgctccaatggaacgagaaagactcgatgactgggatagagagagatactggagagaatgtgaacgtgactatcaagatgatacactagagctctataacagagaggacaggttctcagcaccaccatctcggtctcatgatggagataggcgaggcccttggtgggatgattgggagagagaccaggatatggatgaggactacaatagggaaatggaaagggacatggacagggatgtggatcggatttcaagacctatggatatgtatgatagaagtttggataatgagtgggacagagattatgggagaccactggatgaacaagaatcacagtttcgtgaacgggatattccatctcttccacctttaccgcccctcccacctcttccacctttggatagatatcgggatgatagatggagagaagaaagaaatcgagagcatgggtatgatcgagatttccgtgataggggtgagttgaggattcgagagtatccagaaagaggagatacatggcgggaaaagcgagattatgttcctgacagaatggactgggaaagagaacggttgtcagacagatggtacccatctgatgtggatagacattcccccatggcggaacatatgccctcctcacatcattcctcagaaatgatggggtccgatgcaagcttagactctgaccaaggccttggaggggtaatggttctcagtcagaggcagcatgaaatcattttgaaagctgcacaagaactgaaaatgcttcgggaacagaaagaacagcttcaaaagatgaaagacttcgggtctgagccacagatggctgaccatctaccacctcaggaatcaagattgcagaatacatcttcaagacctggaatgtatccgcctccagggtcgtatagacctccccctcctatgggcaaaccaccaggttcaattgtaagaccctctgctccaccagcaagatcatctgttcctgtgaccaggccacctgtcccaataccaccacctccacctcctccacctctacctcctcctcctccagtgataaagccacaaacttcagctgtagaacaggaacgatgggatgaagattctttctatgggctctgggatacaaatgatgaacaaggactgaattcagaatttaagtcagaaactgcagcaattccatctgctccagtattaccacccccacctgttcactcttccattccccctcctggcccagtgcctatgggtatgccaccaatgtccaagccaccaccagtacaacagactgttgattatggccatggccgagatatatccactaataaagttgaacagataccttatggagaaagaataactctacgcccagatccactacctgaaagatcaacttttgagacagagcatgcaggccaacgtgatcgttatgatagagaaagagatcgtgagccttattttgatcgtcaaagtaatgtcatagcagatcatcgagattttaaaagggatcgtgagacacatagagatcgagaccgggatcgtggtgttattgactatgaccgggatcgatttgacagagaacgccgaccccgagatgatagagctcagtcatatcgagacaaaaaagaccattcctcatccagaagagggggttttgataggccatcctatgaccggaagtctgaccgaccagtctatgaaggaccatccatgtttggaggagaacgaaggacttatcctgaggagcgaatgcctctgccagctccttcactgagccaccagcctcctccagctccacgagtcgagaagaagcctgaatcaaagaatgtggacgatattttgaaaccaccgggccgggagagcagacctgagagaattgttgttataatgagaggattacctggcagtggaaagacacatgttgcaaaacttattcgagataaggaggtagaatttggaggacctgcacccagagttctaagcctggatgattacttcatcactgaagtggaaaaagaagaaaaagatccagattctggaaagaaagtgaaaaagaaggtaatggaatatgaatatgaagctgagatggaggagacttaccgcaccagcatgttcaaaactttcaaaaagactctggatgatggcttttttcccttcatcatcctggatgccatcaatgacagagttaggcattttgaccagttttggagtgcagcaaaaaccaagggatttgaggtatatttggctgaaatgagtgcagataaccagacttgtggcaagagaaatattcatggaagaaagcttaaagaaataaataagatggctgatcactgggaaactgcacctcgtcacatgatgcgtctagatattcgttctttgctgcaagatgctgctattgaagaggtagagatggaagattttgatgcaaatatcgaagaacagaaagaagaaaagaaagatgcagaggaagaggaaagcgaactgggttacattccgaaaagcaaatgggagatggacacatctgaggcaaagctagacaagttggatggcttgaggactggtactaaaaggaaacgtgactgggaggccattgccagcagaatggaggattatcttcagctccccgatgattatgatactcgtgcttctgagcctgggaagaagagggtcagatgggcagacctggaagagaagaaggatgcagataggaaaagggccataggttttgtggtcggacagactgattgggagaagatcacagatgaaagtggtcacctggctgaaaaagccctcaatcgaaccaaatatatatgagacttagtttttgaacggagtcattattcctctaaggtggttcgctttgaggtggtctgaagccaaggcctcgcggagcttctttgtgtgtcaccttgcttccacgtttcagttcttgttttgtttctactgctttagttttttttaaagttctccagtgtccccaagaggtattagaatcttgctgtacccaagcaagacgttaatttttcttttaactgttttggggagggagggagtgatagcttaactgctgaagccaggcgggggtctgctggaggattccaacagagagtatttcctccactgtacaatgtcacagactatctctatcatcattgctttgtggctgtttctgttttttactgtatgtaactggtagctgattgtactaggattaaaaacaataaactttcatgataaagccgatgagattcatgggctatacagcatgggcccttttctcttgttttcttaattttatttttaattgctttttaaatatggtatgtcctaattaaatgctagctgaacatcccaaaa

SEQ ID NO: 200683 - DNA, 4899 bp, Homo sapiens
  Payload ID: 19607
  Gene Name: YLP motif containing 1
  ENST ID: ENST00000552421
  CDS Start-End: 125-4447
gtttacacgctccggggcctgtaggcgccgcgagttccggctgtcgccgtcgccgccgcggctcctggaggtcggttgcgacgagtaacggcgccaggacgagccctgcgccttctttttcgatatgtacccgaattggggccggtatggcgggagcagccactatccgccgccaccggtcccaccgccgccgccagtggcgcttcctgaggcctcgccggggcccgggtactcgagctcgacgactcccgcggccccctcctcctcgggcttcatgagcttccgcgaacagcacttggcgcagctccagcagctgcagcagatgcaccagaagcaaatgcagtgcgtgcttcagccccaccaccttcctccgccccctctgccgcccccgccagtgatgccggggggcggctacggagactggcagccgccaccgccaccgatgcccccgccacccgggccggccctcagctatcagaagcagcagcagtacaaacaccagatgctccaccaccaacgagacgggcctcctggtttggttccaatggagctggaatccccccctgaatctccccctgtgccgcctgggtcctatatgcccccatctcagtcttacatgcccccacctcagccgccaccctcttactaccccccgacctcatctcagccctacctgcctcctgctcagccgtccccttcgcagtccccaccttcccaatcctacctggcgcccaccccttcttactcatcctcctcctcttcctcgcaatcctatttgagccattcccagtcctacttgccctcttctcaggcatctccttcccgcccctcccagggccattctaaatcccaactactagctccaccaccaccgtccgccccccctggaaataagacaactgtccagcaagagcctttggagagtggggccaaaaacaagagtactgaacagcagcaagccgcccctgagccagatccctctacgatgactccacaggaacagcagcagtattggtatcgacagcacttgcttagtttgcaacagaggacaaaagttcatttgccaggacacaaaaagggtcctgtggtagcaaaggatacaccagagccggtaaaagaagaagttacagtacctgccaccagtcaagttccagaatctccttcttctgaggagcccccattgccacctccaaatgaggaagtgccacctcctctcccacctgaggaaccccagtctgaggacccagaagaagatgccaggttaaagcagttgcaggctgcagcagcacactggcagcagcaccagcagcatcgagtcggtttccagtatcagggaataatgcagaagcacactcagttacagcagattctacaacagtatcagcagattatacagcccccaccacatatacagaccatgtctgtagatatgcagctgcggcattatgagatgcagcagcaacagtttcaacatctttaccaagaatgggagcgagagtttcagctatgggaggaacaactccattcctatcctcataaagatcagcttcaggagtatgagaagcagtggaaaacatggcagggacatatgaaagccactcagagctatctccaggagaaagtcaattcatttcagaacatgaagaaccagtatatggggaacatgtcaatgccacctccttttgttccatattctcagatgcctccacctctacctacaatgccccctccagtgttgcctccttcattgccaccaccagtgatgccccctgccctccctgctacagtgccaccacctggcatgcccccacctgttatgccaccttctctaccaacctctgttcccccaccagggatgcctccttctctctcttctgcagggccaccaccagttctccccccaccttccctgtcttctgcagggccaccaccagttcttcccccaccatctctctcttcaacagcacctccacctgtcatgcccctcccaccattgtcttcagctacacctcctccaggaatacctccccctggagttccacaagggatacctcctcagttaacagcagccccagttccaccagcctccagttcacagagctcgcaagttccagagaaacctagaccagcactgcttcctactcctgtgtcttttggttctgccccaccgacaacttaccatcctccgttgcaatcagctggtccatcagaacaagtgaattcaaaagctcctttgagcaagtctgctctgccatacagttcattctcatctgatcaaggacttggggagtcttcagctgctccatctcagccaatcactgcagtgaaggacatgccagtgagatcaggtggcctgcttccagatcctcctagaagtagttacttggaaagtccaagaggcccaagggaacagaaagaacagcttcaaaagatgaaagacttcgggtctgagccacagatggctgaccatctaccacctcaggaatcaagattgcagaatacatcttcaagacctggaatgtatccgcctccagggtcgtatagacctccccctcctatgggcaaaccaccaggttcaattgtaagaccctctgctccaccagcaagatcatctgttcctgtgaccaggccacctgtcccaataccaccacctccacctcctccacctctacctcctcctcctccagtgataaagccacaaacttcagctgtagaacaggaacgatgggatgaagattctttctatgggctctgggatacaaatgatgaacaaggactgaattcagaatttaagtcagaaactgcagcaattccatctgctccagtattaccacccccacctgttcactcttccattccccctcctggcccagtgcctatgggtatgccaccaatgtccaagccaccaccagtacaacagactgttgattatggccatggccgagatatatccactaataaagttgaacagataccttatggagaaagaataactctacgcccagatccactacctgaaagatcaacttttgagacagagcatgcaggccaacgtgatcgttatgatagagaaagagatcgtgagccttattttgatcgtcaaagtaatgtcatagcagatcatcgagattttaaaagggatcgtgagacacatagagatcgagaccgggatcgtggtgttattgactatgaccgggatcgatttgacagagaacgccgaccccgagatgatagagctcagtcatatcgagacaaaaaagaccattcctcatccagaagagggggttttgataggccatcctatgaccggaagtctgaccgaccagtctatgaaggaccatccatgtttggaggagaacgaaggacttatcctgaggagcgaatgcctctgccagctccttcactgagccaccagcctcctccagctccacgagtcgagaagaagcctgaatcaaagaatgtggacgatattttgaaaccaccgggccgggagagcagacctgagagaattgttgttataatgagaggattacctggcagtggaaagacacatgttgcaaaacttattcgagataaggaggtagaatttggaggacctgcacccagagttctaagcctggatgattacttcatcactgaagtggaaaaagaagaaaaagatccagattctggaaagaaagtgaaaaagaaggtaatggaatatgaatatgaagctgagatggaggagacttaccgcaccagcatgttcaaaactttcaaaaagactctggatgatggcttttttcccttcatcatcctggatgccatcaatgacagagttaggcattttgaccagttttggagtgcagcaaaaaccaagggatttgaggtatatttggctgaaatgagtgcagataaccagacttgtggcaagagaaatattcatggaagaaagcttaaagaaataaataagatggctgatcactgggaaactgcacctcgtcacatgatgcgtctagatattcgttctttgctgcaagatgctgctattgaagaggtagagatggaagattttgatgcaaatatcgaagaacagaaagaagaaaagaaagatgcagaggaagaggaaagcgaactgggttacattccgaaaagcaaatgggagatggacacatctgaggcaaagctagacaagttggatggcttgaggactggtactaaaaggaaacgtgactgggaggccattgccagcagaatggaggattatcttcagctccccgatgattatgatactcgtgcttctgagcctgggaagaagagggtcagatgggcagacctggaagagaagaaggatgcagataggaaaagggccataggttttgtggtcggacagactgattgggagaagatcacagatgaaagtggtcacctggctgaaaaagccctcaatcgaaccaaatatatatgagacttagtttttgaacggagtcattattcctctaaggtggttcgctttgaggtggtctgaagccaaggcctcgcggagcttctttgtgtgtcaccttgcttccacgtttcagttcttgttttgtttctactgctttagttttttttaaagttctccagtgtccccaagaggtattagaatcttgctgtacccaagcaagacgttaatttttcttttaactgttttggggagggagggagtgatagcttaactgctgaagccaggcgggggtctgctggaggattccaacagagagtatttcctccactgtacaatgtcacagactatctctatcatcattgctttgtggctgtttctgttttttactgtatgtaactggtagctgattgtactaggattaaaaacaataaactttcatgataaagccgatgagattcatgggctatacagca

SEQ ID NO: 200684 - DNA, 2316 bp, Homo sapiens
  Payload ID: 19607
  Gene Name: YLP motif containing 1
  ENST ID: ENST00000547879
  CDS Start-End: 1-1401
aattcagaatttaagtcagaaactgcagcaattccatctgctccagtattaccacccccacctgttcactcttccattccccctcctggcccagtgcctatgggtatgccaccaatgtccaagccaccaccagtacaacagactgttgattatggccatggccgagatatatccactaataaagttgaacagataccttatggagaaagaataactctacgcccagatccactacctgaaagatcaacttttgagacagagcatgcaggccaacgtgatcgttatgatagagaaagagatcgtgagccttattttgatcgtcaaagtaatgtcatagcagatcatcgagattttaaaagggatcgtgagacacatagagatcgagaccgggatcgtggtgttattgactatgaccgggatcgatttgacagagaacgccgaccccgagatgatagagctcagtcatatcgagacaaaaaagaccattcctcatccagaagagggggttttgataggccatcctatgaccggaagtctgaccgaccagtctatgaaggaccatccatgtttggaggagaacgaaggacttatcctgaggagcgaatgcctctgccagctccttcactgagccaccagcctcctccagctccacgagtcgagaagaagcctgaatcaaagaatgtggacgatattttgaaaccaccgggccgggagagcagacctgagagaattgttgttataatgagaggattacctggcagtggaaagacacatgttgcaaaacttattcgagataaggaggtagaatttggaggacctgcacccagagttctaagcctggatgattacttcatcactgaagtggaaaaagaagaaaaagatccagattctggaaagaaagtgaaaaagaaggtaatggaatatgaatatgaagctgagatggaggagacttaccgcaccagcatgttcaaaactttcaaaaagactctggatgatggcttttttcccttcatcatcctggatgccatcaatgacagagttaggcattttgaccagttttggagtgcagcaaaaaccaagggatttgaggtatatttggctgaaatgagtgcagataaccagacttgtggcaagagaaatattcatggaagaaagcttaaagaaataaataagatggctgatcactgggaaactgcacctcgtcacatgatgcgtctagatattcgttctttgctgcaagatgctgctattgaagaggtagagatggaagattttgatgcaaatatcgaagaacagaaagaagaaaagaaagatgcagaggaagaggaaagcgaactggtaggagacagaccaaccactttgaacagtgtctctttattaaaattcttaaagaaggtttaaattcagatctgtggttagacaactactgttgatatacactttagtggtaaaagtttccataatcatcttcaaggagacttttggatactctttatttttccccagaccaaaagaaccctctaatgtggtgttaagagaaagttttaacagagtgctaagaaacttacccttgtactcatctatttgtgggtggttttaggggagtataccttttaagaaaatcaattacatatgaaagggcattcttacattccagcagatatgtggcacagcctacccaacatatgcataattgtctcttctttgctacaagatctccaaatttgagtttctgtcaacagaggcagaagaacttattgaatggggaggcagagggttgccactggctgctagatttgttcttctgcattttatcctaagtgacggggaaaaattaaatgactgtgtaggcaatggattttgctcaggctgattagaggcttacatagtgtgagtttaaagtttctgtgtacctaatgtaaaatgctttcgatcacacctctgtagagatgtttgcctttccctgtcattcaagaatatgcgacctatagagttacgttgacttttcagtgtttactgaagtacagagattagcaatgccttggaatagtgttgctttttaaatccagaatattactcggtttatttaatacttgagcccttgctaaagttgctcctcatattcttttgaaaatgtacaaaatgagaactctgattcctaccccctagagtatacagaatctccagggagtggtcccatcgaacccgtgtgtgatatagaggactcttgataaaaactgtgtttatataaagatggtgtcaacctctacattccaagatttcaaatgtggattaaaaaataagttttaaagttaa

SEQ ID NO: 200685 - DNA, 5500 bp, Homo sapiens
  Payload ID: 19607
  Gene Name: YLP motif containing 1
  ENST ID: ENST00000549293
  CDS Start-End: 1-4788
tttcaacatctttaccaagaatgggagcgagagtttcagctatgggaggaacaactccattcctatcctcataaagatcagcttcaggagtatgagaagcagtggaaaacatggcagggacatatgaaagccactcagagctatctccaggagaaagtcaattcatttcagaacatgaagaaccagtatatggggaacatgtcaatgccacctccttttgttccatattctcagatgcctccacctctacctacaatgccccctccagtgttgcctccttcattgccaccaccagtgatgccccctgccctccctgctacagtgccaccacctggcatgcccccacctgttatgccaccttctctaccaacctctgttcccccaccagggatgcctccttctctctcttctgcagggccaccaccagttctccccccaccttccctgtcttctgcagggccaccaccagttcttcccccaccatctctctcttcaacagcacctccacctgtcatgcccctcccaccattgtcttcagctacacctcctccaggaatacctccccctggagttccacaagggatacctcctcagttaacagcagccccagttccaccagcctccagttcacagagctcgcaagttccagagaaacctagaccagcactgcttcctactcctgtgtcttttggttctgccccaccgacaacttaccatcctccgttgcaatcagctggtccatcagaacaagtgaattcaaaagctcctttgagcaagtctgctctgccatacagttcattctcatctgatcaaggacttggggagtcttcagctgctccatctcagccaatcactgcagtgaaggacatgccagtgagatcaggtggcctgcttccagatcctcctagaagtagttacttggaaagtccaagaggcccaagatttgatggtcctcgaagatttgaggatttagggtcaaggtgtgaaggaccgagacccaaagggcctcgttttgaaggaaatcgccccgatgggccaagacccagatatgaaggtcacccagcagagggcactaaaagcaagtggggaatgattccccgggggccagcatctcaattttatattacccccagtacatccctaagtcctcgacagagtggaccacagtggaaaggccccaaaccagcttttggacagcagcatcagcagcaacctaagtcacaagcagaacctctttcaggaaacaaagaaccattagcagacaccagtagtaaccagcagaagaattttaaaatgcaatcagctgcattttccattgctgcagatgtaaaggatgtcaaggcggctcagtcaaatgagaatctaagcgactctcaacaagagccacctaaaagtgaagtctcggaagggcccgtagagccctctaattgggaccagaatgttcaaagtatggagactcaaatcgacaaagcccaagctgttactcagcctgtaccccttgcgaataagcctgtacctgctcaatctacttttccttcaaaaacaggggggatggagggaggaacagcagtagcaacatcatcattaacagcagataatgattttaaacctgtgggtattggtctaccccattcagaaaacaaccaagataaaggcctgcctcggccagataatagagataatagattagaaggcaatagaggcaacagctcatcttacagaggtcctgggcaaagcagaatggaagacacacgggataaaggtctagtaaacagaggtcgcggccaggcaatcagtcgaggcccaggattggtcaagcaagaagactttcgggataagatgatgggtagaagagaagatagtcgagagaagatgaacagaggagaaggtagccgggacagagggttggtgaggcctggaagcagtcgggagaaagtgccaggtggtcttcaagggagccaggacaggggtgcagctggcagccgagaaaggggaccacctcggagggctggcagtcaggagaggggacctcttcgaagggctgggagtagagagagaataccaccccgaagagctgggagcagggagagaggaccacctcgagggcctggcagtcgagaaaggggactgggaagatcagattttggtcgtgatagaggtccattcagaccagaaccaggagatggtggggaaaaaatgtatccatatcaccgggatgagcctcctagggctccatggaaccatggagaagagcgagggcatgaagagtttccattagatggtagaaatgctccaatggaacgagaaagactcgatgactgggatagagagagatactggagagaatgtgaacgtgactatcaagatgatacactagagctctataacagagaggacaggttctcagcaccaccatctcggtctcatgatggagataggcgaggcccttggtgggatgattgggagagagaccaggatatggatgaggactacaatagggaaatggaaagggacatggacagggatgtggatcggatttcaagacctatggatatgtatgatagaagtttggataatgagtgggacagagattatgggagaccactggatgaacaagaatcacagtttcgtgaacgggatattccatctcttccacctttaccgcccctcccacctcttccacctttggatagatatcgggatgatagatggagagaagaaagaaatcgagagcatgggtatgatcgagatttccgtgataggggtgagttgaggattcgagagtatccagaaagaggagatacatggcgggaaaagcgagattatgttcctgacagaatggactgggaaagagaacggttgtcagacagatggtacccatctgatgtggatagacattcccccatggcggaacatatgccctcctcacatcattcctcagaaatgatggggtccgatgcaagcttagactctgaccaaggccttggaggggtaatggttctcagtcagaggcagcatgaaatcattttgaaagctgcacaagaactgaaaatgcttcgggaacagaaagaacagcttcaaaagatgaaagacttcgggtctgagccacagatggctgaccatctaccacctcaggaatcaagattgcagaatacatcttcaagacctggaatgtatccgcctccagggtcgtatagacctccccctcctatgggcaaaccaccaggttcaattgtaagaccctctgctccaccagcaagatcatctgttcctgtgaccaggccacctgtcccaataccaccacctccacctcctccacctctacctcctcctcctccagtgataaagccacaaacttcagctgtagaacaggaacgatgggatgaagattctttctatgggctctgggatacaaatgatgaacaaggactgaattcagaatttaagtcagaaactgcagcaattccatctgctccagtattaccacccccacctgttcactcttccattccccctcctggcccagtgcctatgggtatgccaccaatgtccaagccaccaccagtacaacagactgttgattatggccatggccgagatatatccactaataaagttgaacagataccttatggagaaagaataactctacgcccagatccactacctgaaagatcaacttttgagacagagcatgcaggccaacgtgatcgttatgatagagaaagagatcgtgagccttattttgatcgtcaaagtaatgtcatagcagatcatcgagattttaaaagggatcgtgagacacatagagatcgagaccgggatcgtggtgttattgactatgaccgggatcgatttgacagagaacgccgaccccgagatgatagagctcagtcatatcgagacaaaaaagaccattcctcatccagaagagggggttttgataggccatcctatgaccggaagtctgaccgaccagtctatgaaggaccatccatgtttggaggagaacgaaggacttatcctgaggagcgaatgcctctgccagctccttcactgagccaccagcctcctccagctccacgagtcgagaagaagcctgaatcaaagaatgtggacgatattttgaaaccaccgggccgggagagcagacctgagagaattgttgttataatgagaggattacctggcagtggaaagacacatgttgcaaaacttattcgagataaggaggtagaatttggaggacctgcacccagagttctaagcctggatgattacttcatcactgaagtggaaaaagaagaaaaagatccagattctggaaagaaagtgaaaaagaaggtaatggaatatgaatatgaagctgagatggaggagacttaccgcaccagcatgttcaaaactttcaaaaagactctggatgatggcttttttcccttcatcatcctggatgccatcaatgacagagttaggcattttgaccagttttggagtgcagcaaaaaccaagggatttgaggtatatttggctgaaatgagtgcagataaccagacttgtggcaagagaaatattcatggaagaaagcttaaagaaataaataagatggctgatcactgggaaactgcacctcgtcacatgatgcgtctagatattcgttctttgctgcaagatgctgctattgaagaggtagagatggaagattttgatgcaaatatcgaagaacagaaagaagaaaagaaagatgcagaggaagaggaaagcgaactgacaagttggatggcttgaggactggtactaaaaggaaacgtgactgggaggccattgccagcagaatggaggattatcttcagctccccgatgattatgatactcgtgcttctgagcctgggaagaagagggtcagatgggcagacctggaagagaagaaggatgcagataggaaaagggccataggttttgtggtcggacagactgattgggagaagatcacagatgaaagtggtcacctggctgaaaaagccctcaatcgaaccaaatatatatgagacttagtttttgaacggagtcattattcctctaaggtggttcgctttgaggtggtctgaagccaaggcctcgcggagcttctttgtgtgtcaccttgcttccacgtttcagttcttgttttgtttctactgctttagttttttttaaagttctccagtgtccccaagaggtattagaatcttgctgtacccaagcaagacgttaatttttcttttaactgttttggggagggagggagtgatagcttaactgctgaagccaggcgggggtctgctggaggattccaacagagagtatttcctccactgtacaatgtcacagactatctctatcatcattgctttgtggctgtttctgttttttactgtatgtaactggtagctgattgtactaggattaaaaacaataaactttcatgataaagccgatgagattcatgggctatacagca

SEQ ID NO: 200686 - DNA, 4424 bp, Homo sapiens
  Payload ID: 19607
  Gene Name: YLP motif containing 1
  ENST ID: ENST00000554107
  CDS Start-End: 1-331
gagaaatattcatggaagaaagcttaaagaaataaataagatggctgatcactgggaaactgcacctcgtcacatgatgcgtctagatattcgttctttgctgcaagatgctgctattgaagaggtagagatggaagattttgatgcaaatatcgaagaacagaaagaagaaaagaaagatgcagaggaagaggaaagcgaactggaaggatctgagtctctccctgcggagacagccctgaagaactcctgtaacgtcaagctggcaatttccaagaagcaatctggaacctgcatttccaaagagacccacaagaaagaaaagacgtgaggttgggaagcactggtgccagagccctcactagcgggtgctgcctgtttcttgggtagtgggctaggagcatccctgctctagtggcccctgattctgcaaccctaggactcctctgcttcctcatcagacacaaaccttgataagacagctccagtgagaaagccctgggagaaggtgaattaaggacacttcctttgtaggaggagctgatctcgctaatgggcgactttttaactaagcaggtcagaaaatcttactgaaagtaaatctgtggctcaaagagacttcggtattcttttccctagtactaactgtggaaaggagtgcccccaagcttctgactgtcatacctcattccactgccttttagggctgggtctgaagagcttacactcctgctttcagagctggttgacgggggtgctgttctagaatcctaacccagactggcaccatgaatgatgggttgccccactgccaagctccagacccagcttggcttggggcttgctgccactgcaggtcaaatgaccaccctatgtggaaagatgcagcagtgctgcctgtcccatactggccgtgaccccttgagcctcagaaagggagacatggacaattttccccacaggtagtcttagctttccaaacatactctgactcaccagtcaaccagtggatgaccacagttcttgtattttttggaggtatcaataaaccactctttgtgatcacagtcaagggagaagtcaagaagagggaagtgtaatctgtgaccagatatacccggcacctgcagaatcagatgccagcctaacagctgtcagctgtgcatgaggcaacatgcatctcttgattaggaatgtgcgccagtgacacctaggctcacctttcactgacgctttacctctgaggtgccaccagtgtgccttcatagggatccccgagggactgagcttgagtgttgtttattgttatttccagaaaggatttgaggtgacttgctatggaaggcccactgatacattttcaagggaaaatacagataagaatcaaatcatgaaaagcatagaaattgttgagaaaacctaggccaagactaggtgccacaactgagctcagcattcagtcctgagcctcctggcactaaggcaaaaaggtcaggaagttatgtaacttgataatgacagggtattcagtctaagatggtgtaacacctggcagccctctcactaagcttcagaatgaagactggctgttgactcagtttgctgcttccacctgttgcccaagtgaagatgttgaggctgtaatctttgtggatgatacagagattggcccaggctgccctggctctcagtaacttaaggagacacagaagagggatctttcctaaaactcgaatcatatagggaagacactcatcagatctcatgggaacccagtacatggtcttacctcaaagtcatttcccttgttgtagtgcatattgagagcttgaaaaagttctgaattgcggagaaccaccagcattttgggatttgtgacaccatctgaaattgcttgccgggcagatttttccatttggatgtaataaaactcacgaaagttgctgaaccacttgatcatctgggaggtaatgcagcggttgaactgtacaaacaagaggtccatccagtcagacatttgccacgaggtgctcagaattagaactgtctgcttccagctcagtataggggttcatatacggctttaaccagcattaacaggggcttcctttaaaaaaagaagcgaagccaccgctattttccaagcctatttagttatactcagaaaaatctaaattagctacagtgcccattagaacataacttttttttgatatgctagatttatgggggttgttttacccatgaaaagctttttgtggtgtttgagtgggacttaggggtcacgaccagtgtggtgccagattttgctgcacccaggtggactgcatggcaggcctggggccttccacttggataaagggccaagggaagggcaagatgtaggtcagggagcagtttattagcaactttgaattgtggaatgaattgaaatcaaaatcagaggttgcttcagggatcaaccaaccaactgaatatgagggaaagaaaagcttgaatgatgtagaccaaaagtattaacagcccctaacccaacacccaaagtaaaagaggccctcagaaaccttttatgggaacaggggaggtctggtcccaacaattagtttgattttccttattgtcacacttcatctgtatgtactttcactcagttttgaactatagcaatttgaacataaatttgacagtgtctgacactctgtctctctctccctctctatatatattttttgttgtttgtttgtttgtttttgtgtgtttttttttttttgagatgtagtctcgctttgtcgcccaggctggagtgcagtggcgtgatctctgttcactgcaacatccacctcctgggttcaagtgattctcctgcctcagcctccgagtagctgggattacaggcgcacgccaccacgccagctagtttttgtatttttagtagacatggggttttaccatgttggtcaggctggtctcgaactcctgacctcaggtcatctgcccacctcggcctcccaaagtgctgggattagaggcatgagccactgtgcctggcctatattttatttttcatagtgtccccagccaaggcagaaaactagccaaaaaggccactaactagtgtttctgtttccctctacttttcctgcccatgtgtttctgttttggggattatctacagctcagtagcttaagaatttagacagccagcctttctagcctaaagttattcacggttatttgggtagagtctcagcccagaactggacattgcttccatcagcaacactaaggggagcttgaagtgcacatatgatgacctaggacttgcctcacaccaggcaaaacacactgcctcttgggagttctgcagaagctgccatttagttgagtgactttacctgaacatcaggaaaataaaccttcaggaggttggagctgggatatcgtgtgaagaaaaacattagtttggccttcttcaagtgaccagggtttagaccctcctggatttatctcagtgtcaaggaaaatgaacactttaaaatgccagtttatcaattaactagtgaattccttgttcctgtggtttctatttgatttcattttgtttttctgattggaattgtgtatttgctccatttttctgtctctggaaactctggtcaaataagctggatgacatatgtgcacagttaagtcacagaatgtaaaaatcatctcgatgtggaaaagttatgtagcatagatgatgtcaaatacaggttggtgtattttgtgtgtgtgtgtgtgtgtgtgtgtgtgtgtggtgtcttagatgtcaaatacaggttggtgtattgtgtgtgtgtgtgtgtgtgtgtgtgtgtgtgtgtgtgtgtgtggtgtccaagtgggatgggaagagatggcaattctatcccagataaaccatttcaaaaccccaagcagagatttacttcccctctctgcctcagtttcctcagctgtaaaacgagaagagtaaactaggtggtccccattctggctgtcactcttatcattgccttcacagtgttgcctttataaccagcaaacatctaagcaggctgaataccagctcatattttgctcttgctcaagaagcttgaatggttgggtggtacccactctccatttgcctggcagaactatccctcatctttcaggtctcagctcagaagctcccacctctgttaaacccttccttgccaaattaggccttccttaccctgggctatgaagactctttgtacaaactgttgcagcgatgaccttattggaatttttactgtatgtttgtctcgtctagactgtgagctccttgagagtgaggaccttatcttttcatctttgtgcctagcccagtgctaggaacatagcaggtgctcaataaatatttgttgtgtgaagga

SEQ ID NO: 200687 - DNA, 3994 bp, Homo sapiens
  Payload ID: 19608
  Gene Name: YME1-like 1 ATPase
  Uniprot ID: Q96TA2
  ENST ID: ENST00000326799
  CDS Start-End: 150-2471
aggggaggccattttccgtttctgggaggagtgaggggcaacgggtcggagaaaaaggaaaaaagaagggctcagcgcctccccgccgggccgtggacagaggggcacagtttcggcaggcgggtgaggtcgctgagggcccgccggagatgttttccttgtcgagcacggtgcaaccccaggttacagttcctctgagtcatctcatcaatgccttccatacaccaaaaaacacttctgtttctctcagtggagtgtcagtttctcaaaaccagcatcgagatgtagttcctgagcatgaggctcccagcagtgagtgtatgttcagtgacttcctgacgaagcttaacattgtttcaattggcaaaggaaaaatattcgaagggtacagatccatgttcatggagccagcaaaaaggatgaagaagagcttggacacaaccgataactggcacatccgtccagaacccttctccctctcaatccctccttcacttaacttaagggaccttggattatctgaactaaaaattggacagattgatcagctggtagaaaatctacttcctggattttgtaaaggcaaaaacatttcttcccattggcatacatcccatgtctctgcacaatccttctttgaaaataaatatggtaacttagatatatttagtacattacgttcctcttgcttgtatcgacatcattcaagagctcttcaaagcatttgttcagatcttcagtactggccagttttcatacagtctcggggttttaaaactttgaaatcaaggacacgacgtctccagtctacctccgagagattagctgaaacacagaatatagcgccatcattcgtgaaggggtttcttttgcgggacagaggatcagatgttgagagtttggacaaactcatgaaaaccaaaaatatacctgaagctcaccaagatgcatttaaaactggttttgcggaaggttttctgaaagctcaagcactcacacaaaaaaccaatgattccctaaggcgaacccgtctgattctcttcgttctgctgctattcggcatttatggacttctaaaaaacccatttttatctgtccgcttccggacaacaacagggcttgattctgcagtagatcctgtccagatgaaaaatgtcacctttgaacatgttaaaggggtggaggaagctaaacaagaattacaggaagttgttgaattcttgaaaaatccacaaaaatttactattcttggaggtaaacttccaaaaggaattcttttagttggacccccagggactggaaagacacttcttgcccgagctgtggcgggagaagctgatgttcctttttattatgcttctggatccgaatttgatgagatgtttgtgggtgtgggagccagccgtatcagaaatctttttagggaagcaaaggcgaatgctccttgtgttatatttattgatgaattagattctgttggtgggaagagaattgaatctccaatgcatccatattcaaggcagaccataaatcaacttcttgctgaaatggatggttttaaacccaatgaaggagttatcataataggagccacaaacttcccagaggcattagataatgccttaatacgtcctggtcgttttgacatgcaagttacagttccaaggccagatgtaaaaggtcgaacagaaattttgaaatggtatctcaataaaataaagtttgatcaatccgttgatccagaaattatagctcgaggtactgttggcttttccggagcagagttggagaatcttgtgaaccaggctgcattaaaagcagctgttgatggaaaagaaatggttaccatgaaggagctggagttttccaaagacaaaattctaatggggcctgaaagaagaagtgtggaaattgataacaaaaacaaaaccatcacagcatatcatgaatctggtcatgccattattgcatattacacaaaagatgcaatgcctatcaacaaagctacaatcatgccacgggggccaacacttggacatgtgtccctgttacctgagaatgacagatggaatgaaactagagcccagctgcttgcacaaatggatgttagtatgggaggaagagtggcagaggagcttatatttggaaccgaccatattacaacaggtgcttccagtgattttgataatgccactaaaatagcaaagcggatggttaccaaatttggaatgagtgaaaagcttggagttatgacctacagtgatacagggaaactaagtccagaaacccaatctgccatcgaacaagaaataagaatccttctaagggactcatatgaacgagcaaaacatatcttgaaaactcatgcaaaggagcataagaatctcgcagaagctttattgacctatgagactttggatgccaaagagattcaaattgttcttgaggggaaaaagttggaagtgagatgataactctcttgatatggatgcttgctggttttattgcaagaatacaagtagcattgcagtagtctacttttacaacgctttcccctcattcttgatgtggtgtaattgaagggtgtgaaatgctttgtcaatcatttgtcacatttatccagtttgggttattctcattatgacacctattgcaaattagcatcccatggcaaatatattttgaaaaaataaagaactatcaggattgaaaacagctcttttgaggaatgtcaattagttattaagttgaaagtaattaatgattttatgtttggttactctactagatttgataaaaattgtgcctttagccttctatatacatcagtggaaacttaagatgcagtaattatgttccagattgaccatgaataaaatattttttaatctaaatgtagagaagttgggattaaaagcagtctcggaaacacagagccaggaatatagccttttggcatggtgccatggctcacatctgtaatcccagcacttttggaggctgaggcgggtggattgcttgaggccaggagttcgagaccagcctggccaacgtggtgaaacgctgtctctactaaaatacaaaaaaatagggctgggcgcggttgctcacgcctgtaatcccagcacttttcagaggccaaggcgggcaaatcacctgaggtcaagagtttgagaccagcctggccaacatggtgaaaccccatctctactaaacatgcaaaaattacctgggcatggtggcaggtgcttataatcccagctactctgggggccaaggcaggagaattgcttgagcctgggagatggaggttgcagtgagctgagatcatgccactgcactccagcctgggcaacagagcaagactctgcctcaaaaaaaaattaaaataaatttaaatacaaaaaaaaatagccaggtgtggggtgcatgcctggaatcccagctacttgagaggctgaggcacgagaattgcttgaacccaggaggtggaggttgcagtgagccaagatcacaggagccactgcactccagcctgggtgacagagtgagactctgtctcaaaaaaaaattaaataaattattataacctttcagaaatgctgtgtgcattttcatgttcttttttttagcattactgtcactctccctaatgaaatgtacttcagagaagcagtattttgttaaataaatacataacctcattctgaataatgtccctcattttgactataactgtgcttggtttcaaaagcaaaattaaacaaaaatctcagtcccctccgaagtgaactttgtgttaccctgcgtcagaaatgccaagttgtgtttacttttcattcagattttgtgaatatgaacatgctgttataggatctacagatgaatatttaactcaatagaaaaattattttagaacacattgtattggtattacaaccagattatattcttgacgttgacttcattaaaattatctacaatttcctaataa

SEQ ID NO: 200688 - DNA, 2517 bp, Homo sapiens
  Payload ID: 19608
  Gene Name: YME1-like 1 ATPase
  ENST ID: ENST00000375972
  CDS Start-End: 147-2369
ggaggccattttccgtttctgggaggagtgaggggcaacgggtcggagaaaaaggaaaaaagaagggctcagcgcctccccgccgggccgtggacagaggggcacagtttcggcaggcgggtgaggtcgctgagggcccgccggagatgttttccttgtcgagcacggtgcaaccccaggttacagttcctctgagtcatctcatcaatgccttccatacaccaaaaaacacttctgtttctctcagtggagtgtcagtttctcaaaaccagcatcgagatgtagttcctgagcatgaggctcccagcagtgagtgtatgttcagtgacttcctgacgaagcttaacattgtttcaattggcaaaggaaaaatattcgaagggtacagatccatgttcatggagccagcaaaaaggatgaagaagagcttggacacaaccgataactggcacatccgtccagaacccttctccctctcaatccctccttcacttaacttaagggaccttggattatctgaactaaaaattggacagattgatcagctggtagaaaatctacttcctggattttgtaaaggcaaaaacatttcttcccattggcatacatcccatgtctctgcacaatccttctttgaaaataaatatggtaacttagatatatttagtacattacgttcctcttgcttgtatcgacatcattcaagagctcttcaaagcatttgttcagatcttcagtactggccagttttcatacagtctcggggttttaaaactttgaaatcaaggacacgacgtctccagtctacctccgagagattagctgaaacacagaatatagcgccatcattcgtgaaggggtttcttttgcgggacagaggatcagatgttgagagtttggacaaactcatgaaaaccaaaaatatacctgaagctcaccaagatgcatttaaaactggttttgcggaaggttttctgaaagctcaagcactcacacaaaaaaccaatgattccctaaggcgaacccgtctgattctcttcgttctgctgctattcggcatttatggacttctaaaaaacccatttttatctgtccgcttccggacaacaacagggcttgattctgcagtagatcctgtccagatgaaaaatgtcacctttgaacatgttaaaggggtggaggaagctaaacaagaattacaggaagttgttgaattcttgaaaaatccacaaaaatttactattcttggaggtaaacttccaaaaggaattcttttagttggacccccagggactggaaagacacttcttgcccgagctgtggcgggagaagctgatgttcctttttattatgcttctggatccgaatttgatgagatgtttgtgggtgtgggagccagccgtatcagaaatctttttagggaagcaaaggcgaatgctccttgtgttatatttattgatgaattagattctgttggtgggaagagaattgaatctccaatgcatccatattcaaggcagaccataaatcaacttcttgctgaaatggatggttttaaacccaatgaaggagttatcataataggagccacaaacttcccagaggcattagataatgccttaatacgtcctggtcgttttgacatgcaagttacagttccaaggccagatgtaaaaggtcgaacagaaattttgaaatggtatctcaataaaataaagtttgatcaatccgttgatccagaaattatagctcgaggtactgttggcttttccggagcagagttggagaatcttgtgaaccaggctgcattaaaagcagctgttgatggaaaagaaatggttaccatgaaggagctggagttttccaaagacaaaattctaatggggcctgaaagaagaagtgtggaaattgataacaaaaacaaaaccatcacagcatatcatgaatctggtcatgccattattgcatattacacaaaagatgcaatgcctatcaacaaagctacaatcatgccacgggggccaacacttggacatgtgtccctgttacctgagaatgacagatggaatgaaactagagcccagctgcttgcacaaatggatgttagtatgggaggaagagtggcagaggagcttatatttggaaccgaccatattacaacaggtgcttccagtgattttgataatgccactaaaatagcaaagcggatggttaccaaatttggaatgagtgaaaagcttggagttatgacctacagtgatacagggaaactaagtccagaaacccaatctgccatcgaacaagaaataagaatccttctaagggactcatatgaacgagcaaaacatatcttgaaaactcattcttgatgtggtgtaattgaagggtgtgaaatgctttgtcaatcatttgtcacatttatccagtttgggttattctcattatgacacctattgcaaattagcatcccatggcaaatatattttgaaaaaataaagaactatcaggattgaaaac

SEQ ID NO: 200689 - DNA, 3856 bp, Homo sapiens
  Payload ID: 19608
  Gene Name: YME1-like 1 ATPase
  Uniprot ID: Q96TA2
  ENST ID: ENST00000376016
  CDS Start-End: 183-2333
ggcggattgtctgtcgttgcagtagctgtaggaaggggaggccattttccgtttctgggaggagtgaggggcaacgggtcggagaaaaaggaaaaaagaagggctcagcgcctccccgccgggccgtggacagaggggcacagtttcggcaggcgggtgaggtcgctgagggcccgccggagatgttttccttgtcgagcacggtgcaaccccaggttacagttcctctgagtcatctcatcaatgccttccatacaccaaaaaacacttctgtttctctcagtggagtgtcagtttctcaaaaccagcatcgagatgtagttcctgagcatgaggctcccagcagtgagccttcacttaacttaagggaccttggattatctgaactaaaaattggacagattgatcagctggtagaaaatctacttcctggattttgtaaaggcaaaaacatttcttcccattggcatacatcccatgtctctgcacaatccttctttgaaaataaatatggtaacttagatatatttagtacattacgttcctcttgcttgtatcgacatcattcaagagctcttcaaagcatttgttcagatcttcagtactggccagttttcatacagtctcggggttttaaaactttgaaatcaaggacacgacgtctccagtctacctccgagagattagctgaaacacagaatatagcgccatcattcgtgaaggggtttcttttgcgggacagaggatcagatgttgagagtttggacaaactcatgaaaaccaaaaatatacctgaagctcaccaagatgcatttaaaactggttttgcggaaggttttctgaaagctcaagcactcacacaaaaaaccaatgattccctaaggcgaacccgtctgattctcttcgttctgctgctattcggcatttatggacttctaaaaaacccatttttatctgtccgcttccggacaacaacagggcttgattctgcagtagatcctgtccagatgaaaaatgtcacctttgaacatgttaaaggggtggaggaagctaaacaagaattacaggaagttgttgaattcttgaaaaatccacaaaaatttactattcttggaggtaaacttccaaaaggaattcttttagttggacccccagggactggaaagacacttcttgcccgagctgtggcgggagaagctgatgttcctttttattatgcttctggatccgaatttgatgagatgtttgtgggtgtgggagccagccgtatcagaaatctttttagggaagcaaaggcgaatgctccttgtgttatatttattgatgaattagattctgttggtgggaagagaattgaatctccaatgcatccatattcaaggcagaccataaatcaacttcttgctgaaatggatggttttaaacccaatgaaggagttatcataataggagccacaaacttcccagaggcattagataatgccttaatacgtcctggtcgttttgacatgcaagttacagttccaaggccagatgtaaaaggtcgaacagaaattttgaaatggtatctcaataaaataaagtttgatcaatccgttgatccagaaattatagctcgaggtactgttggcttttccggagcagagttggagaatcttgtgaaccaggctgcattaaaagcagctgttgatggaaaagaaatggttaccatgaaggagctggagttttccaaagacaaaattctaatggggcctgaaagaagaagtgtggaaattgataacaaaaacaaaaccatcacagcatatcatgaatctggtcatgccattattgcatattacacaaaagatgcaatgcctatcaacaaagctacaatcatgccacgggggccaacacttggacatgtgtccctgttacctgagaatgacagatggaatgaaactagagcccagctgcttgcacaaatggatgttagtatgggaggaagagtggcagaggagcttatatttggaaccgaccatattacaacaggtgcttccagtgattttgataatgccactaaaatagcaaagcggatggttaccaaatttggaatgagtgaaaagcttggagttatgacctacagtgatacagggaaactaagtccagaaacccaatctgccatcgaacaagaaataagaatccttctaagggactcatatgaacgagcaaaacatatcttgaaaactcatgcaaaggagcataagaatctcgcagaagctttattgacctatgagactttggatgccaaagagattcaaattgttcttgaggggaaaaagttggaagtgagatgataactctcttgatatggatgcttgctggttttattgcaagaatacaagtagcattgcagtagtctacttttacaacgctttcccctcattcttgatgtggtgtaattgaagggtgtgaaatgctttgtcaatcatttgtcacatttatccagtttgggttattctcattatgacacctattgcaaattagcatcccatggcaaatatattttgaaaaaataaagaactatcaggattgaaaacagctcttttgaggaatgtcaattagttattaagttgaaagtaattaatgattttatgtttggttactctactagatttgataaaaattgtgcctttagccttctatatacatcagtggaaacttaagatgcagtaattatgttccagattgaccatgaataaaatattttttaatctaaatgtagagaagttgggattaaaagcagtctcggaaacacagagccaggaatatagccttttggcatggtgccatggctcacatctgtaatcccagcacttttggaggctgaggcgggtggattgcttgaggccaggagttcgagaccagcctggccaacgtggtgaaacgctgtctctactaaaatacaaaaaaatagggctgggcgcggttgctcacgcctgtaatcccagcacttttcagaggccaaggcgggcaaatcacctgaggtcaagagtttgagaccagcctggccaacatggtgaaaccccatctctactaaacatgcaaaaattacctgggcatggtggcaggtgcttataatcccagctactctgggggccaaggcaggagaattgcttgagcctgggagatggaggttgcagtgagctgagatcatgccactgcactccagcctgggcaacagagcaagactctgcctcaaaaaaaaattaaaataaatttaaatacaaaaaaaaatagccaggtgtggggtgcatgcctggaatcccagctacttgagaggctgaggcacgagaattgcttgaacccaggaggtggaggttgcagtgagccaagatcacaggagccactgcactccagcctgggtgacagagtgagactctgtctcaaaaaaaaattaaataaattattataacctttcagaaatgctgtgtgcattttcatgttcttttttttagcattactgtcactctccctaatgaaatgtacttcagagaagcagtattttgttaaataaatacataacctcattctgaataatgtccctcattttgactataactgtgcttggtttcaaaagcaaaattaaacaaaaatctcagtcccctccgaagtgaactttgtgttaccctgcgtcagaaatgccaagttgtgtttacttttcattcagattttgtgaatatgaacatgctgttataggatctacagatgaatatttaactcaatagaaaaattattttagaacacattgtattggtattacaaccagattatattcttgacgttgacttcattaaaattatctacaatttcctaataa

SEQ ID NO: 200690 - DNA, 986 bp, Homo sapiens
  Payload ID: 19608
  Gene Name: YME1-like 1 ATPase
  ENST ID: ENST00000396296
  CDS Start-End: 241-986
gtagctgtaggaaggggaggccattttccgtttctgggaggagtgaggggcaacgggtcggagaaaaaggaaaaaagaagggctcagcgcctccccgccgggccgtggacagaggggcacagtttcggcaggcgggtgaggtcgctgagggcccgccggagatgttttccttgtcgagcacggtgcaaccccagtactggctaacaaactgaagcagctgcttgttattgggcatcagttatgtaccaggttacagttcctctgagtcatctcatcaatgccttccatacaccaaaaaacacttctgtttctctcagtggagtgtcagtttctcaaaaccagcatcgagatgtagttcctgagcatgaggctcccagcagtgagccttcacttaacttaagggaccttggattatctgaactaaaaattggacagattgatcagctggtagaaaatctacttcctggattttgtaaaggcaaaaacatttcttcccattggcatacatcccatgtctctgcacaatccttctttgaaaataaatatggtaacttagatatatttagtacattacgttcctcttgcttgtatcgacatcattcaagagctcttcaaagcatttgttcagatcttcagtactggccagttttcatacagtctcggggttttaaaactttgaaatcaaggacacgacgtctccagtctacctccgagagattagctgaaacacagaatatagcgccatcattcgtgaaggggtttcttttgcgggacagaggatcagatgttgagagtttggacaaactcatgaaaaccaaaaatatacctgaagctcaccaagatgcatttaaaactggttttgcggaaggttttctgaaagctcaagcactcacacaaaaaaccaatgattccctaaggcgaacccgtctgattctcttcgttctgctgctattcggcatttatggacttctaaaaaacccattttt

SEQ ID NO: 200691 - DNA, 775 bp, Homo sapiens
  Payload ID: 19608
  Gene Name: YME1-like 1 ATPase
  ENST ID: ENST00000427324
  CDS Start-End: 17-775
tgagggcccgccggagatgttttccttgtcgagcacggtgcaaccccaggttacagttcctctgagtcatctcatcaatgccttccatacaccaaaaaacacttctgtttctctcagtggagtgtcagtttctcaaaaccagcatcgagatgtagttcctgagcatgaggctcccagcagtgagccttcacttaacttaagggaccttggattatctgaactaaaaattggacagattgatcagctggtagaaaatctacttcctggattttgtaaaggcaaaaacatttcttcccattggcatacatcccatgtctctgcacaatccttctttgaaaataaatatgttttcatacagtctcggggttttaaaactttgaaatcaaggacacgacgtctccagtctacctccgagagattagctgaaacacagaatatagcgccatcattcgtgaaggggtttcttttgcgggacagaggatcagatgttgagagtttggacaaactcatgaaaaccaaaaatatacctgaagctcaccaagatgcatttaaaactggttttgcggaaggttttctgaaagctcaagcactcacacaaaaaaccaatgattccctaaggcgaacccgtctgattctcttcgttctgctgctattcggcatttatggacttctaaaaaacccatttttatctgtccgcttccggacaacaacagggcttgattctgcagtagatcctgtccagatgaaaaatgtcacctttgaacatgttaaaggg

SEQ ID NO: 200692 - DNA, 3474 bp, Homo sapiens
  Payload ID: 19608
  Gene Name: YME1-like 1 ATPase
  ENST ID: ENST00000477432
  CDS Start-End: 1057-1467
ggagggggcgtcgggaaagccccgacttcgcagccttacactcttcgtgggcggcgaccgcggccccactgacatcattcctcatgagggaggaggcacaaacagttctgggccgaccagaaaaaggacgactgggacttgactctgaatcgcaggatttgaagagatttctcctggcttcccaacgaggctggtgggaagcggtcctcctcccatacacgacctcccaccctcgcgaggcgtagaaaccagttctgactgtacagtaaagcgagggccagggctgaggtctggaagctaatgaaagcacagaaagtgtcgaaactggatgagcaggaagcgagtggcctcccctgtcatctgacgttttcccaggatgtaatttgcctgactgaaacagatcaggaccaacagggagagttttcgatttagtgtgaggaaaagagcactaaattgtagcaaaagaccttattgctcaaggcccagtcagaagatttcataaggaagctgtagaaagtcttaagaggaaatcagccgggcgtggtggcgggcacctgtaatcccagctactcgggaggctgaggcaggagaatcgcttgaacccggggagcagaggttgcagtgagccgagatcgcgccactgtacgccagcctgggcgaaagaacgaaactccgtctccaaaaaaaaaaaaaacgaagaaaaagtccaaagagggtaaaggctgttctccccttaaaaaacagctaaagacctttgggggcgctgctccttgtaaatgtcaactacttccgcgggaaagaacgcgcaggcacttggccttgtgggcgctcacttgccccggaagtactgttgagttagcgcctcgccttccggggcggattgtctgtcgttgcagtagctgtaggaaggggaggccattttccgtttctgggaggagtgaggggcaacgggtcggagaaaaaggaaaaaagaagggctcagcgcctccccgccgggccgtggacagaggggcacagtttcggcaggcgggtgaggtcgctgagggcccgccggagatgttttccttgtcgagcacggtgcaaccccaggttacagttcctctgagtcatctcatcaatgccttccatacaccaaaaaacacttctgtttctctcagtggagtgtcagtttctcaaaaccagcatcgagatgtagttcctgagcatgaggctcccagcagtgagtgtatgttcagtgacttcctgacgaagcttaacattgtttcaattggcaaaggaaaaatattcgaagggtacagatccatgttcatggagccagcaaaaaggatgaagaagagcttggacacaaccgataactggcacatccgtccagaacccttctccctctcaatccctgtacactgcgggtttctccaaatgcctattgtctatgatttgttttgtccatcgttcttagtcacggcttagttcaggttcttgccatctttcacttgttccatcagccttctctctcatccagtctagtttctttgtttgtttgttttatcatttttaaattttttgtaaagacagggtcttgctttcttcaccaggctgatctcgaactcctggcctgaagcagtcctcccacctcagcctctcaaaagtgttgggattacaggctcgagccaccatgctaggccagtctatcttccttagttctccattttcttctataagacagaactaatcatgttacttagagaattaaattcaaacatggctcttcacagtttggccataacctatctctttaattttttctttccttgaattttttgagatattccagacccttggatggctttttgtttgcccccgtccctaagccgccttgatcatttttaatagcttaaaaagtacttttaagtattttatttcatcatgcctttaactgtcttttactatgtgctgtcatgttgtatgctaggatacgtagatgagtaaggcatgatctctgcctttgatccttactattaggaaataaggtgtattttatagttatgttagtattgagaaaatgaattctaagaatatgagttatagctaatttaaaaagtaccgtattcccagacatcagtccagagctatataatccgtgtccatgcctcttttaaaaaaaactttatttttagagacagggtctcccctttgtagcccaggctgaagtgcagtgatgctgtcatagctcactgcaacctccagctcctgggctcaaacatttctcctgagtagctggtgctgcgggtgcataccaccatgcccagctaatttttaaatttttcatcaagatgatgtcttaccatgttgctcaggctggtctcaaactcctggcctcaaacgatcttcccaccttagctgttttgggtttgagtaacatgtaattgttacttgcctttaagtgcctctctttcagctcatgtggacaagaaaataatccctatcctgttgtttaaaagtgggtatacacacatttttgtgatttttagacttttttgcctgattttcacacagttttgactttaattttcttctttattagaagatatgggtaactttagaacctctgagttcaaggaaggatctaagcaatgaggccagaggagtgagatgtcctatggtaaccaagcataccatttctttgtcaagtgggcttttgtttatggctgcttaggggcttaaaagctccatggactggtgaggattatcatttgaatggaatttccccaattcaagaaccttactattatcctccaatcagttctacactgttggggaaaatcccctggaccttatataacatactttgtaaccctgcagttagttactcttacactcttgtcattataaatgcttgatcaatagttgatagactagctcttgatcagagtacccttgtatggagagaaggaaaaaatgccatacatttcacttgattctgtgaaccataatgcttaggacagtagtggtttgggtttgatttaaaaaaaaaaaaagtttttctcattcatgctgaaatgtcatctctttatttaaggataccattaggaatataattttttaacctatgtcaaacctcatatgactgatctcagtaaaacgaactgtgaaaatatttgcatcaatttatttttaaatattaaaaaaaggaaatatatttgttagacttttaaaatctgattgttttaactgataatatgtactccttaggttaaatatcttgataatattaatgcatacctggttgacccaatcttttacagccttcacttaacttaagggaccttggattatctgaactaaaaattggacagattgatcagctggtagaaaatctacttcctggattttgtaaaggcaaaaacatttcttcccattggcatacatcccatgtctctgcacaatccttctttgaaaataaatatggtatgttaa

SEQ ID NO: 200693 - DNA, 912 bp, Homo sapiens
  Payload ID: 19608
  Gene Name: YME1-like 1 ATPase
  ENST ID: ENST00000491542
  CDS Start-End: 183-912
ggcggattgtctgtcgttgcagtagctgtaggaaggggaggccattttccgtttctgggaggagtgaggggcaacgggtcggagaaaaaggaaaaaagaagggctcagcgcctccccgccgggccgtggacagaggggcacagtttcggcaggcgggtgaggtcgctgagggcccgccggagatgttttccttgtcgagcacggtgcaaccccaggttacagttcctctgagtcatctcatcaatgccttccatacaccaaaaaacacttctgtttctctcagtggagtgtcagtttctcaaaaccagcatcgagatgtagttcctgagcatgaggctcccagcagtgaggggtttcttttgcgggacagaggatcagatgttgagagtttggacaaactcatgaaaaccaaaaatatacctgaagctcaccaagatgcatttaaaactggttttgcggaaggttttctgaaagctcaagcactcacacaaaaaaccaatgattccctaaggcgaacccgtctgattctcttcgttctgctgctattcggcatttatggacttctaaaaaacccatttttatctgtccgcttccggacaacaacagggcttgattctgcagtagatcctgtccagatgaaaaatgtcacctttgaacatgttaaaggggtggaggaagctaaacaagaattacaggaagttgttgaattcttgaaaaatccacaaaaatttactattcttggaggtaaacttccaaaaggaattcttttagttggacccccagggactggaaagacacttcttgcccgagctgtggcgggagaagctgatgttcctttttattatgcttctggatccgaatttgatgagatgtttgtgggtgtgggagccagccgtatcagaaatcttttta

SEQ ID NO: 200694 - DNA, 4127 bp, Homo sapiens
  Payload ID: 19608
  Gene Name: YME1-like 1 ATPase
  Uniprot ID: Q96TA2
  ENST ID: ENST00000613434
  CDS Start-End: 211-2262
actgttgagttagcgcctcgccttccggggcggattgtctgtcgttgcagtagctgtaggaaggggaggccattttccgtttctgggaggagtgaggggcaacgggtcggagaaaaaggaaaaaagaagggctcagcgcctccccgccgggccgtggacagaggggcacagtttcggcaggcgggtgaggtcgctgagggcccgccggagatgttttccttgtcgagcacggtgcaaccccaggttacagttcctctgagtcatctcatcaatgccttccatacaccaaaaaacacttctgtttctctcagtggagtgtcagtttctcaaaaccagcatcgagatgtagttcctgagcatgaggctcccagcagtgagccttcacttaacttaagggaccttggattatctgaactaaaaattggacagattgatcagctggtagaaaatctacttcctggattttgtaaaggcaaaaacatttcttcccattggcatacatcccatgtctctgcacaatccttctttgaaaataaatatgttttcatacagtctcggggttttaaaactttgaaatcaaggacacgacgtctccagtctacctccgagagattagctgaaacacagaatatagcgccatcattcgtgaaggggtttcttttgcgggacagaggatcagatgttgagagtttggacaaactcatgaaaaccaaaaatatacctgaagctcaccaagatgcatttaaaactggttttgcggaaggttttctgaaagctcaagcactcacacaaaaaaccaatgattccctaaggcgaacccgtctgattctcttcgttctgctgctattcggcatttatggacttctaaaaaacccatttttatctgtccgcttccggacaacaacagggcttgattctgcagtagatcctgtccagatgaaaaatgtcacctttgaacatgttaaaggggtggaggaagctaaacaagaattacaggaagttgttgaattcttgaaaaatccacaaaaatttactattcttggaggtaaacttccaaaaggaattcttttagttggacccccagggactggaaagacacttcttgcccgagctgtggcgggagaagctgatgttcctttttattatgcttctggatccgaatttgatgagatgtttgtgggtgtgggagccagccgtatcagaaatctttttagggaagcaaaggcgaatgctccttgtgttatatttattgatgaattagattctgttggtgggaagagaattgaatctccaatgcatccatattcaaggcagaccataaatcaacttcttgctgaaatggatggttttaaacccaatgaaggagttatcataataggagccacaaacttcccagaggcattagataatgccttaatacgtcctggtcgttttgacatgcaagttacagttccaaggccagatgtaaaaggtcgaacagaaattttgaaatggtatctcaataaaataaagtttgatcaatccgttgatccagaaattatagctcgaggtactgttggcttttccggagcagagttggagaatcttgtgaaccaggctgcattaaaagcagctgttgatggaaaagaaatggttaccatgaaggagctggagttttccaaagacaaaattctaatggggcctgaaagaagaagtgtggaaattgataacaaaaacaaaaccatcacagcatatcatgaatctggtcatgccattattgcatattacacaaaagatgcaatgcctatcaacaaagctacaatcatgccacgggggccaacacttggacatgtgtccctgttacctgagaatgacagatggaatgaaactagagcccagctgcttgcacaaatggatgttagtatgggaggaagagtggcagaggagcttatatttggaaccgaccatattacaacaggtgcttccagtgattttgataatgccactaaaatagcaaagcggatggttaccaaatttggaatgagtgaaaagcttggagttatgacctacagtgatacagggaaactaagtccagaaacccaatctgccatcgaacaagaaataagaatccttctaagggactcatatgaacgagcaaaacatatcttgaaaactcatgcaaaggagcataagaatctcgcagaagctttattgacctatgagactttggatgccaaagagattcaaattgttcttgaggggaaaaagttggaagtgagatgataactctcttgatatggatgcttgctggttttattgcaagaatacaagtagcattgcagtagtctacttttacaacgctttcccctcattcttgatgtggtgtaattgaagggtgtgaaatgctttgtcaatcatttgtcacatttatccagtttgggttattctcattatgacacctattgcaaattagcatcccatggcaaatatattttgaaaaaataaagaactatcaggattgaaaacagctcttttgaggaatgtcaattagttattaagttgaaagtaattaatgattttatgtttggttactctactagatttgataaaaattgtgcctttagccttctatatacatcagtggaaacttaagatgcagtaattatgttccagattgaccatgaataaaatattttttaatctaaatgtagagaagttgggattaaaagcagtctcggaaacacagagccaggaatatagccttttggcatggtgccatggctcacatctgtaatcccagcacttttggaggctgaggcgggtggattgcttgaggccaggagttcgagaccagcctggccaacgtggtgaaacgctgtctctactaaaatacaaaaaaatagggctgggcgcggttgctcacgcctgtaatcccagcacttttcagaggccaaggcgggcaaatcacctgaggtcaagagtttgagaccagcctggccaacatggtgaaaccccatctctactaaacatgcaaaaattacctgggcatggtggcaggtgcttataatcccagctactctgggggccaaggcaggagaattgcttgagcctgggagatggaggttgcagtgagctgagatcatgccactgcactccagcctgggcaacagagcaagactctgcctcaaaaaaaaattaaaataaatttaaatacaaaaaaaaatagccaggtgtggggtgcatgcctggaatcccagctacttgagaggctgaggcacgagaattgcttgaacccaggaggtggaggttgcagtgagccaagatcacaggagccactgcactccagcctgggtgacagagtgagactctgtctcaaaaaaaaattaaataaattattataacctttcagaaatgctgtgtgcattttcatgttcttttttttagcattactgtcactctccctaatgaaatgtacttcagagaagcagtattttgttaaataaatacataacctcattctgaataatgtccctcattttgactataactgtgcttggtttcaaaagcaaaattaaacaaaaatctcagtcccctccgaagtgaactttgtgttaccctgcgtcagaaatgccaagttgtgtttacttttcattcagattttgtgaatatgaacatgctgttataggatctacagatgaatatttaactcaatagaaaaattattttagaacacattgtattggtattacaaccagattatattcttgacgttgacttcattaaaattatctacaatttcctaataatttaagctgtatatggtcttcattgaaaaaagatagatattgttacaggaagcttgttacattatattcttgaccttttggttgataatcttaaatcttaatgtaatttcaaactggcagaaatgttgccagcataatacatggatgtctcatataccctgcatccagatttaccagttgttatcattctgcccgttttttattgccccaaacctgttctgtctccctctctgtatgtacatacatacacgtataaaatattgataaagtcttatctgtcttaaatttttttacatatttgttgaggtataatttacatatgataaaattcattttaaatgt

SEQ ID NO: 200695 - DNA, 6265 bp, Homo sapiens
  Payload ID: 19609
  Gene Name: YOD1 deubiquitinase
  Uniprot ID: Q5VVQ6
  ENST ID: ENST00000315927
  CDS Start-End: 48-1094
ccgcaccgaagcgtcgcgataactgcaaccacccgcaacttctcgcgatgtttggccccgctaaaggtcgccattttggagtccacccggcgcctggtttccccggcggcgtctcccaacaggctgccgggaccaaagctggccccgcgggtgcctggcctgtgggcagccggaccgacacgatgtggcggctccgctgcaaggccaaggacggcacccatgttttgcaggggctgtccagccggacccgggtgcgggaactccagggccaaattgccgccatcaccgggatcgcccccggcggtcagcgaatcctcgtcggataccctcccgagtgcctggatctcagcaatggggataccattctggaagacttgcccatccaatctggtgacatgctgatcattgaagaagaccaaaccaggcccagaagttcacctgcatttactaaacgtggtgcttctagttacgtcagggaaactttgcctgtgcttaccagaaccgtggtcccagcagacaactcttgcctctttactagtgtgtactatgtcgtcgaaggaggagtcttgaatccagcttgtgcccctgagatgagacgcctcatagcacaaattgtagcaagcgatccagacttctatagtgaggcaatactgggaaaaacaaatcaagagtactgtgactggatcaaaagggatgacacttggggaggagcaatagagatatcgattttgtccaagttttaccaatgtgaaatatgtgtagtggatacacagacagtaagaattgatcgttttggggaagatgcaggatataccaaaagggttctgcttatttatgatggcatccactatgatccacttcagcgtaacttccctgatccagatacacctcctctgaccattttctcctctaatgatgatattgttcttgtacaagcactggaattagcagatgaagctagaagaaggagacagtttactgatgtcaaccgcttcaccctgagatgcatggtatgtcagaaaggattaactggacaagcagaagcaagggaacatgccaaggagacaggccataccaactttggagaagtgtgacctatgcatgaatgagggttgaagcctactacctcacacatccagaaggctctgggttttccaataagctatggtaaccctaaagaacaaaggatacaatgcttgaaccatccttttaacttaaaaccactaagacactgaaattccttgttaagattaaaattagtgtgcaagtttacagatgtgtgtctacagtggtaaactgtacatacatgcctctttctgctggagtgacagaataggtgatccttgccacctactgacactgacctgaaggttgagattgagtattataaactagcacccagcagctttaacttgtagaagaaagcatcacattttgggtaatgtggaaggcctcctgtgagtccactgggcatacgattgagattgagtattataaactagcacccagcagctttaacttgtagaagaaagcatcacattttgggtaatgtggaaggcctcctgtgagtccactggacatttaccacagtgtctccagtaactgagtctttttaaaaactctgaatgagttaagtttctaaattatgaattgattcatcaaatgaagatactcagaattgtccaaactgattttatattgcaatttggtagacattataaatgtgtgcttaaccactgataagtacatcacaagcaatttttacagggatgagtctcatccttgagaatgttatcacaaaacaggaactgattgtgccctgtttaagatctctagcatataaaacgtagaatgtatgagggaataggtgcctgagcagcttcctgaagctttaaaagaccgttggcctcgtgttttaatgcaattcatgtattggtctttgtcacattggataacattttaaagttaagcagggtacttttttaattgaaattccttgaaattcgagtcctcagttttttcttcatttgcgtaaagtttatcggggggaatttaattttctcagctttttgttaagagcacttcctccaaaaaatttttttcaagtaataatgctctgctttgggttggtttttgtaagattttttgcacacctaaagagtgtttgcttttgtgctagccttatccctccactaaagttattttaaataatttcacatttctgcaaattagcactttgcttatctgcaatcttttactttgatttttgaagttttaaagcaattggagtaatactgttgaatgaactagtttcacttccaaaatagaaaaaattgtaaatccttgccttatgcagctttctcagaattctgcttcttcctagtactagatgtgtagccatttgcttagtggactaatccgcaaggcacaccctctaaaacttagcttcactacaagatcttccagataaaagttttctacctcttttcttaattattctgatcagggatgctaaattataatttgttatgtattatctcacataatgtgaagaggcttaatgtgaagttttgttattttggtctcttttttattaagtatctcacttagaaattcagtggtatactttaaagcacttggatctttttcagcatatctgcctagcaaatgttttaaaattgacatttatttttagcactttcacttggtgaaggtggccatataaaattaaggaacatttgaacaatataagagaaaagaacttttaaggaacaattcacaaagtttgtttgaaattgtcagatgacatttcttgagtaccttttgtgtgcatagttattttagacaatataagctgttatggtcagcataacttaaaagtgtttagttttctattttactgagccttaaaaatagcactgatgagcttatgatacttaatgtttggcaatcataatgtgttcaaattaatgggattgaaaatctctccacacctgactctcatctgatctggatggttttggttttgtatcttttttacttctcccagaaaatactaaatttaaaactgtaaattaagaatataccactagataacaattatcaaattgagctttatgcatcattactcagaaagcttgccttcctttctttgctacttcaggacacagagttgacatttgcttactacagctttagatctagaagtttattcgtgcaacaaatatttattgagtaatttatactgtgccaggcatgttttgatatgtttctgtcatatgttttgatatgttccaacataagtttctgtcactttatattcagtatatattttctacagtgggtaaatttaacaaatggaaaggaatagaacactgatattttacagaattaaaccccttcattgtaagggctttgtttacatattaagtgtcaagtatttattcaggggatcttatttcattgtattttatctgttatctaggttgtccatttaccggttggacactgatactctgtcaaattcctttcaaaaatgactctttagtctgctgaaatttagcactagtactttagtgttctgatcctggaaaattcaaggtgaagctttatttgtggaccatctgatttaattattgaggattaaaaacctaaacctttgctcattctaaactcaagcttttaagcctcacagaatttacaggggtttgctttttgtttgtttgttttttcattttttactgtgcttattaaactcttggaattagttattaaagggagtaaattctcatcttgggaattttgaaaatctatggacttacaactttcaggaggattaaatgtcttaagttttgtactagagcagaatgaaatctttcctattcattgagtttttgcctgccatagaggaatttttttaaaaattaaaatgacagtttatattagtggcaaagtgaataaagacctcactttcccaccccacccttcttcctttctcttacttttctttggattaaaggtcaggtgtagtactatgaagattcactcctgaataaagtgatttcagaagctaaaatttaacatacctggaaattttgtgatgtgttagccaagtgaagacattagtgtgttccatcttttgctaatggttcatggttgatttcttcattgtttcccatgaaattagcatagtcaagtggtacccttgacgcttgactgctggtcagtttgaccctgtttttaacaactaatgtagtcatgccgcttgattattccatgaagtcccagcaaaataataatgaggaattaactaacattatgttatctatctaatttgtctgtgtccctaaatgcccatgcctaacttgcttctctagtttattccttctgtggagggattaaaacgtgggtgttgcaagttgccctaagctaaacatagttttcttacatctttttgggaaaaaaaatggaatgggaagtatgcaagattaagcaagagtgatttttttttttttttgacaaatcaggtggccttcctaaacatactaagaattatgttctttcatgtgtggagacacatttgtttgcagcactttaaaaaatatatatggaataaaagtttacatgttggccctctagggatctaattaaggacattaaagtacaattcttgagctactaaccatcagctcttcttaatcaaagattgccatcagtgtagagtgtatctattggcacaacattctggtgttttgataacagtagaactcaatttcagtaactattaggagcatggtctgtgccctagcattaaaaatgttacttattattatgtgaatatcttgtattattatacaatgcagtattcaaatttgtccttgtagtgcagagatgactgataatttctaaaagattcgatccttaaaacttgtttccaagcagacttataaggaagctgatttttgagtcagaggccttaaacgtgtcatatacaagtggcatcattttaagtccaaagtgaaacacttgatttgaataagctagtttataaactaaagctgttttcttatgttacagtatttcagcacatttcattccacataaaaagaatattaagtgtccctggttgtgggagagtgtttatttttctcaaaattatctagcattttgcttacagtgctttgaatgtttgacttaaaattattattgatgttgaattgtagggtgctgatttaggtcttgattcatacacatttaaaggaggttggtaaccccctcatggtagagtgaagggagaaaagggccaagaagacaaagtaccactgataaagaagagattgtcaaatagatgcattcctagtcatgaattacccttttccaaacatttttaaagcaatgcctttgtgtcaactcaacccttcttccccatttcttgtcatagaatgtagcatggccataggtgaaaaagcttatcattaaagtatgaaaccatgaattataagcattttgccatgatgcccttttatacatatgtttttaaaagtactaaccaacatataggagtttaggaatggtgaagatataatttgattaagttgtaggtaaacagaaaggatcatcttaggctcagaatttctaatatgattacatgagtctactttataaactggtataggctatgtaattagcccgtaagttacttaaaggaccaggggacctaatttttgtcagttttccagtcacattggtgccattcaggactccagctgtttacaggaaatatgtacttagcagaatagtatttttccttgaaaaaaatttgaattcagcctaaatacagaatgaatatgaatagtttgtgaaaagggttagagaacaacaatattcctatagtttctgtattaatgcagtagagacagaggttcctaacgcaaaaagaaaaccacaagtaaagaccgtcaaattagagctttagaatatgacttgaaaaagtagggatgggcaaaacagcataagaaaatattttttcttaatgcagatggacagtgttttcttgttttaaaaatgttttgcctatttgccagcattttttgaagtaatacactgctgctacctggaagatgtctaacttcattttctacaactcttatgtgattttgccattgtcattaagatgcattgattttatttatgaggtgtatgactttaaatatctaaatgctgtattaagtgacttgtttcaaaggaataaatgaagtgaaaacgt

SEQ ID NO: 200696 - DNA, 6291 bp, Homo sapiens
  Payload ID: 19609
  Gene Name: YOD1 deubiquitinase
  Uniprot ID: Q5VVQ6
  ENST ID: ENST00000367084
  CDS Start-End: 206-1120
agactattcggtaggcgtcttgagagcgggtgtgccgggtgacgagaaaatgctgcaaagattaacgctctcattcctgaatcccagcagaacctcattagatccataaatgggaacgctgtatcatccgttgcagtcgtcttgaagaaccaaggaggaaaattgcaccagcaaaaaaaaattgagtcatgaaagatgtgaaaagatggaaacattacatataatttattcagaagcaaagtcttttacagtggaggggctgtccagccggacccgggtgcgggaactccagggccaaattgccgccatcaccgggatcgcccccggcggtcagcgaatcctcgtcggataccctcccgagtgcctggatctcagcaatggggataccattctggaagacttgcccatccaatctggtgacatgctgatcattgaagaagaccaaaccaggcccagaagttcacctgcatttactaaacgtggtgcttctagttacgtcagggaaactttgcctgtgcttaccagaaccgtggtcccagcagacaactcttgcctctttactagtgtgtactatgtcgtcgaaggaggagtcttgaatccagcttgtgcccctgagatgagacgcctcatagcacaaattgtagcaagcgatccagacttctatagtgaggcaatactgggaaaaacaaatcaagagtactgtgactggatcaaaagggatgacacttggggaggagcaatagagatatcgattttgtccaagttttaccaatgtgaaatatgtgtagtggatacacagacagtaagaattgatcgttttggggaagatgcaggatataccaaaagggttctgcttatttatgatggcatccactatgatccacttcagcgtaacttccctgatccagatacacctcctctgaccattttctcctctaatgatgatattgttcttgtacaagcactggaattagcagatgaagctagaagaaggagacagtttactgatgtcaaccgcttcaccctgagatgcatggtatgtcagaaaggattaactggacaagcagaagcaagggaacatgccaaggagacaggccataccaactttggagaagtgtgacctatgcatgaatgagggttgaagcctactacctcacacatccagaaggctctgggttttccaataagctatggtaaccctaaagaacaaaggatacaatgcttgaaccatccttttaacttaaaaccactaagacactgaaattccttgttaagattaaaattagtgtgcaagtttacagatgtgtgtctacagtggtaaactgtacatacatgcctctttctgctggagtgacagaataggtgatccttgccacctactgacactgacctgaaggttgagattgagtattataaactagcacccagcagctttaacttgtagaagaaagcatcacattttgggtaatgtggaaggcctcctgtgagtccactgggcatacgattgagattgagtattataaactagcacccagcagctttaacttgtagaagaaagcatcacattttgggtaatgtggaaggcctcctgtgagtccactggacatttaccacagtgtctccagtaactgagtctttttaaaaactctgaatgagttaagtttctaaattatgaattgattcatcaaatgaagatactcagaattgtccaaactgattttatattgcaatttggtagacattataaatgtgtgcttaaccactgataagtacatcacaagcaatttttacagggatgagtctcatccttgagaatgttatcacaaaacaggaactgattgtgccctgtttaagatctctagcatataaaacgtagaatgtatgagggaataggtgcctgagcagcttcctgaagctttaaaagaccgttggcctcgtgttttaatgcaattcatgtattggtctttgtcacattggataacattttaaagttaagcagggtacttttttaattgaaattccttgaaattcgagtcctcagttttttcttcatttgcgtaaagtttatcggggggaatttaattttctcagctttttgttaagagcacttcctccaaaaaatttttttcaagtaataatgctctgctttgggttggtttttgtaagattttttgcacacctaaagagtgtttgcttttgtgctagccttatccctccactaaagttattttaaataatttcacatttctgcaaattagcactttgcttatctgcaatcttttactttgatttttgaagttttaaagcaattggagtaatactgttgaatgaactagtttcacttccaaaatagaaaaaattgtaaatccttgccttatgcagctttctcagaattctgcttcttcctagtactagatgtgtagccatttgcttagtggactaatccgcaaggcacaccctctaaaacttagcttcactacaagatcttccagataaaagttttctacctcttttcttaattattctgatcagggatgctaaattataatttgttatgtattatctcacataatgtgaagaggcttaatgtgaagttttgttattttggtctcttttttattaagtatctcacttagaaattcagtggtatactttaaagcacttggatctttttcagcatatctgcctagcaaatgttttaaaattgacatttatttttagcactttcacttggtgaaggtggccatataaaattaaggaacatttgaacaatataagagaaaagaacttttaaggaacaattcacaaagtttgtttgaaattgtcagatgacatttcttgagtaccttttgtgtgcatagttattttagacaatataagctgttatggtcagcataacttaaaagtgtttagttttctattttactgagccttaaaaatagcactgatgagcttatgatacttaatgtttggcaatcataatgtgttcaaattaatgggattgaaaatctctccacacctgactctcatctgatctggatggttttggttttgtatcttttttacttctcccagaaaatactaaatttaaaactgtaaattaagaatataccactagataacaattatcaaattgagctttatgcatcattactcagaaagcttgccttcctttctttgctacttcaggacacagagttgacatttgcttactacagctttagatctagaagtttattcgtgcaacaaatatttattgagtaatttatactgtgccaggcatgttttgatatgtttctgtcatatgttttgatatgttccaacataagtttctgtcactttatattcagtatatattttctacagtgggtaaatttaacaaatggaaaggaatagaacactgatattttacagaattaaaccccttcattgtaagggctttgtttacatattaagtgtcaagtatttattcaggggatcttatttcattgtattttatctgttatctaggttgtccatttaccggttggacactgatactctgtcaaattcctttcaaaaatgactctttagtctgctgaaatttagcactagtactttagtgttctgatcctggaaaattcaaggtgaagctttatttgtggaccatctgatttaattattgaggattaaaaacctaaacctttgctcattctaaactcaagcttttaagcctcacagaatttacaggggtttgctttttgtttgtttgttttttcattttttactgtgcttattaaactcttggaattagttattaaagggagtaaattctcatcttgggaattttgaaaatctatggacttacaactttcaggaggattaaatgtcttaagttttgtactagagcagaatgaaatctttcctattcattgagtttttgcctgccatagaggaatttttttaaaaattaaaatgacagtttatattagtggcaaagtgaataaagacctcactttcccaccccacccttcttcctttctcttacttttctttggattaaaggtcaggtgtagtactatgaagattcactcctgaataaagtgatttcagaagctaaaatttaacatacctggaaattttgtgatgtgttagccaagtgaagacattagtgtgttccatcttttgctaatggttcatggttgatttcttcattgtttcccatgaaattagcatagtcaagtggtacccttgacgcttgactgctggtcagtttgaccctgtttttaacaactaatgtagtcatgccgcttgattattccatgaagtcccagcaaaataataatgaggaattaactaacattatgttatctatctaatttgtctgtgtccctaaatgcccatgcctaacttgcttctctagtttattccttctgtggagggattaaaacgtgggtgttgcaagttgccctaagctaaacatagttttcttacatctttttgggaaaaaaaatggaatgggaagtatgcaagattaagcaagagtgatttttttttttttttgacaaatcaggtggccttcctaaacatactaagaattatgttctttcatgtgtggagacacatttgtttgcagcactttaaaaaatatatatggaataaaagtttacatgttggccctctagggatctaattaaggacattaaagtacaattcttgagctactaaccatcagctcttcttaatcaaagattgccatcagtgtagagtgtatctattggcacaacattctggtgttttgataacagtagaactcaatttcagtaactattaggagcatggtctgtgccctagcattaaaaatgttacttattattatgtgaatatcttgtattattatacaatgcagtattcaaatttgtccttgtagtgcagagatgactgataatttctaaaagattcgatccttaaaacttgtttccaagcagacttataaggaagctgatttttgagtcagaggccttaaacgtgtcatatacaagtggcatcattttaagtccaaagtgaaacacttgatttgaataagctagtttataaactaaagctgttttcttatgttacagtatttcagcacatttcattccacataaaaagaatattaagtgtccctggttgtgggagagtgtttatttttctcaaaattatctagcattttgcttacagtgctttgaatgtttgacttaaaattattattgatgttgaattgtagggtgctgatttaggtcttgattcatacacatttaaaggaggttggtaaccccctcatggtagagtgaagggagaaaagggccaagaagacaaagtaccactgataaagaagagattgtcaaatagatgcattcctagtcatgaattacccttttccaaacatttttaaagcaatgcctttgtgtcaactcaacccttcttccccatttcttgtcatagaatgtagcatggccataggtgaaaaagcttatcattaaagtatgaaaccatgaattataagcattttgccatgatgcccttttatacatatgtttttaaaagtactaaccaacatataggagtttaggaatggtgaagatataatttgattaagttgtaggtaaacagaaaggatcatcttaggctcagaatttctaatatgattacatgagtctactttataaactggtataggctatgtaattagcccgtaagttacttaaaggaccaggggacctaatttttgtcagttttccagtcacattggtgccattcaggactccagctgtttacaggaaatatgtacttagcagaatagtatttttccttgaaaaaaatttgaattcagcctaaatacagaatgaatatgaatagtttgtgaaaagggttagagaacaacaatattcctatagtttctgtattaatgcagtagagacagaggttcctaacgcaaaaagaaaaccacaagtaaagaccgtcaaattagagctttagaatatgacttgaaaaagtagggatgggcaaaacagcataagaaaatattttttcttaatgcagatggacagtgttttcttgttttaaaaatgttttgcctatttgccagcattttttgaagtaatacactgctgctacctggaagatgtctaacttcattttctacaactcttatgtgattttgccattgtcattaagatgcattgattttatttatgaggtgtatgactttaaatatctaaatgctgtattaagtgacttgtttcaaaggaataaatgaagtgaaaacgt

SEQ ID NO: 200697 - DNA, 1826 bp, Homo sapiens
  Payload ID: 19610
  Gene Name: yrdC N(6)-threonylcarbamoyltransferase domain containing
  Uniprot ID: Q86U90
  ENST ID: ENST00000373044
  CDS Start-End: 6-845
ggcggatgtctccggcgcgtcggtgcagggggatgagggccgcggtggctgccagcgtggggttgagcgaggggcctgctggctcccggagcggtcgcctcttccgcccgccgagtcccgctccggcggcccccggcgcccggctgttgcggctcccggggagcggggccgtgcaggccgcgagcccggagcgcgccggctggaccgaggcgctgcgggccgccgtggccgagctgcgcgccggcgccgtggtggccgtccccaccgatacgctgtacggcctggcctgcgcggcgagctgctcggcggctctgcgcgctgtgtaccgcctcaagggtcgcagcgaggccaagcctctggccgtatgcctcggccgcgtggccgacgtctacagatactgccgtgtgagagtacctgaggggctcctgaaagacctactgccaggaccagtgaccctggtgatggaacgctcggaggagctcaacaaggacctaaacccttttacgcctcttgtaggcattcggattcctgatcatgcttttatgcaagacttggctcagatgtttgagggtccgcttgctctcactagtgccaacctcagctcccaggccagttctctgaatgtcgaggagttccaggatctctggcctcagttgtccttggttattgatgggggacaaattggggatggccagagccccgagtgtcgccttggctcaactgtggttgatttgtctgtgcccggaaagtttggcatcattcgtccaggctgtgccctggaaagtactacagccatcctccaacagaagtacggactgctcccctcacatgcgtcctacctgtgaaactctgggaagcaggaaggcccaagacctggtgctggatactatgtgtctgtccactgacgactgtcaaggcctcatttgcagaggccaccggagctagggcactagcctgacttttaaggcagtgtgtctttctgagcactgtagaccaagcccttggagctgctggtttagccttgcacctggggaaaggatgtatttatttgtattttcatatatcagccaaaagctgaatggaaaagttaagaacattcctaggtggccttattctaataagtttcttctgtctgttttgtttttcaattgaaaagtaattaaataacagatttagaatctagtgagagcctcctctctggtgggtggtggcatttaaggttcaaaccagccagaagtgctggtgctgtttaaaaagtctcaggtggctgcgtgtggtggctcatgcctgtaatcccaacattctgggaggcccaggcgggagaactgcttgagcccaggagttcagaatcagcctgggcaacatagcaatactccgtctcataaaaattaataaataaaaagtctcaggtgaccaaaggctcctgaagctagaaccaggtttggataaagattgaagagccacaggccactcttccctctgagccattgggcctagtggtgtcatgtattgtaattgctcgcagggagagcagtctttttggtgtaatagtgggatgtctgcttagttggcaggggttcagtccaaatggaagaatattgggaaataaacctccactatcctttatagccagggacttttttcttatttattcataaaataaattatagttaattatacccataacacctttatttaaatccagtgttctccgcagccttttgtctatttatatgtgtaccaagtgttaaacataattattattgggcatttgaactttgtttttctttaaagaaatgctgctattaaacatatttgtaaatggt

SEQ ID NO: 200698 - DNA, 6232 bp, Homo sapiens
  Payload ID: 19611
  Gene Name: YTH domain containing 1
  Uniprot ID: Q96MU7
  ENST ID: ENST00000344157
  CDS Start-End: 337-2520
tttcgggagcgggattgtttcgcgcaggaagcaggctccattttagcgccgcccgccgtcgccatctgtttcccttccctcccccatacctagcccgagtctgagccctaacgagaaggctgggcctaggccgctggatgctggagtgaaaggaagggagaaagggaaaaagcgggaagagtcgagaaggctgagtgttaagaggccaagtgcgacgcgcgtatccgggcagacggactgacggacgggcccgtgcttctgccgcggctgcggcgcccgcgcgagtcgcgtctaagcggcggcggcggtggcagcggcggaaaccgaaggggagccatggcggctgacagtcgggaggagaaagatggagaacttaatgttctggatgatattttaactgaagtaccagaacaagatgatgaactgtataatccagagagtgaacaagataaaaatgagaaaaagggatcaaaaagaaaaagtgatcgaatggaatctactgataccaaacgacaaaagccttctgtccattctagacaactggtttctaagccactgagctcatctgttagcaataacaaaagaatagttagtacaaaaggaaagtcagccacagagtataaaaatgaggaatatcaaagatctgaaagaaacaagcgtctagatgctgatcggaaaattcgtctatcaagtagtgcctccagagaaccttataagaatcaacctgaaaaaacctgtgtccggaaaagggatcctgaaaggagggccaaatctcctacgccagatggttctgagagaattgggcttgaagtggatagacgtgcaagcagatccagccagtcttctaaggaagaagtgaactctgaagaatatggctctgaccatgagactggcagcagtggttcttctgatgagcaagggaacaacactgagaatgaggaggaaggagtggaagaagatgtggaggaagatgaagaagtagaagaagatgcagaagaagatgaagaggtggatgaagatggagaggaggaggaggaagaggaggaggaggaagaggaggaggaggaggaggaagaagaagaatatgaacaggatgagagagaccagaaagaggagggaaatgattatgacactcgaagtgaggccagtgactctggttctgaatctgtttccttcacagatgggtctgtcagatctggttcaggcacagatggatcagatgagaaaaagaaggaaaggaagagagctagaggcatatctccaattgtttttgatagaagtggaagctctgcatcagagtcatatgcaggttcagaaaagaagcatgagaaattatcatcttccgttcgtgctgtccgaaaagatcaaaccagtaaactcaaatatgtgcttcaagatgcaagatttttcctcataaagagtaacaaccatgagaatgtgtctcttgccaaagcgaagggtgtatggtccacgctccctgtaaatgagaagaaattaaatcttgcatttagatctgcaaggagtgttatcttaatattttctgtcagagagagtggaaaatttcaagggtttgcaagactttcttcagaatcacatcacggaggatctcctatacactgggtgcttccagcaggaatgagtgctaaaatgctgggaggtgtctttaaaattgactggatttgcaggcgtgaattacccttcactaagtcggctcatctcaccaatccttggaatgaacataaaccagtaaagatcggacgtgatggacaggaaattgaacttgaatgtggaacccagctttgtcttctgtttccccccgatgaaagtattgacttgtatcaggtcattcataaaatgcgtcacaagagaagaatgcattctcagccccgatcacgaggacgtccatcccgtcgagaaccagtccgggatgtgggaaggcgtcgaccagaagattatgatattcataacagcagaaagaaaccaaggattgactatccccctgagtttcaccagagaccagggtatttaaaggatccacgataccaggaagtggacagacgattttcaggagttcgccgagatgtgtttttaaatgggtcctacaatgattatgtgagggaatttcataacatgggaccaccaccaccttggcaaggaatgcccccttacccaggaatggaacaacctccacaccatccttactatcagcaccatgctccacctcctcaagctcatcccccttactcaggacatcatccagtaccacatgaagcaagatacagagataaacgagtacatgattatgatatgagggtggatgatttccttcgtcgcacacaagctgttgtcagtggccggagaagtagaccccgtgaaagagaccgggaacgagagcgagaccgccctagagataacagacgagacagagagcgagatagaggacgtgatagagaaagagaaagagagcgattatgtgatcgagacagagaccgaggggagagaggtcgatatagaagataatgggcttttggaagcactgattgtttaaagatacaaaaaatcttgtattttttttttgtgtgtgtttacaagtagtaaatttattttcagctgtctgcctatgaagttcattgtgtagaaggatttattatgaccccctttgttccaagcatgcagtatcataagaactggaaaaactcaaatccgccaaaaatccacagctgacagttgaattgacacttttattggggcagaatggaacagtccaagaatgtagatactgattctttctccataaatgttcttatagtgtgttcatcctagagttatttttttgtttgtttttttcctttttggatcttgattgataactgccatgatattttgctttgatgtgtttctacatgtagttgcacacggttcagtaaaaataatgctgctatcgagtatgcaaatattgaagtatgatggtttgactgtatggcagtgttgtagcagcctcttgtttttttccccattgcctctttttttaaaaaacttataaagtcactttttatttttcctcagtcttcaatgacgagagcaatattaagaagacattgctatctaatttttaatctttttaaatgaaaaattcctatgttcagtagcgtggttgatgctattgtttagccttcccctccaaattgtatacattggcttggaatgttcacaacttgcgtgcgtggcagcggaagacgattcccatattctacattgctactgttttgtataaaataaattggtaaagattgacggttatcttttgtatctttttcttatccaattgcaggtttgttttattatgcaataatggacataaaagcatgctttttgttcaggaattttaggaaccccatttgctttttttgaggcacactttagcagaaatgattgacctaggcctgttgcattaaaagcttacttctatttctaacataagatacacagagttatgttaataatttggttaagtatttatacacctgataacattttgagtctactctgatcacagaatcgtttatttaggttttctatttgttgttttagtcttctgtaagtgaacgactttgtacatgctttctactttacttcataaatggacttttaaccctcttgtattagttctgtattttaagttaactgtccagttctcccagtggtaaccaactataacatagaaatagagccgctcaagaaaacagtttatgaaataatttttttgaattttttcttgagttacacctggagttttggcctttggaatttggcctttataaacattaggaatatttgaatgtttgatttttttatagtatcaacagttgtactgtgtaccagatcacatagtacagttttacatttaatctatattggcctgaaaagaacaacacaggcactttactcttaaaggatataataaactatagttatactgcattcatattcataccagcatgtagtatctttccctgcattcacagaagttttatttacaatgacaaaactaaagcctgaggatttgttttaaatctgcattgtggtagagaggaaaaagtacttttaaggaaacctgggttctagttttgtcattgtctttaattaaaccggttagtgatacatggtaagtcacttcattggcattttgtgtattcatcagtaagctagacaagatgatagctacagtttaagaatttctgtaaccattatacaaaactggtaggtaatattaaaggtattttcctgaaataataggaataaatactgagcactttgtatgcaatagagactttgtgcttttatatacagactcatttaaatgggctcagagaggctagtaaacttgcccaagattagaaaggtagtaattgatgggccaagattttacccatgtttttatttggtgtttctaaaccacctcatcacttttgaaaaaacagtatataaattaataaatgttttggagatggagtctgtcgcccaggtggagggcagtggcatgatcttggctcactgcaacctcctgcctcagcctcccgaatggctgggactacaggcacccaccaccacaccccgctaatttttgtaattttagtagagatggggttccaacatgttggccaggctggtctcaaactcgacctcaagtgacctcacctgcctcagcctcctaaagtgttgggattacaggcgtgagccactgcacctggcctgagatttttaaacattaacatttccttcaggcttaagcagaggatttttctaaagtgccatccaattagatgttaagttatgctttgtatgttgagcttagtattgagtcgatctattttaaaaagccaacattaagtttttaccaagtatctggcactattctaaacaattctgttggctcacataatcatcactgttttctcctttcctaatttttaaaataaacttaccggaacattgtataaaaaatgcaagatttttttctgtacagaagagtcagtatataaaaatcagtatgttttatttaatattcgtacacatgacagcttttgtcactgtgagaagacatggtttctttcgtgtactccactgtgctgtgattctaacaatctacattagtatgatgtgttcagatgaaaaacagaaaattcagtcattccgagtttagaaatccggtcagggattttattggctggagtaatagttcaaaggagtgaaaattcaagcatgtaatttttggatttgatttcctccataatgatttcctccataatggctttttttcaagcatggtctaatttttcagaaaatggccattatctccaagcttccattgtccatgtagtttcagtggcaggagagagactattttcctcccagtgtccatgtcagttccccaaaaggactgaatagccatgttggttttggagccagccgtaatccaatctgtatttccaaggaaatggggttctttgtctcccagcattgggaagcaagagaggcacatgttatggtcacctctgtgaggattacatcaggaaggacagtctccaaaagacatggacagaggaaatttagcagatgtccattaaatcaggatctcatacaagttataacacctgaatgtttgacttttcagagtattttgccatcacaggtgtggcatcttgcccttggatatatctacattctgctgtagaatgtcgtggtctttctgagggtcacatacatcctgtcttgtcataatgttaaccattaagagtcctcaggggcatggaattgaagaaggaactgttgccagcagttaactgaccaagctagagttccctgacccaacgtaagggtgactgtgacacacatggataattttagcttcatgtttaagattttgttatttgggtaggaaacattccaaatgcagtttgaaacacatattaaaattgaggcacacaggaaagaactggctcaagtttagtccccaagttccttatagtaggaataggaatccttagagtataagcaatccatgcatagtattctgttatctatcatgtagatcatttaatctctaattttttggggtggggattctcttgtttctaaatcttacactttcagtttcttctgtgtcttaaatatagattattgactattgtcttaaatactaataaatacattaaatgtatcttaaatacta

SEQ ID NO: 200699 - DNA, 3244 bp, Homo sapiens
  Payload ID: 19611
  Gene Name: YTH domain containing 1
  Uniprot ID: Q96MU7
  ENST ID: ENST00000355665
  CDS Start-End: 337-2466
tttcgggagcgggattgtttcgcgcaggaagcaggctccattttagcgccgcccgccgtcgccatctgtttcccttccctcccccatacctagcccgagtctgagccctaacgagaaggctgggcctaggccgctggatgctggagtgaaaggaagggagaaagggaaaaagcgggaagagtcgagaaggctgagtgttaagaggccaagtgcgacgcgcgtatccgggcagacggactgacggacgggcccgtgcttctgccgcggctgcggcgcccgcgcgagtcgcgtctaagcggcggcggcggtggcagcggcggaaaccgaaggggagccatggcggctgacagtcgggaggagaaagatggagaacttaatgttctggatgatattttaactgaagtaccagaacaagatgatgaactgtataatccagagagtgaacaagataaaaatgagaaaaagggatcaaaaagaaaaagtgatcgaatggaatctactgataccaaacgacaaaagccttctgtccattctagacaactggtttctaagccactgagctcatctgttagcaataacaaaagaatagttagtacaaaaggaaagtcagccacagagtataaaaatgaggaatatcaaagatctgaaagaaacaagcgtctagatgctgatcggaaaattcgtctatcaagtagtgcctccagagaaccttataagaatcaacctgaaaaaacctgtgtccggaaaagggatcctgaaaggagggccaaatctcctacgccagatggttctgagagaattgggcttgaagtggatagacgtgcaagcagatccagccagtcttctaaggaagaagtgaactctgaagaatatggctctgaccatgagactggcagcagtggttcttctgatgagcaagggaacaacactgagaatgaggaggaaggagtggaagaagatgtggaggaagatgaagaagtagaagaagatgcagaagaagatgaagaggtggatgaagatggagaggaggaggaggaagaggaggaggaggaagaggaggaggaggaggaggaagaagaagaatatgaacaggatgagagagaccagaaagaggagggaaatgattatgacactcgaagtgaggccagtgactctggttctgaatctgtttccttcacagatgggtctgtcagatctggttcaggcacagatggatcagatgagaaaaagaaggaaaggaagagagctagaggcatatctccaattgtttttgatagaagtggaagctctgcatcagagtcatatgcagatcaaaccagtaaactcaaatatgtgcttcaagatgcaagatttttcctcataaagagtaacaaccatgagaatgtgtctcttgccaaagcgaagggtgtatggtccacgctccctgtaaatgagaagaaattaaatcttgcatttagatctgcaaggagtgttatcttaatattttctgtcagagagagtggaaaatttcaagggtttgcaagactttcttcagaatcacatcacggaggatctcctatacactgggtgcttccagcaggaatgagtgctaaaatgctgggaggtgtctttaaaattgactggatttgcaggcgtgaattacccttcactaagtcggctcatctcaccaatccttggaatgaacataaaccagtaaagatcggacgtgatggacaggaaattgaacttgaatgtggaacccagctttgtcttctgtttccccccgatgaaagtattgacttgtatcaggtcattcataaaatgcgtcacaagagaagaatgcattctcagccccgatcacgaggacgtccatcccgtcgagaaccagtccgggatgtgggaaggcgtcgaccagaagattatgatattcataacagcagaaagaaaccaaggattgactatccccctgagtttcaccagagaccagggtatttaaaggatccacgataccaggaagtggacagacgattttcaggagttcgccgagatgtgtttttaaatgggtcctacaatgattatgtgagggaatttcataacatgggaccaccaccaccttggcaaggaatgcccccttacccaggaatggaacaacctccacaccatccttactatcagcaccatgctccacctcctcaagctcatcccccttactcaggacatcatccagtaccacatgaagcaagatacagagataaacgagtacatgattatgatatgagggtggatgatttccttcgtcgcacacaagctgttgtcagtggccggagaagtagaccccgtgaaagagaccgggaacgagagcgagaccgccctagagataacagacgagacagagagcgagatagaggacgtgatagagaaagagaaagagagcgattatgtgatcgagacagagaccgaggggagagaggtcgatatagaagataatgggcttttggaagcactgattgtttaaagatacaaaaaatcttgtattttttttttgtgtgtgtttacaagtagtaaatttattttcagctgtctgcctatgaagttcattgtgtagaaggatttattatgaccccctttgttccaagcatgcagtatcataagaactggaaaaactcaaatccgccaaaaatccacagctgacagttgaattgacacttttattggggcagaatggaacagtccaagaatgtagatactgattctttctccataaatgttcttatagtgtgttcatcctagagttatttttttgtttgtttttttcctttttggatcttgattgataactgccatgatattttgctttgatgtgtttctacatgtagttgcacacggttcagtaaaaataatgctgctatcgagtatgcaaatattgaagtatgatggtttgactgtatggcagtgttgtagcagcctcttgtttttttccccattgcctctttttttaaaaaacttataaagtcactttttatttttcctcagtcttcaatgacgagagcaatattaagaagacattgctatctaatttttaatctttttaaatgaaaaattcctatgttcagtagcgtggttgatgctattgtttagccttcccctccaaattgtatacattggcttggaatgttcacaacttgcgtgcgtggcagcggaagacgattcccatattctacattgctactgttttgtataaaataaattggtaaagattgacggt

SEQ ID NO: 200700 - DNA, 689 bp, Homo sapiens
  Payload ID: 19611
  Gene Name: YTH domain containing 1
  ENST ID: ENST00000507529
  CDS Start-End: 1-281
caggagttcgccgagatgtgtttttaaatgggtcctacaatgattatgtgagggaatttcataacatgggaccaccaccaccttggcaaggaatgcccccttacccaggaatggaacaacctccacaccatccttactatcagcaccatgctccacctcctcaagctcatcccccttactcaggacatcatccagtaccacatgaagcaagatacagagataaacgagtagtaagtgcacaaggaggcaaaggtgtgagggaactacttagaattctgtaggtaacttaaatatggggagaccagagtatgatgattgacggaccattgcatattcttactgcagactgttttggaataattgtttgtttttattaaaaatgcctgattatgcccctttggattatatagatagaatatatttcttttactgatcaaatcacaaactgcttaaggcaaacgcctacaaatagaactccttttaggtagtacctaggctatgttctttccatattgagatcttaattatgctatgtaattaatattgttaatagatatttctgaactttttgtgtattcttactcaatttttctaggatagatcgtgtatattaagttagctgataagctgtaatctcatttagtcatttgtttttatttctaccaaatgttaaagctagtaactgataa

SEQ ID NO: 200701 - DNA, 515 bp, Homo sapiens
  Payload ID: 19611
  Gene Name: YTH domain containing 1
  ENST ID: ENST00000510746
  CDS Start-End: 478-515
agcgccgcccgccgtcgccatctgtttcccttccctcccccatacctagcccgagtctgagccctaacgagaaggctgggcctaggccgctggatgctggagtgaaaggaagggagaaagggaaaaagcgggaagagtcgagaaggctgagtgttaagaggccaagtgcgacgcgcgtatccgggcagacggactgacggacgggcccgtgcttctgccgcggctgcggcgcccgcgcgagtcgcgtctaagcggcggcggcggtggcagcggcggaaaccgaaggggagccatggcggctgacagtcgggaggagaaagaagactagactcttccagctggttgttttcagatggagaacttaatgttctggatgatattttaactgaagtaccagaacaagatgatgaactgtataatccagagagtgaacaagataaaaatgagaaaaagggatcaaaaagaaaaagtgatcgaatggaatctactgataccaaacgacaaaagccttctgt

SEQ ID NO: 200702 - DNA, 265 bp, Homo sapiens
  Payload ID: 19611
  Gene Name: YTH domain containing 1
  ENST ID: ENST00000505251
  CDS Start-End: 154-265
ccctattaatttttaattttatttgcagatggagaacttaatgttctggatgatattttaactgaagtaccagaacaagatgatgaactgtataatccagagagtgaacaagataaaaatgagaaaaagggatcaaaaagaaaaagtgatcgaatggaatctactgataccaaacgacaaaagccttctgtccattctagacaactggtttctaagccactgagctcatctgttagcaataacaaaagaatagttagtacaaaag

SEQ ID NO: 200703 - DNA, 2983 bp, Homo sapiens
  Payload ID: 19611
  Gene Name: YTH domain containing 1
  ENST ID: ENST00000579690
  CDS Start-End: 1-2208
atggcggctgacagtcgggaggagaaagatggagaacttaatgttctggatgatattttaactgaagtaccagaacaagatgatgaactgtataatccagagagtgaacaagataaaaatgagaaaaagggatcaaaaagaaaaagtgatcgaatggaatctactgataccaaacgacaaaagccttctgtccattctagacaactggtttctaagccactgagctcatctgttagcaataacaaaagaatagttagtacaaaaggaaagtcagccacagagtataaaaatgaggaatatcaaagatctgaaagaaacaagcgtctagatgctgatcggaaaattcgtctatcaagtagtgcctccagagaaccttataagaatcaacctgaaaaaacctgtgtccggaaaagggatcctgaaaggagggccaaatctcctacgccagatggttctgagagaattgggcttgaagtggatagacgtgcaagcagatccagccagtcttctaaggaagaagtgaactctgaagaatatggctctgaccatgagactggcagcagtggttcttctgatgagcaagggaacaacactgagaatgaggaggaaggagtggaagaagatgtggaggaagatgaagaagtagaagaagatgcagaagaagatgaagaggtggatgaagatggagaggaggaggaggaagaggaggaggaggaagaggaggaggaggaggaggaagaagaagaatatgaacaggatgagagagaccagaaagaggagggaaatgattatgacactcgaagtgaggccagtgactctggttctgaatctgtttccttcacagatgggtctgtcagatctggttcaggcacagatggatcagatgagaaaaagaaggaaaggaagagagctagaggcatatctccaattgtttttgatagaagtggaagctctgcatcagagtcatatgcaggttcagaaaagaagcatgagaaattatcatcttccgttcgtgctgtccgaaaagatcaaaccagtaaactcaaatatgtgcttcaagatgcaagatttttcctcataaagagtaacaaccatgagaatgtgtctcttgccaaagcgaagggtgtatggtccacgctccctgtaaatgagaagaaattaaatcttgcatttagatctgcaaggagtgttatcttaatattttctgtcagagagagtggaaaatttcaagggtttgcaagactttcttcagaatcacatcacggaggatctcctatacactgggtgcttccagcaggaatgagtgctaaaatgctgggaggtgtctttaaaattgactggatttgcaggcgtgaattacccttcactaagtcggctcatctcaccaatccttggaatgaacataaaccagtaaagatcggacgtgatggacaggaaattgaacttgaatgtggaacccagctttgtcttctgtttccccccgatgaaagtattgacttgtatcaggtcattcataaaatgcgtcacaagagaagaatgcattctcagccccgatcacgaggacgtccatcccgtcgagaaccagtccgggatgtgggaaggcgtcgaccagaagattatgatattcataacagcagaaagaaaccaaggattgactatccccctgagtttcaccagagaccagggtatttaaaggatccacgataccaggaagtggacagtttcacaaatcttattcccaacagacgattttcaggagttcgccgagatgtgtttttaaatgggtcctacaatgattatgtgagggaatttcataacatgggaccaccaccaccttggcaaggaatgcccccttacccaggaatggaacaacctccacaccatccttactatcagcaccatgctccacctcctcaagctcatcccccttactcaggacatcatccagtaccacatgaagcaagatacagagataaacgagtacatgattatgatatgagggtggatgatttccttcgtcgcacacaagctgttgtcagtggccggagaagtagaccccgtgaaagagaccgggaacgagagcgagaccgccctagagataacagacgagacagagagcgagatagaggacgtgatagagaaagagaaagagagcgattatgtgatcgagacagagaccgaggggagagaggtcgatatagaagataatgggcttttggaagcactgattgtttaaagatacaaaaaatcttgtattttttttttgtgtgtgtttacaagtagtaaatttattttcagctgtctgcctatgaagttcattgtgtagaaggatttattatgaccccctttgttccaagcatgcagtatcataagaactggaaaaactcaaatccgccaaaaatccacagctgacagttgaattgacacttttattggggcagaatggaacagtccaagaatgtagatactgattctttctccataaatgttcttatagtgtgttcatcctagagttatttttttgtttgtttttttcctttttggatcttgattgataactgccatgatattttgctttgatgtgtttctacatgtagttgcacacggttcagtaaaaataatgctgctatcgagtatgcaaatattgaagtatgatggtttgactgtatggcagtgttgtagcagcctcttgtttttttccccattgcctctttttttaaaaaacttataaagtcactttttatttttcctcagtcttcaatgacgagagcaatattaagaagacattgctatctaatttttaatctttttaaatgaaaaattcctatgttcagtagcgtggttgatgctattgtttagccttcccctccaaattgtatacattggcttggaatgttcacaacttgcgtgcgtggcagcggaagacgattcccatattctacattgctactgttttgtataaaataaattggtaaagattgac

SEQ ID NO: 200704 - DNA, 6232 bp, Homo sapiens; identical to SEQ ID NO: 200698
  Payload ID: 19611
  Gene Name: YTH domain containing 1
  Uniprot ID: Q96MU7
  ENST ID: ENST00000615500
  CDS Start-End: 337-2520

SEQ ID NO: 200705 - DNA, 3244 bp, Homo sapiens; identical to SEQ ID NO: 200699
  Payload ID: 19611
  Gene Name: YTH domain containing 1
  Uniprot ID: Q96MU7
  ENST ID: ENST00000613637
  CDS Start-End: 337-2466

SEQ ID NO: 200706 - DNA, 515 bp, Homo sapiens; identical to SEQ ID NO: 200701
  Payload ID: 19611
  Gene Name: YTH domain containing 1
  ENST ID: ENST00000625493
  CDS Start-End: 478-515

SEQ ID NO: 200707 - DNA, 689 bp, Homo sapiens; identical to SEQ ID NO: 200700
  Payload ID: 19611
  Gene Name: YTH domain containing 1
  ENST ID: ENST00000628264
  CDS Start-End: 1-281

SEQ ID NO: 200708 - DNA, 2983 bp, Homo sapiens; identical to SEQ ID NO: 200703
  Payload ID: 19611
  Gene Name: YTH domain containing 1
  ENST ID: ENST00000627168
  CDS Start-End: 1-2208

SEQ ID NO: 200709 - DNA, 265 bp, Homo sapiens; identical to SEQ ID NO: 200702
  Payload ID: 19611
  Gene Name: YTH domain containing 1
  ENST ID: ENST00000629100
  CDS Start-End: 154-265

SEQ ID NO: 200710 - DNA, 6316 bp, Homo sapiens
  Payload ID: 19612
  Gene Name: YTH domain containing 2
  Uniprot ID: Q9H6S0
  ENST ID: ENST00000161863
  CDS Start-End: 214-4506
attacgcccgcgctcctcgcctggccgtgatatcaatggcgcaggcttcacttctgctgtggcggtgactgaggcctttctggtgacctcagcccaacacaggccgtctccggagcttcccggtagtggccccggattcccacggtctttgtcattggctgtcagctagcaggcctggccgctcccgtgcggagagaccatctcttcagggcaatgtccaggccgagcagcgtctccccgcggcagccggctcctggcggtggcggaggcggcggcccctcgccttgtggccctgggggcggcggccgggccaaggggctgaaggacattcgcattgatgaggaggtgaagatcgcagtcaatatcgcgctggagcgcttccgatacggggaccagagagaaatggaatttccttcttctttgaccagtactgaaagagcctttattcatcgactcagtcagtctcttggtttggtctctaaaagtaaaggaaagggagcaaatagatacctaactgtgaagaagaaagatggatcagaaacagctcatgcaatgatgacctgtaatttgactcataatacaaaacatgctgttaggagcctaattcaaagatttcctgtcaccaataaagagcgtacagaacttctgcctaaaacagaaagaggaaatgtgtttgcagttgaagctgaaaaccgggaaatgagcaagacaagtgggcgactcaacaatggcatacctcagattccagtgaaaagaggagaatccgaatttgattcttttaggcagtctttaccagtgtttgagaaacaggaagaaattgttaaaataattaaggaaaataaagtagttttgattgtaggagaaactgggtctggaaagaccacacagattcctcagttccttttagatgattgctttaaaaatggtatcccctgccgtatattttgtactcaaccaagacgattggcagctatcgctgtggctgaaagagttgccgcagagagacgggaaaggattggtcaaacaattggttatcagatccgattagaaagcagggtttctccaaagacacttctgacattttgtactaatggggtattgcttcgtacattgatggcaggagatagtacgttgtcgactgtgacacatgttatcgtggatgaagtgcatgaaagggatcgatttagtgattttttacttacaaagttaagagatttgttgcaaaagcacccaactttgaaactaattctttctagtgctgccttggatgtaaatctctttataagatattttggaagttgtccagtgatatatatacagggaagaccatttgaagtaaaagaaatgtttctggaagatattttaagaacaactggatatacaaacaaagaaatgttaaaatataaaaaggaaaaacagcaagaagagaaacaacaaaccacacttacagaatggtactcagctcaagaaaatagtttcaagcctgaatctcagaggcagagaactgttctaaatgtgactgatgagtatgacttactggatgatggtggtgatgctgtcttcagtcagctgactgaaaaagatgtgaattgccttgaaccatggttaataaaggaaatggatgcttgcctttctgatatatggctacataaagatattgatgcctttgctcaggtctttcatctcattttaactgaaaatgttagtgttgattacagacatagtgaaaccagtgcaacagctctgatggttgctgcaggacgtggctttgcaagtcaagtagaacagttaatcagtatgggagccaatgtccatagtaaagcatcaaatggctggatggcattggattgggctaaacactttgggcagactgaaattgtggatcttctagaatcttacagtgctacactggaatttggaaatctagatgaaagttctctggttcaaacaaatggaagtgacctcagtgctgaagacagagagctcctgaaagcttatcatcatagtttcgatgatgaaaaagtagacttggatttgatcatgcatcttctatacaatatctgccatagttgtgatgctggtgcagtactaatttttctgcctggatatgacgaaattgttggactgagagatcgcatcctgtttgatgacaagcggtttgctgacagtacacatagataccaagtctttatgcttcattcaaatatgcaaacatccgatcaaaagaaagtattaaaaaacccacctgcaggtgttcgaaaaataattctttccaccaatattgctgaaaccagcatcacagtcaatgatgttgtctttgttattgattctggtaaggtgaaagagaaatcctttgatgctctgaattttgttacaatgttaaaaatggtatggatttccaaagctagtgccatacagcggaaaggcagggcagggcgatgtagacctggaatttgttttcgtctgttcagtagactccgattccagaatatgttggaatttcagactccggaacttttgagaatgccattacaggaactttgcttacataccaagctgttagccccagttaattgtcccattgctgattttcttatgaaagctcctgaacctccaccagctttaattgtaagaaatgctgtacaaatgcttaagacaatagatgcaatggatacatgggaagatctgactgaacttgggtatcatttggctgacttgccagtagaaccacatcttggtaaaatggtcttgtgtgctgttgttttaaagtgtctggaccccatccttacaattgcttgcacactagcttatcgagatccttttgtactacctactcaggcctctcaaaaacgtgcagctatgctttgtaggaaacgttttactgcaggagctttcagtgaccatatggcacttctcagagcattccaggcctggcaaaaagcacgaagtgatgggtgggagcgagccttttgtgaaaagaattttctttcacaggctactatggaaataatcataggcatgagaacacagttgcttggtcaacttagagcatcaggttttgttagagcacgaggtggtggtgacattcgggacgttaacacaaactctgagaattgggctgtcgttaaagctgcattggtggcaggcatgtatcctaatttagtccacgtggacagagagaatctagtgttgacagggccaaaggagaaaaaagtacgatttcatcctgcttcagttctcagtcagcctcaatataaaaagattcctccagccaatggtcaagctgcagcaattaaggcactgcccacagattggcttatttatgatgaaatgaccagagcccatagaatagctaatattagatgttgttcagcagtgacgcctgtcactatattggtattctgtggaccagctagattggcaagtaatgctcttcaggaaccttcatcctttagagtggatggcattcccaatgacagtagtgatagtgaaatggaggacaaaactacagctaatttggcagccttgaaacttgatgagtggctccatttcacactggagccagaggcagctagtttattgctgcagctcagacagaagtggcatagcttatttttacgccgaatgagagctccatctaaaccttggtctcaagttgatgaagctaccataagagcaattatagctgttttaagcactgaagaacagtctgcaggtttacaacaaccatctgggattggccaaaggccaaggcctatgtcttcagaagagcttcctttggcctcatcttggaggtcaaataatagtaggaaaagttcagcagatactgaattttctgatgagtgtactactgcagaaagagtactgatgaaatctccatctccagcattacacccacctcagaagtacaaagatagaggaattttacatcctaaacgaggtactgaggaccgatcagatcagtcttctctgaaatctacagacagcagtagttacccaagtccttgtgctagtccttctcctccatcctcaggaaagggctcaaaatctccttcgccaagaccaaacatgcctgttcgatacttcataatgaagagtagcaatttgagaaaccttgaaatttctcaacagaagggtatctggtctacaactcctagtaatgaacggaagctaaatcgagccttttgggaaagcagcatagtttacttggtattttctgttcaaggatctggacatttccagggattttctaggatgtcttctgagattggaagggaaaagagtcaggactggggctctgctggactaggaggagtatttaaggtggagtggatacgaaaagaaagccttccctttcaatttgcacaccatttactcaatccatggaatgacaacaagaaagtgcagataagcagggatgggcaggaactagaacctctggttggtgaacagttgctccagttatgggaacgtcttcccttgggagaaaaaaacacaactgattgacactcagaactcttagctgtggaagaacatcatgcctatttataaccactgaatgcactgactttcaaaaactgaggtggggtgtgtgttacgaatgggctttttaacacttttagagtgttgctttagaactaccatcttcatatacaggagaaaggaagcatttaaatttttatagtgattatagagaatgattatatgatgtttgtaatgaataaaatagtagtttcattatttggcacaatagcagtttattttaaacaaacaatttgaagttaaacatttcatttttaaaaacactgaattacagttcttattgatgactttttaatgcagagtaagttgtttaagaaaggcctgaatatatcagaacatctgagcaccattttagaagagtcaactcttaagattatcattagaaaacaaatacgtcaacacctatgaaaagaagcggggaaaacaacaacaaggacaacaacaaaaaaccagtgaaattctacaagtgtcccttttaaaaatagtgtgtgctaactaagggctattcattctgccatttttaacttgagacacatttaagaataaagttggatgttctttttctgtgattatgaaatgcaataaaatctgaataaagggcaaagtttcttcctgatcagattagattaagtgcttagttttattcctaattctgccccttttaacctgatgtgtaccttactctttcctccctctcttcctcccttcctcctctccccgctcctttcctgcatttctccctccctccttccctcgtcacatctcttatatgagcacagtaattatgacctttttgttttggctacaacttgattgaaacaagttcaaaatttaaacaagttcatacaagtttttaaaaattctcaactggtagcttgcttgctgtgcgtcttccaaactaaagcctgcaagcgccacaattctaagtgccgccttccattttttttcagtatgttttcactggcttatgttttcagatatgattttcctttttcgcatatatggtttaataaatgggggataattttttttttgtaaatccgtgcttgtgccaagtctcatatttctttgccatctcagaattatctttttaccaccactgtttataaaatttccttagagactttttgaagggaaaatagagcaacagggaaaaatgaaagaaatgtcttggttactgagctctaaatagacaggtttgatggcacttctcatgatacattttagttattcttataaaagcaaacaggcaaacatgagtgtaaattaaagacaaaaagaaaactctggttttatatttgagaacacgtgaaaaatcatgggtcaacataaaatcttgagaaccttctactttctctgggaaagcattatatagtggtgcattagtttagaaagtcagctatgattttgcctatagttctagttattagctttggggttttcttgtactttaagacatacctgtaaattgaacctatttgaattatattccactgtatgtgtattatggctcttttcctattagagcaacttgtgtttccctgataatgtgtacattttttaggcatgtacttaatagttcacaatgttctaaatttggaaggacttaaaaaaaaaacttgtttaaatttccatctgttttgtaatatctagctctatatgtaaatgatgggtttgttggtatttaaaatgaatacaacttgaatgtaattaaagtgctgttttttggaagcgataaactttaaatatacttattaaaatgaaattctattaa

SEQ ID NO: 200711 - DNA, 536 bp, Homo sapiens
  Payload ID: 19612
  Gene Name: YTH domain containing 2
  ENST ID: ENST00000514720
  CDS Start-End: 124-536
aacggcggcccaccgagtgatgggggtgcctccgaagagggagggaagacccgggccaccgtccggggcgggcctcagcggcggcacccgggtctggaacgcggctgttggccctgcggtggaatgcgagaaatggaatttccttcttctttgaccagtactgaaagagcctttattcatcgactcagtcagtctcttggtttggtctctaaaagtaaaggaaagggagcaaatagatacctaactgtgaagaagaaagatggatcagaaacagctcatgcaatgatgacctgtaatttgactcataatacaaaacatgctgttaggagcctaattcaaagatttcctgtcaccaataaagagcgtacagaacttctgcctaaaacagaaagaggaaatgtgtttgcagttgaagctgaaaaccgggaaatgagcaagacaagtgggcgactcaacaatggcatacctcagattccagtgaaaagaggagaatccgaatttgattcttttaggcagtctttaccagtgtttgagaa

SEQ ID NO: 200712 - DNA, 2629 bp, Homo sapiens
  Payload ID: 19612
  Gene Name: YTH domain containing 2
  ENST ID: ENST00000515883
  CDS Start-End: 188-2407
gtgatatcaatggcgcaggcttcacttctgctgtggcggtgactgaggcctttctggtgacctcagcccaacacaggccgtctccggagcttcccggtagtggccccggattcccacggtctttgtcattggctgtcagctagcaggcctggccgctcccgtgcggagagaccatctcttcagggcaatgtccaggccgagcagcgtctccccgcggcagccggctcctggcggtggcggaggcggcggcccctcgccttgtggccctgggggcggcggccgggccaaggggctgaaggacattcgcattgatgaggaggtgaagatcgcagtcaatatcgcgctggagcgcttccgatacggggaccagagagaaatggaatttccttcttctttgaccagtactgaaagagcctttattcatcgactcagtcagtctcttggtttggtctctaaaagtaaaggaaagggagcaaatagatacctaactgtgaagaagaaagatggatcagaaacagctcatgcaatgatgacctgtaatttgactcataatacaaaacatgctgttaggagcctaattcaaagatttcctgtcaccaataaagagcgtacagaacttctgcctaaaacagaaagaggaaatgtgtttgcagttgaagctgaaaaccgggaaatgagcaagacaagtgggcgactcaacaatggcatacctcagattccagtgaaaagaggagaatccgaatttgattcttttaggcagtctttaccagtgtttgagaaacaggaagaaattgttaaaataattaaggaaaataaagtagttttgattgtaggagaaactgggtctggaaagaccacacagattcctcagttccttttagatgattgctttaaaaatggtatcccctgccgtatattttgtactcaaccaagacgattggcagctatcgctgtggctgaaagagttgccgcagagagacgggaaaggattggtcaaacaattggttatcagatccgattagaaagcagggtttctccaaagacacttctgacattttgtactaatggggtattgcttcgtacattgatggcaggagatagtacgttgtcgactgtgacacatgttatcgtggatgaagtgcatgaaagggatcgatttagtgattttttacttacaaagttaagagatttgttgcaaaagcacccaactttgaaactaattctttctagtgctgccttggatgtaaatctctttataagatattttggaagttgtccagtgatatatatacagggaagaccatttgaagtaaaagaaatgtttctggaagatattttaagaacaactggatatacaaacaaagaaatgttaaaatataaaaaggaaaaacagcaagaagagaaacaacaaaccacacttacagaatggtactcagctcaagaaaatagtttcaagcctgaatctcagaggcagagaactgttctaaatgtgactgatgagtatgacttactggatgatggtggtgatgctgtcttcagtcagctgactgaaaaagatgtgaattgccttgaaccatggttaataaaggaaatggatgcttgcctttctgatatatggctacataaagatattgatgcctttgctcaggtctttcatctcattttaactgaaaatgttagtgttgattacagacatagtgaaaccagtgcaacagctctgatggttgctgcaggacgtggctttgcaagtcaagtagaacagttaatcagtatgggagccaatgtccatagtaaagcatcaaatggctggatggcattggattgggctaaacactttgggcagactgaaattgtggatcttctagaatcttacagtgctacactggaatttggaaatctagatgaaagttctctggttcaaacaaatggaagtgacctcagtgctgaagacagagagctcctgaaagcttatcatcatagtttcgatgatgaaaaagtagacttggatttgatcatgcatcttctatacaatatctgccatagttgtgatgctggtgcagtactaatttttctgcctggatatgacgaaattgttggactgagagatcgcatcctgtttgatgacaagcggtttgctgacagtacacatagataccaagtctttatgcttcattcaaatatgcaaacatccgatcaaaagaaagtattaaaaaacccacctgcaggtgttcgaaaaataattctttccaccaatattgctgaaaccagcatcacagtcaatgatgttgtctttgttattgattctggtaaggtgaaagagaaatcctttgatgctctgaattttgttacaatgttaaaaatggtatggatttccaaagctagtgccatacagcggaaaggcaggtaatgtatatttaatgtatattcattcaattgcctgtaaaatggaaacgtttttatatgcattacacatttatcatatattccatgttcaataaaatagtagttttcatgttaaaatttttatattatttttgcaaagcaagccattttgatacttccttaaaagttgaatgtaggttatgttaaaattaaaaacttttgcctagttaaatgtacattcagatgt

SEQ ID NO: 200713 - DNA, 2138 bp, Homo sapiens
  Payload ID: 19612
  Gene Name: YTH domain containing 2
  ENST ID: ENST00000503857
  CDS Start-End: 203-499
gctcctcgcctggccgtgatatcaatggcgcaggcttcacttctgctgtggcggtgactgaggcctttctggtgacctcagcccaacacaggccgtctccggagcttcccggtagtggccccggattcccacggtctttgtcattggctgtcagctagcaggcctggccgctcccgtgcggagagaccatctcttcagggcaatgtccaggccgagcagcgtctccccgcggcagccggctcctggcggtggcggaggcggcggcccctcgccttgtggccctgggggcggcggccgggccaaggggctgaaggacattcgcattgatgaggaggtgaagatcgcagtcaatatcgcgctggagcgcttccgatacggggaccagagagaaatggaatttccttcttctttgaccagtactgaaagagcctttattcatcgactcagtcagtctcttggtttggtctctaaaagtaaaggattcctcagttccttttagatgattgctttaaaaatggtatcccctgccgtatattttgtactcaaccaagacgattggcagctatcgctgtggctgaaagagttgccgcagagagacgggaaaggattggtcaaacaattggttatcagatccgattagaaagcagggtttctccaaagacacttctgacattttgtactaatggggtattgcttcgtacattgatggcaggagatagtacgttgtcgactgtgacacatgttatcgtggatgaagtgcatgaaagggatcgatttagtgattttttacttacaaagttaagagatttgttgcaaaagcacccaactttgaaactaattctttctagtgctgccttggatgtaaatctctttataagatattttggaagttgtccagtgatatatatacagggaagaccatttgaagtaaaagaaatgtttctggaagatattttaagaacaactggatatacaaacaaagaaatgttaaaatataaaaaggaaaaacagcaagaagagaaacaacaaaccacacttacagaatggtactcagctcaagaaaatagtttcaagcctgaatctcagaggcagagaactgttctaaatgtgactgatgagtatgacttactggatgatggtggtgatgctgtcttcagtcagctgactgaaaaagatgtgaattgccttgaaccatggttaataaaggaaatggatgcttgcctttctgatatatggctacataaagatattgatgcctttgctcaggtctttcatctcattttaactgaaaatgttagtgttgattacagacatagtgaaaccagtgcaacagctctgatggttgctgcaggacgtggctttgcaagtcaagtagaacagttaatcagtatgggagccaatgtccatagtaaagcatcaaatggctggatggcattggattgggctaaacactttgggcagactgaaattgtggatcttctagaatcttacagtgctacactggaatttggaaatctagatgaaagttctctggttcaaacaaatggaagtgacctcagtgctgaagacagagagctcctgaaagcttatcatcatagtttcgatgatgaaaaagtagacttggatttgatcatgcatcttctatacaatatctgccatagttgtgatgctggtgcagtactaatttttctgcctggatatgacgaaattgttggactgagagatcgcatcctgtttgatgacaagcggtttgctgacagtacacatagataccaagtctttatgcttcattcaaatatgcaaacatccgatcaaaagaaagtattaaaaaacccacctgcaggtgttcgaaaaataattctttccaccaatattgctgaaaccagcatcacagtcaatgatgttgtctttgttattgattctggtaaggtgaaagagaaatcctttgatgctctgaattttgttacaatgttaaaaatggtatggatttccaaagctagtgccatacagcggaaaggcagggcagggcgatgtagacctggaatttgttttcgtctgttcagtagactccgattccagaatatgttggaatttcagactccggaacttttgagaatgccattacaggtaaaaattta

SEQ ID NO: 200714 - DNA, 747 bp, Homo sapiens
  Payload ID: 19613
  Gene Name: YTH N(6)-methyladenosine RNA binding protein 1
  ENST ID: ENST00000370334
  CDS Start-End: 248-406
ccgctgctgtcgccgccgccgccgccattggagtcgacgcctcctcagtgcgtccgcgtcccgggctcaccgccgctgccgcctcgccaggggcccgcgcgcccagcagccgccgccgccgcccggccggcgcccggggaattggcggcggggcccggggccgcgcgagctagggtgacaggcccggcctctaggggaggcccgagccggcgggcgccccggccccgcgtctagttgttcatgaagcatgtcggccaccagcgtggacacccagagaacaaaaggacaagataataaagtacaaaatggttcgttacatcagaaggatacagttcatgacaatgactttgagccctaccttactggacagtcaaatcaggaacggcagagtcgaaacaaacaatgagggcgaaccagtttcttacatgttctaacgtttgactttgaaaacagtttaaaacacgtgtgcttggtcagctccagtgtgtcgtcccgtgcgggggttgagtgttgcatctttgcctttcttgtcgttgatttttgcccagatggatctgcatttatttgtactttttctatgtattataatcctgtagaagtcactaataaaggagtattttttttgtcagcttatcaatcagactgatctaatgtgaaatgtaagtatccttaaaaacaaagcatctattttggcagaaattgtgttcttaaattcagtcatttgatattctgtgagacttcatattt

SEQ ID NO: 200715 - DNA, 3301 bp, Homo sapiens
  Payload ID: 19613
  Gene Name: YTH N(6)-methyladenosine RNA binding protein 1
  Uniprot ID: Q9BYJ9
  ENST ID: ENST00000370339
  CDS Start-End: 343-2022
cgcaggcgcgaagtgtggcggcccggcgcggcgctcccggcctgccccgcgtgcacgctgacgccgcgcagtctcgtcccctgccgccgccgtcgccgctgctgtcgccgccgccgccgccattggagtcgacgcctcctcagtgcgtccgcgtcccgggctcaccgccgctgccgcctcgccaggggcccgcgcgcccagcagccgccgccgccgcccggccggcgcccggggaattggcggcggggcccggggccgcgcgagctagggtgacaggcccggcctctaggggaggcccgagccggcgggcgccccggccccgcgtctagttgttcatgaagcatgtcggccaccagcgtggacacccagagaacaaaaggacaagataataaagtacaaaatggttcgttacatcagaaggatacagttcatgacaatgactttgagccctaccttactggacagtcaaatcagagtaacagttacccctcaatgagcgacccctacctgtccagctattacccgccgtccattggatttccttactccctcaatgaggctccgtggtctactgcaggggaccctccgattccatacctcaccacctacggacagctcagtaacggagaccatcattttatgcacgatgctgtttttgggcagcctgggggcctggggaacaacatctatcagcacaggttcaattttttccctgaaaaccctgcgttctcagcatgggggacaagtgggtctcaaggtcagcagacccagagctccgcgtatgggagcagctacacctaccccccgagctccctgggtggcacggtggttgatgggcagccaggctttcacagcgacaccctcagcaaggcccccgggatgaacagcctggagcagggcatggttggcctgaagattggggacgtcagctcctccgccgtcaagacggtgggctctgtcgtcagcagcgtggcactgactggtgtcctttctggcaacggtgggacaaatgtgaacatgccagtttcaaagccgacctcgtgggctgccattgccagcaagcctgcaaaaccacagcctaaaatgaaaacaaagagcgggcctgtcatggggggtgggctgccccctccacccataaagcataacatggacattggcacctgggataacaaggggcctgtgccgaaggccccagtcccccagcaggcaccctctccacaggctgccccacagccccagcaggtggctcagcctctcccagcacagcccccagctttggctcaaccgcagtatcagagccctcagcagccaccccagacccgctgggttgccccacgcaacagaaacgcggcgtttgggcagagcggaggggctggcagcgatagcaactctcctggaaacgtccagcctaattctgcccccagcgtcgaatcccaccccgtccttgaaaaactgaaggctgctcacagctacaacccgaaagagtttgagtggaatctgaaaagcgggcgtgtgttcatcatcaagagctactctgaggacgacatccaccgctccattaagtactccatctggtgtagcacagagcacggcaacaagcgcctggacagcgccttccgctgcatgagcagcaaggggcccgtctacctgctcttcagcgtcaatgggagtgggcatttttgtggggtggccgagatgaagtcccccgtggactacggcaccagtgccggggtctggtctcaggacaagtggaaggggaagtttgatgtccagtggatttttgttaaggatgtacccaataaccagctccggcacatcaggctggagaataacgacaacaaaccggtcacaaactcccgggacacccaggaggtgcccttagaaaaagccaagcaagtgctgaaaattatcagttcctacaagcacacaacctccatcttcgacgactttgctcactacgagaagcgccaggaggaggaggaggtggtgcgcaaggaacggcagagtcgaaacaaacaatgagggcgaaccagtttcttacatgttctaacgtttgactttgaaaacagtttaaaacacgtgtgcttggtcagctccagtgtgtcgtcccgtgcgggggttgagtgttgcatctttgcctttcttgtcgttgatttttgcccagatggatctgcatttatttgtactttttctatgtattataatcctgtagaagtcactaataaaggagtattttttttgtcagcttatcaatcagactgatctaatgtgaaatgtaagtatccttaaaaacaaagcatctattttggcagaaattgtgttcttaaattcagtcatttgatattctgtgagacttcatatttctcatccctttattgctttttagcaaacataagaaaccatgagtcattttgtcatttagagtattctgataaaatctcttgaaaatactgaaatcaaaaggttaatgattttttgttcattctgatttgtcattttattatctgttatcggtctaaagtgctaatttacccatttgatttttctgctagacagataacttttaatttttcaaatttggcagacactttttttttttttttgaaaatctttccttccagatctgttgcccactgaacagccacccgtccctcactgtcctggtgtccgattgggctggatggtgttggggcatgatgtgtggaggaactggaaggtgctttaggtctggttcagggtcgggcattctttgttgtttgcacatctttttaaattttacaccttttcttaagaattctaatgccgtcttaagtttttataccaataatgctgagctttaagtgtaggatctggtagtacagacagtgtgatggatgatgctgctggttgtaaatttcatcgtgtgtgtctaattttttttcctgttgaatgggtaaaaacaaaacaaaactttttttagaagatgaatttgctgtcatgttttgtggaatgagggaccgttgagctcactaccacctggagtttgagttgaagcatgaaaatggtgcccatgcctgacgctccagcgcctggatctgcacgtgcccttgtagaggatccttaccgtcctagagagcagacgctttctgaaaactacttgctccaaaagaccctctgagttaacgtttcagctgtatcattagacttgtatttagagcgtgtcacttcctctgaactgttactgcctgaatggagtcctggacgacattgggtttttcctctaggagaatacaagccttaataaacaatactatttagcaaa

SEQ ID NO: 200716 - DNA, 2925 bp, Homo sapiens
  Payload ID: 19614
  Gene Name: YTH N(6)-methyladenosine RNA binding protein 2
  Uniprot ID: Q9Y5A9
  ENST ID: ENST00000373812
  CDS Start-End: 363-2102
ggccggcctctcccttcccggggttcttcgcgccgggccccttccgcgtgggtgagtgaatgtgagagtcagcgctcgcgccgcgcgcgccgcccgcctccgctgttcggcgctctgctttaggcggtggggggcgggcgcgcgcgtaaaagcatagagacgggcattgagctcttgggctagagcgtcgccgagtcggagccggagcctgagccgcgcgctgtgtctccgctgcgtccgccgaggcccccgagtgtcagggacaaaagcctccgcctgctcccgcagacggggctcatctgccgccgccgccgcgctgaggagagttcgccgccgtcgccgcccgtgaggatctgagagccatgtcggccagcagcctcttggagcagagaccaaaaggtcaaggaaacaaagtacaaaatggatctgtacatcaaaaggatggattaaacgatgatgattttgaaccttacttgagtccacaggcaaggcccaataatgcatatactgccatgtcagattcctacttacccagttactacagtccctccattggcttctcctattctttgggtgaagctgcttggtctacggggggtgacacagccatgccctacttaacttcttatggacagctgagcaacggagagccccacttcctaccagatgcaatgtttgggcaaccaggagccctaggtagcactccatttcttggtcagcatggttttaatttctttcccagtgggattgacttctcagcatggggaaataacagttctcagggacagtctactcagagctctggatatagtagcaattatgcttatgcacctagctccttaggtggagccatgattgatggacagtcagcttttgccaatgagaccctcaataaggctcctggcatgaatactatagaccaagggatggcagcactgaagttgggtagcacagaagttgcaagcaatgttccaaaagttgtaggttctgctgttggtagcgggtccattactagtaacatcgtggcttccaatagtttgcctccagccaccattgctcctccaaaaccagcatcttgggctgatattgctagcaagcctgcaaaacagcaacctaaactgaagaccaagaatggcattgcagggtcaagtcttccgccacccccgataaagcataacatggatattggaacttgggataacaagggtcccgttgcaaaagccccctcacaggctttggttcagaatataggtcagccaacccaggggtctcctcagcctgtaggtcagcaggctaacaatagcccaccagtggctcaggcatcagtagggcaacagacacagccattgcctccacctccaccacagcctgcccagctttcagtccagcaacaggcagctcagccaacccgctgggtagcacctcggaaccgtggcagtgggttcggtcataatggggtggatggtaatggagtaggacagtctcaggctggttctggatctactccttcagaaccccacccagtgttggagaagcttcggtccattaataactataaccccaaagattttgactggaatctgaaacatggccgggttttcatcattaagagctactctgaggacgatattcaccgttccattaagtataatatttggtgcagcacagagcatggtaacaagagactggatgctgcttatcgttccatgaacgggaaaggccccgtttacttacttttcagtgtcaacggcagtggacacttctgtggcgtggcagaaatgaaatctgctgtggactacaacacatgtgcaggtgtgtggtcccaggacaaatggaagggtcgttttgatgtcaggtggatttttgtgaaggacgttcccaatagccaactgcgacacattcgcctagagaacaacgagaataaaccagtgaccaactctagggacactcaggaagtgcctctggaaaaggctaagcaggtgttgaaaattatagccagctacaagcacaccacttccatttttgatgacttctcacactatgagaaacgccaagaggaagaagaaagtgttaaaaaggaacgtcaaggtcgtgggaaataaaaggcagttctacacagactgcagcaacggttgcatctgcatatcctaagaggaaaaaatgaccttcaagagaattaggacttttttcttaatttcactgacttcagagacgattgcagacttgcagtttaagtattggaatttcacaaaagacataggacttaactggaaaatgaaaaaaaaaagaaaaagaaaaaactaaacaaaaaatccctctaggtagtttaggtgaaaaatgtcccttttattttggctttggttgtgatttcagagcataatgctatgtttttttgtctttttactatgtttttcggatttttaagtccgtaagtgcatacagttttctctaatttttaaaccctttcctcctcccattttgacatttgcacttggagaacacttgagttgtgaaggttttgggcatccaccccagaaagtgggaatttgattttatccttccgaactggaagaacatttttatgaagaatttttgtctaggagaatataacagtgttacccaaggttgtgtctttaagggtggttcattttctctgaccttttgttactcaaagtaaagtactaggagtcctaagaaatgttctgttcttgtacattatactgattaagtcaggattaatttgatttcaaagctgagaacagtggtaaaaactcgtttacagaaatgcattttggaagagaaaaatactgtaaaacgtgtcgtgaatgtttcttcagtttcttgttcagccaatgaggaaagggcattgcctttctttttaccattaatcacttctcaataaacgtgagatcctgttgagcatca

SEQ ID NO: 200717 - DNA, 2719 bp, Homo sapiens
  Payload ID: 19614
  Gene Name: YTH N(6)-methyladenosine RNA binding protein 2
  Uniprot ID: Q9Y5A9
  ENST ID: ENST00000541996
  CDS Start-End: 307-1896
agagcgtcgccgagtcggagccggagcctgagccgcgcgctgtgtctccgctgcgtccgccgaggcccccgagtgtcagggacaaaagcctccgcctgctcccgcagacggggctcatctgccgccgccgccgcgctgaggagagttcgccgccgtcgccgcccgtgaggatctgagagccatgtcggccagcagcctcttggagcagtacaaaatggatctgtacatcaaaaggatggattaaacgatgatgattttgaaccttacttgagtccacaggcaaggcccaataatgcatatactgccatgtcagattcctacttacccagttactacagtccctccattggcttctcctattctttgggtgaagctgcttggtctacggggggtgacacagccatgccctacttaacttcttatggacagctgagcaacggagagccccacttcctaccagatgcaatgtttgggcaaccaggagccctaggtagcactccatttcttggtcagcatggttttaatttctttcccagtgggattgacttctcagcatggggaaataacagttctcagggacagtctactcagagctctggatatagtagcaattatgcttatgcacctagctccttaggtggagccatgattgatggacagtcagcttttgccaatgagaccctcaataaggctcctggcatgaatactatagaccaagggatggcagcactgaagttgggtagcacagaagttgcaagcaatgttccaaaagttgtaggttctgctgttggtagcgggtccattactagtaacatcgtggcttccaatagtttgcctccagccaccattgctcctccaaaaccagcatcttgggctgatattgctagcaagcctgcaaaacagcaacctaaactgaagaccaagaatggcattgcagggtcaagtcttccgccacccccgataaagcataacatggatattggaacttgggataacaagggtcccgttgcaaaagccccctcacaggctttggttcagaatataggtcagccaacccaggggtctcctcagcctgtaggtcagcaggctaacaatagcccaccagtggctcaggcatcagtagggcaacagacacagccattgcctccacctccaccacagcctgcccagctttcagtccagcaacaggcagctcagccaacccgctgggtagcacctcggaaccgtggcagtgggttcggtcataatggggtggatggtaatggagtaggacagtctcaggctggttctggatctactccttcagaaccccacccagtgttggagaagcttcggtccattaataactataaccccaaagattttgactggaatctgaaacatggccgggttttcatcattaagagctactctgaggacgatattcaccgttccattaagtataatatttggtgcagcacagagcatggtaacaagagactggatgctgcttatcgttccatgaacgggaaaggccccgtttacttacttttcagtgtcaacggcagtggacacttctgtggcgtggcagaaatgaaatctgctgtggactacaacacatgtgcaggtgtgtggtcccaggacaaatggaagggtcgttttgatgtcaggtggatttttgtgaaggacgttcccaatagccaactgcgacacattcgcctagagaacaacgagaataaaccagtgaccaactctagggacactcaggaagtgcctctggaaaaggctaagcaggtgttgaaaattatagccagctacaagcacaccacttccatttttgatgacttctcacactatgagaaacgccaagaggaagaagaaagtgttaaaaaggaacgtcaaggtcgtgggaaataaaaggcagttctacacagactgcagcaacggttgcatctgcatatcctaagaggaaaaaatgaccttcaagagaattaggacttttttcttaatttcactgacttcagagacgattgcagacttgcagtttaagtattggaatttcacaaaagacataggacttaactggaaaatgaaaaaaaaaagaaaaagaaaaaactaaacaaaaaatccctctaggtagtttaggtgaaaaatgtcccttttattttggctttggttgtgatttcagagcataatgctatgtttttttgtctttttactatgtttttcggatttttaagtccgtaagtgcatacagttttctctaatttttaaaccctttcctcctcccattttgacatttgcacttggagaacacttgagttgtgaaggttttgggcatccaccccagaaagtgggaatttgattttatccttccgaactggaagaacatttttatgaagaatttttgtctaggagaatataacagtgttacccaaggttgtgtctttaagggtggttcattttctctgaccttttgttactcaaagtaaagtactaggagtcctaagaaatgttctgttcttgtacattatactgattaagtcaggattaatttgatttcaaagctgagaacagtggtaaaaactcgtttacagaaatgcattttggaagagaaaaatactgtaaaacgtgtcgtgaatgtttcttcagtttcttgttcagccaatgaggaaagggcattgcctttctttttaccattaatcacttctcaataaacgtgagatcctgttgagcatca

SEQ ID NO: 200718 - DNA, 2825 bp, Homo sapiens
  Payload ID: 19614
  Gene Name: YTH N(6)-methyladenosine RNA binding protein 2
  Uniprot ID: Q9Y5A9
  ENST ID: ENST00000542507
  CDS Start-End: 264-2003
agtctttccaggtgttagtcgaaacctcgtggtgcgaccctggtcgtcccaaaccccctaggccttaatcctggggcggtgggggcggggaggccgtgagcacggcttccgctcctccaatccgccagagggcgcagcggccggcctctcccttcccggggttcttcgcgccgggccccttccgcgtggacggggctcatctgccgccgccgccgcgctgaggagagttcgccgccgtcgccgcccgtgaggatctgagagccatgtcggccagcagcctcttggagcagagaccaaaaggtcaaggaaacaaagtacaaaatggatctgtacatcaaaaggatggattaaacgatgatgattttgaaccttacttgagtccacaggcaaggcccaataatgcatatactgccatgtcagattcctacttacccagttactacagtccctccattggcttctcctattctttgggtgaagctgcttggtctacggggggtgacacagccatgccctacttaacttcttatggacagctgagcaacggagagccccacttcctaccagatgcaatgtttgggcaaccaggagccctaggtagcactccatttcttggtcagcatggttttaatttctttcccagtgggattgacttctcagcatggggaaataacagttctcagggacagtctactcagagctctggatatagtagcaattatgcttatgcacctagctccttaggtggagccatgattgatggacagtcagcttttgccaatgagaccctcaataaggctcctggcatgaatactatagaccaagggatggcagcactgaagttgggtagcacagaagttgcaagcaatgttccaaaagttgtaggttctgctgttggtagcgggtccattactagtaacatcgtggcttccaatagtttgcctccagccaccattgctcctccaaaaccagcatcttgggctgatattgctagcaagcctgcaaaacagcaacctaaactgaagaccaagaatggcattgcagggtcaagtcttccgccacccccgataaagcataacatggatattggaacttgggataacaagggtcccgttgcaaaagccccctcacaggctttggttcagaatataggtcagccaacccaggggtctcctcagcctgtaggtcagcaggctaacaatagcccaccagtggctcaggcatcagtagggcaacagacacagccattgcctccacctccaccacagcctgcccagctttcagtccagcaacaggcagctcagccaacccgctgggtagcacctcggaaccgtggcagtgggttcggtcataatggggtggatggtaatggagtaggacagtctcaggctggttctggatctactccttcagaaccccacccagtgttggagaagcttcggtccattaataactataaccccaaagattttgactggaatctgaaacatggccgggttttcatcattaagagctactctgaggacgatattcaccgttccattaagtataatatttggtgcagcacagagcatggtaacaagagactggatgctgcttatcgttccatgaacgggaaaggccccgtttacttacttttcagtgtcaacggcagtggacacttctgtggcgtggcagaaatgaaatctgctgtggactacaacacatgtgcaggtgtgtggtcccaggacaaatggaagggtcgttttgatgtcaggtggatttttgtgaaggacgttcccaatagccaactgcgacacattcgcctagagaacaacgagaataaaccagtgaccaactctagggacactcaggaagtgcctctggaaaaggctaagcaggtgttgaaaattatagccagctacaagcacaccacttccatttttgatgacttctcacactatgagaaacgccaagaggaagaagaaagtgttaaaaaggaacgtcaaggtcgtgggaaataaaaggcagttctacacagactgcagcaacggttgcatctgcatatcctaagaggaaaaaatgaccttcaagagaattaggacttttttcttaatttcactgacttcagagacgattgcagacttgcagtttaagtattggaatttcacaaaagacataggacttaactggaaaatgaaaaaaaaaagaaaaagaaaaaactaaacaaaaaatccctctaggtagtttaggtgaaaaatgtcccttttattttggctttggttgtgatttcagagcataatgctatgtttttttgtctttttactatgtttttcggatttttaagtccgtaagtgcatacagttttctctaatttttaaaccctttcctcctcccattttgacatttgcacttggagaacacttgagttgtgaaggttttgggcatccaccccagaaagtgggaatttgattttatccttccgaactggaagaacatttttatgaagaatttttgtctaggagaatataacagtgttacccaaggttgtgtctttaagggtggttcattttctctgaccttttgttactcaaagtaaagtactaggagtcctaagaaatgttctgttcttgtacattatactgattaagtcaggattaatttgatttcaaagctgagaacagtggtaaaaactcgtttacagaaatgcattttggaagagaaaaatactgtaaaacgtgtcgtgaatgtttcttcagtttcttgttcagccaatgaggaaagggcattgcctttctttttaccattaatcacttctcaataaacgtgagatcctgttgagcatc

SEQ ID NO: 200719 - DNA, 864 bp, Homo sapiens
  Payload ID: 19614
  Gene Name: YTH N(6)-methyladenosine RNA binding protein 2
  ENST ID: ENST00000474884
  CDS Start-End: 264-864
agtctttccaggtgttagtcgaaacctcgtggtgcgaccctggtcgtcccaaaccccctaggccttaatcctggggcggtgggggcggggaggccgtgagcacggcttccgctcctccaatccgccagagggcgcagcggccggcctctcccttcccggggttcttcgcgccgggccccttccgcgtggacggggctcatctgccgccgccgccgcgctgaggagagttcgccgccgtcgccgcccgtgaggatctgagagccatgtcggccagcagcctcttggagcagagaccaaaaggtcaaggaaacaaagtacaaaatggatctgtacatcaaaaggatggattaaacgatgatgattttgaaccttacttgagtccacaggcaaggcccaataatgcatatactgccatgtcagattcctacttacccagttactacagtccctccattggcttctcctattctttgggtgaagctgcttggtctacggggggtgacacagccatgccctacttaacttcttatggacagctgagcaacggagagccccacttcctaccagatgcaatgtttgggcaaccaggagccctaggtagcactccatttcttggtcagcatggttttaatttctttcccagtgggattgacttctcagcatggggaaataacagttctcagggacagtctactcagagctctggatatagtagcaattatgcttatgcacctagctccttaggtggagccatgattgatggacagtcagcttttgccaatgagaccctcaataaggctcctggcatgaatactatagaccaagggatggcagcactgaagttgggtagcacagaagttgcaa

SEQ ID NO: 200720 - DNA, 879 bp, Homo sapiens
  Payload ID: 19614
  Gene Name: YTH N(6)-methyladenosine RNA binding protein 2
  ENST ID: ENST00000496288
  CDS Start-End: 157-879
gcctgagccgcgcgctgtgtctccgctgcgtccgccgaggcccccgagtgtcagggacaaaagcctccgcctgctcccgcagacggggctcatctgccgccgccgccgcgctgaggagagttcgccgccgtcgccgcccgtgaggatctgagagccatgtcggccagcagcctcttggagcagagaccaaaaggtcaaggaaacaaagtacaaaatggatctgtacatcaaaaggatggattaaacgatgatgattttgaaccttacttgagtccacagaataatgcatatactgccatgtcagattcctacttacccagttactacagtccctccattggcttctcctattctttgggtgaagctgcttggtctacggggggtgacacagccatgccctacttaacttcttatggacagctgagcaacggagagccccacttcctaccagatgcaatgtttgggcaaccaggagccctaggtagcactccatttcttggtcagcatggttttaatttctttcccagtgggattgacttctcagcatggggaaataacagttctcagggacagtctactcagagctctggatatagtagcaattatgcttatgcacctagctccttaggtggagccatgattgatggacagtcagcttttgccaatgagaccctcaataaggctcctggcatgaatactatagaccaagggatggcagcactgaagttgggtagcacagaagttgcaagcaatgttccaaaagttgtaggttctgctgttggtagcgggtccattactagtaacatcgtggcttccaatagtttgcctccagccaccattgctcctccaaaaccagcatcttgggctgatattgctagc

SEQ ID NO: 200721 - DNA, 2067 bp, Homo sapiens
  Payload ID: 19614
  Gene Name: YTH N(6)-methyladenosine RNA binding protein 2
  ENST ID: ENST00000621244
  CDS Start-End: 151-1860
gccgcgcgctgtgtctccgctgcgtccgccgaggcccccgagtgtcagggacaaaagcctccgcctgctcccgcagacggggctcatctgccgccgccgccgcgctgaggagagttcgccgccgtcgccgcccgtgaggatctgagagccatgtcggccagcagcctcttggagcagagaccaaaaggtcaaggaaacaaagtacaaaatggatctgtacatcaaaaggatggattaaacgatgatgattttgaaccttacttgagtccacaggcaaggcccaataatgcatatactgccatgtcagattcctacttacccagttactacagtccctccattggcttctcctattctttgggtgaagctgcttggtctacggggggtgacacagccatgccctacttaacttcttatggacagctgagcaacggagagccccacttcctaccagatgcaatgtttgggcaaccaggagccctaggtagcactccatttcttggtcagcatggttttaatttctttcccagtgggattgacttctcagcatggggaaataacagttctcagggacagtctactcagagctctggatatagtagcaattatgcttatgcacctagctccttaggtggagccatgattgatggacagtcagcttttgccaatgagaccctcaataaggctcctggcatgaatactatagaccaagggatggcagcactgaagttgggtagcacagaagttgcaagcaatgttccaaaagttgtaggttctgctgttggtagcgggtccattactagtaacatcgtggcttccaatagtttgcctccagccaccattgctcctccaaaaccagcatcttgggctgatattgctagcaagcctgcaaaacagcaacctaaactgaagaccaagaatggcattgcagggtcaagtcttccgccacccccgataaagcataacatggatattggaacttgggataacaagggtcccgttgcaaaagccccctcacaggctttggttcagaatataggtcagccaacccaggggtctcctcagcctgtaggtcagcaggctaacaatagcccaccagtggctcaggcatcagtagggcaacagacacagccattgcctccacctccaccacagcctgcccagctttcagtccagcaacaggcagctcagccaacccgctgggtagcacctcggaaccgtggcagtgggttcggtcataatggggtggatggtaatggagtaggacagtctcaggctggttctggatctactccttcagaaccccacccagtgttggagaagcttcggtccattaataactataaccccaaagattttgactggaatctgaaacatggccgggttttcatcattaagagctactctgaggacgatattcaccgttccattaagtataatatttggtgcagcacagagcatggtaacaagagactggatgctgcttatcgttccatgaacgggaaaggccccgtttacttacttttcagtgtcaacggcagtggacacttctgtggcgtggcagaaatgaaatctgctgtggactacaacacatgtgcaggtgtgtggtcccaggacaaatggaagggtcgttttgatgtcaggtggatttttgtgaaggacgttcccaatagccaactgcgacacattcgcctagagaacaacgagaataaaccagtgaccaactctagggacactcaggaagtgcctctggaaaaggctaagcaggtgttgaaaattatagccagctacaagcacaccacttccatttttgatgacttctcacactatgagaaacgccaaggaagaagaaagtgttaaaaaggaacgtcaaggtcgtgggaaataaaaggcagttctacacagactgcagcaacggttgcatctgcatatcctaagaggaaaaaatgaccttcaagagaattaggacttttttcttaatttcactgacttcagagacgattgcagacttgcagtttaagtattggaatttcacaaaagacataggacttaactggaaaatgaaaa

SEQ ID NO: 200722 - DNA, 5163 bp, Homo sapiens
  Payload ID: 19615
  Gene Name: YTH N(6)-methyladenosine RNA binding protein 3
  Uniprot ID: Q7Z739
  ENST ID: ENST00000539294
  CDS Start-End: 326-2083
aggaagagcgaggtgagcgcggacgtcagagtggagagcggaaggtcagggaggctcggagcggaagtgagactagggagtctgtccgccattgtggacccgagaagcagagagcgagagggggaagaggagcgtgcaagcggaaaagacgggcctcttcctccgactcccgagcgcgaggccctcattttgggttctcagcgaacggcggcagcggcggcggctggaacaatcactcggccaagggcgacagccaactgctgtgagtgcacggggagaggcccaggcagcggcggcggcggcggctctcgggttgcggtgaagaatgtcagccactagcgtggatcagagacctaaagggcaaggaaataaagtttcagtacaaaacggttcgattcatcaaaaagatgctgtaaatgatgatgattttgagccatacttaagtagccagacaaatcagagtaacagctatccaccaatgtcagatccatacatgcctagttactatgctccatccattggatttccatattctcttggggaagcagcgtggtccacagctggagaccagcctatgccatatctgacaacctatggacaaatgagtaatggagaacatcactatataccagatggtgtatttagtcaacctggggcattaggaaatacccctccatttcttggtcaacatggatttaacttttttcctggtaatgctgatttctctacatgggggacaagtggatctcagggacaatcaacacaaagttctgcttatagtagcagttatggctatccacctagttctcttgggagagctattactgatggacaggctggatttggcaatgatactttgagtaaggtgcctggcattagcagtattgagcaaggcatgactggactgaaaattggtggtgacctgacagctgcagtgacaaaaactgtaggtacagctttgagcagcagtggtatgactagcattgcaaccaatagtgtgcccccagttagcagtgcagcacctaaaccaacctcctgggctgccattgccagaaagcctgccaaacctcaaccgaaacttaaacccaagggcaatgtgggaattgggggttctgctgtaccaccacctcctataaaacacaacatgaatattggaacttgggatgaaaaagggtcagtggtaaaggctccaccaacccaaccagttctgcctcctcaaactataatccagcagcctcagccattaattcaaccaccaccattggtgcaaagccaactgcctcaacagcagcctcaaccaccacaaccacagcagcaacaaggacctcagccacaggcccagcctcaccaagtgcagcctcaacagcagcagctgcagaatcgctgggtagctcctcgtaacaggggagcaggcttcaaccagaacaatggagcgggcagtgaaaactttggtttaggtgttgtacctgtcagtgcttcaccttctagtgtagaagtgcatcccgtgctggaaaagctaaaggccataaacaactataatcccaaagactttgattggaatctgaagaatggacgtgtgtttataattaaaagctactctgaggatgacatacatcgttccattaaatactctatctggtgtagtactgagcatggtaataagcgtttggatgcagcttaccgttccctgaatgggaaaggcccactctatttactcttcagtgtgaatggcagtggacatttttgtggagtggctgaaatgaagtctgttgtggactataatgcgtatgctggtgtctggtctcaggataagtggaagggcaaatttgaagttaaatggatctttgtcaaagatgttcccaataaccaattacggcatattcgcttagaaaataatgacaacaaaccggttaccaattcaagggacactcaagaggtacccctagaaaaagctaagcaagtgcttaaaataattgctactttcaagcataccacctcaatctttgatgactttgcacattatgaaaagcgtcaagaagaggaggaagccatgcgtagggagagaaatagaaacaaacaataaccgtatgaagatgtcctgttaaatttacaacactaacgatgtagactctggaaatgcctaataagtcaaagaagacgtattaaagctcttttctgcttaaggtgacatctttgaacactttaacacaaagttgactcttctcgtaatggttttcatcagcgcatctgcccttatactcttcaccaaacacacttgagaactgtaacttcgtcaagcactttctgtcctgaagcttttaccagtatctgctgtcttttgtaattatgcatcctagctaaggcacagaagactgaatgaatgcaaggattcattaactctttgaatttgttaaatactaacagttaaccattagaagtggttcaatgatgtaagagtcacactgcttcaactttttctttgttgtagtttttaaattgtcgatttttagctatttgacagattaaaagcaaaataatcatgccatatttagtcctggagttcaagtctaaatgttgatgtgaaaaattattgtagtaaacttttaatatggcaaagcaaccttaagctctattttagccaaatgaaacataatctgaaattatattagaacatttcccttgtcttcaaactgtttggtgtaacagaatattgatatgcagcttggtggatttcaccagttaatgcacattcttcttccctcctccccccattaatatgtatactgaaaaatgtgcatttgtctgaggaattattttgtttgctaccacttaatgaatctcaaaattttgagtaaatgtacctcagtctaatcagactttttatgacctttataactacatttaaaacccttaattcctatttctgggtgtttgcgagcctgattgctatcatgaagtaaaaatttattactctaggtattcactagctaaataaacatagttcttgtttagcaagcatatgttgttcctcagctcttttctccagcttttgcagtgtcctggcatccttaaaatactttgaaaatatggccttgatccatggattaaatcagtatctaagtgaatgtgttgatgttttattgatcagatctatataagtgggaatacagcatatatctggatattcttatagttatctttttaacatcttatttttttcattaattacatatcaacattaattttgtatcttgaagcaaattgattttgtataattaaatgtgtcaagcatctgtattaattgatttgatggcataaggttatgaaaataatgtactgccccatgtattactgttccaaaaggagaaagctatgtagaaagatacattaagggtgaaaatagcaatacagtagatttgaataccttgatgttttgcattacttcatttatgtttacatcatgtttagaaatgttttcatttactgtggtctttggtcacttcagctcaaagacctagtgatggatatttctttgaggctttcatttatataattttattttgtacaatgttttttttaaatgtgcaaatactgtattcaagtgaaaaaaatacagtatttgtagataaccatagctactacacagttcttcggtagtcccagtgtagttatatcagtgtttactgaagggaacatcaaaatattaatggtatattataaaataaagactttcttaaaggaaaattgcacctattttacctttttaagagtaagccatgaaatcttgtaacatgtctcttaactatttataatgaaaagtggcatttgggtatagtcaccacagcaatgttctacatccctaagattatctaggtaggacatgtcaaagatgactgttgtcattctggaggtcctattagagaatattataaaagggtgaccttgtaggaaggatctgagtcctccccctgaggttctctttttcttggtgctttattagcaactctggatatttttataaaactagttacattataaacggtttcaaacatgtttaatttacattaggtttttatgtaagagtgtcatggaagcactcagcaagcaggctgattgcaatagactcagacatgcgaataaatgtaattgagagtctattcatggtgaggagtacatcccagtgcctttaacctggatttctaatcttaagtgaaatgggtgcagcattcctttggaaaaaaaaatctttttattttcaagtgataattttgtgtttttctcatataagttttctccagagcacccaccttctcttccttcttggtctgtcattatattgcaaaatatttttcctctgaatgaaattatcacaggttgtctcaagcacaaccaactgaatgtctcttaactgtggggaccaaaagggagagagcctggggtctacaagaggagacacatcatcaaatgtttgaatgatcacaaattaagacattatcagcccagtaaatttcttgcttaatgtttttccaagttctggcttgaatatttcttattaaagctatcttatgtgggtattttattttgaaaggtattatagtttgtatatttaacagtaaggaggaaactgtaaccaaaattagtatttctctatacgtattggtacttgaagattcctttcaaaagaaatccagcgttttcctaattttagtacttaatttctctttttaatttaagtgatctttctaattcgaaagctgtgttctttttgaataccgtgcatgggggttaagctgatgttaaaacagtttgcaataaaaaaaaatgaatcagcttaagtcatttaatcatttcaagtgcattctgcatcctttaaaaataagtttaagaaatttaagagaattgtgttttcattaagttttgcatatcttttgttatgccatgtaaattccctttttcgtatgattaaaggaaggttatgataaaatgattagttcatttacattcacttgtagcaattacatgagaatttgaattttgtcgtgtttgggtttgttcattcctgtgaatgatggtacagttaggtgagattttctgttatggtacccaaactcaccatttggtcctctttaatctttgagggtttcaataaaaattgttcactca

SEQ ID NO: 200723 - DNA, 3122 bp, Homo sapiens
  Payload ID: 19615
  Gene Name: YTH N(6)-methyladenosine RNA binding protein 3
  ENST ID: ENST00000517371
  CDS Start-End: 225-383
gagaagcagagagcgagagggggaagaggagcgtgcaagcggaaaagacgggcctcttcctccgactcccgagcgcgaggccctcattttgggttctcagcgaacggcggcagcggcggcggctggaacaatcactcggccaagggcgacagccaactgctgtgagtgcacggggagaggcccaggcagcggcggcggcggcggctctcgggttgcggtgaagaatgtcagccactagcgtggatcagagacctaaagggcaaggaaataaagtttcagtacaaaacggttcgattcatcaaaaagatgctgtaaatgatgatgattttgagccatacttaagtagccagacaaatcaggagagaaatagaaacaaacaataaccgtatgaagatgtcctgttaaatttacaacactaacgatgtagactctggaaatgcctaataagtcaaagaagacgtattaaagctcttttctgcttaaggtgacatctttgaacactttaacacaaagttgactcttctcgtaatggttttcatcagcgcatctgcccttatactcttcaccaaacacacttgagaactgtaacttcgtcaagcactttctgtcctgaagcttttaccagtatctgctgtcttttgtaattatgcatcctagctaaggcacagaagactgaatgaatgcaaggattcattaactctttgaatttgttaaatactaacagttaaccattagaagtggttcaatgatgtaagagtcacactgcttcaactttttctttgttgtagtttttaaattgtcgatttttagctatttgacagattaaaagcaaaataatcatgccatatttagtcctggagttcaagtctaaatgttgatgtgaaaaattattgtagtaaacttttaatatggcaaagcaaccttaagctctattttagccaaatgaaacataatctgaaattatattagaacatttcccttgtcttcaaactgtttggtgtaacagaatattgatatgcagcttggtggatttcaccagttaatgcacattcttcttccctcctccccccattaatatgtatactgaaaaatgtgcatttgtctgaggaattattttgtttgctaccacttaatgaatctcaaaattttgagtaaatgtacctcagtctaatcagactttttatgacctttataactacatttaaaacccttaattcctatttctgggtgtttgcgagcctgattgctatcatgaagtaaaaatttattactctaggtattcactagctaaataaacatagttcttgtttagcaagcatatgttgttcctcagctcttttctccagcttttgcagtgtcctggcatccttaaaatactttgaaaatatggccttgatccatggattaaatcagtatctaagtgaatgtgttgatgttttattgatcagatctatataagtgggaatacagcatatatctggatattcttatagttatctttttaacatcttatttttttcattaattacatatcaacattaattttgtatcttgaagcaaattgattttgtataattaaatgtgtcaagcatctgtattaattgatttgatggcataaggttatgaaaataatgtactgccccatgtattactgttccaaaaggagaaagctatgtagaaagatacattaagggtgaaaatagcaatacagtagatttgaataccttgatgttttgcattacttcatttatgtttacatcatgtttagaaatgttttcatttactgtggtctttggtcacttcagctcaaagacctagtgatggatatttctttgaggctttcatttatataattttattttgtacaatgttttttttaaatgtgcaaatactgtattcaagtgaaaaaaatacagtatttgtagataaccatagctactacacagttcttcggtagtcccagtgtagttatatcagtgtttactgaagggaacatcaaaatattaatggtatattataaaataaagactttcttaaaggaaaattgcacctattttacctttttaagagtaagccatgaaatcttgtaacatgtctcttaactatttataatgaaaagtggcatttgggtatagtcaccacagcaatgttctacatccctaagattatctaggtaggacatgtcaaagatgactgttgtcattctggaggtcctattagagaatattataaaagggtgaccttgtaggaaggatctgagtcctccccctgaggttctctttttcttggtgctttattagcaactctggatatttttataaaactagttacattataaacggtttcaaacatgtttaatttacattaggtttttatgtaagagtgtcatggaagcactcagcaagcaggctgattgcaatagactcagacatgcgaataaatgtaattgagagtctattcatggtgaggagtacatcccagtgcctttaacctggatttctaatcttaagtgaaatgggtgcagcattcctttggaaaaaaaaatctttttattttcaagtgataattttgtgtttttctcatataagttttctccagagcacccaccttctcttccttcttggtctgtcattatattgcaaaatatttttcctctgaatgaaattatcacaggttgtctcaagcacaaccaactgaatgtctcttaactgtggggaccaaaagggagagagcctggggtctacaagaggagacacatcatcaaatgtttgaatgatcacaaattaagacattatcagcccagtaaatttcttgcttaatgtttttccaagttctggcttgaatatttcttattaaagctatcttatgtgggtattttattttgaaaggtattatagtttgtatatttaacagtaaggaggaaactgtaaccaaaattagtatttctctatacgtattggtacttgaagattcctttcaaaagaaatccagcgttttcctaattttagtacttaatttctctttttaatttaagtgatctttctaattcgaaagctgtgttctttttgaataccgtgcatgggggttaagctgatgttaaaacagtttgcaataaaaaaaaa

SEQ ID NO: 200724 - DNA, 420 bp, Homo sapiens
  Payload ID: 19615
  Gene Name: YTH N(6)-methyladenosine RNA binding protein 3
  ENST ID: ENST00000617952
  CDS Start-End: 162-420
gcggggcttcggctcctccccgtcgccgccgctgccggccccataacgagacctaaagggcaaggaaataaaggtggggaaacatgatgcacagatctgttgactttcctaacttgatgtagtcaggaccagagcaaagaatcacctggctcctaaggcccatgttctatcttgatttgactctgtttcatagagcagaggaaacaggcgaagaatcattttcagtacaaaacggttcgattcatcaaaaagatgctgtaaatgatgatgattttgagccatacttaagtagccagacaaatcagagtaacagctatccaccaatgtcagatccatacatgcctagttactatgctccatccattggatttccatattctcttggggaagcagcgtggtccacagctggagaccagccta

SEQ ID NO: 200725 - DNA, 545 bp, Homo sapiens
  Payload ID: 19615
  Gene Name: YTH N(6)-methyladenosine RNA binding protein 3
  ENST ID: ENST00000619337
  CDS Start-End: 239-545
ataacggtgccccgggcgcaagttgctgcggtgtagctacccgggccggggcgtgcgccctggccccgtagcttgcgggcgggcgggcgcggtgccgcggcgggtggggagacctaaagggcaaggaaataaagtttcagtacaaaacggttcgattcatcaaaaagatgctgtaaatgatgatgattttgagccatacttaagtagccagacaaatcagagtaacagctatccaccaatgtcagatccatacatgcctagttactatgctccatccattggatttccatattctcttggggaagcagcgtggtccacagctggagaccagcctatgccatatctgacaacctatggacaaatgagtaatggagaacatcactatataccagatggtgtatttagtcaacctggggcattaggaaatacccctccatttcttggtcaacatggatttaacttttttcctggtaatgctgatttctctacatgggggacaagtggatctcagggacaatcaacacaaagttctgcttatagtagca

SEQ ID NO: 200726 - DNA, 2370 bp, Homo sapiens
  Payload ID: 19615
  Gene Name: YTH N(6)-methyladenosine RNA binding protein 3
  ENST ID: ENST00000621413
  CDS Start-End: 355-2121
agagagcgagagggggaagaggagcgtgcaagcggaaaagacgggcctcttcctccgactcccgagcgcgaggccctcattttgggttctcagcgaacggcggcagcggcggcggctggaacaatcactcggccaagggcgacagccaactgctgtgagtgcacggggagaggcccaggcagcggcggcggcggcggctctcgggttgcggtgaagaatgtcagccactagcgtggatcagagacctaaagggcaaggaaataaaggtggggaaacatgatgcacagatctgttgactttcctaacttgatgtagtcaggaccagagcaaagaatcacctggctcctaaggcccatgttctatcttgatttgactctgtttcatagagcagaggaaacaggcgaagaatcattttcagtacaaaacggttcgattcatcaaaaagatgctgtaaatgatgatgattttgagccatacttaagtagccagacaaatcagagtaacagctatccaccaatgtcagatccatacatgcctagttactatgctccatccattggatttccatattctcttggggaagcagcgtggtccacagctggagaccagcctatgccatatctgacaacctatggacaaatgagtaatggagaacatcactatataccagatggtgtatttagtcaacctggggcattaggaaatacccctccatttcttggtcaacatggatttaacttttttcctggtaatgctgatttctctacatgggggacaagtggatctcagggacaatcaacacaaagttctgcttatagtagcagttatggctatccacctagttctcttgggagagctattactgatggacaggctggatttggcaatgatactttgagtaaggtgcctggcattagcagtattgagcaaggcatgactggactgaaaattggtggtgacctgacagctgcagtgacaaaaactgtaggtacagctttgagcagcagtggtatgactagcattgcaaccaatagtgtgcccccagttagcagtgcagcacctaaaccaacctcctgggctgccattgccagaaagcctgccaaacctcaaccgaaacttaaacccaagggcaatgtgggaattgggggttctgctgtaccaccacctcctataaaacacaacatgaatattggaacttgggatgaaaaagggtcagtggtaaaggctccaccaacccaaccagttctgcctcctcaaactataatccagcagcctcagccattaattcaaccaccaccattggtgcaaagccaactgcctcaacagcagcctcaaccaccacaaccacagcagcaacaaggacctcagccacaggcccagcctcaccaagtgcagcctcaacagcagcagctgcagaatcgctgggtagctcctcgtaacaggggagcaggcttcaaccagaacaatggagcgggcagtgaaaactttggtttaggtgttgtacctgtcagtgcttcaccttctagtgtagaagtgcatcccgtgctggaaaagctaaaggccataaacaactataatcccaaagactttgattggaatctgaagaatggacgtgtgtttataattaaaagctactctgaggatgacatacatcgttccattaaatactctatctggtgtagtactgagcatggtaataagcgtttggatgcagcttaccgttccctgaatgggaaaggcccactctatttactcttcagtgtgaatggcagtggacatttttgtggagtggctgaaatgaagtctgttgtggactataatgcgtatgctggtgtctggtctcaggataagtggaagggcaaatttgaagttaaatggatctttgtcaaagatgttcccaataaccaattacggcatattcgcttagaaaataatgacaacaaaccggttaccaattcaagggacactcaagaggtacccctagaaaaagctaagcaagtgcttaaaataattgctactttcaagcataccacctcaatctttgatgactttgcacattatgaaaagcgtcaagaagaggaggaagccatgcgtagggagagaaatagaaacaaacaataaccgtatgaagatgtcctgttaaatttacaacactaacgatgtagactctggaaatgcctaataagtcaaagaagacgtattaaagctcttttctgcttaaggtgacatctttgaacactttaacacaaagttgactcttctcgtaatggttttcatcagcgcatctgcccttatactcttcaccaaacacacttgagaactgtaacttcgtcaagcactttctgtcctgaagcttttaccagtatctgc

SEQ ID NO: 200727 - DNA, 2296 bp, Homo sapiens
  Payload ID: 19615
  Gene Name: YTH N(6)-methyladenosine RNA binding protein 3
  ENST ID: ENST00000621890
  CDS Start-End: 231-1835
ataacggtgccccgggcgcaagttgctgcggtgtagctacccgggccggggcgtgcgccctggccccgtagcttgcgggcgggcgggcgcggtgccgcggcggacctaaagggcaaggaaataaagtttcagtacaaaacggttcgattcatcaaaaagatgctgtaaatgatgatgattttgagccatacttaagtagccagacaaatcagagtaacagctatccaccaatgtcagatccatacatgcctagttactatgctccatccattggatttccatattctcttggggaagcagcgtggtccacagctggagaccagcctatgccatatctgacaacctatggacaaatgagtaatggagaacatcactatataccagatggtgtatttagtcaacctggggcattaggaaatacccctccatttcttggtcaacatggatttaacttttttcctggtaatgctgatttctctacatgggggacaagtggatctcagggacaatcaacacaaagttctgcttatagtagcagttatggctatccacctagttctcttgggagagctattactgatggacaggctggatttggcaatgatactttgagtaaggtgcctggcattagcagtattgagcaaggcatgactggactgaaaattggtggtgacctgacagctgcagtgacaaaaactgtaggtacagctttgagcagcagtggtatgactagcattgcaaccaatagtgtgcccccagttagcagtgcagcacctaaaccaacctcctgggctgccattgccagaaagcctgccaaacctcaaccgaaacttaaacccaagggcaatgtgggaattgggggttctgctgtaccaccacctcctataaaacacaacatgaatattggaacttgggatgaaaaagggtcagtggtaaaggctccaccaacccaaccagttctgcctcctcaaactataatccagcagcctcagccattaattcaaccaccaccattggtgcaaagccaactgcctcaacagcagcctcaaccaccacaaccacagcagcaacaaggacctcagccacaggcccagcctcaccaagtgcagcctcaacagcagcagctgcagaatcgctgggtagctcctcgtaacaggggagcaggcttcaaccagaacaatggagcgggcagtgaaaactttggtttaggtgttgtacctgtcagtgcttcaccttctagtgtagaagtgcatcccgtgctggaaaagctaaaggccataaacaactataatcccaaagactttgattggaatctgaagaatggacgtgtgtttataattaaaagctactctgaggatgacatacatcgttccattaaatactctatctggtgtagtactgagcatggtaataagcgtttggatgcagcttaccgttccctgaatgggaaaggcccactctatttactcttcagtgtgaatggcagtggacatttttgtggagtggctgaaatgaagtctgttgtggactataatgcgtatgctggtgtctggtctcaggataagtggaagggcaaatttgaagttaaatggatctttgtcaaagatgttcccaataaccaattacggcatattcgcttagaaaataatgacaacaaaccggttaccaattcaagggacactcaagaggtacccctagaaaaagctaagcaagtgcttaaaataattgctactttcaagcataccacctcaatctttgatgactttgcacattatgaaaagcgtcaagaagaggaggaagccatgcgtagggagagaaatagaaacaaacaataaccgtatgaagatgtcctgttaaatttacaacactaacgatgtagactctggaaatgcctaataagtcaaagaagacgtattaaagctcttttctgcttaaggtgacatctttgaacactttaacacaaagttgactcttctcgtaatggttttcatcagcgcatctgcccttatactcttcaccaaacacacttgagaactgtaacttcgtcaagcactttctgtcctgaagcttttaccagtatctgctgtcttttgtaattatgcatcctagctaaggcacagaagactgaatgaatgcaaggattcattaactctttgaatttgttaaatactaacagttaaccattagaagtggttcaatgatgtaagagtcacactgcttcaactttttctttgttgtagtttttaaattgtcgatttttagctatttgacagattaaaagcaaaataatcatgcc

SEQ ID NO: 200728 - DNA, 593 bp, Homo sapiens
  Payload ID: 19615
  Gene Name: YTH N(6)-methyladenosine RNA binding protein 3
  ENST ID: ENST00000612880
  CDS Start-End: 259-593
tgcaagcggaaaagacgggcctcttcctccgactcccgagcgcgaggccctcattttgggttctcagcgaacggcggcagcggcggcggctggaacaatcactcggccaagggcgacagccaactgctgtgagtgcacggggagaggcccaggcagcggcggcggcggcggctctcgggttgcggtgaagaatgtcagccactagcgtggatcagagacctaaagggcaaggaaataaagagtaacagctatccaccaatgtcagatccatacatgcctagttactatgctccatccattggatttccatattctcttggggaagcagcgtggtccacagctggagaccagcctatgccatatctgacaacctatggacaaatgagtaatggagaacatcactatataccagatggtgtatttagtcaacctggggcattaggaaatacccctccatttcttggtcaacatggatttaacttttttcctggtaatgctgatttctctacatgggggacaagtggatctcagggacaatcaacacaaagttctgcttatagtagcagttatggctatccacctagttctcttgg

SEQ ID NO: 200729 - DNA, 2363 bp, Homo sapiens
  Payload ID: 19615
  Gene Name: YTH N(6)-methyladenosine RNA binding protein 3
  ENST ID: ENST00000621820
  CDS Start-End: 198-1964
aagttgctgcggtgtagctacccgggccggggcgtgcgccctggccccgtagcttgcgggcgggcgggcgcggtgccgcggcggagacctaaagggcaaggaaataaaggtggggaaacatgatgcacagatctgttgactttcctaacttgatgtagtcaggaccagagcaaagaatcacctggctcctaaggcccatgttctatcttgatttgactctgtttcatagagcagaggaaacaggcgaagaatcattttcagtacaaaacggttcgattcatcaaaaagatgctgtaaatgatgatgattttgagccatacttaagtagccagacaaatcagagtaacagctatccaccaatgtcagatccatacatgcctagttactatgctccatccattggatttccatattctcttggggaagcagcgtggtccacagctggagaccagcctatgccatatctgacaacctatggacaaatgagtaatggagaacatcactatataccagatggtgtatttagtcaacctggggcattaggaaatacccctccatttcttggtcaacatggatttaacttttttcctggtaatgctgatttctctacatgggggacaagtggatctcagggacaatcaacacaaagttctgcttatagtagcagttatggctatccacctagttctcttgggagagctattactgatggacaggctggatttggcaatgatactttgagtaaggtgcctggcattagcagtattgagcaaggcatgactggactgaaaattggtggtgacctgacagctgcagtgacaaaaactgtaggtacagctttgagcagcagtggtatgactagcattgcaaccaatagtgtgcccccagttagcagtgcagcacctaaaccaacctcctgggctgccattgccagaaagcctgccaaacctcaaccgaaacttaaacccaagggcaatgtgggaattgggggttctgctgtaccaccacctcctataaaacacaacatgaatattggaacttgggatgaaaaagggtcagtggtaaaggctccaccaacccaaccagttctgcctcctcaaactataatccagcagcctcagccattaattcaaccaccaccattggtgcaaagccaactgcctcaacagcagcctcaaccaccacaaccacagcagcaacaaggacctcagccacaggcccagcctcaccaagtgcagcctcaacagcagcagctgcagaatcgctgggtagctcctcgtaacaggggagcaggcttcaaccagaacaatggagcgggcagtgaaaactttggtttaggtgttgtacctgtcagtgcttcaccttctagtgtagaagtgcatcccgtgctggaaaagctaaaggccataaacaactataatcccaaagactttgattggaatctgaagaatggacgtgtgtttataattaaaagctactctgaggatgacatacatcgttccattaaatactctatctggtgtagtactgagcatggtaataagcgtttggatgcagcttaccgttccctgaatgggaaaggcccactctatttactcttcagtgtgaatggcagtggacatttttgtggagtggctgaaatgaagtctgttgtggactataatgcgtatgctggtgtctggtctcaggataagtggaagggcaaatttgaagttaaatggatctttgtcaaagatgttcccaataaccaattacggcatattcgcttagaaaataatgacaacaaaccggttaccaattcaagggacactcaagaggtacccctagaaaaagctaagcaagtgcttaaaataattgctactttcaagcataccacctcaatctttgatgactttgcacattatgaaaagcgtcaagaagaggaggaagccatgcgtagggagagaaatagaaacaaacaataaccgtatgaagatgtcctgttaaatttacaacactaacgatgtagactctggaaatgcctaataagtcaaagaagacgtattaaagctcttttctgcttaaggtgacatctttgaacactttaacacaaagttgactcttctcgtaatggttttcatcagcgcatctgcccttatactcttcaccaaacacacttgagaactgtaacttcgtcaagcactttctgtcctgaagcttttaccagtatctgctgtcttttgtaattatgcatcctagctaaggcacagaagactgaatgaatgcaaggattcattaactctttgaatttgttaaatactaacagttaaccattagaagtggttcaatgatgtaagagtcacactgcttcaactttttctttg

SEQ ID NO: 200730 - DNA, 5076 bp, Homo sapiens
  Payload ID: 19615
  Gene Name: YTH N(6)-methyladenosine RNA binding protein 3
  ENST ID: ENST00000617200
  CDS Start-End: 393-1997
aggaagagcgaggtgagcgcggacgtcagagtggagagcggaaggtcagggaggctcggagcggaagtgagactagggagtctgtccgccattgtggacccgagaagcagagagcgagagggggaagaggagcgtgcaagcggaaaagacgggcctcttcctccgactcccgagcgcgaggccctcattttgggttctcagcgaacggcggcagcggcggcggctggaacaatcactcggccaagggcgacagccaactgctgtgagtgcacggggagaggcccaggcagcggcggcggcggcggctctcgggttgcggtgaagaatgtcagccactagcgtggatcagagacctaaagggcaaggaaataaagagtaacagctatccaccaatgtcagatccatacatgcctagttactatgctccatccattggatttccatattctcttggggaagcagcgtggtccacagctggagaccagcctatgccatatctgacaacctatggacaaatgagtaatggagaacatcactatataccagatggtgtatttagtcaacctggggcattaggaaatacccctccatttcttggtcaacatggatttaacttttttcctggtaatgctgatttctctacatgggggacaagtggatctcagggacaatcaacacaaagttctgcttatagtagcagttatggctatccacctagttctcttgggagagctattactgatggacaggctggatttggcaatgatactttgagtaaggtgcctggcattagcagtattgagcaaggcatgactggactgaaaattggtggtgacctgacagctgcagtgacaaaaactgtaggtacagctttgagcagcagtggtatgactagcattgcaaccaatagtgtgcccccagttagcagtgcagcacctaaaccaacctcctgggctgccattgccagaaagcctgccaaacctcaaccgaaacttaaacccaagggcaatgtgggaattgggggttctgctgtaccaccacctcctataaaacacaacatgaatattggaacttgggatgaaaaagggtcagtggtaaaggctccaccaacccaaccagttctgcctcctcaaactataatccagcagcctcagccattaattcaaccaccaccattggtgcaaagccaactgcctcaacagcagcctcaaccaccacaaccacagcagcaacaaggacctcagccacaggcccagcctcaccaagtgcagcctcaacagcagcagctgcagaatcgctgggtagctcctcgtaacaggggagcaggcttcaaccagaacaatggagcgggcagtgaaaactttggtttaggtgttgtacctgtcagtgcttcaccttctagtgtagaagtgcatcccgtgctggaaaagctaaaggccataaacaactataatcccaaagactttgattggaatctgaagaatggacgtgtgtttataattaaaagctactctgaggatgacatacatcgttccattaaatactctatctggtgtagtactgagcatggtaataagcgtttggatgcagcttaccgttccctgaatgggaaaggcccactctatttactcttcagtgtgaatggcagtggacatttttgtggagtggctgaaatgaagtctgttgtggactataatgcgtatgctggtgtctggtctcaggataagtggaagggcaaatttgaagttaaatggatctttgtcaaagatgttcccaataaccaattacggcatattcgcttagaaaataatgacaacaaaccggttaccaattcaagggacactcaagaggtacccctagaaaaagctaagcaagtgcttaaaataattgctactttcaagcataccacctcaatctttgatgactttgcacattatgaaaagcgtcaagaagaggaggaagccatgcgtagggagagaaatagaaacaaacaataaccgtatgaagatgtcctgttaaatttacaacactaacgatgtagactctggaaatgcctaataagtcaaagaagacgtattaaagctcttttctgcttaaggtgacatctttgaacactttaacacaaagttgactcttctcgtaatggttttcatcagcgcatctgcccttatactcttcaccaaacacacttgagaactgtaacttcgtcaagcactttctgtcctgaagcttttaccagtatctgctgtcttttgtaattatgcatcctagctaaggcacagaagactgaatgaatgcaaggattcattaactctttgaatttgttaaatactaacagttaaccattagaagtggttcaatgatgtaagagtcacactgcttcaactttttctttgttgtagtttttaaattgtcgatttttagctatttgacagattaaaagcaaaataatcatgccatatttagtcctggagttcaagtctaaatgttgatgtgaaaaattattgtagtaaacttttaatatggcaaagcaaccttaagctctattttagccaaatgaaacataatctgaaattatattagaacatttcccttgtcttcaaactgtttggtgtaacagaatattgatatgcagcttggtggatttcaccagttaatgcacattcttcttccctcctccccccattaatatgtatactgaaaaatgtgcatttgtctgaggaattattttgtttgctaccacttaatgaatctcaaaattttgagtaaatgtacctcagtctaatcagactttttatgacctttataactacatttaaaacccttaattcctatttctgggtgtttgcgagcctgattgctatcatgaagtaaaaatttattactctaggtattcactagctaaataaacatagttcttgtttagcaagcatatgttgttcctcagctcttttctccagcttttgcagtgtcctggcatccttaaaatactttgaaaatatggccttgatccatggattaaatcagtatctaagtgaatgtgttgatgttttattgatcagatctatataagtgggaatacagcatatatctggatattcttatagttatctttttaacatcttatttttttcattaattacatatcaacattaattttgtatcttgaagcaaattgattttgtataattaaatgtgtcaagcatctgtattaattgatttgatggcataaggttatgaaaataatgtactgccccatgtattactgttccaaaaggagaaagctatgtagaaagatacattaagggtgaaaatagcaatacagtagatttgaataccttgatgttttgcattacttcatttatgtttacatcatgtttagaaatgttttcatttactgtggtctttggtcacttcagctcaaagacctagtgatggatatttctttgaggctttcatttatataattttattttgtacaatgttttttttaaatgtgcaaatactgtattcaagtgaaaaaaatacagtatttgtagataaccatagctactacacagttcttcggtagtcccagtgtagttatatcagtgtttactgaagggaacatcaaaatattaatggtatattataaaataaagactttcttaaaggaaaattgcacctattttacctttttaagagtaagccatgaaatcttgtaacatgtctcttaactatttataatgaaaagtggcatttgggtatagtcaccacagcaatgttctacatccctaagattatctaggtaggacatgtcaaagatgactgttgtcattctggaggtcctattagagaatattataaaagggtgaccttgtaggaaggatctgagtcctccccctgaggttctctttttcttggtgctttattagcaactctggatatttttataaaactagttacattataaacggtttcaaacatgtttaatttacattaggtttttatgtaagagtgtcatggaagcactcagcaagcaggctgattgcaatagactcagacatgcgaataaatgtaattgagagtctattcatggtgaggagtacatcccagtgcctttaacctggatttctaatcttaagtgaaatgggtgcagcattcctttggaaaaaaaaatctttttattttcaagtgataattttgtgtttttctcatataagttttctccagagcacccaccttctcttccttcttggtctgtcattatattgcaaaatatttttcctctgaatgaaattatcacaggttgtctcaagcacaaccaactgaatgtctcttaactgtggggaccaaaagggagagagcctggggtctacaagaggagacacatcatcaaatgtttgaatgatcacaaattaagacattatcagcccagtaaatttcttgcttaatgtttttccaagttctggcttgaatatttcttattaaagctatcttatgtgggtattttattttgaaaggtattatagtttgtatatttaacagtaaggaggaaactgtaaccaaaattagtatttctctatacgtattggtacttgaagattcctttcaaaagaaatccagcgttttcctaattttagtacttaatttctctttttaatttaagtgatctttctaattcgaaagctgtgttctttttgaataccgtgcatgggggttaagctgatgttaaaacagtttgcaataaaaaaaaatgaatcagcttaagtcatttaatcatttcaagtgcattctgcatcctttaaaaataagtttaagaaatttaagagaattgtgttttcattaagttttgcatatcttttgttatgccatgtaaattccctttttcgtatgattaaaggaaggttatgataaaatgattagttcatttacattcacttgtagcaattacatgagaatttgaattttgtcgtgtttgggtttgttcattcctgtgaatgatggtacagttaggtgagattttctgttatggtacccaaactcaccatttggtcctctttaatctttgagggtttcaataaaaattgttcactc

SEQ ID NO: 200731 - DNA, 5092 bp, Homo sapiens
  Payload ID: 19615
  Gene Name: YTH N(6)-methyladenosine RNA binding protein 3
  ENST ID: ENST00000615676
  CDS Start-End: 224-349
agaagcagagagcgagagggggaagaggagcgtgcaagcggaaaagacgggcctcttcctccgactcccgagcgcgaggccctcattttgggttctcagcgaacggcggcagcggcggcggctggaacaatcactcggccaagggcgacagccaactgctgtgagtgcacggggagaggcccaggcagcggcggcggcggcggctctcgggttgcggtgaagaatgtcagccactagcgtggatcagagacctaaagggcaaggaaataaaggagcagtaaagccagtgtcagaggagaacagtttcagtacaaaacggttcgattcatcaaaaagatgctgtaaatgatgatgattttgagccatacttaagtagccagacaaatcagagtaacagctatccaccaatgtcagatccatacatgcctagttactatgctccatccattggatttccatattctcttggggaagcagcgtggtccacagctggagaccagcctatgccatatctgacaacctatggacaaatgagtaatggagaacatcactatataccagatggtgtatttagtcaacctggggcattaggaaatacccctccatttcttggtcaacatggatttaacttttttcctggtaatgctgatttctctacatgggggacaagtggatctcagggacaatcaacacaaagttctgcttatagtagcagttatggctatccacctagttctcttgggagagctattactgatggacaggctggatttggcaatgatactttgagtaaggtgcctggcattagcagtattgagcaaggcatgactggactgaaaattggtggtgacctgacagctgcagtgacaaaaactgtaggtacagctttgagcagcagtggtatgactagcattgcaaccaatagtgtgcccccagttagcagtgcagcacctaaaccaacctcctgggctgccattgccagaaagcctgccaaacctcaaccgaaacttaaacccaagggcaatgtgggaattgggggttctgctgtaccaccacctcctataaaacacaacatgaatattggaacttgggatgaaaaagggtcagtggtaaaggctccaccaacccaaccagttctgcctcctcaaactataatccagcagcctcagccattaattcaaccaccaccattggtgcaaagccaactgcctcaacagcagcctcaaccaccacaaccacagcagcaacaaggacctcagccacaggcccagcctcaccaagtgcagcctcaacagcagcagctgcagaatcgctgggtagctcctcgtaacaggggagcaggcttcaaccagaacaatggagcgggcagtgaaaactttggtttaggtgttgtacctgtcagtgcttcaccttctagtgtagaagtgcatcccgtgctggaaaagctaaaggccataaacaactataatcccaaagactttgattggaatctgaagaatggacgtgtgtttataattaaaagctactctgaggatgacatacatcgttccattaaatactctatctggtgtagtactgagcatggtaataagcgtttggatgcagcttaccgttccctgaatgggaaaggcccactctatttactcttcagtgtgaatggcagtggacatttttgtggagtggctgaaatgaagtctgttgtggactataatgcgtatgctggtgtctggtctcaggataagtggaagggcaaatttgaagttaaatggatctttgtcaaagatgttcccaataaccaattacggcatattcgcttagaaaataatgacaacaaaccggttaccaattcaagggacactcaagaggtacccctagaaaaagctaagcaagtgcttaaaataattgctactttcaagcataccacctcaatctttgatgactttgcacattatgaaaagcgtcaagaagaggaggaagccatgcgtagggagagaaatagaaacaaacaataaccgtatgaagatgtcctgttaaatttacaacactaacgatgtagactctggaaatgcctaataagtcaaagaagacgtattaaagctcttttctgcttaaggtgacatctttgaacactttaacacaaagttgactcttctcgtaatggttttcatcagcgcatctgcccttatactcttcaccaaacacacttgagaactgtaacttcgtcaagcactttctgtcctgaagcttttaccagtatctgctgtcttttgtaattatgcatcctagctaaggcacagaagactgaatgaatgcaaggattcattaactctttgaatttgttaaatactaacagttaaccattagaagtggttcaatgatgtaagagtcacactgcttcaactttttctttgttgtagtttttaaattgtcgatttttagctatttgacagattaaaagcaaaataatcatgccatatttagtcctggagttcaagtctaaatgttgatgtgaaaaattattgtagtaaacttttaatatggcaaagcaaccttaagctctattttagccaaatgaaacataatctgaaattatattagaacatttcccttgtcttcaaactgtttggtgtaacagaatattgatatgcagcttggtggatttcaccagttaatgcacattcttcttccctcctccccccattaatatgtatactgaaaaatgtgcatttgtctgaggaattattttgtttgctaccacttaatgaatctcaaaattttgagtaaatgtacctcagtctaatcagactttttatgacctttataactacatttaaaacccttaattcctatttctgggtgtttgcgagcctgattgctatcatgaagtaaaaatttattactctaggtattcactagctaaataaacatagttcttgtttagcaagcatatgttgttcctcagctcttttctccagcttttgcagtgtcctggcatccttaaaatactttgaaaatatggccttgatccatggattaaatcagtatctaagtgaatgtgttgatgttttattgatcagatctatataagtgggaatacagcatatatctggatattcttatagttatctttttaacatcttatttttttcattaattacatatcaacattaattttgtatcttgaagcaaattgattttgtataattaaatgtgtcaagcatctgtattaattgatttgatggcataaggttatgaaaataatgtactgccccatgtattactgttccaaaaggagaaagctatgtagaaagatacattaagggtgaaaatagcaatacagtagatttgaataccttgatgttttgcattacttcatttatgtttacatcatgtttagaaatgttttcatttactgtggtctttggtcacttcagctcaaagacctagtgatggatatttctttgaggctttcatttatataattttattttgtacaatgttttttttaaatgtgcaaatactgtattcaagtgaaaaaaatacagtatttgtagataaccatagctactacacagttcttcggtagtcccagtgtagttatatcagtgtttactgaagggaacatcaaaatattaatggtatattataaaataaagactttcttaaaggaaaattgcacctattttacctttttaagagtaagccatgaaatcttgtaacatgtctcttaactatttataatgaaaagtggcatttgggtatagtcaccacagcaatgttctacatccctaagattatctaggtaggacatgtcaaagatgactgttgtcattctggaggtcctattagagaatattataaaagggtgaccttgtaggaaggatctgagtcctccccctgaggttctctttttcttggtgctttattagcaactctggatatttttataaaactagttacattataaacggtttcaaacatgtttaatttacattaggtttttatgtaagagtgtcatggaagcactcagcaagcaggctgattgcaatagactcagacatgcgaataaatgtaattgagagtctattcatggtgaggagtacatcccagtgcctttaacctggatttctaatcttaagtgaaatgggtgcagcattcctttggaaaaaaaaatctttttattttcaagtgataattttgtgtttttctcatataagttttctccagagcacccaccttctcttccttcttggtctgtcattatattgcaaaatatttttcctctgaatgaaattatcacaggttgtctcaagcacaaccaactgaatgtctcttaactgtggggaccaaaagggagagagcctggggtctacaagaggagacacatcatcaaatgtttgaatgatcacaaattaagacattatcagcccagtaaatttcttgcttaatgtttttccaagttctggcttgaatatttcttattaaagctatcttatgtgggtattttattttgaaaggtattatagtttgtatatttaacagtaaggaggaaactgtaaccaaaattagtatttctctatacgtattggtacttgaagattcctttcaaaagaaatccagcgttttcctaattttagtacttaatttctctttttaatttaagtgatctttctaattcgaaagctgtgttctttttgaataccgtgcatgggggttaagctgatgttaaaacagtttgcaataaaaaaaaatgaatcagcttaagtcatttaatcatttcaagtgcattctgcatcctttaaaaataagtttaagaaatttaagagaattgtgttttcattaagttttgcatatcttttgttatgccatgtaaattccctttttcgtatgattaaaggaaggttatgataaaatgattagttcatttacattcacttgtagcaattacatgagaatttgaattttgtcgtgtttgggtttgttcattcctgtgaatgatggtacagttaggtgagattttctgttatggtacccaaactcaccatttggtcctctttaatctttgagggtttcaataaaaattgttcactca

SEQ ID NO: 200732 - DNA, 2387 bp, Homo sapiens
  Payload ID: 19615
  Gene Name: YTH N(6)-methyladenosine RNA binding protein 3
  ENST ID: ENST00000621957
  CDS Start-End: 227-1978
ccgagaagcagagagcgagagggggaagaggagcgtgcaagcggaaaagacgggcctcttcctccgactcccgagcgcgaggccctcattttgggttctcagcgaacggcggcagcggcggcggctggaacaatcactcggccaagggcgacagccaactgctgtgagtgcacggggagaggcccaggcagcggcggcggcggcggctctcgggttgcggtgaagaatgtcagccactagcgtggatcagagacctaaagggcaaggaaataaagtacaaaacggttcgattcatcaaaaagatgctgtaaatgatgatgattttgagccatacttaagtagccagacaaatcagagtaacagctatccaccaatgtcagatccatacatgcctagttactatgctccatccattggatttccatattctcttggggaagcagcgtggtccacagctggagaccagcctatgccatatctgacaacctatggacaaatgagtaatggagaacatcactatataccagatggtgtatttagtcaacctggggcattaggaaatacccctccatttcttggtcaacatggatttaacttttttcctggtaatgctgatttctctacatgggggacaagtggatctcagggacaatcaacacaaagttctgcttatagtagcagttatggctatccacctagttctcttgggagagctattactgatggacaggctggatttggcaatgatactttgagtaaggtgcctggcattagcagtattgagcaaggcatgactggactgaaaattggtggtgacctgacagctgcagtgacaaaaactgtaggtacagctttgagcagcagtggtatgactagcattgcaaccaatagtgtgcccccagttagcagtgcagcacctaaaccaacctcctgggctgccattgccagaaagcctgccaaacctcaaccgaaacttaaacccaagggcaatgtgggaattgggggttctgctgtaccaccacctcctataaaacacaacatgaatattggaacttgggatgaaaaagggtcagtggtaaaggctccaccaacccaaccagttctgcctcctcaaactataatccagcagcctcagccattaattcaaccaccaccattggtgcaaagccaactgcctcaacagcagcctcaaccaccacaaccacagcagcaacaaggacctcagccacaggcccagcctcaccaagtgcagcctcaacagcagcagctgcagaatcgctgggtagctcctcgtaacaggggagcaggcttcaaccagaacaatggagcgggcagtgaaaactttggtttaggtgttgtacctgtcagtgcttcaccttctagtgtagaagtgcatcccgtgctggaaaagctaaaggccataaacaactataatcccaaagactttgattggaatctgaagaatggacgtgtgtttataattaaaagctactctgaggatgacatacatcgttccattaaatactctatctggtgtagtactgagcatggtaataagcgtttggatgcagcttaccgttccctgaatgggaaaggcccactctatttactcttcagtgtgaatggcagtggacatttttgtggagtggctgaaatgaagtctgttgtggactataatgcgtatgctggtgtctggtctcaggataagtggaagggcaaatttgaagttaaatggatctttgtcaaagatgttcccaataaccaattacggcatattcgcttagaaaataatgacaacaaaccggttaccaattcaagggacactcaagaggtacccctagaaaaagctaagcaagtgcttaaaataattgctactttcaagcataccacctcaatctttgatgactttgcacattatgaaaagcgtcaagaagaggaggaagccatgcgtagggagagaaatagaaacaaacaataaccgtatgaagatgtcctgttaaatttacaacactaacgatgtagactctggaaatgcctaataagtcaaagaagacgtattaaagctcttttctgcttaaggtgacatctttgaacactttaacacaaagttgactcttctcgtaatggttttcatcagcgcatctgcccttatactcttcaccaaacacacttgagaactgtaacttcgtcaagcactttctgtcctgaagcttttaccagtatctgctgtcttttgtaattatgcatcctagctaaggcacagaagactgaatgaatgcaaggattcattaactctttgaatttgttaaatactaacagttaaccattagaagtggttcaatgatgtaagagtcacactgcttcaactttttctttgttgtagtttt

SEQ ID NO: 200733 - DNA, 563 bp, Homo sapiens
  Payload ID: 19615
  Gene Name: YTH N(6)-methyladenosine RNA binding protein 3
  ENST ID: ENST00000613853
  CDS Start-End: 206-563
gcaagttgctgcggtgtagctacccgggccggggcgtgcgccctggccccgtagcttgcgggcgggcgggcgcggtgccgcggcgggtggggagacctaaagggcaaggaaataaaggtggggaaacatgatgcacagatctgttgactttcctaacttgatgtagtcaggaccagagcaaagaatcacctggctcctaaggcccatgttctatcttgatttgactctgtttcatagagcagaggaaacaggcgaagaatcattttcagtacaaaacggttcgattcatcaaaaagatgctgtaaatgatgatgattttgagccatacttaagtagccagacaaatcagagtaacagctatccaccaatgtcagatccatacatgcctagttactatgctccatccattggatttccatattctcttggggaagcagcgtggtccacagctggagaccagcctatgccatatctgacaacctatggacaaatgagtaatggagaacatcactatataccagatggtgtatttagtcaacctggggcattaggaaatacccctc

SEQ ID NO: 200734 - DNA, 5193 bp, Homo sapiens
  Payload ID: 19615
  Gene Name: YTH N(6)-methyladenosine RNA binding protein 3
  ENST ID: ENST00000623280
  CDS Start-End: 510-2114
aggaagagcgaggtgagcgcggacgtcagagtggagagcggaaggtcagggaggctcggagcggaagtgagactagggagtctgtccgccattgtggacccgagaagcagagagcgagagggggaagaggagcgtgcaagcggaaaagacgggcctcttcctccgactcccgagcgcgaggccctcattttgggttctcagcgaacggcggcagcggcggcggctggaacaatcactcggccaagggcgacagccaactgctgtgagtgcacggggagaggcccaggcagcggcggcggcggcggctctcgggttgcggtgaagaatgtcagccactagcgtggatcagagacctaaagggcaaggaaataaaggagcagtaaagccagtgtcagaggagaacagtttcagtacaaaacggttcgattcatcaaaaagatgctgtaaatgatgatgattttgagccatacttaagtagccagacaaatcagagtaacagctatccaccaatgtcagatccatacatgcctagttactatgctccatccattggatttccatattctcttggggaagcagcgtggtccacagctggagaccagcctatgccatatctgacaacctatggacaaatgagtaatggagaacatcactatataccagatggtgtatttagtcaacctggggcattaggaaatacccctccatttcttggtcaacatggatttaacttttttcctggtaatgctgatttctctacatgggggacaagtggatctcagggacaatcaacacaaagttctgcttatagtagcagttatggctatccacctagttctcttgggagagctattactgatggacaggctggatttggcaatgatactttgagtaaggtgcctggcattagcagtattgagcaaggcatgactggactgaaaattggtggtgacctgacagctgcagtgacaaaaactgtaggtacagctttgagcagcagtggtatgactagcattgcaaccaatagtgtgcccccagttagcagtgcagcacctaaaccaacctcctgggctgccattgccagaaagcctgccaaacctcaaccgaaacttaaacccaagggcaatgtgggaattgggggttctgctgtaccaccacctcctataaaacacaacatgaatattggaacttgggatgaaaaagggtcagtggtaaaggctccaccaacccaaccagttctgcctcctcaaactataatccagcagcctcagccattaattcaaccaccaccattggtgcaaagccaactgcctcaacagcagcctcaaccaccacaaccacagcagcaacaaggacctcagccacaggcccagcctcaccaagtgcagcctcaacagcagcagctgcagaatcgctgggtagctcctcgtaacaggggagcaggcttcaaccagaacaatggagcgggcagtgaaaactttggtttaggtgttgtacctgtcagtgcttcaccttctagtgtagaagtgcatcccgtgctggaaaagctaaaggccataaacaactataatcccaaagactttgattggaatctgaagaatggacgtgtgtttataattaaaagctactctgaggatgacatacatcgttccattaaatactctatctggtgtagtactgagcatggtaataagcgtttggatgcagcttaccgttccctgaatgggaaaggcccactctatttactcttcagtgtgaatggcagtggacatttttgtggagtggctgaaatgaagtctgttgtggactataatgcgtatgctggtgtctggtctcaggataagtggaagggcaaatttgaagttaaatggatctttgtcaaagatgttcccaataaccaattacggcatattcgcttagaaaataatgacaacaaaccggttaccaattcaagggacactcaagaggtacccctagaaaaagctaagcaagtgcttaaaataattgctactttcaagcataccacctcaatctttgatgactttgcacattatgaaaagcgtcaagaagaggaggaagccatgcgtagggagagaaatagaaacaaacaataaccgtatgaagatgtcctgttaaatttacaacactaacgatgtagactctggaaatgcctaataagtcaaagaagacgtattaaagctcttttctgcttaaggtgacatctttgaacactttaacacaaagttgactcttctcgtaatggttttcatcagcgcatctgcccttatactcttcaccaaacacacttgagaactgtaacttcgtcaagcactttctgtcctgaagcttttaccagtatctgctgtcttttgtaattatgcatcctagctaaggcacagaagactgaatgaatgcaaggattcattaactctttgaatttgttaaatactaacagttaaccattagaagtggttcaatgatgtaagagtcacactgcttcaactttttctttgttgtagtttttaaattgtcgatttttagctatttgacagattaaaagcaaaataatcatgccatatttagtcctggagttcaagtctaaatgttgatgtgaaaaattattgtagtaaacttttaatatggcaaagcaaccttaagctctattttagccaaatgaaacataatctgaaattatattagaacatttcccttgtcttcaaactgtttggtgtaacagaatattgatatgcagcttggtggatttcaccagttaatgcacattcttcttccctcctccccccattaatatgtatactgaaaaatgtgcatttgtctgaggaattattttgtttgctaccacttaatgaatctcaaaattttgagtaaatgtacctcagtctaatcagactttttatgacctttataactacatttaaaacccttaattcctatttctgggtgtttgcgagcctgattgctatcatgaagtaaaaatttattactctaggtattcactagctaaataaacatagttcttgtttagcaagcatatgttgttcctcagctcttttctccagcttttgcagtgtcctggcatccttaaaatactttgaaaatatggccttgatccatggattaaatcagtatctaagtgaatgtgttgatgttttattgatcagatctatataagtgggaatacagcatatatctggatattcttatagttatctttttaacatcttatttttttcattaattacatatcaacattaattttgtatcttgaagcaaattgattttgtataattaaatgtgtcaagcatctgtattaattgatttgatggcataaggttatgaaaataatgtactgccccatgtattactgttccaaaaggagaaagctatgtagaaagatacattaagggtgaaaatagcaatacagtagatttgaataccttgatgttttgcattacttcatttatgtttacatcatgtttagaaatgttttcatttactgtggtctttggtcacttcagctcaaagacctagtgatggatatttctttgaggctttcatttatataattttattttgtacaatgttttttttaaatgtgcaaatactgtattcaagtgaaaaaaatacagtatttgtagataaccatagctactacacagttcttcggtagtcccagtgtagttatatcagtgtttactgaagggaacatcaaaatattaatggtatattataaaataaagactttcttaaaggaaaattgcacctattttacctttttaagagtaagccatgaaatcttgtaacatgtctcttaactatttataatgaaaagtggcatttgggtatagtcaccacagcaatgttctacatccctaagattatctaggtaggacatgtcaaagatgactgttgtcattctggaggtcctattagagaatattataaaagggtgaccttgtaggaaggatctgagtcctccccctgaggttctctttttcttggtgctttattagcaactctggatatttttataaaactagttacattataaacggtttcaaacatgtttaatttacattaggtttttatgtaagagtgtcatggaagcactcagcaagcaggctgattgcaatagactcagacatgcgaataaatgtaattgagagtctattcatggtgaggagtacatcccagtgcctttaacctggatttctaatcttaagtgaaatgggtgcagcattcctttggaaaaaaaaatctttttattttcaagtgataattttgtgtttttctcatataagttttctccagagcacccaccttctcttccttcttggtctgtcattatattgcaaaatatttttcctctgaatgaaattatcacaggttgtctcaagcacaaccaactgaatgtctcttaactgtggggaccaaaagggagagagcctggggtctacaagaggagacacatcatcaaatgtttgaatgatcacaaattaagacattatcagcccagtaaatttcttgcttaatgtttttccaagttctggcttgaatatttcttattaaagctatcttatgtgggtattttattttgaaaggtattatagtttgtatatttaacagtaaggaggaaactgtaaccaaaattagtatttctctatacgtattggtacttgaagattcctttcaaaagaaatccagcgttttcctaattttagtacttaatttctctttttaatttaagtgatctttctaattcgaaagctgtgttctttttgaataccgtgcatgggggttaagctgatgttaaaacagtttgcaataaaaaaaaatgaatcagcttaagtcatttaatcatttcaagtgcattctgcatcctttaaaaataagtttaagaaatttaagagaattgtgttttcattaagttttgcatatcttttgttatgccatgtaaattccctttttcgtatgattaaaggaaggttatgataaaatgattagttcatttacattcacttgtagcaattacatgagaatttgaattttgtcgtgtttgggtttgttcattcctgtgaatgatggtacagttaggtgagattttctgttatggtacccaaactcaccatttggtcctctttaatctttgagggtttcaataaaaattgttcactc

SEQ ID NO: 200735 - DNA, 4156 bp, Homo sapiens
  Payload ID: 19616
  Gene Name: YY1 associated factor 2
  Uniprot ID: Q8IY57
  ENST ID: ENST00000327791
  CDS Start-End: 57-671
attgacaaacagagcggtcgcggcggcgactctcggcgtgcggtgatagccaagccatgggagacaagaagagccccaccaggccgaagcggcagccgaagccgtcctcggatgagggttactgggactgtagcgtctgcaccttccggaacagcgccgaggccttcaagtgcatgatgtgcgatgtgcggaagggcacctccacccgatccacattgtttgaagttattgtgagtgcctcgaggaccaaggaaccgttgaaatttccaatttcaggaaggaaacctcgacctgtctcccagttggttgcacagcaggttactcagcagtttgtgcctcctacacagtcaaagaaagagaaaaaagataaagtagaaaaagaaaaaagtgaaaaggaaacaactagcaaaaagaatagccataagaaaaccaggccaagattgaaaaatgtggatcggagtagtgctcagcatttggaagttactgttggagatctgacagtcattattacagactttaaggagaaaacaaagtcaccgcctgcatctagtgctgcttctgcagatcaacacagtcaaagcggctctagctctgataacacagagagaggaatgtccaggtcatcttcacccagaggagaagcctcatcattgaatggagaatctcattaaagtttattttctccaatttcttagtcacttctgtcctaccatgcaaatacacagattatgccaagaggtaccacattttcatgacagatacattcatgcacaatccataatttgagttttacataaaatagaaatttgttagaatttgttagattttattgcaatgatgcctaccaaacatttccagacttaacattttggtctctgcagttaagtgccatgaaaatgtggttgaattattcattatgcagtgttattggtaagtgtattttcacttttagtttagtgaattctaacacataattcttgaattctctactattggcatgtaacgaatttaaattttttataacatagtgcaagctgcctaaatatgtattatttgagaattgtgaaacagatagttatatgtatacaagtcaaagaacaacttaactattgctgcaacaggtttttcttaatggttatcctcttaaatacacctgctggtacttggtgtggttaaataggaaaattgttattaaataaagaatttgtatgaacctttgccaatgtttttgacacgttttactaattattgttcctgaattatgtttctggttttatctattttttgaggtttttttgtttgcttatttttcaaaacattcatttattgtaatgtttactagcggactagtaaacaataaaacattgattatttagctttataattcaggtttagtgctattgtcattgaacactggtattttctgtatcatataaaacattaaaattcaaataattataagcatttggcaaaaacaagagaaaagaaacttgccatattttacaagctgcaattttagaaaagctttaacttaatgatagttttatcattgttttcttgtcccaaacttatccagggccatagaagtatgaatctaattaaaacagaaatgggaattattgcacagaaatgggaaataactaattttaaatcagtcaaattggcttcttattaaatacaataattcttatgaaaatcatagtaccctattttcagacacagctgccagtttacacatttctcagtatcctgaaaggaaaaaagtatagccccacttatactatgtaaaattaccaataaaatatttttatgactacagattttgcatttttgtttacaactatttaaagagttttatgttgtatttagaatttcaacctagaaaccacacagtacttaaattctcctggggtctcctgctttctcttaaccatttgcttaatatatatctacctaaaggagacttctgaattgtaaatgaacttaaaaatagaatgtggatgcaaaatatcacataagacatcatgataacatttgaagaaaaaataaaactgtagaccctaacagttgtgatatttggtggtttcatgtggtaatgtaattttctgtttaattacagtactttttacaggcacagtggtactgtcttttttgtaagatgctagttgtgaaatacaattaattgcatacagtaaaagtctgtgattaaaacatttatatacctcattctttagtgttgttaaatgaaaaattaaaatttgtgtttattataagatactttcaatggaataccagctaaccagatatgttcctttaaaacatgaatttttttgtcttattctgtttttaacatgtttcaaatgttttatacatttttggagatagtaaaaatttaaaaatgtaatagggaaaatatttaatttttaagtcaaaaactatgctttaaaggaattacatcttatgatcaaataactttcaggatgtattttaaatgagctgcaagagagaaaaatctgacaggagatgggattttacctgaatggagcatactcatatttctacataggtgggaagatactcatctttctacatagacgggaacacggtgtagcatggagattaagcgtgctaactgacacctcatgtttgaatcctgttgtagaatggaaatgagcttaaattacccaagcttactttccatctataaaacagggctaataatggtaatcacatctaatttatagggtttttgggaggattaagtcaatccgtgtaaaattcttaattatctgacacatactggtcactcagtaaatgtgagcttttaccattgttataggtaaaatcccattacaaaaatacaaaaatattttttgtaacagttattttcctgccctcttggatgacctaaagtaatagtgttttatagatttcactaaattttcagtgtaatatcagatgttttctctggatgcagaaagaccatctttccataattaaagaacctggtgggtgtgcactatgagattggagaaatgaattaagttgacttgaaattattttacttttattaatcacaggtatctcaacctgcctttgtttcaccctacttcaagtacacttccacaccaggaaaacagacccaaattccataaacagaactgacgttaaaatatgcgaaagattcagaacctaggtttagggtacatgtttttctctgtttcatgaacttacagtgtggtttgagcactgggttcttttagccaaattccatacaaaaagaatttggatgttttccagcatttattaccttactttgctataagtaagagtgaagataggccgggtgtgatggctcatgccagtaatcccagcactttgggctgaagcaggcagatattttgagcccaggaccagcctgggcaacatggtgaaagctcatctctatgaaaaaatttgaatatacatatatatatatatgtatatttaaaaagtgaatataatttgaggcacagaagaatattcttaaaaccttttgtattatacaatagaaataaaggttttatttttattaaatgctttcctaaaatgatagtggataatagacaaagtgaaaacatttaaaaaggaagagaaacttcagcctttctaagttgatagcatgtttattaacttttagataaagatccttatagactgaaagaatgtagcctctgcattaatggtaaatggtctagaagttttcgtttccactgaggcttccgccactcgcttttttaaacttcctgctatggtttggatatggtttgtcctcaccaaaactcatgctgaggcctgagtccccagtttgattgtgttggtaggtggtgcctttaagaggtgattaggtcattgagatggattaaaggctttctcatgaggctcagttagttctggaatggattcgctcttgcaggaatggatgaattctcacaagagtgggttgttatgaagtgaggatgcttcttgtgttctgttctctttgccctcctcagttcaccatctgctttccaccatgagttgaagcagcatgaggccctcatcagatgggctccctgatcttggactcctcagcctttggactcataagccaaaataaatctgttttctttataaa

SEQ ID NO: 200736 - DNA, 1211 bp, Homo sapiens
  Payload ID: 19616
  Gene Name: YY1 associated factor 2
  Uniprot ID: Q8IY57
  ENST ID: ENST00000380790
  CDS Start-End: 108-524
ccctccctccctcctcccccgcccgcttccgcccggcttattatcctccttattgacaaacagagcggtcgcggcggcgactctcggcgtgcggtgatagccaagccatgggagacaagaagagccccaccaggaaacctcgacctgtctcccagttggttgcacagcaggttactcagcagtttgtgcctcctacacagtcaaagaaagagaaaaaagataaagtagaaaaagaaaaaagtgaaaaggaaacaactagcaaaaagaatagccataagaaaaccaggccaagattgaaaaatgtggatcggagtagtgctcagcatttggaagttactgttggagatctgacagtcattattacagactttaaggagaaaacaaagtcaccgcctgcatctagtgctgcttctgcagatcaacacagtcaaagcggctctagctctgataacacagagagaggaatgtccaggtcatcttcacccagaggagaagcctcatcattgaatggagaatctcattaaagtttattttctccaatttcttagtcacttctgtcctaccatgcaaatacacagattatgccaagaggtaccacattttcatgacagatacattcatgcacaatccataatttgagttttacataaaatagaaatttgttagaatttgttagattttattgcaatgatgcctaccaaacatttccagacttaacattttggtctctgcagttaagtgccatgaaaatgtggttgaattattcattatgcagtgttattggtaagtgtattttcacttttagtttagtgaattctaacacataattcttgaattctctactattggcatgtaacgaatttaaattttttataacatagtgcaagctgcctaaatatgtattatttgagaattgtgaaacagatagttatatgtatacaagtcaaagaacaacttaactattgctgcaacaggtttttcttaatggttatcctcttaaatacacctgctggtacttggtgtggttaaataggaaaattgttattaaataaagaatttgtatgaacctttgccaatgtttttgacacgttttactaattattgttcctgaattatgtttctggttttatctattttttgaggtttttttgtttgcttatttttcaaaacattcatttattgtaatgtttactagcggactagtaaacaat

SEQ ID NO: 200737 - DNA, 2076 bp, Homo sapiens
  Payload ID: 19616
  Gene Name: YY1 associated factor 2
  Uniprot ID: Q8IY57
  ENST ID: ENST00000534854
  CDS Start-End: 69-611
attatcctccttattgacaaacagagcggtcgcggcggcgactctcggcgtgcggtgatagccaagccatgggagacaagaagagccccaccaggccgaagcggcagccgaagccgtcctcggatgagggttactgggactgtagcgtctgcaccttccggaacagcgccgaggccttcaagtgcatgatgtgcgatgtgcggaagggcacctccacccggaaacctcgacctgtctcccagttggttgcacagcaggttactcagcagtttgtgcctcctacacagtcaaagaaagagaaaaaagataaagtagaaaaagaaaaaagtgaaaaggaaacaactagcaaaaagaatagccataagaaaaccaggccaagattgaaaaatgtggatcggagtagtgctcagcatttggaagttactgttggagatctgacagtcattattacagactttaaggagaaaacaaagtcaccgcctgcatctagtgctgcttctgcagatcaacacagtcaaagcggctctagctctgataacacagagagaggaatgtccaggtcatcttcacccagaggagaagcctcatcattgaatggagaatctcattaaagtttattttctccaatttcttagtcacttctgtcctaccatgcaaatacacagattatgccaagaggtaccacattttcatgacagatacattcatgcacaatccataatttgagttttacataaaatagaaatttgttagaatttgttagattttattgcaatgatgcctaccaaacatttccagacttaacattttggtctctgcagttaagtgccatgaaaatgtggttgaattattcattatgcagtgttattggtaagtgtattttcacttttagtttagtgaattctaacacataattcttgaattctctactattggcatgtaacgaatttaaattttttataacatagtgcaagctgcctaaatatgtattatttgagaattgtgaaacagatagttatatgtatacaagtcaaagaacaacttaactattgctgcaacaggtttttcttaatggttatcctcttaaatacacctgctggtacttggtgtggttaaataggaaaattgttattaaataaagaatttgtatgaacctttgccaatgtttttgacacgttttactaattattgttcctgaattatgtttctggttttatctattttttgaggtttttttgtttgcttatttttcaaaacattcatttattgtaatgtttactagcggactagtaaacaataaaacattgattatttagctttataattcaggtttagtgctattgtcattgaacactggtattttctgtatcatataaaacattaaaattcaaataattataagcatttggcaaaaacaagagaaaagaaacttgccatattttacaagctgcaattttagaaaagctttaacttaatgatagttttatcattgttttcttgtcccaaacttatccagggccatagaagtatgaatctaattaaaacagaaatgggaattattgcacagaaatgggaaataactaattttaaatcagtcaaattggcttcttattaaatacaataattcttatgaaaatcatagtaccctattttcagacacagctgccagtttacacatttctcagtatcctgaaaggaaaaaagtatagccccacttatactatgtaaaattaccaataaaatatttttatgactacagattttgcatttttgtttacaactatttaaagagttttatgttgtatttagaatttcaacctagaaaccacacagtacttaaattctcctggggtctcctgctttctcttaaccatttgcttaatatatatctacctaaaggagacttctgaattgtaaatgaacttaaaaatagaatgtggatgcaaaatatcacataagacatcatgataacatttgaagaaaaaataaaactgtagaccctaacagttgtgatatttggtggtttcatgtggtaatgtaattttctgtttaattacagtactttttacaggcaca

SEQ ID NO: 200738 - DNA, 434 bp, Homo sapiens
  Payload ID: 19616
  Gene Name: YY1 associated factor 2
  ENST ID: ENST00000548661
  CDS Start-End: 124-258
tgcggccttccccgccccctccctccctcctcccccgcccgcttccgcccggcttattatcctccttattgacaaacagagcggtcgcggcggcgactctcggcgtgcggtgatagccaagccatgggagacaagaagagccccaccagatccacattgtttgaagttattgtgagtgcctcgaggaccaaggaaccgttgaaatttccaatttcaggaagttccagtggatgcccatcaggaagattctcatgctgaacagaagggcaagagaggtggatctgtgagggaaaagacccaataggataactcaagttactggaaacctcgacctgtctcccagttggttgcacagcaggttactcagcagtttgtgcctcctacacagtcaaagaaagagaaaaaagataaagtagaaaaagaaaaaagtgaaa

SEQ ID NO: 200739 - DNA, 269 bp, Homo sapiens
  Payload ID: 19616
  Gene Name: YY1 associated factor 2
  ENST ID: ENST00000548917
  CDS Start-End: 168-269
cggccgcggggcccgggcaccgggcgcggcctgctggtgaccccgcgccgcgtcgtgtccgggttgtgtcctgcaggccgaagcggcagccgaagccgtcctcggatgagggttactgggactgtagcgtctgcaccttccggaacagcgccgaggccttcaagtgcatgatgtgcgatgtgcggaagggcacctccacccggaaacctcgacctgtctcccagttggttgcacagcaggttactcagcagtttgtgcctcctacacag

SEQ ID NO: 200740 - DNA, 580 bp, Homo sapiens
  Payload ID: 19616
  Gene Name: YY1 associated factor 2
  ENST ID: ENST00000546726
  CDS Start-End: 1-204
atgggagacaagaagagccccaccaggccgaagcggcagccgaagccgtcctcggatgagggttactgggactgtagcgtctgcaccttccggaacagcgccgaggccttcaagtgcatgatgtgcgatgtgcggaagggcacctccacccgagaagaaaaagctggatcacttaccagtaactggagttctcctattgggtaatctccacagatccacattgtttgaagttattgtgagtgcctcgaggaccaaggaaccgttgaaatttccaatttcaggaagttccagtggatgcccatcaggaagattctcatgctgaacagaagggcaagagaggtggatctgtgagggaaaagacccaataggataactcaagttactgagataacaggaagagagcctggttaccatttggtggaacaatcctgctggctcaagcctctgcctagaaatttgggtcattctcttttttggacagtctggaaacctcgacctgtctcccagttggttgcacagcaggttactcagcagtttgtgcctcctacacagtcaaagaaagagaaaaaagataaagtag

SEQ ID NO: 200741 - DNA, 702 bp, Homo sapiens
  Payload ID: 19616
  Gene Name: YY1 associated factor 2
  ENST ID: ENST00000551268
  CDS Start-End: 84-254
gcttccgcccggcttattatcctccttattgacaaacagagcggtcgcggcggcgactctcggcgtgcggtgatagccaagccatgggagacaagaagagccccaccaggccgaagcggcagccgaagccgtcctcggatgagggttactgggactgtagcgtctgcaccttccggaacagcgccgaggccttcaagtgcatgatgtgcgatgtgcggaagggcacctccacccgtacatctaagctcttgtagatccaatttttagtggtggaaacattacttgaggaggactcagagaagcattgtcatttggattgaaactgaagaggctctgggcaactcaccagaaatctaagggacactgtgttcctgaaaatccacattgtttgaagttattgtgagtgcctcgaggaccaaggaaccgttgaaatttccaatttcaggaagttccagtggatgcccatcaggaagattctcatgctgaacagaagggcaagagaggtggatctgtgagggaaaagacccaataggataactcaagttactggaaacctcgacctgtctcccagttggttgcacagcaggttactcagcagtttgtgcctcctacacagtcaaagaaagagaaaaaagataaagtagaaaaagaaaaaagtgaaaaggaaacaactagcaaaaagaatagccataagaaaaccag

SEQ ID NO: 200742 - DNA, 571 bp, Homo sapiens
  Payload ID: 19616
  Gene Name: YY1 associated factor 2
  ENST ID: ENST00000547254
  CDS Start-End: 170-373
agctggaggctgcgtgggatccggcggcggctcccgagcgcggcggtgcggccttccccgccccctccctccctcctcccccgcccgcttccgcccggcttattatcctccttattgacaaacagagcggtcgcggcggcgactctcggcgtgcggtgatagccaagccatgggagacaagaagagccccaccaggccgaagcggcagccgaagccgtcctcggatgagggttactgggactgtagcgtctgcaccttccggaacagcgccgaggccttcaagtgcatgatgtgcgatgtgcggaagggcacctccacccgagaagaaaaagctggatcacttaccagtaactggagttctcctattgggtaatctccacagatccacattgtttgaagttattgtgagtgcctcgaggaccaaggaaccgttgaaatttccaatttcaggaagttccagtggatgcccatcaggaagattctcatgctgaacagaagggcaagagaggtggatctgtgagggaaaagacccaataggataactcaagttactggaaacctcgacctgtct

SEQ ID NO: 200743 - DNA, 1034 bp, Homo sapiens
  Payload ID: 19616
  Gene Name: YY1 associated factor 2
  ENST ID: ENST00000552109
  CDS Start-End: 69-287
attatcctccttattgacaaacagagcggtcgcggcggcgactctcggcgtgcggtgatagccaagccatgggagacaagaagagccccaccaggccgaagcggcagccgaagccgtcctcggatgagggttactgggactgtagcgtctgcaccttccggaacagcgccgaggccttcaagtgcatgatgtgcgatgtgcggaagggcacctccacccgagataacaggaagagagcctggttaccatttggtggaacaatcctgctggctcaagcctctgcctagaaatttgggtcattctcttttttggacagtctggaaacctcgacctgtctcccagttggttgcacagcaggttactcagcagtttgtgcctcctacacagtcaaagaaagagaaaaaagataaagtagaaaaagaaaaaagtgaaaaggaaacaactagcaaaaagaatagccataagaaaaccaggccaagattgaaaaatgtggatcggagtagtgctcagcatttggaagttactgttggagatctgacagtcattattacagactttaaggagaaaacaaagtcaccgcctgcatctagtgctgcttctgcagatcaacacagtcaaagcggctctagctctgataacacagagagaggaatgtccaggtcatcttcacccagaggagaagcctcatcattgaatggagaatctcattaaagtttattttctccaatttcttagtcacttctgtcctaccatgcaaatacacagattatgccaagaggtaccacattttcatgacagatacattcatgcacaatccataatttgagttttacataaaatagaaatttgttagaatttgttagattttattgcaatgatgcctaccaaacatttccagacttaacattttggtctctgcagttaagtgccatgaaaatgtggttgaattattcattatgcagtgttattggtaagtgtattttcacttttagtttagtgaattctaacacataattcttgaattctctactatt

SEQ ID NO: 200744 - DNA, 545 bp, Homo sapiens
  Payload ID: 19616
  Gene Name: YY1 associated factor 2
  ENST ID: ENST00000552928
  CDS Start-End: 44-406
gcggtcgcggcggcgactctcggcgtgcggtgatagccaagccatgggagacaagaagagccccaccaggccgaagcggcagccgaagccgtcctcggatgagggttactgggactgtagcgtctgcaccttccggaacagcgccgaggccttcaagtgcatgatgtgcgatgtgcggaagggcacctccacccgaatgaagaatcatgaaatcataagtttcttgaaggaaggagagaagaaaaagctggatcacttaccagtaactggagttctcctattgggtaatctccacagatccacattgtttgaagttattgtgagtgcctcgaggaccaaggaaccgttgaaatttccaatttcaggaagttccagtggatgcccatcaggaagattctcatgctgaacagaagggcaagagaggtggatctgtgagggaaaagacccaataggataactcaagttactggaaacctcgacctgtctcccagttggttgcacagcaggttactcagcagtttgtgcctcctacacagtcaaagaaa

SEQ ID NO: 200745 - DNA, 807 bp, Homo sapiens
  Payload ID: 19616
  Gene Name: YY1 associated factor 2
  ENST ID: ENST00000547351
  CDS Start-End: 42-332
ggtcgcggcggcgactctcggcgtgcggtgatagccaagccatgggagacaagaagagccccaccaggccgaagcggcagccgaagccgtcctcggatgagggttactgggactgtagcgtctgcaccttccggaacagcgccgaggccttcaagtgcatgatgtgcgatgtgcggaagggcacctccacccgatccacattgtttgaagttattgtgagtgcctcgaggaccaaggaaccgttgaaatttccaatttcaggaagagataacaggaagagagcctggttaccatttggtggaacaatcctgctggctcaagcctctgcctagaaatttgggtcattctcttttttggacagtctgcttctaaattactttaattgaagagcttcccaagattcaaggtgaatttaaagttaaaagattgtcatttgaaacctcgacctgtctcccagttggttgcacagcaggttactcagcagtttgtgcctcctacacagtcaaagaaagagaaaaaagataaagtagaaaaagaaaaaagtgaaaaggaaacaactagcaaaaagaatagccataagaaaaccaggccaagattgaaaaatgtggatcggagtagtgctcagcatttggaagttactgttggagatctgacagtcattattacagactttaaggagaaaacaaagtcaccgcctgcatctagtgctgcttctgcagatcaacacagtcaaagcggctctagctctgataacacagagagaggaatgtccaggtcatcttcacccagaggagaagcctcatcatt

SEQ ID NO: 200746 - DNA, 5095 bp, Homo sapiens
  Payload ID: 19616
  Gene Name: YY1 associated factor 2
  Uniprot ID: Q8IY57
  ENST ID: ENST00000555248
  CDS Start-End: 170-523
agctggaggctgcgtgggatccggcggcggctcccgagcgcggcggtgcggccttccccgccccctccctccctcctcccccgcccgcttccgcccggcttattatcctccttattgacaaacagagcggtcgcggcggcgactctcggcgtgcggtgatagccaagccatgggagacaagaagagccccaccaggccgaagcggcagccgaagccgtcctcggatgagggttactgggactgtagcgtctgcaccttccggaacagcgccgaggccttcaagtgcatgatgtgcgatgtgcggaagggcacctccacccgggacagcaaggaaggggggaagctggtgtcctactccacagccagtcttggggttagaggaaccctgagaaatagagtaggtggtggcagctcagaagagaagaaacaggctgaatacctggcacctggaagaagaaggaatatagtacacaggggagttggcccaggacagagaagtgggcctagtttaaaagaggcttgaggcccacatgggggcccctgacattttttttttttaccagtacatctaagctcttgtagatccaatttttagtggtggaaacattacttgaggaggactcagagaagcattgtcatttggattgaaactgaagaggctctgggcaactcaccagaaatctaagggacactgtgttcctgaaagtaagtgttctacaccacgaccctctcagcttcttccttcctctctctgaattctcttctcttttgattttggctctaagttaaacctaagagctctaatttctctgttatctgttattttcctagtggtttctgaaattcagggtagaatctgtgtttgtatagaacagtgtggaacagggtattgttactagagaagatattgattgcatcacagaatattaatatttttcctctctggtaatgttaaaaaaacaagattaaaggactgcagaacggtgttgagaagcaaaagtttcagtagttggaagaaataattctccataattgacttattaatgaacagggtaatttccagagtaaggttggcaagtactaaagccaagactggatagctgcagagcagaaggatgcagtttgctaatgatttgtttgtgtgacgcacagatgggatttgaatcctttgggtcagactgacctttgaactgattctgcctcattgccaaatgttaggccaagtctaagccattctagacatttgaaaaacttttttctttttagacctgcagagaagattgagtccttgttctacctttgaagtcttctttttttcttttttcttttttgagataagatctcattctgttgcccaggctgggttgcagtggcatcatccaggctcactgcagcctcgaactcccaggttcaaggaatcctcccacctcagcctcccaagtagctgaaactacagatgcacaccaccatgtgtggctaattttcttattttttgtagagatgggggatctctatgttgcctaggctagtctcaaactcttgagctcaagtgatcctcctaccttggcctcccaaagaactgggattataggaatgagccaccattcggcccctttaaagtctttattggcaatataattttttttctttaaataatattaagttcaaattctttatgcaacagaagcccatttcctttggctatatccatggtaggtcatgtctttctagagaacgaagttacattcatggcatgtatttcaaaataaaatgatttgttgtagcttcagttcctcaagttttaattttattttagattttggggtacatgtgcatgtttgttacttgggtatattgcagagtggtgggattgggattccagtgtacccattacccaaatggtgaacgttatacccaacaggtcatttttcagcccctcactccaaaattttttacattgtgcttttgtgagagaaacagtagtaaatgtcaaactgacaggaaattttttaaaaggaaacaaaatgccacggtgacacattattttcaagatgctgcacagtctttatatctgaagtttcttttctttcttttcttttcttttcttttcttttcttttcttttctctttttttttttgaggcagaatttgagacagtcttgctctgtcgcccaggctggagtacagtggcgtgacctcggctcactgcaacctccacctcccaggttcaagcaattctcatgcctcagcctctgtggtagctgggattacaggtgcccgccaccacaccaggctaatttttgtatttttagtagagatggggtttcactatgctggccaggctggtctcaaactcctgacctcaggtgatccgtctgcgtcggcttcccaaagtgctgggattacaggagtgagacactgtgcccagcctatctgaagattcttataaggcaagaaatgtcccaaatataaatgcaagaaactttaggaaattaaggatcattcttggctggcccagtggcccacacctgtaagcccagcaccttgggaggctgagacaggaggatttcttgaggccaggagtttgagaccaacctgggcaacacagtgagatctcgtctctactaaaaattaaaaaaattagctgggtgtggtggtgcatgcctgtggtcccagctactcaggaggctgaagtgggaggatcccttgagccccagagttcgaggttgcagtgagctgtgatcataccactgcactccagcctgggcaacagagtgagaccttgtctcaaaaaaacaaaattctgagtcatcagagaaaatgaaatattaaatattaaggatagtctgtatgagggtgataatcaatgtgtgatgattaatttaagactggtgtcttattggtacttcatctagtagtggacagttacttaatattgcttaattcagatagcaaatatttagaaatgaaaatgatagaattattggtttgggtttcaaactgtggtctaaatggttcataccaggctttcaaatgtaacaggtaatgttacattttgttagaggatattataacagtcctttaggtttctcataggtgttattttagagagctataaaaaagatttcacatagtagaaagagtgctagatgttacactagtatgattttggtaacctgggttcatatctcatttcatatcaaccatttcaatattcagcattcagcaaatgtttattgagcatcttatttaagggctgagttggatactagacatacagtggtgagcaaaatggatttttttgtttctttaaaattttacagttttgcaaattagaaccgctttaactgtaccaagctctatatgtgaggtttagtgttagtagatctttcctttatgtgtaggctgaagaggtggaacttcttcattaaaaatatatgttgtttataactgaacacagtattattattatggttaggtaaaaagagtgagttatttcagcttcttttaaaagtaagctataaaatccacattctgaaagaagcttaaaccaactatcatctggtagaaatcttttcagcatcgttgttttcttgtcatacttgctttatgtcttcaaatttgaggtttggcactgattcttctagacttttggtgtaggaatgggagaaaaaaattgaggaccatctacataagtcctttttaaagaaatgcatggttcctgagccgcctcctgtctatctgaggagcctttctagcaaccatttagttgttcagagactccttattctaggagatttcttacttgtttgttttttgtcctgtaagaggactcacactggttaattgtatatgggtaaattttacaagtgattattagtgtttgtgtagtctggatatcagagtggttttcaaagtgtagtctgagggacactgagagtccctgagatctttttagttgaagctttctatgaggttcacactgtttttataataatttgaagatgttatttgcctttttcactgtgatggtgcagaggcagtgatgggtaaaactgccagcaccttagcatgaatcaaagcagtggcaccaaattgctatcttcattgtaatattcaccaccatgtacatgcatgcagtaagaataatgtcagtttgaattaagaatatccttgaagcagaaaaatttactaattttattacatctcatatttttaaaaatattctgtctgaccaaatgggaactacacataaagcacttctactgtataccaaagtacagtggttaagggaaagcacatgtgtagtttgtcttgcaagcagagctagtctttttgtcatagagcatcatttttacttgaaagactacctgaaataccatagttattcagacttggatatttagcatatattttcttgaaaatgaatatattcaaaaaatatatcacttcaaggaaaacacttgatactatatgttgccagtgataatcattcaagtgaaaattagaatttttgaaaatttgtagcaacaatgagctttagagtttctgtgtataaagacttttctgagaagattagtggtggtatcaatgaatataatttctgatatttcaccatgaaatgtgtcagcatttggaagctacgcataactcagcaaacaaatggttcctagttaccgatgtatgattttacaaaactgtaatgggtaatccatcaaagtacaaaataccaacagattttaagggaacactgaaaacttcattgatgtggtttcagatttcatattgcaactaacctttgagaaacaactgtgtttttatgtagtatcaaagaataacacctatagttatctgaaaatgctattcaactacttacctcttttcaactgtatatctgtgagagtccagattttcttaatatttttggaccaaaacaacatattgcaacaaattgaatgctgagatagatgtgacaatccaggtgtcttctactaaccagatgttagaggtttgcaaaaatatacgatgccactcttcatacaaaatatctttgttttggaaaataataagtttttaaaataaaaatatgtcattt

SEQ ID NO: 200747 - DNA, 2626 bp, Homo sapiens
  Payload ID: 19617
  Gene Name: YY1 associated protein 1
  Uniprot ID: Q9H869
  ENST ID: ENST00000295566
  CDS Start-End: 25-2415
cctcgatcccctcgccgcggtcccatggaggaggaggcgagccgcagcgccgcggcgacgaacccagggagtcggcttacccgctggccgcctcctgacaagcgggagggatccgcggtggacccagggaagcggaggagcctggcggccaccccctcttcctcacttccctgtactctcatcgctctcggcctccgacacgaaaaggaagcaaatgagctgatggaagatctgtttgaaactttccaagatgagatgggattctccaacatggaagatgatggcccagaagaggaggagcgtgtggctgagcctcaagctaactttaacacccctcaagctctacggtttgaggaactactggccaacctactaaatgaacaacatcagatagcgaaggaactatttgaacagctgaagatgaagaaaccttcagccaaacagcagaaggaggtagagaaggttaaaccccagtgtaaggaagttcatcagaccctgattctggacccagcacaaaggaagagactccagcagcagatgcagcagcatgttcagctcttgacacaaatccaccttcttgccacctgcaaccccaatctcaatccggaggccagtagcaccaggatatgtcttaaagagctgggaacctttgctcaaagctccatcgcccttcaccatcagtacaaccccaagtttcagaccctgttccaaccctgtaacttgatgggagctatgcagctgattgaagacttcagcacacatgtcagcattgactgcagccctcataaaactgtcaagaagactgccaatgaatttccctgtttgccaaagcaagtggcttggatcctggccacaagcaaggttttcatgtatccagagttacttccagtgtgttccctgaaggcaaagaatccccaggataagatcctcttcaccaaggctgaggacaacaagtaccttctaacctgcaagactgcccgccaactgacagtgagaatcaagaacctcaacatgaacagagctcctgacaacatcattaaattttataagaagaccaaacagctgccagtcctaggaaaatgctgtgaagagatccagccacatcagtggaagccacctatagagagagaagaacaccggctcccattctggttaaaggccagtctgccatccatccaggaagaactgcggcacatggctgatggtgctagagaggtaggaaatatgactggaaccactgagatcaactcagatcaaggcctagaaaaagacaactcagagttggggagtgaaactcggtacccactgctattgcctaagggtgtagtcctgaaactgaagccagttgccgaccgtttccccaagaaggcttggagacagaagcgttcatcagtcctgaaacccctccttatccaacccagcccctctctccagcccagcttcaaccctgggaaaacaccagcccaatcaactcattcagaagcccctccgagcaaaatggtgctccggattcctcacccaatacagccagccactgttttacagacagttccaggtgtccctccactgggggtcagtggaggtgagagttttgagtctcctgcagcactgcctgctatgccccctgaggccaggacaagcttccctctgtctgagtcccagactttgctctcttctgcccctgtgcccaaggtaatgatgccctcccctgcctcttccatgtttcgaaagccatatgtgagacggagaccctcaaaaagaaggggagccagggcctttcgctgtatcaaacctgcccctgttatccaccctgcatctgttatcttcactgttcctgctaccactgtgaagattgtgagccttggcggtggctgtaacatgatccagcctgtcaatgcggctgtggcccagagtccccagactattcccatcgccaccctcttggttaaccctacttccttcccctgtccattgaaccagccccttgtggcctcctctgtctcacccttaattgtttctggcaattctgtgaatcttcctataccatccacccctgaagataaggcccacatgaatgtggacattgcttgtgctgtggctgatggggaaaatgcctttcagggcctagaacccaaattagagccccaggaactatctcctctctctgctactgttttccccaaagtggaacatagcccagggcctccaccagtcgataaacagtgccaagaaggattgtcagagaacagtgcctatcgctggaccgttgtgaaaacagaggagggaaggcaagctctggagccgctccctcagggcatccaggagtctctaaacaactcttcccctggggatttagaggaagttgtcaagatggaacctgaagatgctacagaggaaatcagtggatttctttgagctaggagaataagagtctggagactgggagccttcacttcggcctccgattggtggcgcatagggtgtaaccaataggaaacccctaaagggtacttaaaccccagattttgcaactggggctcttgagcagcttgctttagcctgctcccactctgtggaatatacttttgcttcaataaatctgtgcttttattgcttcattgtttca

SEQ ID NO: 200748 - DNA, 2682 bp, Homo sapiens
  Payload ID: 19617
  Gene Name: YY1 associated protein 1
  Uniprot ID: Q9H869
  ENST ID: ENST00000311573
  CDS Start-End: 312-2471
aacgatcccagtgtcggttgcgggatccgcctcctctcagtttgcccctttagccctccacctttcccttctcctctctcgcatttccgccagtcggcttacccgctggccgcctcctgacaagcgggagggatccgcggtggacccagggaagcggaggagcctggcggccaccccctcttcctcacttccctgtactctcatcgctctcggcctccgacacgaaaaggaagcaaatgagctgatggaagatctgtttgaaactgtgagtaatgatcctcaagtgagaacatgggattttccaagatgagatgggattctccaacatggaagatgatggcccagaagaggaggagcgtgtggctgagcctcaagctaactttaacacccctcaagctctacggtttgaggaactactggccaacctactaaatgaacaacatcagatagcgaaggaactatttgaacagctgaagatgaagaaaccttcagccaaacagcagaaggaggtagagaaggttaaaccccagtgtaaggaagttcatcagaccctgattctggacccagcacaaaggaagagactccagcagcagatgcagcagcatgttcagctcttgacacaaatccaccttcttgccacctgcaaccccaatctcaatccggaggccagtagcaccaggatatgtcttaaagagctgggaacctttgctcaaagctccatcgcccttcaccatcagtacaaccccaagtttcagaccctgttccaaccctgtaacttgatgggagctatgcagctgattgaagacttcagcacacatgtcagcattgactgcagccctcataaaactgtcaagaagactgccaatgaatttccctgtttgccaaagcaagtggcttggatcctggccacaagcaaggttttcatgtatccagagttacttccagtgtgttccctgaaggcaaagaatccccaggataagatcctcttcaccaaggctgaggacaacaagtaccttctaacctgcaagactgcccgccaactgacagtgagaatcaagaacctcaacatgaacagagctcctgacaacatcattaaattttataagaagaccaaacagctgccagtcctaggaaaatgctgtgaagagatccagccacatcagtggaagccacctatagagagagaagaacaccggctcccattctggttaaaggccagtctgccatccatccaggaagaactgcggcacatggctgatggtgctagagaggtaggaaatatgactggaaccactgagatcaactcagatcaaggcctagaaaaagacaactcagagttggggagtgaaactcggtacccactgctattgcctaagggtgtagtcctgaaactgaagccagttgccgaccgtttccccaagaaggcttggagacagaagcgttcatcagtcctgaaacccctccttatccaacccagcccctctctccagcccagcttcaaccctgggaaaacaccagcccaatcaactcattcagaagcccctccgagcaaaatggtgctccggattcctcacccaatacagccagccactgttttacagacagttccaggtgtccctccactgggggtcagtggaggtgagagttttgagtctcctgcagcactgcctgctatgccccctgaggccaggacaagcttccctctgtctgagtcccagactttgctctcttctgcccctgtgcccaaggtaatgatgccctcccctgcctcttccatgtttcgaaagccatatgtgagacggagaccctcaaaaagaaggggagccagggcctttcgctgtatcaaacctgcccctgttatccaccctgcatctgttatcttcactgttcctgctaccactgtgaagattgtgagccttggcggtggctgtaacatgatccagcctgtcaatgcggctgtggcccagagtccccagactattcccatcgccaccctcttggttaaccctacttccttcccctgtccattgaaccagccccttgtggcctcctctgtctcacccttaattgtttctggcaattctgtgaatcttcctataccatccacccctgaagataaggcccacatgaatgtggacattgcttgtgctgtggctgatggggaaaatgcctttcagggcctagaacccaaattagagccccaggaactatctcctctctctgctactgttttccccaaagtggaacatagcccagggcctccaccagtcgataaacagtgccaagaaggattgtcagagaacagtgcctatcgctggaccgttgtgaaaacagaggagggaaggcaagctctggagccgctccctcagggcatccaggagtctctaaacaactcttcccctggggatttagaggaagttgtcaagatggaacctgaagatgctacagaggaaatcagtggatttctttgagctaggagaataagagtctggagactgggagccttcacttcggcctccgattggtggcgcatagggtgtaaccaataggaaacccctaaagggtacttaaaccccagattttgcaactggggctcttgagcagcttgctttagcctgctcccactctgtggaatatacttttgcttcaataaatctgtgcttttattgcttcattgtttca

SEQ ID NO: 200749 - DNA, 2524 bp, Homo sapiens
  Payload ID: 19617
  Gene Name: YY1 associated protein 1
  Uniprot ID: Q9H869
  ENST ID: ENST00000347088
  CDS Start-End: 61-2313
gaagaggaggtggagaaggcttgggctcgcgccgctgaagaaaaggaagcaaatgagctgatggaagatctgtttgaaactttccaagatgagatgggattctccaacatggaagatgatggcccagaagaggaggagcgtgtggctgagcctcaagctaactttaacacccctcaagctctacggtttgaggaactactggccaacctactaaatgaacaacatcagatagcgaaggaactatttgaacagctgaagatgaagaaaccttcagccaaacagcagaaggaggtagagaaggttaaaccccagtgtaaggaagttcatcagaccctgattctggacccagcacaaaggaagagactccagcagcagatgcagcagcatgttcagctcttgacacaaatccaccttcttgccacctgcaaccccaatctcaatccggaggccagtagcaccaggatatgtcttaaagagctgggaacctttgctcaaagctccatcgcccttcaccatcagtacaaccccaagtttcagaccctgttccaaccctgtaacttgatgggagctatgcagctgattgaagacttcagcacacatgtcagcattgactgcagccctcataaaactgtcaagaagactgccaatgaatttccctgtttgccaaagcaagtggcttggatcctggccacaagcaaggttttcatgtatccagagttacttccagtgtgttccctgaaggcaaagaatccccaggataagatcctcttcaccaaggctgaggacaatttgttagctttaggactgaagcattttgaagggactgagtttcttaaccctctaatcagcaagtaccttctaacctgcaagactgcccgccaactgacagtgagaatcaagaacctcaacatgaacagagctcctgacaacatcattaaattttataagaagaccaaacagctgccagtcctaggaaaatgctgtgaagagatccagccacatcagtggaagccacctatagagagagaagaacaccggctcccattctggttaaaggccagtctgccatccatccaggaagaactgcggcacatggctgatggtgctagagaggtaggaaatatgactggaaccactgagatcaactcagatcaaggcctagaaaaagacaactcagagttggggagtgaaactcggtacccactgctattgcctaagggtgtagtcctgaaactgaagccagttgccgaccgtttccccaagaaggcttggagacagaagcgttcatcagtcctgaaacccctccttatccaacccagcccctctctccagcccagcttcaaccctgggaaaacaccagcccaatcaactcattcagaagcccctccgagcaaaatggtgctccggattcctcacccaatacagccagccactgttttacagacagttccaggtgtccctccactgggggtcagtggaggtgagagttttgagtctcctgcagcactgcctgctatgccccctgaggccaggacaagcttccctctgtctgagtcccagactttgctctcttctgcccctgtgcccaaggtaatgatgccctcccctgcctcttccatgtttcgaaagccatatgtgagacggagaccctcaaaaagaaggggagccagggcctttcgctgtatcaaacctgcccctgttatccaccctgcatctgttatcttcactgttcctgctaccactgtgaagattgtgagccttggcggtggctgtaacatgatccagcctgtcaatgcggctgtggcccagagtccccagactattcccatcgccaccctcttggttaaccctacttccttcccctgtccattgaaccagccccttgtggcctcctctgtctcacccttaattgtttctggcaattctgtgaatcttcctataccatccacccctgaagataaggcccacatgaatgtggacattgcttgtgctgtggctgatggggaaaatgcctttcagggcctagaacccaaattagagccccaggaactatctcctctctctgctactgttttccccaaagtggaacatagcccagggcctccaccagtcgataaacagtgccaagaaggattgtcagagaacagtgcctatcgctggaccgttgtgaaaacagaggagggaaggcaagctctggagccgctccctcagggcatccaggagtctctaaacaactcttcccctggggatttagaggaagttgtcaagatggaacctgaagatgctacagaggaaatcagtggatttctttgagctaggagaataagagtctggagactgggagccttcacttcggcctccgattggtggcgcatagggtgtaaccaataggaaacccctaaagggtacttaaaccccagattttgcaactggggctcttgagcagcttgctttagcctgctcccactctgtggaatatacttttgcttcaataaatctgtgcttttattgcttcattgtttca

SEQ ID NO: 200750 - DNA, 2498 bp, Homo sapiens
  Payload ID: 19617
  Gene Name: YY1 associated protein 1
  ENST ID: ENST00000354691
  CDS Start-End: 180-770
gagaaggcttgggctcgcgccgctgaagtcggcttacccgctggccgcctcctgacaagcgggagggatccgcggtggacccagggaagcggaggagcctggcggccaccccctcttcctcacttccctgtactctcatcgctctcggcctccgacacgaaaaggaagcaaatgagctgatggaagatctgtttgaaactttccaagatgagatgggattctccaacatggaagatgatggcccagaagaggaggagcgtgtggctgagcctcaagctaactttaacacccctcaagctctacggtttgaggaactactggccaacctactaaatgaacaacatcagatagcgaaggaactatttgaacagctgaagatgaagaaaccttcagccaaacagcagaaggaggtagagaaggttaaaccccagtgtaaggaagttcatcagaccctgattctggacccagcacaaaggaagagactccagcagcagatgcagcagcatgttcagctcttgacacaaatccaccttcttgccacctgcaaccccaatctcaatccggaggccagtagcaccaggatatgtcttaaagagctgggaacctttgctcaaagctccatcgcccttcaccatcagtacaaccccaagtttcagaccctgttccaaccctgtaacttgatgggagctatgcagctgattgaagacttcagcacacatgtcagcattgactgcagccctcataaaactgtcaagaagactgtttgttagctttaggactgaagcattttgaagggactgagtttcttaaccctctaatcagcaagtaccttctaacctgcaagactgcccgccaactgacagtgagaatcaagaacctcaacatgaacagagctcctgacaacatcattaaattttataagaagaccaaacagctgccagtcctaggaaaatgctgtgaagagatccagccacatcagtggaagccacctatagagagagaagaacaccggctcccattctggttaaaggccagtctgccatccatccaggaagaactgcggcacatggctgatggtgctagagaggtaggaaatatgactggaaccactgagatcaactcagatcaaggcctagaaaaagacaactcagagttggggagtgaaactcggtacccactgctattgcctaagggtgtagtcctgaaactgaagccagttgccgaccgtttccccaagaaggcttggagacagaagcgttcatcagtcctgaaacccctccttatccaacccagcccctctctccagcccagcttcaaccctgggaaaacaccagcccaatcaactcattcagaagcccctccgagcaaaatggtgctccggattcctcacccaatacagccagccactgttttacagacagttccaggtgtccctccactgggggtcagtggaggtgagagttttgagtctcctgcagcactgcctgctatgccccctgaggccaggacaagcttccctctgtctgagtcccagactttgctctcttctgcccctgtgcccaaggtaatgatgccctcccctgcctcttccatgtttcgaaagccatatgtgagacggagaccctcaaaaagaaggggagccagggcctttcgctgtatcaaacctgcccctgttatccaccctgcatctgttatcttcactgttcctgctaccactgtgaagattgtgagccttggcggtggctgtaacatgatccagcctgtcaatgcggctgtggcccagagtccccagactattcccatcgccaccctcttggttaaccctacttccttcccctgtccattgaaccagccccttgtggcctcctctgtctcacccttaattgtttctggcaattctgtgaatcttcctataccatccacccctgaagataaggcccacatgaatgtggacattgcttgtgctgtggctgatggggaaaatgcctttcagggcctagaacccaaattagagccccaggaactatctcctctctctgctactgttttccccaaagtggaacatagcccagggcctccaccagtcgataaacagtgccaagaaggattgtcagagaacagtgcctatcgctggaccgttgtgaaaacagaggagggaaggcaagctctggagccgctccctcagggcatccaggagtctctaaacaactcttcccctggggatttagaggaagttgtcaagatggaacctgaagatgctacagaggaaatcagtggatttctttgagctaggagaataagagtctggagactgggagccttcacttcggcctccgattggtggcgcatagggtgtaaccaataggaaacccctaaagggtacttaaaccccagattttgcaactggggctcttgagcagcttgctttagcctgctcccactctgtggaatatacttttgcttcaataaatctgtgcttttattgcttcattgtttca

SEQ ID NO: 200751 - DNA, 2663 bp, Homo sapiens
  Payload ID: 19617
  Gene Name: YY1 associated protein 1
  Uniprot ID: Q9H869
  ENST ID: ENST00000355499
  CDS Start-End: 200-2452
ggaggagagaagaggaggtggagaaggcttgggctcgcgccgctgaagtcggcttacccgctggccgcctcctgacaagcgggagggatccgcggtggacccagggaagcggaggagcctggcggccaccccctcttcctcacttccctgtactctcatcgctctcggcctccgacacgaaaaggaagcaaatgagctgatggaagatctgtttgaaactttccaagatgagatgggattctccaacatggaagatgatggcccagaagaggaggagcgtgtggctgagcctcaagctaactttaacacccctcaagctctacggtttgaggaactactggccaacctactaaatgaacaacatcagatagcgaaggaactatttgaacagctgaagatgaagaaaccttcagccaaacagcagaaggaggtagagaaggttaaaccccagtgtaaggaagttcatcagaccctgattctggacccagcacaaaggaagagactccagcagcagatgcagcagcatgttcagctcttgacacaaatccaccttcttgccacctgcaaccccaatctcaatccggaggccagtagcaccaggatatgtcttaaagagctgggaacctttgctcaaagctccatcgcccttcaccatcagtacaaccccaagtttcagaccctgttccaaccctgtaacttgatgggagctatgcagctgattgaagacttcagcacacatgtcagcattgactgcagccctcataaaactgtcaagaagactgccaatgaatttccctgtttgccaaagcaagtggcttggatcctggccacaagcaaggttttcatgtatccagagttacttccagtgtgttccctgaaggcaaagaatccccaggataagatcctcttcaccaaggctgaggacaatttgttagctttaggactgaagcattttgaagggactgagtttcttaaccctctaatcagcaagtaccttctaacctgcaagactgcccgccaactgacagtgagaatcaagaacctcaacatgaacagagctcctgacaacatcattaaattttataagaagaccaaacagctgccagtcctaggaaaatgctgtgaagagatccagccacatcagtggaagccacctatagagagagaagaacaccggctcccattctggttaaaggccagtctgccatccatccaggaagaactgcggcacatggctgatggtgctagagaggtaggaaatatgactggaaccactgagatcaactcagatcaaggcctagaaaaagacaactcagagttggggagtgaaactcggtacccactgctattgcctaagggtgtagtcctgaaactgaagccagttgccgaccgtttccccaagaaggcttggagacagaagcgttcatcagtcctgaaacccctccttatccaacccagcccctctctccagcccagcttcaaccctgggaaaacaccagcccaatcaactcattcagaagcccctccgagcaaaatggtgctccggattcctcacccaatacagccagccactgttttacagacagttccaggtgtccctccactgggggtcagtggaggtgagagttttgagtctcctgcagcactgcctgctatgccccctgaggccaggacaagcttccctctgtctgagtcccagactttgctctcttctgcccctgtgcccaaggtaatgatgccctcccctgcctcttccatgtttcgaaagccatatgtgagacggagaccctcaaaaagaaggggagccagggcctttcgctgtatcaaacctgcccctgttatccaccctgcatctgttatcttcactgttcctgctaccactgtgaagattgtgagccttggcggtggctgtaacatgatccagcctgtcaatgcggctgtggcccagagtccccagactattcccatcgccaccctcttggttaaccctacttccttcccctgtccattgaaccagccccttgtggcctcctctgtctcacccttaattgtttctggcaattctgtgaatcttcctataccatccacccctgaagataaggcccacatgaatgtggacattgcttgtgctgtggctgatggggaaaatgcctttcagggcctagaacccaaattagagccccaggaactatctcctctctctgctactgttttccccaaagtggaacatagcccagggcctccaccagtcgataaacagtgccaagaaggattgtcagagaacagtgcctatcgctggaccgttgtgaaaacagaggagggaaggcaagctctggagccgctccctcagggcatccaggagtctctaaacaactcttcccctggggatttagaggaagttgtcaagatggaacctgaagatgctacagaggaaatcagtggatttctttgagctaggagaataagagtctggagactgggagccttcacttcggcctccgattggtggcgcatagggtgtaaccaataggaaacccctaaagggtacttaaaccccagattttgcaactggggctcttgagcagcttgctttagcctgctcccactctgtggaatatacttttgcttcaataaatctgtgcttttattgcttcattgtttca

SEQ ID NO: 200752 - DNA, 2690 bp, Homo sapiens
  Payload ID: 19617
  Gene Name: YY1 associated protein 1
  Uniprot ID: Q9H869
  ENST ID: ENST00000359205
  CDS Start-End: 260-2479
gtagggtgggggtgctggcggcggctgctttggcggcggttggtggccgtgcgggcggggagggagggggaggagagaagaggaggtggagaaggcttgggctcgcgccgctgaagtcggcttacccgctggccgcctcctgacaagcgggagggatccgcggtggacccagggaagcggaggagcctggcggccaccccctcttcctcacttccctgtactctcatcgctctcggcctccgacacgttccaagatgagatgggattctccaacatggaagatgatggcccagaagaggaggagcgtgtggctgagcctcaagctaactttaacacccctcaagctctacggtttgaggaactactggccaacctactaaatgaacaacatcagatagcgaaggaactatttgaacagctgaagatgaagaaaccttcagccaaacagcagaaggaggtagagaaggttaaaccccagtgtaaggaagttcatcagaccctgattctggacccagcacaaaggaagagactccagcagcagatgcagcagcatgttcagctcttgacacaaatccaccttcttgccacctgcaaccccaatctcaatccggaggccagtagcaccaggatatgtcttaaagagctgggaacctttgctcaaagctccatcgcccttcaccatcagtacaaccccaagtttcagaccctgttccaaccctgtaacttgatgggagctatgcagctgattgaagacttcagcacacatgtcagcattgactgcagccctcataaaactgtcaagaagactgccaatgaatttccctgtttgccaaagcaagtggcttggatcctggccacaagcaaggttttcatgtatccagagttacttccagtgtgttccctgaaggcaaagaatccccaggataagatcctcttcaccaaggctgaggacaatttgttagctttaggactgaagcattttgaagggactgagtttcttaaccctctaatcagcaagtaccttctaacctgcaagactgcccgccaactgacagtgagaatcaagaacctcaacatgaacagagctcctgacaacatcattaaattttataagaagaccaaacagctgccagtcctaggaaaatgctgtgaagagatccagccacatcagtggaagccacctatagagagagaagaacaccggctcccattctggttaaaggccagtctgccatccatccaggaagaactgcggcacatggctgatggtgctagagaggtaggaaatatgactggaaccactgagatcaactcagatcaaggcctagaaaaagacaactcagagttggggagtgaaactcggtacccactgctattgcctaagggtgtagtcctgaaactgaagccagttgccgaccgtttccccaagaaggcttggagacagaagcgttcatcagtcctgaaacccctccttatccaacccagcccctctctccagcccagcttcaaccctgggaaaacaccagcccaatcaactcattcagaagcccctccgagcaaaatggtgctccggattcctcacccaatacagccagccactgttttacagacagttccaggtgtccctccactgggggtcagtggaggtgagagttttgagtctcctgcagcactgcctgctatgccccctgaggccaggacaagcttccctctgtctgagtcccagactttgctctcttctgcccctgtgcccaaggtaatgatgccctcccctgcctcttccatgtttcgaaagccatatgtgagacggagaccctcaaaaagaaggggagccagggcctttcgctgtatcaaacctgcccctgttatccaccctgcatctgttatcttcactgttcctgctaccactgtgaagattgtgagccttggcggtggctgtaacatgatccagcctgtcaatgcggctgtggcccagagtccccagactattcccatcgccaccctcttggttaaccctacttccttcccctgtccattgaaccagccccttgtggcctcctctgtctcacccttaattgtttctggcaattctgtgaatcttcctataccatccacccctgaagataaggcccacatgaatgtggacattgcttgtgctgtggctgatggggaaaatgcctttcagggcctagaacccaaattagagccccaggaactatctcctctctctgctactgttttccccaaagtggaacatagcccagggcctccaccagtcgataaacagtgccaagaaggattgtcagagaacagtgcctatcgctggaccgttgtgaaaacagaggagggaaggcaagctctggagccgctccctcagggcatccaggagtctctaaacaactcttcccctggggatttagaggaagttgtcaagatggaacctgaagatgctacagaggaaatcagtggatttctttgagctaggagaataagagtctggagactgggagccttcacttcggcctccgattggtggcgcatagggtgtaaccaataggaaacccctaaagggtacttaaaccccagattttgcaactggggctcttgagcagcttgctttagcctgctcccactctgtggaatatacttttgcttcaataaatctgtgcttttattgcttcattgtttca

SEQ ID NO: 200753 - DNA, 2701 bp, Homo sapiens
  Payload ID: 19617
  Gene Name: YY1 associated protein 1
  ENST ID: ENST00000361140
  CDS Start-End: 242-739
gctttggcggcggttggtggccgtgcgggcggggagggagggggaggagagaagaggaggtggagaaggcttgggctcgcgccgctgaagtcggcttacccgctggccgcctcctgacaagcgggagggatccgcggtggacccagggaagcggaggagcctggcggccaccccctcttcctcacttccctgtactctcatcgctctcggcctccgacacgaaaaggaagcaaatgagctgatggaagatctgtttgaaactttccaagatgagatgggattctccaacatggaagatgatggcccagaagaggaggagcgtgtggctgagcctcaagctaactttaacacccctcaagctctacggtttgaggaactactggccaacctactaaatgaacaacatcagatagcgaaggaactatttgaacagctgaagatgaagaaaccttcagccaaacagcagaaggaggtagagaaggttaaaccccagtgtaaggaagttcatcagaccctgattctggacccagcacaaaggaagagactccagcagcagatgcagcagcatgttcagctcttgacacaaatccaccttcttgccacctgcaaccccaatctcaatccggaggccagtagcaccaggatatgtcttagctgggaacctttgctcaaagctccatcgcccttcaccatcagtacaaccccaagtttcagaccctgttccaaccctgtaacttgatgggagctatgcagctgattgaagacttcagcacacatgtcagcattgactgcagccctcataaaactgtcaagaagactgccaatgaatttccctgtttgccaaagcaagtggcttggatcctggccacaagcaaggttttcatgtatccagagttacttccagtgtgttccctgaaggcaaagaatccccaggataagatcctcttcaccaaggctgaggacaatttgttagctttaggactgaagcattttgaagggactgagtttcttaaccctctaatcagcaagtaccttctaacctgcaagactgcccgccaactgacagtgagaatcaagaacctcaacatgaacagagctcctgacaacatcattaaattttataagaagaccaaacagctgccagtcctaggaaaatgctgtgaagagatccagccacatcagtggaagccacctatagagagagaagaacaccggctcccattctggttaaaggccagtctgccatccatccaggaagaactgcggcacatggctgatggtgctagagaggtaggaaatatgactggaaccactgagatcaactcagatcaaggcctagaaaaagacaactcagagttggggagtgaaactcggtacccactgctattgcctaagggtgtagtcctgaaactgaagccagttgccgaccgtttccccaagaaggcttggagacagaagcgttcatcagtcctgaaacccctccttatccaacccagcccctctctccagcccagcttcaaccctgggaaaacaccagcccaatcaactcattcagaagcccctccgagcaaaatggtgctccggattcctcacccaatacagccagccactgttttacagacagttccaggtgtccctccactgggggtcagtggaggtgagagttttgagtctcctgcagcactgcctgctatgccccctgaggccaggacaagcttccctctgtctgagtcccagactttgctctcttctgcccctgtgcccaaggtaatgatgccctcccctgcctcttccatgtttcgaaagccatatgtgagacggagaccctcaaaaagaaggggagccagggcctttcgctgtatcaaacctgcccctgttatccaccctgcatctgttatcttcactgttcctgctaccactgtgaagattgtgagccttggcggtggctgtaacatgatccagcctgtcaatgcggctgtggcccagagtccccagactattcccatcgccaccctcttggttaaccctacttccttcccctgtccattgaaccagccccttgtggcctcctctgtctcacccttaattgtttctggcaattctgtgaatcttcctataccatccacccctgaagataaggcccacatgaatgtggacattgcttgtgctgtggctgatggggaaaatgcctttcagggcctagaacccaaattagagccccaggaactatctcctctctctgctactgttttccccaaagtggaacatagcccagggcctccaccagtcgataaacagtgccaagaaggattgtcagagaacagtgcctatcgctggaccgttgtgaaaacagaggagggaaggcaagctctggagccgctccctcagggcatccaggagtctctaaacaactcttcccctggggatttagaggaagttgtcaagatggaacctgaagatgctacagaggaaatcagtggatttctttgagctaggagaataagagtctggagactgggagccttcacttcggcctccgattggtggcgcatagggtgtaaccaataggaaacccctaaagggtacttaaaccccagattttgcaactggggctcttgagcagcttgctttagcctgctcccactctgtggaatatacttttgcttcaataaatctgtgcttttattgcttcattgtttca

SEQ ID NO: 200754 - DNA, 2743 bp, Homo sapiens
  Payload ID: 19617
  Gene Name: YY1 associated protein 1
  Uniprot ID: Q9H869
  ENST ID: ENST00000361831
  CDS Start-End: 313-2532
gaggagagaagaggaggtggagaaggcttgggctcgcgccgctgaagtcggcttacccgctggccgcctcctgacaagcgggagggatccgcggtggacccagggaagcggaggagcctggcggccaccccctcttcctcacttccctgtactctcatcgctctcggcctccgacacgaaaaggaagcaaatgagctgatggaagatctgtttgaaactagacagggtcttgccatgttctggaactcataggctcaagtaatcttcctgcctcaacctcccaaagtgctggaattacagttccaagatgagatgggattctccaacatggaagatgatggcccagaagaggaggagcgtgtggctgagcctcaagctaactttaacacccctcaagctctacggtttgaggaactactggccaacctactaaatgaacaacatcagatagcgaaggaactatttgaacagctgaagatgaagaaaccttcagccaaacagcagaaggaggtagagaaggttaaaccccagtgtaaggaagttcatcagaccctgattctggacccagcacaaaggaagagactccagcagcagatgcagcagcatgttcagctcttgacacaaatccaccttcttgccacctgcaaccccaatctcaatccggaggccagtagcaccaggatatgtcttaaagagctgggaacctttgctcaaagctccatcgcccttcaccatcagtacaaccccaagtttcagaccctgttccaaccctgtaacttgatgggagctatgcagctgattgaagacttcagcacacatgtcagcattgactgcagccctcataaaactgtcaagaagactgccaatgaatttccctgtttgccaaagcaagtggcttggatcctggccacaagcaaggttttcatgtatccagagttacttccagtgtgttccctgaaggcaaagaatccccaggataagatcctcttcaccaaggctgaggacaatttgttagctttaggactgaagcattttgaagggactgagtttcttaaccctctaatcagcaagtaccttctaacctgcaagactgcccgccaactgacagtgagaatcaagaacctcaacatgaacagagctcctgacaacatcattaaattttataagaagaccaaacagctgccagtcctaggaaaatgctgtgaagagatccagccacatcagtggaagccacctatagagagagaagaacaccggctcccattctggttaaaggccagtctgccatccatccaggaagaactgcggcacatggctgatggtgctagagaggtaggaaatatgactggaaccactgagatcaactcagatcaaggcctagaaaaagacaactcagagttggggagtgaaactcggtacccactgctattgcctaagggtgtagtcctgaaactgaagccagttgccgaccgtttccccaagaaggcttggagacagaagcgttcatcagtcctgaaacccctccttatccaacccagcccctctctccagcccagcttcaaccctgggaaaacaccagcccaatcaactcattcagaagcccctccgagcaaaatggtgctccggattcctcacccaatacagccagccactgttttacagacagttccaggtgtccctccactgggggtcagtggaggtgagagttttgagtctcctgcagcactgcctgctatgccccctgaggccaggacaagcttccctctgtctgagtcccagactttgctctcttctgcccctgtgcccaaggtaatgatgccctcccctgcctcttccatgtttcgaaagccatatgtgagacggagaccctcaaaaagaaggggagccagggcctttcgctgtatcaaacctgcccctgttatccaccctgcatctgttatcttcactgttcctgctaccactgtgaagattgtgagccttggcggtggctgtaacatgatccagcctgtcaatgcggctgtggcccagagtccccagactattcccatcgccaccctcttggttaaccctacttccttcccctgtccattgaaccagccccttgtggcctcctctgtctcacccttaattgtttctggcaattctgtgaatcttcctataccatccacccctgaagataaggcccacatgaatgtggacattgcttgtgctgtggctgatggggaaaatgcctttcagggcctagaacccaaattagagccccaggaactatctcctctctctgctactgttttccccaaagtggaacatagcccagggcctccaccagtcgataaacagtgccaagaaggattgtcagagaacagtgcctatcgctggaccgttgtgaaaacagaggagggaaggcaagctctggagccgctccctcagggcatccaggagtctctaaacaactcttcccctggggatttagaggaagttgtcaagatggaacctgaagatgctacagaggaaatcagtggatttctttgagctaggagaataagagtctggagactgggagccttcacttcggcctccgattggtggcgcatagggtgtaaccaataggaaacccctaaagggtacttaaaccccagattttgcaactggggctcttgagcagcttgctttagcctgctcccactctgtggaatatacttttgcttcaataaatctgtgcttttattgcttcattgtttca

SEQ ID NO: 200755 - DNA, 2555 bp, Homo sapiens
  Payload ID: 19617
  Gene Name: YY1 associated protein 1
  Uniprot ID: Q9H869
  ENST ID: ENST00000368330
  CDS Start-End: 92-2344
cctcgatcccctcgccgcggtcccatggaggaggaggcgagccgcagcgccgcggcgacgaacccagggagaaaaggaagcaaatgagctgatggaagatctgtttgaaactttccaagatgagatgggattctccaacatggaagatgatggcccagaagaggaggagcgtgtggctgagcctcaagctaactttaacacccctcaagctctacggtttgaggaactactggccaacctactaaatgaacaacatcagatagcgaaggaactatttgaacagctgaagatgaagaaaccttcagccaaacagcagaaggaggtagagaaggttaaaccccagtgtaaggaagttcatcagaccctgattctggacccagcacaaaggaagagactccagcagcagatgcagcagcatgttcagctcttgacacaaatccaccttcttgccacctgcaaccccaatctcaatccggaggccagtagcaccaggatatgtcttaaagagctgggaacctttgctcaaagctccatcgcccttcaccatcagtacaaccccaagtttcagaccctgttccaaccctgtaacttgatgggagctatgcagctgattgaagacttcagcacacatgtcagcattgactgcagccctcataaaactgtcaagaagactgccaatgaatttccctgtttgccaaagcaagtggcttggatcctggccacaagcaaggttttcatgtatccagagttacttccagtgtgttccctgaaggcaaagaatccccaggataagatcctcttcaccaaggctgaggacaatttgttagctttaggactgaagcattttgaagggactgagtttcttaaccctctaatcagcaagtaccttctaacctgcaagactgcccgccaactgacagtgagaatcaagaacctcaacatgaacagagctcctgacaacatcattaaattttataagaagaccaaacagctgccagtcctaggaaaatgctgtgaagagatccagccacatcagtggaagccacctatagagagagaagaacaccggctcccattctggttaaaggccagtctgccatccatccaggaagaactgcggcacatggctgatggtgctagagaggtaggaaatatgactggaaccactgagatcaactcagatcaaggcctagaaaaagacaactcagagttggggagtgaaactcggtacccactgctattgcctaagggtgtagtcctgaaactgaagccagttgccgaccgtttccccaagaaggcttggagacagaagcgttcatcagtcctgaaacccctccttatccaacccagcccctctctccagcccagcttcaaccctgggaaaacaccagcccaatcaactcattcagaagcccctccgagcaaaatggtgctccggattcctcacccaatacagccagccactgttttacagacagttccaggtgtccctccactgggggtcagtggaggtgagagttttgagtctcctgcagcactgcctgctatgccccctgaggccaggacaagcttccctctgtctgagtcccagactttgctctcttctgcccctgtgcccaaggtaatgatgccctcccctgcctcttccatgtttcgaaagccatatgtgagacggagaccctcaaaaagaaggggagccagggcctttcgctgtatcaaacctgcccctgttatccaccctgcatctgttatcttcactgttcctgctaccactgtgaagattgtgagccttggcggtggctgtaacatgatccagcctgtcaatgcggctgtggcccagagtccccagactattcccatcgccaccctcttggttaaccctacttccttcccctgtccattgaaccagccccttgtggcctcctctgtctcacccttaattgtttctggcaattctgtgaatcttcctataccatccacccctgaagataaggcccacatgaatgtggacattgcttgtgctgtggctgatggggaaaatgcctttcagggcctagaacccaaattagagccccaggaactatctcctctctctgctactgttttccccaaagtggaacatagcccagggcctccaccagtcgataaacagtgccaagaaggattgtcagagaacagtgcctatcgctggaccgttgtgaaaacagaggagggaaggcaagctctggagccgctccctcagggcatccaggagtctctaaacaactcttcccctggggatttagaggaagttgtcaagatggaacctgaagatgctacagaggaaatcagtggatttctttgagctaggagaataagagtctggagactgggagccttcacttcggcctccgattggtggcgcatagggtgtaaccaataggaaacccctaaagggtacttaaaccccagattttgcaactggggctcttgagcagcttgctttagcctgctcccactctgtggaatatacttttgcttcaataaatctgtgcttttattgcttcattgtttca

SEQ ID NO: 200756 - DNA, 3073 bp, Homo sapiens
  Payload ID: 19617
  Gene Name: YY1 associated protein 1
  Uniprot ID: Q9H869
  ENST ID: ENST00000368339
  CDS Start-End: 193-2859
acgcgtgagggcctgcgctggagccggcttgacagggtctgagggggagtggagaactgggcgaggaggttcccgtgggtgagcgcgtacgggatggctggctcgcaggacggccgaaggtggtggttggtgggagcagccagcgacgagcccgtagacactcgtacgcgtgcgggctgacgtgcgcgctacatggccggagtcgggcgaagcgggggaccgtggggaagaacgcgaggagggaggagtgggaggttgggggtgtcgctaggcgcccttagctccctccctctggaggagctgccgcggccactctgctgccgccgctgccgccgccattttgggttcgctttgcgaggggaaacgatcccagtgtcggttgcgggatccgcctcctctcagtttgcccctttagccctccacctttcccttctcctctctcgcatttccgccagtcggcttacccgctggccgcctcctgacaagcgggagggatccgcggtggacccagggaagcggaggagcctggcggccaccccctcttcctcacttccctgtactctcatcgctctcggcctccgacacgaaaaggaagcaaatgagctgatggaagatctgtttgaaactttccaagatgagatgggattctccaacatggaagatgatggcccagaagaggaggagcgtgtggctgagcctcaagctaactttaacacccctcaagctctacggtttgaggaactactggccaacctactaaatgaacaacatcagatagcgaaggaactatttgaacagctgaagatgaagaaaccttcagccaaacagcagaaggaggtagagaaggttaaaccccagtgtaaggaagttcatcagaccctgattctggacccagcacaaaggaagagactccagcagcagatgcagcagcatgttcagctcttgacacaaatccaccttcttgccacctgcaaccccaatctcaatccggaggccagtagcaccaggatatgtcttaaagagctgggaacctttgctcaaagctccatcgcccttcaccatcagtacaaccccaagtttcagaccctgttccaaccctgtaacttgatgggagctatgcagctgattgaagacttcagcacacatgtcagcattgactgcagccctcataaaactgtcaagaagactgccaatgaatttccctgtttgccaaagcaagtggcttggatcctggccacaagcaaggttttcatgtatccagagttacttccagtgtgttccctgaaggcaaagaatccccaggataagatcctcttcaccaaggctgaggacaatttgttagctttaggactgaagcattttgaagggactgagtttcttaaccctctaatcagcaagtaccttctaacctgcaagactgcccgccaactgacagtgagaatcaagaacctcaacatgaacagagctcctgacaacatcattaaattttataagaagaccaaacagctgccagtcctaggaaaatgctgtgaagagatccagccacatcagtggaagccacctatagagagagaagaacaccggctcccattctggttaaaggccagtctgccatccatccaggaagaactgcggcacatggctgatggtgctagagaggtaggaaatatgactggaaccactgagatcaactcagatcaaggcctagaaaaagacaactcagagttggggagtgaaactcggtacccactgctattgcctaagggtgtagtcctgaaactgaagccagttgccgaccgtttccccaagaaggcttggagacagaagcgttcatcagtcctgaaacccctccttatccaacccagcccctctctccagcccagcttcaaccctgggaaaacaccagcccaatcaactcattcagaagcccctccgagcaaaatggtgctccggattcctcacccaatacagccagccactgttttacagacagttccaggtgtccctccactgggggtcagtggaggtgagagttttgagtctcctgcagcactgcctgctatgccccctgaggccaggacaagcttccctctgtctgagtcccagactttgctctcttctgcccctgtgcccaaggtaatgatgccctcccctgcctcttccatgtttcgaaagccatatgtgagacggagaccctcaaaaagaaggggagccagggcctttcgctgtatcaaacctgcccctgttatccaccctgcatctgttatcttcactgttcctgctaccactgtgaagattgtgagccttggcggtggctgtaacatgatccagcctgtcaatgcggctgtggcccagagtccccagactattcccatcgccaccctcttggttaaccctacttccttcccctgtccattgaaccagccccttgtggcctcctctgtctcacccttaattgtttctggcaattctgtgaatcttcctataccatccacccctgaagataaggcccacatgaatgtggacattgcttgtgctgtggctgatggggaaaatgcctttcagggcctagaacccaaattagagccccaggaactatctcctctctctgctactgttttccccaaagtggaacatagcccagggcctccaccagtcgataaacagtgccaagaaggattgtcagagaacagtgcctatcgctggaccgttgtgaaaacagaggagggaaggcaagctctggagccgctccctcagggcatccaggagtctctaaacaactcttcccctggggatttagaggaagttgtcaagatggaacctgaagatgctacagaggaaatcagtggatttctttgagctaggagaataagagtctggagactgggagccttcacttcggcctccgattggtggcgcatagggtgtaaccaataggaaacccctaaagggtacttaaaccccagattttgcaactggggctcttgagcagcttgctttagcctgctcccactctgtggaatatacttttgcttcaataaatctgtgcttttattgcttcattgtttcattg

SEQ ID NO: 200757 - DNA, 2927 bp, Homo sapiens
  Payload ID: 19617
  Gene Name: YY1 associated protein 1
  Uniprot ID: Q9H869
  ENST ID: ENST00000368340
  CDS Start-End: 110-2716
cgcgtacgggatggctggctcgcaggacggccgaaggtggtggttggtgggagcagccagcgacgagcccgtagacactcgtacgcgtgcgggctgacgtgcgcgctacatggccggagtcgggcgaagcgggggaccgtggggaagaacgcgaggagggaggagtgggaggttgggggtgtcgctaggcgcccttagctccctccctctggaggagctgccgcggccactctgctgccgccgctgccgccgccattttgggttcgctttgcgaggggaaacgatcccagtgtcggttgcgggatccgcctcctctcagtttgcccctttagccctccacctttcccttctcctctctcgcatttccgccagtcggcttacccgctggccgcctcctgacaagcgggagggatccgcggtggacccagggaagcggaggagcctggcggccaccccctcttcctcacttccctgtactctcatcgctctcggcctccgacacgaaaaggaagcaaatgagctgatggaagatctgtttgaaactttccaagatgagatgggattctccaacatggaagatgatggcccagaagaggaggagcgtgtggctgagcctcaagctaactttaacacccctcaagctctacggtttgaggaactactggccaacctactaaatgaacaacatcagatagcgaaggaactatttgaacagctgaagatgaagaaaccttcagccaaacagcagaaggaggtagagaaggttaaaccccagtgtaaggaagttcatcagaccctgattctggacccagcacaaaggaagagactccagcagcagatgcagcagcatgttcagctcttgacacaaatccaccttcttgccacctgcaaccccaatctcaatccggaggccagtagcaccaggatatgtcttaaagagctgggaacctttgctcaaagctccatcgcccttcaccatcagtacaaccccaagtttcagaccctgttccaaccctgtaacttgatgggagctatgcagctgattgaagacttcagcacacatgtcagcattgactgcagccctcataaaactgtcaagaagactgccaatgaatttccctgtttgccaaagcaagtggcttggatcctggccacaagcaaggttttcatgtatccagagttacttccagtgtgttccctgaaggcaaagaatccccaggataagatcctcttcaccaaggctgaggacaacaagtaccttctaacctgcaagactgcccgccaactgacagtgagaatcaagaacctcaacatgaacagagctcctgacaacatcattaaattttataagaagaccaaacagctgccagtcctaggaaaatgctgtgaagagatccagccacatcagtggaagccacctatagagagagaagaacaccggctcccattctggttaaaggccagtctgccatccatccaggaagaactgcggcacatggctgatggtgctagagaggtaggaaatatgactggaaccactgagatcaactcagatcaaggcctagaaaaagacaactcagagttggggagtgaaactcggtacccactgctattgcctaagggtgtagtcctgaaactgaagccagttgccgaccgtttccccaagaaggcttggagacagaagcgttcatcagtcctgaaacccctccttatccaacccagcccctctctccagcccagcttcaaccctgggaaaacaccagcccaatcaactcattcagaagcccctccgagcaaaatggtgctccggattcctcacccaatacagccagccactgttttacagacagttccaggtgtccctccactgggggtcagtggaggtgagagttttgagtctcctgcagcactgcctgctatgccccctgaggccaggacaagcttccctctgtctgagtcccagactttgctctcttctgcccctgtgcccaaggtaatgatgccctcccctgcctcttccatgtttcgaaagccatatgtgagacggagaccctcaaaaagaaggggagccagggcctttcgctgtatcaaacctgcccctgttatccaccctgcatctgttatcttcactgttcctgctaccactgtgaagattgtgagccttggcggtggctgtaacatgatccagcctgtcaatgcggctgtggcccagagtccccagactattcccatcgccaccctcttggttaaccctacttccttcccctgtccattgaaccagccccttgtggcctcctctgtctcacccttaattgtttctggcaattctgtgaatcttcctataccatccacccctgaagataaggcccacatgaatgtggacattgcttgtgctgtggctgatggggaaaatgcctttcagggcctagaacccaaattagagccccaggaactatctcctctctctgctactgttttccccaaagtggaacatagcccagggcctccaccagtcgataaacagtgccaagaaggattgtcagagaacagtgcctatcgctggaccgttgtgaaaacagaggagggaaggcaagctctggagccgctccctcagggcatccaggagtctctaaacaactcttcccctggggatttagaggaagttgtcaagatggaacctgaagatgctacagaggaaatcagtggatttctttgagctaggagaataagagtctggagactgggagccttcacttcggcctccgattggtggcgcatagggtgtaaccaataggaaacccctaaagggtacttaaaccccagattttgcaactggggctcttgagcagcttgctttagcctgctcccactctgtggaatatacttttgcttcaataaatctgtgcttttattgcttcattgtttca

SEQ ID NO: 200758 - DNA, 2011 bp, Homo sapiens
  Payload ID: 19617
  Gene Name: YY1 associated protein 1
  ENST ID: ENST00000405763
  CDS Start-End: 12-1499
gtgcgcgctacatggccggagtcgggcgaagcgggggaccgtggggaagaacgcgaggagggaggagtgggaggttgggggtgtcgctaggcgcccttagctccctccctctggaggagctgccgcggccactctgctgccgccgctgccgccgccattttgggttcgctttgcgaggggaaacgatcccagtgtcggttgcgggatccgcctcctctcagtttgcccctttagccctccacctttcccttctcctctctcgcatttccgccagtcggcttacccgctggccgcctcctgacaagcgggagggatccgcggtggacccagggaagcggaggagcctggcggccaccccctcttcctcacttccctgtactctcatcgctctcggcctccgacacgaaaaggaagcaaatgagctgatggaagatctgtttgaaactttccaagatgagatgggattctccaacatggaagatgatggcccagaagaggaggagcgtgtggctgagcctcaagctaactttaacacccctcaagctctacggtttgaggaactactggccaacctactaaatgaacaacatcagatagcgaaggaactatttgaacagctgaagatgaagaaaccttcagccaaacagcagaaggaggtagagaaggttaaaccccagtgtaaggaagttcatcagaccctgattctggacccagcacaaaggaagagactccagcagcagatgcagcagcatgttcagctcttgacacaaatccaccttcttgccacctgcaaccccaatctcaatccggaggccagtagcaccaggatatgtcttaaagagctgggaacctttgctcaaagctccatcgcccttcaccatcagtacaaccccaagtttcagaccctgttccaaccctgtaacttgatgggagctatgcagctgattgaagacttcagcacacatgtcagcattgactgcagccctcataaaactgtcaagaagactgccaatgaatttccctgtttgccaaagcaagtggcttggatcctggccacaagcaaggttttcatgtatccagagttacttccagtgtgttccctgaaggcaaagaatccccaggataagatcctcttcaccaaggctgaggacaatttgttagctttaggactgaagcattttgaagggactgagtttcttaaccctctaatcagcaagtaccttctaacctgcaagactgcccgccaactgacagtgagaatcaagaacctcaacatgaacagagctcctgacaacatcattaaattttataagaagaccaaacagctgccagtcctaggaaaatgctgtgaagagatccagccacatcagtggaagccacctatagagagagaagaacaccggctcccattctggttaaaggtacagccctcttcctcgaagtctgtaggaggcagaaggtcactgaaagttctgagagaatatcaaggacttccttaatcgtctaatgctttagttgtagaactaggacttcaggaatcttcctgattcacctttcttcccttacttttctgcccttctccgggtgattctacaacattttcaaaataatgggtaaaatggtaatttgctaaaggaaattcagagaagagtttctaaagtgtataattggactgtggtctttgtagaaatttcatatgcagagtcccttggaaagatgccttgagcttgtctcaggtccctaaacttagaaagtcctattctttttcccaaattctgacatgtgctggatcagagtgttctcatttccaataggccagtctgccatccatccaggaagaactgcggcacatggctgatggtgctagagaggtaggaaatatgactggaaccactgagatcaactcagatcaaggcctagaaaaagacaactcagagttggggagtgaaactcggtacccactgctattgcctaagggtgtagtcctgaaactgaagccagttgccgaccg

SEQ ID NO: 200759 - DNA, 2654 bp, Homo sapiens
  Payload ID: 19617
  Gene Name: YY1 associated protein 1
  Uniprot ID: Q9H869
  ENST ID: ENST00000404643
  CDS Start-End: 251-2443
gcggcggctgctttggcggcggttggtggccgtgcgggcggggagggagggggaggagagaagaggaggtggagaaggcttgggctcgcgccgctgaagtcggcttacccgctggccgcctcctgacaagcgggagggatccgcggtggacccagggaagcggaggagcctggcggccaccccctcttcctcacttccctgtactctcatcgctctcggcctccgacacgaaaaggaagcaaatgagctgatggaagatctgtttgaaactttccaagatgagatgggattctccaacatggaagatgatggcccagaagaggaggagcgtgtggctgagcctcaagctaactttaacacccctcaagctctacggtttgaggaactactggccaacctactaaatgaacaacatcagatagcgaaggaactatttgaacagctgaagatgaagaaaccttcagccaaacagcagaaggaggtagagaaggttaaaccccagtgtaaggaagttcatcagaccctgattctggacccagcacaaaggaagagactccagcagcagatgcagcagcatgttcagctcttgacacaaatccaccttcttgccacctgcaaccccaatctcaatccggaggccagtagcaccaggatatgtcttaaagagctgggaacctttgctcaaagctccatcgcccttcaccatcagtacaaccccaagtttcagaccctgttccaaccctgtaacttgatgggagctatgcagctgattgaagacttcagcacacatgtcagcattgactgcagccctcataaaactgtcaagaagactgccaatgaatttccctgtttgccaaagcaagtggcttggatcctggccacaagcaaggttttcatgtatccagagttacttccagtgtgttccctgaaggcaaagaatccccaggataagatcctcttcaccaaggctgaggacaacaagtaccttctaacctgcaagactgcccgccaactgacagtgagaatcaagaacctcaacatgaacagagctcctgacaacatcattaaattttataagaagaccaaacagctgccagtcctaggaaaatgctgtgaagagatccagccacatcagtggaagccacctatagagagagaagaacaccggctcccattctggttaaaggccagtctgccatccatccaggaagaactgcggcacatggctgatggtgctagagaggtaggaaatatgactggaaccactgagatcaactcagatcaaggcctagaaaaagacaactcagagttggggagtgaaactcggtacccactgctattgcctaagggtgtagtcctgaaactgaagccagttgccgaccgtttccccaagaaggcttggagacagaagcgttcatcagtcctgaaacccctccttatccaacccagcccctctctccagcccagcttcaaccctgggaaaacaccagcccaatcaactcattcagaagcccctccgagcaaaatggtgctccggattcctcacccaatacagccagccactgttttacagacagttccaggtgtccctccactgggggtcagtggaggtgagagttttgagtctcctgcagcactgcctgctatgccccctgaggccaggacaagcttccctctgtctgagtcccagactttgctctcttctgcccctgtgcccaaggtaatgatgccctcccctgcctcttccatgtttcgaaagccatatgtgagacggagaccctcaaaaagaaggggagccagggcctttcgctgtatcaaacctgcccctgttatccaccctgcatctgttatcttcactgttcctgctaccactgtgaagattgtgagccttggcggtggctgtaacatgatccagcctgtcaatgcggctgtggcccagagtccccagactattcccatcgccaccctcttggttaaccctacttccttcccctgtccattgaaccagccccttgtggcctcctctgtctcacccttaattgtttctggcaattctgtgaatcttcctataccatccacccctgaagataaggcccacatgaatgtggacattgcttgtgctgtggctgatggggaaaatgcctttcagggcctagaacccaaattagagccccaggaactatctcctctctctgctactgttttccccaaagtggaacatagcccagggcctccaccagtcgataaacagtgccaagaaggattgtcagagaacagtgcctatcgctggaccgttgtgaaaacagaggagggaaggcaagctctggagccgctccctcagggcatccaggagtctctaaacaactcttcccctggggatttagaggaagttgtcaagatggaacctgaagatgctacagaggaaatcagtggatttctttgagctaggagaataagagtctggagactgggagccttcacttcggcctccgattggtggcgcatagggtgtaaccaataggaaacccctaaagggtacttaaaccccagattttgcaactggggctcttgagcagcttgctttagcctgctcccactctgtggaatatacttttgcttcaataaatctgtgcttttattgcttcattgtttca

SEQ ID NO: 200760 - DNA, 2705 bp, Homo sapiens
  Payload ID: 19617
  Gene Name: YY1 associated protein 1
  Uniprot ID: Q9H869
  ENST ID: ENST00000407221
  CDS Start-End: 335-2494
gtagggtgggggtgctggcggcggctgctttggcggcggttggtggccgtgcgggcggggagggagggggaggagagaagaggaggtggagaaggcttgggctcgcgccgctgaagtcggcttacccgctggccgcctcctgacaagcgggagggatccgcggtggacccagggaagcggaggagcctggcggccaccccctcttcctcacttccctgtactctcatcgctctcggcctccgacacgaaaaggaagcaaatgagctgatggaagatctgtttgaaactgtgagtaatgatcctcaagtgagaacatgggattttccaagatgagatgggattctccaacatggaagatgatggcccagaagaggaggagcgtgtggctgagcctcaagctaactttaacacccctcaagctctacggtttgaggaactactggccaacctactaaatgaacaacatcagatagcgaaggaactatttgaacagctgaagatgaagaaaccttcagccaaacagcagaaggaggtagagaaggttaaaccccagtgtaaggaagttcatcagaccctgattctggacccagcacaaaggaagagactccagcagcagatgcagcagcatgttcagctcttgacacaaatccaccttcttgccacctgcaaccccaatctcaatccggaggccagtagcaccaggatatgtcttaaagagctgggaacctttgctcaaagctccatcgcccttcaccatcagtacaaccccaagtttcagaccctgttccaaccctgtaacttgatgggagctatgcagctgattgaagacttcagcacacatgtcagcattgactgcagccctcataaaactgtcaagaagactgccaatgaatttccctgtttgccaaagcaagtggcttggatcctggccacaagcaaggttttcatgtatccagagttacttccagtgtgttccctgaaggcaaagaatccccaggataagatcctcttcaccaaggctgaggacaacaagtaccttctaacctgcaagactgcccgccaactgacagtgagaatcaagaacctcaacatgaacagagctcctgacaacatcattaaattttataagaagaccaaacagctgccagtcctaggaaaatgctgtgaagagatccagccacatcagtggaagccacctatagagagagaagaacaccggctcccattctggttaaaggccagtctgccatccatccaggaagaactgcggcacatggctgatggtgctagagaggtaggaaatatgactggaaccactgagatcaactcagatcaaggcctagaaaaagacaactcagagttggggagtgaaactcggtacccactgctattgcctaagggtgtagtcctgaaactgaagccagttgccgaccgtttccccaagaaggcttggagacagaagcgttcatcagtcctgaaacccctccttatccaacccagcccctctctccagcccagcttcaaccctgggaaaacaccagcccaatcaactcattcagaagcccctccgagcaaaatggtgctccggattcctcacccaatacagccagccactgttttacagacagttccaggtgtccctccactgggggtcagtggaggtgagagttttgagtctcctgcagcactgcctgctatgccccctgaggccaggacaagcttccctctgtctgagtcccagactttgctctcttctgcccctgtgcccaaggtaatgatgccctcccctgcctcttccatgtttcgaaagccatatgtgagacggagaccctcaaaaagaaggggagccagggcctttcgctgtatcaaacctgcccctgttatccaccctgcatctgttatcttcactgttcctgctaccactgtgaagattgtgagccttggcggtggctgtaacatgatccagcctgtcaatgcggctgtggcccagagtccccagactattcccatcgccaccctcttggttaaccctacttccttcccctgtccattgaaccagccccttgtggcctcctctgtctcacccttaattgtttctggcaattctgtgaatcttcctataccatccacccctgaagataaggcccacatgaatgtggacattgcttgtgctgtggctgatggggaaaatgcctttcagggcctagaacccaaattagagccccaggaactatctcctctctctgctactgttttccccaaagtggaacatagcccagggcctccaccagtcgataaacagtgccaagaaggattgtcagagaacagtgcctatcgctggaccgttgtgaaaacagaggagggaaggcaagctctggagccgctccctcagggcatccaggagtctctaaacaactcttcccctggggatttagaggaagttgtcaagatggaacctgaagatgctacagaggaaatcagtggatttctttgagctaggagaataagagtctggagactgggagccttcacttcggcctccgattggtggcgcatagggtgtaaccaataggaaacccctaaagggtacttaaaccccagattttgcaactggggctcttgagcagcttgctttagcctgctcccactctgtggaatatacttttgcttcaataaatctgtgcttttattgcttcattgtttca

SEQ ID NO: 200761 - DNA, 2684 bp, Homo sapiens
  Payload ID: 19617
  Gene Name: YY1 associated protein 1
  ENST ID: ENST00000436865
  CDS Start-End: 65-211
gaggaggaggcgagccgcagcgccgcggcgacgaacccagggagaaaaggaagcaaatgagctgatggaagatctgtttgaaactttccaagatgagatgggattctccaacatggaagatgatggcccagaagaggaggagcgtgtggctgagcctcaagctaactttaacacccctcaagctctacgccagcttctgttactgatgtaaggatgcagagtcctgtcaggagttaggtgtcaagtgaagtctccttgttatggggcagtgcagctgtaggccaagctgtatctgtttgggaagggagaaaaaacagtagctggcatccatatccacttctccgggtttgaggaactactggccaacctactaaatgaacaacatcagatagcgaaggaactatttgaacagctgaagatgaagaaaccttcagccaaacagcagaaggaggtagagaaggttaaaccccagtgtaaggaagttcatcagaccctgattctggacccagcacaaaggaagagactccagcagcagatgcagcagcatgttcagctcttgacacaaatccaccttcttgccacctgcaaccccaatctcaatccggaggccagtagcaccaggatatgtcttaaagagctgggaacctttgctcaaagctccatcgcccttcaccatcagtacaaccccaagtttcagaccctgttccaaccctgtaacttgatgggagctatgcagctgattgaagacttcagcacacatgtcagcattgactgcagccctcataaaactgtcaagaagactgccaatgaatttccctgtttgccaaagcaagtggcttggatcctggccacaagcaaggttttcatgtatccagagttacttccagtgtgttccctgaaggcaaagaatccccaggataagatcctcttcaccaaggctgaggacaatttgttagctttaggactgaagcattttgaagggactgagtttcttaaccctctaatcagcaagtaccttctaacctgcaagactgcccgccaactgacagtgagaatcaagaacctcaacatgaacagagctcctgacaacatcattaaattttataagaagaccaaacagctgccagtcctaggaaaatgctgtgaagagatccagccacatcagtggaagccacctatagagagagaagaacaccggctcccattctggttaaaggccagtctgccatccatccaggaagaactgcggcacatggctgatggtgctagagaggtaggaaatatgactggaaccactgagatcaactcagatcaaggcctagaaaaagacaactcagagttggggagtgaaactcggtacccactgctattgcctaagggtgtagtcctgaaactgaagccagttgccgaccgtttccccaagaaggcttggagacagaagcgttcatcagtcctgaaacccctccttatccaacccagcccctctctccagcccagcttcaaccctgggaaaacaccagcccaatcaactcattcagaagcccctccgagcaaaatggtgctccggattcctcacccaatacagccagccactgttttacagacagttccaggtgtccctccactgggggtcagtggaggtgagagttttgagtctcctgcagcactgcctgctatgccccctgaggccaggacaagcttccctctgtctgagtcccagactttgctctcttctgcccctgtgcccaaggtaatgatgccctcccctgcctcttccatgtttcgaaagccatatgtgagacggagaccctcaaaaagaaggggagccagggcctttcgctgtatcaaacctgcccctgttatccaccctgcatctgttatcttcactgttcctgctaccactgtgaagattgtgagccttggcggtggctgtaacatgatccagcctgtcaatgcggctgtggcccagagtccccagactattcccatcgccaccctcttggttaaccctacttccttcccctgtccattgaaccagccccttgtggcctcctctgtctcacccttaattgtttctggcaattctgtgaatcttcctataccatccacccctgaagataaggcccacatgaatgtggacattgcttgtgctgtggctgatggggaaaatgcctttcagggcctagaacccaaattagagccccaggaactatctcctctctctgctactgttttccccaaagtggaacatagcccagggcctccaccagtcgataaacagtgccaagaaggattgtcagagaacagtgcctatcgctggaccgttgtgaaaacagaggagggaaggcaagctctggagccgctccctcagggcatccaggagtctctaaacaactcttcccctggggatttagaggaagttgtcaagatggaacctgaagatgctacagaggaaatcagtggatttctttgagctaggagaataagagtctggagactgggagccttcacttcggcctccgattggtggcgcatagggtgtaaccaataggaaacccctaaagggtacttaaaccccagattttgcaactggggctcttgagcagcttgctttagcctgctcccactctgtggaatatacttttgcttcaataaatctgtgcttttattgcttcattgtttca

SEQ ID NO: 200762 - DNA, 932 bp, Homo sapiens
  Payload ID: 19617
  Gene Name: YY1 associated protein 1
  ENST ID: ENST00000443231
  CDS Start-End: 315-932
cgccgctgaaggtacgcgtgagggcctgcgctggagccggcttgacaggtcggcttacccgctggccgcctcctgacaagcgggagggatccgcggtggacccagggaagcggaggagcctggcggccaccccctcttcctcacttccctgtactctcatcgctctcggcctccgacacgaaaaggaagcaaatgagctgatggaagatctgtttgaaactagacagggtcttgccatgttctggaactcataggctcaagtaatcttcctgcctcaacctcccaaagtgctggaattacagttccaagatgagatgggattctccaacatggaagatgatggcccagaagaggaggagcgtgtggctgagcctcaagctaactttaacacccctcaagctctacggtttgaggaactactggccaacctactaaatgaacaacatcagatagcgaaggaactatttgaacagctgaagatgaagaaaccttcagccaaacagcagaaggaggtagagaaggttaaaccccagtgtaaggaagttcatcagaccctgattctggacccagcacaaaggaagagactccagcagcagatgcagcagcatgttcagctcttgacacaaatccaccttcttgccacctgcaaccccaatctcaatccggaggccagtagcaccaggatatgtcttaaagagctgggaacctttgctcaaagctccatcgcccttcaccatcagtacaaccccaagtttcagaccctgttccaaccctgtaacttgatgggagctatgcagctgattgaagacttcagcacacatgtcagcattgactgcagccctcataaaactgtcaagaagactgccaatgaatttccctgtttgccaaagcaagtggcttggatcctggccacaagcaaggttttcatgtat

SEQ ID NO: 200763 - DNA, 810 bp, Homo sapiens
  Payload ID: 19617
  Gene Name: YY1 associated protein 1
  ENST ID: ENST00000454523
  CDS Start-End: 228-810
gcgtgagggcctgcgctggagccggcttgacagggtctgagggggagtggagaactgggcgaggaggttcccgtggtcggcttacccgctggccgcctcctgacaagcgggagggatccgcggtggacccagggaagcggaggagcctggcggccaccccctcttcctcacttccctgtactctcatcgctctcggcctccgacacgaaaaggaagcaaatgagctgatggaagatctgtttgaaactttccaagatgagatgggattctccaacatggaagatgatggcccagaagaggaggagcgtgtggctgagcctcaagctaactttaacacccctcaagctctacggtttgaggaactactggccaacctactaaatgaacaacatcagatagcgaaggaactatttgaacagctgaagatgaagaaaccttcagccaaacagcagaaggaggtagagaaggttaaaccccagtgtaaggaagttcatcagaccctgattctggacccagcacaaaggaagagactccagcagcagatgcagcagcatgttcagctcttgacacaaatccaccttcttgccacctgcaaccccaatctcaatccggaggccagtagcaccaggatatgtcttaaagagctgggaacctttgctcaaagctccatcgcccttcaccatcagtacaaccccaagtttcagaccctgttccaaccctgtaacttgatgggagctatgcagctgattgaagacttcagcacacatgtcagcattgactgcagccctcataaaactgtcaagaagactg

SEQ ID NO: 200764 - DNA, 6697 bp, Homo sapiens
  Payload ID: 19618
  Gene Name: YY1 transcription factor
  Uniprot ID: P25490
  ENST ID: ENST00000262238
  CDS Start-End: 261-1505
cgaggcgaggcgaggcggggagccgagacgagcagcggccgagcgagcgcgggcgcgggcgcaccgaggcgagggaggcggggaagccccgccgccgccgcggcgcccgccccttcccccgccgcccgccccctctccccccgcccgctcgccgccttcctccctctgccttccttccccacggccggccgcctcctcgcccgcccgcccgcagccgaggagccgaggccgccgcggccgtggcggcggagccctcagccatggcctcgggcgacaccctctacatcgccacggacggctcggagatgccggccgagatcgtggagctgcacgagatcgaggtggagaccatcccggtggagaccatcgagaccacagtggtgggcgaggaggaggaggaggacgacgacgacgaggacggcggcggtggcgaccacggcggcgggggcggccacgggcacgccggccaccaccaccaccaccatcaccaccaccaccacccgcccatgatcgctctgcagccgctggtcaccgacgacccgacccaggtgcaccaccaccaggaggtgatcctggtgcagacgcgcgaggaggtggtgggcggcgacgactcggacgggctgcgcgccgaggacggcttcgaggatcagattctcatcccggtgcccgcgccggccggcggcgacgacgactacattgaacaaacgctggtcaccgtggcggcggccggcaagagcggcggcggcggctcgtcgtcgtcgggaggcggccgcgtcaagaagggcggcggcaagaagagcggcaagaagagttacctcagcggcggggccggcgcggcgggcggcggcggcgccgacccgggcaacaagaagtgggagcagaagcaggtgcagatcaagaccctggagggcgagttctcggtcaccatgtggtcctcagatgaaaaaaaagatattgaccatgagacagtggttgaagaacagatcattggagagaactcacctcctgattattcagaatatatgacaggaaagaaacttcctcctggaggaatacctggcattgacctctcagatcccaaacaactggcagaatttgctagaatgaagccaagaaaaattaaagaagatgatgctccaagaacaatagcttgccctcataaaggctgcacaaagatgttcagggataactcggccatgagaaaacatctgcacacccacggtcccagagtccacgtctgtgcagaatgtggcaaagcttttgttgagagttcaaaactaaaacgacaccaactggttcatactggagagaagccctttcagtgcacgttcgaaggctgtgggaaacgcttttcactggacttcaatttgcgcacacatgtgcgaatccataccggagacaggccctatgtgtgccccttcgatggttgtaataagaagtttgctcagtcaactaacctgaaatctcacatcttaacacatgctaaggccaaaaacaaccagtgaaaagaagagagaagacccttctcgaccacgggaagcatcttccagaagtgtgattgggaataaatatgcctctcctttgtatattatttctaggaagaattttaaaaatgaatcctacacacctaagggacatgttttgataaagtagtaaaaattaaaaaaaaaaaactttactaagatgacattgctaagatgctctatcttgctctgtaatctcgtttcaaaaacacagtgtttttgtaaagtgtggtcccaacaggaggacaattcatgaacttcgcatcaaaagacaattctttatacaacagtgctaaaaatgggacttcttttcacattcttataaatatgaagctcacctgttgcttacaatttttttaattttgtattttccaagtgtgcatattgtacacttttttggggatatgcttagtaatgctacgtgtgatttttctggaggttgataactttgcttgcagtagattttctttaaaagaatgggcagttacatgcatacttcaaaagtattttcctgtaaaaaaaaaaaagttatataggttttgtttgctatcttaattttggttgtattctttgatgttaacacattttgtataattgtatcgtatagctgtattgaatcatgtagtatcaaatattagatgtgatttaatagtgttaatcaatttaaacccattttagtcactttttttttccaaaaaaatactgccagatgctgatgttcagtgtaatttctttgcctgttcagttacagaaagtggtgctcagttgtagaatgtattgtaccttttaacacctgatgtgtacatcccatgtaacagaaagggcaacaataaaatagcaatcctaaagcaagaatatggcagaacaagatctgtaagcacagtcttattttcttttgttgtccagaatacttataattcttgagcctcccagaaattggaagctaaataaagcaactcaagtttcctttattttgcactcaattacagtgattattgatgaaagcgatgcatggatattttaatacttcctacatgtcctgacttctgaaagagagtaggtaacaggcatcccgagttcaggaactacctcagaacaccccaggccaggttggtcataggctgtgattttagcccccggcaagtgtgagtgaagcatctgtaccaccgcgcaggctgagcgcctgcgcagggtaaggtgccacctggcagtggggcacacagagggaagaccaggcctgtccatcagccggctgccttcagaggcagctccagcaggaccttggcttgtctgacaggaaatgcttgtggtcgttggttatttggtttgagagcccttgttcctccatctagtggagtccttattaaatgctagcaatgtggcaattgagtgccagtagcttaatttcatgtttctaaatggacactgggtgcaaatcggcaaggtgattagattattagaaaattctgctcaatgagtacctctcacattgtaacctcttaaatgtacgattataatgttggatcttaggtcaaataacagacttgagaatactttataaactgccatgatacagcaaaatctcatttattcaaagtgcaaacatactgtgtgtctttctgttttgtgtatgcttgactgcaagataaatgacaaactagctaatatccgagatttatttacaaatggccagggaccccatcaggtgaaacacatagcccattgtcttagagcttctccatcggtcctgtacaggaggattggtgacctactaacagtgaccctgtggctctgtggaattttgaagtgccttttgtgaatcatgaatgaaacatttaacttgagaccctttaaaaaattcatccagaatctgttaccccttgggtagtttgatggaactgagttaagcagaagaccccagctgttttctgggtaagccaggctttgctgtatctggcagtcaggagagaggtcagcccatggtggaggtcttcagtgccgagggctcggatgagaacgtgtagttctttgacttggacctgggcagcgtcttctatggatgcctgccttgtgagcacccacaccttccctccccactgtcgggttgagtagccccagcgtggctgtgttaggagtcctttgcccaacattgtgctgcactggagcctggccctggcactgtcctcaggaccctgcccaagggcccaccgcagagcacacctatgctatggggagccctgctggcagccccgagagccatgccatggcctgcaggagccaggctcctgtgtggatgaagtccctcttcctctgtgccttgatcccttgggggtgcctttggtcatctcttctgtcctttcctgtctctgaaatagtcatcactccccttgactctctctgttcacgtcttctcagtctgcagagttaacttctgtaaggagtttaatctggggttccaagaaaacaagttccttgttaacatagcactgactttgcaacaatagaaaactaacaaatgagcaacaatataaagagtagaggtagttctcattgggtgtaacttcaacccattctgcttgtggttagaatttataattttgctaacgatgtaatttactaaggtttgaaatggtattctaacagtgagtccattgtcttgaggattaatctgatttataagtaatactgatagacatattttcgtacatctgagcagaaataaatgcatgtttctagcatatgtaatataaaaactccagaggataagtttacacttaacaagatgttgttttctatttttgaatttcttattatttccccctttttggtagtggagttgagagggggagcatactatttgtataaagaactgtcaccccagagtgacatttattttccaagatgaccctgaactcatgctgttggtttcatatggtgtttgtgtgctttgcctagattcaaggcctgaggatttgaggaaaatcgggattttttttttcctatttggttttcatgtaaaagttctaaatgtcacttattttgctaaataagaccctttcacaggatagtgtgcgcaatacctgtccgtgtttccaagcagagttcaagttcatgtcttcacaagtagatgagagtcacttccagtcgggggaagcccgcctgagcagtgttttgagagtgcgtacattggaggactgccccacgtccgtttgcactctgccttgcaaaacttactgtggagacgtgtcccagactggtctcagaccagagtttgtggcacaggaaaacctggccccctaaaaagaagttttggaattggaagcctgataatttcgggaggctgaggcaggagaacggcgtgaacccgggaggcggagcttgcagtgagccgagatcgcaccactgcactccagcctgggtgacagagcaagactccgtctcccaaaaaaaaaaaaaaaaaaaaaaaaaaggaaacctgacaattctacccacctccccccacccccgactataggcaaagagagttgatcacttccagggtctctgacttctgtgacctggaaatcagcctggcttgggaaattcatgttgttgatctttaattatttaattattctttaataatccttctattttcttgacatctgacccccagcaagagtaaggatcccagaggtcaaaacagtggtgagagccaagctgctcacagacacccacttgatgccacagccatgccatgaggcttcctcccagctgctctgctggcttgctgaagccagctctgagtcacagggttgccttggaccctcggctgtagggggcacctgtctggctccgggccctttgtcctggatacactgacagtaatgtgagcgcagcacttcagagttcaggcccagcaggtcctggcaagtgcattccacccgaacttttaacccaagcggtggggaaggaagccaaaactccaagctgcactttcttggggttctggccatgcacttcttagccttctctctgactttacaggacaaaaggtaccccacgccttcagaatcatgcttacctgcacggcagcatctgactggatggctggctaggtctcatccaccccaaattactgacccttgatttatgttgttactgctcaggttatgctcagatgccctggttgcctgaagatggtttaagtgcaggcccttcagacaagtcacgtcaggcaagagagggctggcctctgacccacaagagggcagatttgtggccaagaggcttcctggcatccacccccaggcccaagggatcagtgtggtgccagagaggatctttaagctgggactgtactgaggcttgatgggaagtatgggcagcatgtacttgacacgttatcacccagtccccttgtaaaatctggaatggagcgtttaagctgagcgttagcatcaggtcagcaggcaaagcaaacctcccacaaactgggtgccgtaaggtgggaggtgacacatggagagcttcgtcctggccgagcaggcacccagccccatgtcccccgccagcattctggatgtcagaggagggtgcgtgtgatggcgtcacattcatctgaagcacactgattgattttccacaaggtggcaagtttgatcaaattgaccgcttttcatgagacacccagatgctgtaaaaaaaaaaaacagcactgggatgtgttgaggagggggcagtttgctgtgctctgttctgtctgctgctctctctgggggccgcacaatgtccgcacacatcacggaggggagaaaggcatcagtaccaaacggaacaacctcttttttctacattgtccatacccggacatgtgaggctctattatcaacaggtggtgagaaaaattatgtttttattcgctttctggtaacttctgtaggccctggctcaaggacttagcatttcgtctcatgtacatctttttcttaagtgttctttgccatttctggaattgtccttggtttttccttagctcataggtcatagatgcagaaatatagtatttaaggcatccgcatccagcatcagatggctttgcatccagaaaaacattgataactcagtttgaagcaccaagcatgtgtaatatggctctatacaatataataaatgcataatgttaagctttttaa

SEQ ID NO: 200765 - DNA, 636 bp, Homo sapiens
  Payload ID: 19618
  Gene Name: YY1 transcription factor
  ENST ID: ENST00000554371
  CDS Start-End: 535-636
ttctcgtcaaagcagactttattggggcgacagggccgccccgcacgcgccagccgctccccgcgcggcccccgggccgcccacccgcctcaaccccgctcccggccggcccctccctcccttctcctcaggctcccgcccccgtggtgcccggggccgcgcggaccgctcaccggctcccaaggcagcggctgtagcggcgacgccccgttcccgagtgcggccccggcccgaggcggcgggttttgtggctgttgcaccgcgaagggcggcagccgcgcgacaccgggaagcgggaggcggtggcggcggcggcggcgcgctgacgtcacgcgccgcgggccagccagggcgcgtgcgagccgccccgcccccggtcccatcggccccaatccgggaggagcccggcgagtgggcggggccgcggaggccagcggacagatcgattggccgagaggagaatcgagagggcgaacgggcgagtggcagcgaggagccgaggccgccgcggccgtggcggcggagccctcagccatggcctcgggcgacaccctctacatcgccacggacggctcggagatgccggccgagatcgtggagctgcacgagatcgaggtggagaccatcccggtggag

SEQ ID NO: 200766 - DNA, 422 bp, Homo sapiens
  Payload ID: 19618
  Gene Name: YY1 transcription factor
  ENST ID: ENST00000553625
  CDS Start-End: 1-370
ccgcgtcaagaagggcggcggcaagaagagcggcaagaagagttacctcagcggcggggccggcgcggcgggcggcggcggcgccgacccgggcaacaagaagtgggagcagaagcaggtgcagatcaagaccctggagggcgagttctcggtcaccatgtggtcctcagatgaaaaaaaagatattgaccatgagacagtggttgaagaacagatcattggagagaactcacctcctgattattcagaatatatgacaggaaagaaacttcctcctggaggaatacctggcattgacctctcagatcccaaacaactggcagaatttgctagggctgcacaaagatgttcagggataactcggccatgagaaaacatctgcacacccacggtcccagagtccacgtctgtgcagaatgtgg

SEQ ID NO: 200767 - DNA, 1114 bp, Homo sapiens
  Payload ID: 19618
  Gene Name: YY1 transcription factor
  ENST ID: ENST00000554804
  CDS Start-End: 1-572
tcaagaagggcggcggcaagaagagcggcaagaagagttacctcagcggcggggccggcgcggcgggcggcggcggcgccgacccgggcaacaagaagtgggagcagaagcaggtgcagatcaagaccctggagggcgagttctcggtcaccatgtggtcctcagatgaaaaaaaagatattgaccatgagacagtggttgaagaacagatcattggagagaactcacctcctgattattcagaatatatgacaggaaagaaacttcctcctggaggaatacctggcattgacctctcagatcccaaacaactggcagaatttgctagaatgaagccaagaaaaattaaagaagatgatgctccaagaacaatagcttgccctcataaatgcacgttcgaaggctgtgggaaacgcttttcactggacttcaatttgcgcacacatgtgcgaatccataccggagacaggccctatgtgtgccccttcgatggttgtaataagaagtttgctcagtcaactaacctgaaatctcacatcttaacacatgctaaggccaaaaacaaccagtgaaaagaagagagaagacccttctcgaccacgggaagcatcttccagaagtgtgattgggaataaatatgcctctcctttgtatattatttctaggaagaattttaaaaatgaatcctacacacctaagggacatgttttgataaagtagtaaaaattaaaaaaaaaaaactttactaagatgacattgctaagatgctctatcttgctctgtaatctcgtttcaaaaacacagtgtttttgtaaagtgtggtcccaacaggaggacaattcatgaacttcgcatcaaaagacaattctttatacaacagtgctaaaaatgggacttcttttcacattcttataaatatgaagctcacctgttgcttacaatttttttaattttgtattttccaagtgtgcatattgtacacttttttggggatatgcttagtaatgctacgtgtgatttttctggaggttgataactttgcttgcagtagattttctttaaaagaatgggcagttacatgcatacttcaaaagtattttcctgtaaaaaaaaa

SEQ ID NO: 200768 - DNA, 2741 bp, Homo sapiens
  Payload ID: 19619
  Gene Name: YY2 transcription factor
  Uniprot ID: O15391
  ENST ID: ENST00000429584
  CDS Start-End: 499-1617
attaaataagagaaaaaagcataaaaggagtaggcttttttggcagatactgttatatgggatggacaggaggggaagacatgaaaatcaactaaaatgaaatacataaaaaatcagtaaagagcctgcttacgaaagtggaaaaacaacagctgggcggggtcgcagggtggcaaacgtacgcgggcacgtgcacgtgcttttggggccgacagacgcgccagttgcctaggcgcatgcgtctggctatcccagaagcacctgcgccttccggctcgtgctttcctcagtctcgcgcctttctctgcagctcgcgcctttctctgcagctcgcgcctttctctgcagctcgcgcctttctctgcagctcgcgcctttctctgcagctcgccccttcctctgcagctcgccccttcctctgcagctcccacctcactcccctcagcgttctttttcccacggtcttcccgttgccgctaacctaactaactctcagccatggcctccaacgaagatttctccatcacacaagacctggagatcccggcagatattgtggagctccacgacatcaatgtggagccccttcctatggaggacattccgacggaaagcgtccagtacgaggatgtggatggcaattggatctacggtggccacaaccatccgccattgatggtgttgcagccgctcttcacgaacacgggctatggcgaccacgaccaggaaatgcttatgttgcagacacaagaggaagtggtgggctattgcgactcagacaaccagctaggcaacgacttggaggaccagttggccctcccggatagcattgaagacgagcacttccagatgaccctggcctctctgtcggcctcggcggcatcaacatcaacatcaacccagagccgcagcaaaaagcccagcaaaaagcccagcggcaagagtgccaccagcactgaggccaacccggcaggcagcagctccagcctgggcacgaggaagtgggagcagaagcaaatgcaggtcaaaacgctggagggtgagttttccgtgactatgtggtcccctaacgataacaatgaccaaggggcagtgggtgaaggccaggctgaaaacccacctgattattccgagtacttgaaagggaagaaacttcctcctggggggttaccaggcattgatctctcagatcctaaacagctggcagaatttactaaagtgaagcccaaaaggtccaaaggagaacctcccaaaacagtcccttgctcttatagcggctgcgaaaagatgttccgggattacgccgccatgagaaaacatctccacatccacgggcccagagtccacgtatgtgcagaatgtggcaaagcttttcttgagagctcaaagctgagacgacaccagctggtccacaccggcgagaagccctttcagtgcacattcgaaggctgcgggaaacgcttttcccttgatttcaatttgcgcacacacttgcgcatccacaccggcgataagcccttcgtgtgccccttcgatgtttgcaacaggaagttcgctcagtcaaccaacctgaaaacccacatattaacgcatgtgaagaccaaaaacaacccgtgaaaaggagaagacccctctcagacttgggaattatcttccaggactgcggtagggaataaatatgcctctcaaagctttgtatgttgtttctaagagttttaaaaaaaaatgaatcctgcacatttaaggttcgtgttttgttagagtagtaaaaatagaatttaaacgtttttaaaaaggtaaaccttgacataagataatagtgctaagatgccatagcttgttctgtaactatttttgtaaagtttggtcccaacaggagaaaaattcgtagacttcacatcaagagacggttcttacaaactgtttaaaatgggacttttcacattcttagaaataggaagttcatttattgtttacaatgtttttaaaaaacttgttaaaaaattcaaagtgttcatgtttatacttttaggaatatgcttaataagtctatgtatggtttttctggaggttgataactttgggaaagatttactttaaaagagtgaacaattatatgcatacgtgaagtattttcctgcttaaaaaagttatataggtgttatttgttttaatcttggttgtagtcttggatgttaacacatcttgcattttagctgtattaggtcatgtagtattgatattaggtgatttaatagtactagtttaaacctattttagtcattttattttccccaaaatactaccagatgctgttgtttagtgtaatttctttgcctgttcagttaaagtagtgcttgcttgtagaatatattgtgtatatgttgactttaacacttaagaagtacatcctgtgtaatagaaaaagcaaaataaaacacctcttctaaagaaggaaaaaagtagtttgcctatatcagtacagaagttagaactaaagaaaagggggagggtgctactggcatctggtgagtggagggagatcaggaatgccactaaacatcctacaatgcacagacagccccacgaaacacataattatttggctaaaatgccaatagtgtcaggtgcaggggctcaggcctgtaatgtcaacactttgggaggccgaggtgggtggatcgtttgagctcaggaattgaacatcagcctgggcaacatggcataactcggtctctacc

SEQ ID NO: 200769 - DNA, 2933 bp, Homo sapiens
  Payload ID: 19620
  Gene Name: ZBED6 C-terminal like
  Uniprot ID: Q96FA7
  ENST ID: ENST00000343855
  CDS Start-End: 617-1327
aggctcctgagtgatttcccccagctgccctcgtttgcatttggatagagcttggttggagttccaagggctgatgctgggaaccttgctctggatgcgaggcctgcccctggagggagccgcggaggactggcagctgcagatgctggagcaggccagcctgtggctgggccgtagcttcctgctggcaggcttcctggtatcgagcagctgccccagcctggagcaggcggccaagggtgagggctgttcccccatcccttgtttcgcccactgcctcgactccctggtgagaaactttctgtgtcaccctcacagtgtccagatcatcctgggcactgccagggccacctgcagccatttctaaggctctgtggaggcccagggactcctcacccagctccagcgccagcgcagcctcctagcccaccagccctttgaggagctcttggaccactgggtctcggcctaccacctgctggagtggctggtggagcagcagcagccccttcaagagtacaagggcaggcaccagctggggaaggctggtgttgccttgtcggccacattctggagcccggcagacagcctcagcaagctcctgtagcccttccagatggtggtccgcgaggcgagtgcggcacaggcctctctgagccaggtgctgccccagctgcgctacctgcacatcttcctggagcaggttcacacacactttcaggagcagagtgtcggggagaggggcgcagccatccagctggctgaggggttggcccggcagctctgcaccgactgtcagctcaacaagctcttctaccgcgaggagtttgtgctggccaccttgctggacccttgcttcaaggggaagattgaggccatcctgccatgggggccgaccgacattgaccactggaagcaagtcctcgtgtacaaggtgaaggagattagagtgtctgaatactctttgaactccccaagtcccctgcaaagccccaggggtctgtgcgtggaccccaccagggtagccaagagctccggggtggaggggagaagccagggggagcctctgcagagcagcagccactctggggccttcctgctggcccagagggagaagggcttgctggagagcatggggctgctggcctctgagagaagcgggggctcgctgtccaccaagagccactgggccagcatcattgtcaagaagtatctgtgggagaatgagaccgttggagcccaggatgaccccctggcttactgggagaagaagcgagaagcctggccaccatctatctgtcttaccccccacaggagccttctctgaaagcatctttgcctccctgaacagccccacccttgtagagcaaaactcttctctcaaggtggaagccattgagcatctcctcttcttgaaggccaacctggagcagttccccaactacaccccgcctcccctcatctgctctagtggtgacctggccaaggggatacagaccctgcagtccgctcagggtgggatggcagacatggcaggtgccggtgctcaccctgcccgtgaactcctagagagcccctgcctgtaataggtcaaagcagagagctgggtgttgcatcctgggcgccacatgctcatggccagaatcttaaacctatttggtaggaaagggtcagtttctcacttgacagattgccatatttttttttctgggagatgtcattttccatctcccgattacttcctttacgtctagcagtatgtgccgagaagaggcttactctcttcgtaggtgactgtgaattttgtactacgtggctttgtacatgtgatgctctgttaaaacataagtgggtatgaaggtccttgcatacaccttgtctgtgtggataagtggacacatgcccttaagaggcttgctttctcaaaaagtggccaaggatgtggagtgggcatgtgctggcaggtgggatatgtcctcagcctttgggggcctggataagctattgcagcactttctgaggctttcactgtagggagaaggaaaccccaagggtagaatagccatttccagagggaagtacacacatacccccacacaccagtctttttgggggtttcagagtggccggagaaaccgactgaagggactgaccagctagctaggagagctgagacgccagtcctcaaatggcgttcttaccaatagtctatttccagactactggaaacgttggggtttcttcctccagtgacagcagcctcagtagctttcctgggctccaggcggctggctgcacaccctgcctgccatcacccttgcccctgcttgtcctggaccacttttaaaggggaagtcccttatttggaagagagaaaggatgtgtgtagcacacactcatcatggattgctcagagttcctttagggcagagctgagggcctgggatccaggaaccagtgggattggatgggagaagaaggaagggggtggcccgtcacccccgcaagacttgcatccaggtagcctaaggactcctggtcactgggtagggtggctgctgagatgcaggtcggaagaggcaggggaaggctccaggcctaacttggagcatgtcactggccatgggggtgaggggacagactctgctctcactggctggcagccccaggagcctgttcccttgcctctcctggatgggttgtcagccctgtgtttcactgtgaccaattcattataacatttggatattactgaaaatgtaaggaagcaggaaaaattaactactttcattcagagatagcctctatcaatagtttgacatttttccctcttttacattgagatcataccctaggtactgtttagtatgcaatattttcattttcgcagtataataattgcacctgttaaataaagttttgtaaacatttaa

SEQ ID NO: 200770 - DNA, 2195 bp, Homo sapiens
  Payload ID: 19621
  Gene Name: Z-DNA binding protein 1
  Uniprot ID: Q9H171
  ENST ID: ENST00000371173
  CDS Start-End: 179-1468
gctgacacctgcccagtggaagctggcatccctccccttgtgggttcagagctgcaagaagcaccaggctcggccacttcagaagccccagcctcgacctagcccaccctctcagggccacagtgcagaagcctgcacacctgccaagtctctccgactccttgcagctgctgtcagcatggcccaggctcctgctgacccgggcagagaaggccaccttgaacaaagaatcctgcaggtgctgacagaggctggctccccggtgaaacttgcccagctggtgaaggaatgccaagcacccaagagggagctcaaccaagtcctctaccgaatgaaaaaggagttgaaagtctccctcacatcccctgccacctggtgcttgggcgggactgatcctgaaggcgagggtcctgcagagctggccttgtccagccctgccgagaggccccagcaacatgcagctacaattccagagacccctggccctcagttcagccaacaacgggaggaagacatctacaggtttctcaaagacaatggtccccagagggccctggtcatcgcccaagcactgggaatgaggacagcaaaagatgtgaaccgagacttgtacaggatgaagagcaggcaccttctggacatggatgagcagtccaaagcatggacgatttaccgcccagaagattctggaagaagagcaaagtcagcctcaattatttaccagcacaatccaatcaacatgatctgccagaatggacccaacagctggatttccattgcaaactccgaagccatccagattggacacgggaacatcattacaagacagacagtctccagggaggacggttccgccggtccacgccacctcccttcaatggcaccaggtgattcctcaacttgggggaccctagttgatccctgggggccccaggacatccacatggagcagtccatactgagacgggtgcagctgggacacagcaatgagatgaggctccacggcgtcccgtccgagggccctgcccacatcccccctggcagccccccagtctctgccactgctgccggcccagaagcttcgtttgaagcaagaattcccagtccaggaactcaccctgagggggaagccgcccagagaatccacatgaaatcgtgctttctcgaggacgccaccatcggcaacagcaacaaaatgtctatcagcccaggggtggctggcccaggaggagtcgcagggtctggagagggggagccaggggaggacgcaggtcgtcgtcccgcagacacacaatccagaagtcactttcctcgagacattggtcagcccatcactcccagccactcgaagctcacccccaagctggaaactatgactcttggaaacaggagtcacaaagctgcagaaggcagccactatgtggatgaagcctcacacgaggggagctggtggggaggtgggatttagtgcacagcctcacgtggggcttggacacaggctgggggtgggcgcatgctagggagactagcctgctgctctctgcattccttagcgtcttgtttgacctgcttgcttccagacataacctgcatgaatcagttttgggggaatggacctggcatggggatgggttcaggccaggtcttttgatggccaggagtagatgacagggagttgccttggggaacctttggtgtgccaagaggaggtgggtagatgggagtggggctcggtcccccaggcccaggggactctctccactctttcctgggctcggggcatctgcctggagttaccttccatcatggctacctgctgtggtttgaatgtttgagtcccaacaaaattcatatcaaaacataatcccaactgggtgcagtggctcacgcctgtaatcccagcactttgggaggccgaggcgggcggatcaataggtcaggaaatccagaccgtcctggctaacatggtgaaaccccgtctctactaaaaaaaaaaatacaaaaaattagccgggcgttgtggcgggcacctggagtcccagctactccggaggctgagggaggagaatggtgtgaacccgggaggtggagcttccagtgagccgagatcgcgccactgcactccaggctgggcgacagagcgagactccgtctcaaaaaaataaatacataaataaaaaataaaccaaccataa

SEQ ID NO: 200771 - DNA, 2073 bp, Homo sapiens
  Payload ID: 19621
  Gene Name: Z-DNA binding protein 1
  Uniprot ID: Q9H171
  ENST ID: ENST00000395822
  CDS Start-End: 282-1346
tttttttttctttcaaaagacgaacagagaagtttcattttctttttctcctgaaaccgaatctggccggcctggctaggcatctatttccgggctgtaagcagctgacacctgcccagtggaagctggcatccctccccttgtgggttcagagctgcaagaagcaccaggctcggccacttcagaagccccagcctcgacctagcccaccctctcagggccacagtgcagaagcctgcacacctgccaagtctctccgactccttgcagctgctgtcagcatggcccaggctcctgctgacccgggcagagaagccgagaggccccagcaacatgcagctacaattccagagacccctggccctcagttcagccaacaacgggaggaagacatctacaggtttctcaaagacaatggtccccagagggccctggtcatcgcccaagcactgggaatgaggacagcaaaagatgtgaaccgagacttgtacaggatgaagagcaggcaccttctggacatggatgagcagtccaaagcatggacgatttaccgcccagaagattctggaagaagagcaaagtcagcctcaattatttaccagcacaatccaatcaacatgatctgccagaatggacccaacagctggatttccattgcaaactccgaagccatccagattggacacgggaacatcattacaagacagacagtctccagggaggacggttccgccggtccacgccacctcccttcaatggcaccaggtgattcctcaacttgggggaccctagttgatccctgggggccccaggacatccacatggagcagtccatactgagacgggtgcagctgggacacagcaatgagatgaggctccacggcgtcccgtccgagggccctgcccacatcccccctggcagccccccagtctctgccactgctgccggcccagaagcttcgtttgaagcaagaattcccagtccaggaactcaccctgagggggaagccgcccagagaatccacatgaaatcgtgctttctcgaggacgccaccatcggcaacagcaacaaaatgtctatcagcccaggggtggctggcccaggaggagtcgcagggtctggagagggggagccaggggaggacgcaggtcgtcgtcccgcagacacacaatccagaagtcactttcctcgagacattggtcagcccatcactcccagccactcgaagctcacccccaagctggaaactatgactcttggaaacaggagtcacaaagctgcagaaggcagccactatgtggatgaagcctcacacgaggggagctggtggggaggtgggatttagtgcacagcctcacgtggggcttggacacaggctgggggtgggcgcatgctagggagactagcctgctgctctctgcattccttagcgtcttgtttgacctgcttgcttccagacataacctgcatgaatcagttttgggggaatggacctggcatggggatgggttcaggccaggtcttttgatggccaggagtagatgacagggagttgccttggggaacctttggtgtgccaagaggaggtgggtagatgggagtggggctcggtcccccaggcccaggggactctctccactctttcctgggctcggggcatctgcctggagttaccttccatcatggctacctgctgtggtttgaatgtttgagtcccaacaaaattcatatcaaaacataatcccaactgggtgcagtggctcacgcctgtaatcccagcactttgggaggccgaggcgggcggatcaataggtcaggaaatccagaccgtcctggctaacatggtgaaaccccgtctctactaaaaaaaaaaatacaaaaaattagccgggcgttgtggcgggcacctggagtcccagctactccggaggctgagggaggagaatggtgtgaacccgggaggtggagcttccagtgagccgagatcgcgccactgcactccaggctgggcgacagagcgagactccgtctcaaaaaaataaatacataaataaaaaataaaccaaccataa

SEQ ID NO: 200772 - DNA, 357 bp, Homo sapiens
  Payload ID: 19621
  Gene Name: Z-DNA binding protein 1
  ENST ID: ENST00000453793
  CDS Start-End: 1-357
cgtgctttctcgaggacgccaccatcggcaacagcaacaaaatgtctatcagcccaggggtggctggcccaggaggagtcgcagggtctggagagggggagccaggggaggacgcagttgctgccttcactgaagtcttgaacccctcaaagtcattcatgaaatttggaatcaacttcttccagactcctgtgaatgttgatagtttgacctcctcccatgaatcacaaatgttcttaacggcatgtagattggtgatcttttccagaagattttcaacttactttgcccagatccatctgaggaatcactctgtgttgcacttatgccctcataaaatatatttattgaagaata

SEQ ID NO: 200773 - DNA, 1041 bp, Homo sapiens
  Payload ID: 19621
  Gene Name: Z-DNA binding protein 1
  Uniprot ID: Q9H171
  ENST ID: ENST00000541799
  CDS Start-End: 100-846
cagaagccccagcctcgacctagcccaccctctcagggccacagtgcagaagcctgcacacctgccaagtctctccgactccttgcagctgctgtcagcatggcccaggctcctgctgacccgggcagagaaggccaccttgaacaaagaatcctgcaggtgctgacagaggctggctccccggtgaaacttgcccagctggtgaaggaatgccaagcacccaagagggagctcaaccaagtcctctaccgaatgaaaaaggagttgaaagtctccctcacatcccctgccacctggtgcttgggcgggactgatcctgaaggcgagggtcctgcagagctggccttgtccagccctgccgagaggccccagcaacatgcagctacaattccagagacccctggccctcagttcagccaacaacgggaggaagacatctacaggtttctcaaagacaatggtccccagagggccctggtcatcgcccaagcactgggaatgaggacagcaaaagatgtgaaccgagacttgtacaggatgaagagcaggcaccttctggacatggatgagcagtccaaagcatggacgatttaccgcccagaagattctggaagaagagcaaagtcagcctcaattatttaccagcacaatccaatcaacatgatctgccagaatggacccaacagctggatttccattgcaaactccgaagccatccagattggacacgggaacatcattacaagacagacagtctccagggaggacggtaagtcacccaagagagcccagggaggggacctcggtggggagccaccggatcctctgggtgggggcaaagggtagggatggggagtggggggattctgccctccaaggggaaagggttgcttccagacccccacagtccacctttacggccgtcctgagaatgaggacacctggatcaaagctctcctgatttccctgtactctgatactttctacctcattttaaagtttaatttaatttttatttttctaataaaattttaaaattaa

SEQ ID NO: 200774 - DNA, 2437 bp, Homo sapiens
  Payload ID: 19622
  Gene Name: zeta-chain (TCR) associated protein kinase 70kDa
  Uniprot ID: P43403
  ENST ID: ENST00000264972
  CDS Start-End: 216-2075
atccaggaaataggttagtttcagacaagcctgcttgccggagctcagcagacaccaggccttccgggcaggcctggcccaccgtgggcctcagagctgctgctggggcattcagaaccggctctccattggcattgggaccagagaccccgcaagtggcctgtttgcctggacatccacctgtacgtccccaggtttcgggaggcccaggggcgatgccagaccccgcggcgcacctgcccttcttctacggcagcatctcgcgtgccgaggccgaggagcacctgaagctggcgggcatggcggacgggctcttcctgctgcgccagtgcctgcgctcgctgggcggctatgtgctgtcgctcgtgcacgatgtgcgcttccaccactttcccatcgagcgccagctcaacggcacctacgccattgccggcggcaaagcgcactgtggaccggcagagctctgcgagttctactcgcgcgaccccgacgggctgccctgcaacctgcgcaagccgtgcaaccggccgtcgggcctcgagccgcagccgggggtcttcgactgcctgcgagacgccatggtgcgtgactacgtgcgccagacgtggaagctggagggcgaggccctggagcaggccatcatcagccaggccccgcaggtggagaagctcattgctacgacggcccacgagcggatgccctggtaccacagcagcctgacgcgtgaggaggccgagcgcaaactttactctggggcgcagaccgacggcaagttcctgctgaggccgcggaaggagcagggcacatacgccctgtccctcatctatgggaagacggtgtaccactacctcatcagccaagacaaggcgggcaagtactgcattcccgagggcaccaagtttgacacgctctggcagctggtggagtatctgaagctgaaggcggacgggctcatctactgcctgaaggaggcctgccccaacagcagtgccagcaacgcctcaggggctgctgctcccacactcccagcccacccatccacgttgactcatcctcagagacgaatcgacaccctcaactcagatggatacacccctgagccagcacgcataacgtccccagacaaaccgcggccgatgcccatggacacgagcgtgtatgagagcccctacagcgacccagaggagctcaaggacaagaagctcttcctgaagcgcgataacctcctcatagctgacattgaacttggctgcggcaactttggctcagtgcgccagggcgtgtaccgcatgcgcaagaagcagatcgacgtggccatcaaggtgctgaagcagggcacggagaaggcagacacggaagagatgatgcgcgaggcgcagatcatgcaccagctggacaacccctacatcgtgcggctcattggcgtctgccaggccgaggccctcatgctggtcatggagatggctgggggcgggccgctgcacaagttcctggtcggcaagagggaggagatccctgtgagcaatgtggccgagctgctgcaccaggtgtccatggggatgaagtacctggaggagaagaactttgtgcaccgtgacctggcggcccgcaacgtcctgctggttaaccggcactacgccaagatcagcgactttggcctctccaaagcactgggtgccgacgacagctactacactgcccgctcagcagggaagtggccgctcaagtggtacgcacccgaatgcatcaacttccgcaagttctccagccgcagcgatgtctggagctatggggtcaccatgtgggaggccttgtcctacggccagaagccctacaagaagatgaaagggccggaggtcatggccttcatcgagcagggcaagcggatggagtgcccaccagagtgtccacccgaactgtacgcactcatgagtgactgctggatctacaagtgggaggatcgccccgacttcctgaccgtggagcagcgcatgcgagcctgttactacagcctggccagcaaggtggaagggcccccaggcagcacacagaaggctgaggctgcctgtgcctgagctcccgctgcccaggggagccctccacgccggctcttccccaccctcagccccaccccaggtcctgcagtctggctgagccctgcttggttgtctccacacacagctgggctgtggtagggggtgtctcaggccacaccggccttgcattgcctgcctggccccctgtcctctctggctggggagcagggaggtccgggagggtgcggctgtgcagcctgtcctgggctggtggctcccggagggccctgagctgagggcattgcttacacggatgccttcccctgggccctgacattggagcctgggcatcctcaggtggtcaggcgtagatcaccagaataaacccagcttccctcttg

SEQ ID NO: 200775 - DNA, 1085 bp, Homo sapiens
  Payload ID: 19622
  Gene Name: zeta-chain (TCR) associated protein kinase 70kDa
  Uniprot ID: P43403
  ENST ID: ENST00000451498
  CDS Start-End: 147-1085
tgcatgctccagggacggcacccttgtctggggcaggtgcttgtgggggctgaggctgccttgctccccacacccctgcccctgacctgggagtgtaccgctgtgtgtgcccagcacgcataacgtccccagacaaaccgcggccgatgcccatggacacgagcgtgtatgagagcccctacagcgacccagaggagctcaaggacaagaagctcttcctgaagcgcgataacctcctcatagctgacattgaacttggctgcggcaactttggctcagtgcgccagggcgtgtaccgcatgcgcaagaagcagatcgacgtggccatcaaggtgctgaagcagggcacggagaaggcagacacggaagagatgatgcgcgaggcgcagatcatgcaccagctggacaacccctacatcgtgcggctcattggcgtctgccaggccgaggccctcatgctggtcatggagatggctgggggcgggccgctgcacaagttcctggtcggcaagagggaggagatccctgtgagcaatgtggccgagctgctgcaccaggtgtccatggggatgaagtacctggaggagaagaactttgtgcaccgtgacctggcggcccgcaacgtcctgctggttaaccggcactacgccaagatcagcgactttggcctctccaaagcactgggtgccgacgacagctactacactgcccgctcagcagggaagtggccgctcaagtggtacgcacccgaatgcatcaacttccgcaagttctccagccgcagcgatgtctggagctatggggtcaccatgtgggaggccttgtcctacggccagaagccctacaagaagatgaaagggccggaggtcatggccttcatcgagcagggcaagcggatggagtgcccaccagagtgtccacccgaactgtacgcactcatgagtgactgctggatctacaagtgggaggatcgccccgacttcctgaccgtggagcagcgcatgcgagcctgttactacagcctggccagcaaggtggaagggcccccaggcagcacacagaaggctgaggctgcctgtgcctga

SEQ ID NO: 200776 - DNA, 1502 bp, Homo sapiens
  Payload ID: 19623
  Gene Name: ZFP1 zinc finger protein
  ENST ID: ENST00000332307
  CDS Start-End: 195-1319
caccaccagcggcgagtgggtgacagagcccccgtctccgcgcgtcttcgccgccctgcgccgtgacccgctgtggcactgggccacgagtggaggctgcgcccctccagggatcagtttcattcacggatgtgactgtggactttacccaggaggaatgggaacaactggacccctctcagaggatcctatacatggatgtgatgctggagaattatagcaacttactttcagtggaagtgtggaaggctgatgaccagatggagagagaccacagaaacccagacgagcaggcgaggcaatttttaattcttaagaaccaaaccccaattgaggaaagaggcgatctctttggaaaagcacttaatctgaacacagactttgtttctttaagacaagtaccttataaatatgacttatatgaaaaaactttgaaatataattcagacttgcttaatagtaatagaagctatgcaggaaagcagactgatgagtgtaatgaatttggaaaagcacttctctacctgaagcaagagaaaacccacagtggagtagaatattctgaatacaataaaagtggaaaagccctcagccataaagcagccatttttaaacatcagaaaataaaaaacttggttcaacctttcatttgtacttactgtgacaaggctttctcctttaagtcactcctcattagtcataagagaatacatactggagaaaagccatatgaatgcaatgtatgtaagaaaaccttctcccataaggccaacctcatcaaacatcagagaattcacactggggagaaacctttcgagtgtccggaatgtggaaaagctttcacccaccagtcaaacctcattgtacaccagagagcacatatggagaagaagccctatgagtgcagtgaatgtggaaagacatttgcccaaaagtttgaactcaccacacaccagagaattcatacaggagagcgaccctatgagtgtaacgaatgtgcaaaaaccttctttaagaagtcaaaccttatcatacatcagaagattcacacgggggagaaacgctatgagtgcagtgaatgtggaaaatcctttatccagaactcacagctcatcatacacatgagaactcatacaggagagaaaccctatgaatgtactgagtgcggcaaaactttcagccagaggtcaactcttagattacacttgcgaatccacacaggagagaaaccatatgagtgttccgaatgtgggaaggcctttagcaggaagtcccgactcagtgtccatcagagagttcacatcggggagaaaccctgaaactccagccaggtcttactgtggaaaactcctgccagaactcttcaagcgggtgaaaaacctcatgacagtattgagggaacatgggaattcatactgagatgcaatctctcaactcaaaaatgtattaaaaataggatcccatgagaacattatactggaagttacatgtgatacccagct

SEQ ID NO: 200777 - DNA, 3250 bp, Homo sapiens
  Payload ID: 19623
  Gene Name: ZFP1 zinc finger protein
  Uniprot ID: Q6P2D0
  ENST ID: ENST00000393430
  CDS Start-End: 125-1348
cgccgccctgcgccgtgacccgctgtggcactgggccacgagtggaggctgcgcccctccaggtacgagaggggcttccagttctgccttcatagttctctgcctttgcccaaaactgcagaaaatgaacaaatcccagggatcagtttcattcacggatgtgactgtggactttacccaggaggaatgggaacaactggacccctctcagaggatcctatacatggatgtgatgctggagaattatagcaacttactttcagtggaagtgtggaaggctgatgaccagatggagagagaccacagaaacccagacgagcaggcgaggcaatttttaattcttaagaaccaaaccccaattgaggaaagaggcgatctctttggaaaagcacttaatctgaacacagactttgtttctttaagacaagtaccttataaatatgacttatatgaaaaaactttgaaatataattcagacttgcttaatagtaatagaagctatgcaggaaagcagactgatgagtgtaatgaatttggaaaagcacttctctacctgaagcaagagaaaacccacagtggagtagaatattctgaatacaataaaagtggaaaagccctcagccataaagcagccatttttaaacatcagaaaataaaaaacttggttcaacctttcatttgtacttactgtgacaaggctttctcctttaagtcactcctcattagtcataagagaatacatactggagaaaagccatatgaatgcaatgtatgtaagaaaaccttctcccataaggccaacctcatcaaacatcagagaattcacactggggagaaacctttcgagtgtccggaatgtggaaaagctttcacccaccagtcaaacctcattgtacaccagagagcacatatggagaagaagccctatgagtgcagtgaatgtggaaagacatttgcccaaaagtttgaactcaccacacaccagagaattcatacaggagagcgaccctatgagtgtaacgaatgtgcaaaaaccttctttaagaagtcaaaccttatcatacatcagaagattcacacgggggagaaacgctatgagtgcagtgaatgtggaaaatcctttatccagaactcacagctcatcatacacatgagaactcatacaggagagaaaccctatgaatgtactgagtgcggcaaaactttcagccagaggtcaactcttagattacacttgcgaatccacacaggagagaaaccatatgagtgttccgaatgtgggaaggcctttagcaggaagtcccgactcagtgtccatcagagagttcacatcggggagaaaccctgaaactccagccaggtcttactgtggaaaactcctgccagaactcttcaagcgggtgaaaaacctcatgacagtattgagggaacatgggaattcatactgagatgcaatctctcaactcaaaaatgtattaaaaataggatcccatgagaacattatactggaagttacatgtgatacccagctaaagaatacatatcagaatatatccagttgtaaatagccatacccagttgtactacaatgagctttttaaaatcttgaatgaattgagtattctagacagcagcataagaaatatacaaacagtatcctatgaatttagtggttttatgtggatatgccacaaaacacaagtggtatgctttagatctgcacatgtgaatttagcataatcactgggaatttgaaattcttgtcctctgtgataattaggacataacaagattttccatactaaacatcacatgtgtttttcagtatctctgcaatccagtatgcattccaaatgaaatgtgtaacatttaaagtagcatggaacctacgtctttccctactgcttgctggcatatatcagttggtatgaacattgttcttgagctgcctcttaggaaacagaagacagtgttgaagttttccctgcttctggtttgctgaagattttctagaagcactatttacacaaatatgcaaatgtgaaataaccgatctataacgtgaaggaggcagacatgagctgtactactcagtatgcaccacagaataagagtttgccgtgtaaagacaatatccccattcgtcatgctcttattttcccgtgggatatttgcatacaaatgcatgtctgttaccaaaatattgtgtaacacagacagaaaccacctgtttttgtctttccttgtttcccttaatatttcatgaattgtctagcaaaaatggtaggatgcttctgtagttcacaaatgttacatttcagagactttagaggaaaaattattttaaataactgtcaactgtttcattgctttttaaatttttcacgtgcataaccccctttagaagtaaatttttacactattttgttgtttaaaggaggcatttctacttccttgagttttgctgttgccaacctaaaacatttccctttggaacatgagttataagttattacttttcctttacatgtttacacttttataaaaatcagatttttcagtggtctctccagatattaacaagaattgttgtgtaactcaaagatttgcttttatagacttgatttcaaattcttaagttcagcctttccctatcaatcacaaatcatgtattggaaattataaatggcaaccaaaaactggcttttaaaaaatatttttggatatcattgatgtgctgtcacactatatattgagtgactttctgaacaaatttatccagaacatccatagcccaataagcttttgtctaagttgtcatcttacttactcacaaaggaggggaaaacgttattttcatagctgcttttagaaatgtaaattgtaacagcctccttggacaacattgtgagtctgttttaacattaatatactcttacaacctaggaatctcctgggaatctatccctaaggaataaaaagcgccagcacttaagattatatgtttactaatgtatattgtattttttggtaaggaccaaaaaaacaaacaaaaaaaagaccatcagtaagggaatggatgaataaattgtggtaaaaacataccatggctgaatggtatttccttgaaaagaatgtgtgggaacaaactccaaacttctctaggtcaaatgaggaaagcaagaggggagagagagagtgtatgtgtgtgtgtagcagtttttataaaataaagataaacccttatata

SEQ ID NO: 200778 - DNA, 1426 bp, Homo sapiens
  Payload ID: 19623
  Gene Name: ZFP1 zinc finger protein
  ENST ID: ENST00000568079
  CDS Start-End: 194-280
atgtgcagtgctgcgagcgcgccggtggccgcccttcccccaccaccagcggcgagtgggtgacagagcccccgtctccgcgcgtcttcgccgccctgcgccgtgacccgctgtggcactgggccacgagtggaggctgcgcccctccagttctgccttcatagttctctgcctttgcccaaaactgcagaaaatgaacaaatcccagaagtgtggaaggctgatgaccagatggagagagaccacagaaacccagacgagcaggcgaggcaatttttaattcttaagaaccaaaccccaattgaggaaagaggcgatctctttggaaaagcacttaatctgaacacagactttgtttctttaagacaagtaccttataaatatgacttatatgaaaaaactttgaaatataattcagacttgcttaatagtaatagaagctatgcaggaaagcagactgatgagtgtaatgaatttggaaaagcacttctctacctgaagcaagagaaaacccacagtggagtagaatattctgaatacaataaaagtggaaaagccctcagccataaagcagccatttttaaacatcagaaaataaaaaacttggttcaacctttcatttgtacttactgtgacaaggctttctcctttaagtcactcctcattagtcataagagaatacatactggagaaaagccatatgaatgcaatgtatgtaagaaaaccttctcccataaggccaacctcatcaaacatcagagaattcacactggggagaaacctttcgagtgtccggaatgtggaaaagctttcacccaccagtcaaacctcattgtacaccagagagcacatatggagaagaagccctatgagtgcagtgaatgtggaaagacatttgcccaaaagtttgaactcaccacacaccagagaattcatacaggagagcgaccctatgagtgtaacgaatgtgcaaaaaccttctttaagaagtcaaaccttatcatacatcagaagattcacacgggggagaaacgctatgagtgcagtgaatgtggaaaatcctttatccagaactcacagctcatcatacacatgagaactcatacaggagagaaaccctatgaatgtactgagtgcggcaaaactttcagccagaggtcaactcttagattacacttgcgaatccacacaggagagaaaccatatgagtgttccgaatgtgggaaggcctttagcaggaagtcccgactcagtgtccatcagagagttcacatcggggagaaaccctgaaactccagccaggtcttactgtggaaaactcctgccagaactcttcaagcgggtgaaaaacctcatgacagtattgagggaacatgggaattcatactgagatgcaatctctcaactcaaaaatgtattaaaaata

SEQ ID NO: 200779 - DNA, 493 bp, Homo sapiens
  Payload ID: 19623
  Gene Name: ZFP1 zinc finger protein
  ENST ID: ENST00000567481
  CDS Start-End: 261-491
ctcgtgggtggaggaaggactggagcctggtcagttgccggtggtgaaggagaaccgtgatccctttgtcagagggtcttcagtgaggtgttcccctgatcctcgcatccaccccgtgacttccagcgttatcatctccgtcgctatcccaggaacacgggaggttcagaaggggaaagtgatttccctaaggtctcacaacccggtggtactttatttctgccttcatagttctctgcctttgcccaaaactgcagaaaatgaacaaatcccagggatcagtttcattcacggatgtgactgtggactttacccaggaggaatgggaacaactggacccctctcagaggatcctatacatggatgtgatgctggagaattatagcaacttactttcagtgggtaaggacggttttcagaagtgtggaaggctgatgaccagatggagagagaccacagaaacccagacgagcaggcgaggcaatttttaatt

SEQ ID NO: 200780 - DNA, 1457 bp, Homo sapiens
  Payload ID: 19623
  Gene Name: ZFP1 zinc finger protein
  Uniprot ID: Q6P2D0
  ENST ID: ENST00000570010
  CDS Start-End: 196-1419
gcatgtgcagtgctgcgagcgcgccggtggccgcccttcccccaccaccagcggcgagtgggtgacagagcccccgtctccgcgcgtcttcgccgccctgcgccgtgacccgctgtggcactgggccacgagtggaggctgcgcccctccagttctgccttcatagttctctgcctttgcccaaaactgcagaaaatgaacaaatcccagggatcagtttcattcacggatgtgactgtggactttacccaggaggaatgggaacaactggacccctctcagaggatcctatacatggatgtgatgctggagaattatagcaacttactttcagtggaagtgtggaaggctgatgaccagatggagagagaccacagaaacccagacgagcaggcgaggcaatttttaattcttaagaaccaaaccccaattgaggaaagaggcgatctctttggaaaagcacttaatctgaacacagactttgtttctttaagacaagtaccttataaatatgacttatatgaaaaaactttgaaatataattcagacttgcttaatagtaatagaagctatgcaggaaagcagactgatgagtgtaatgaatttggaaaagcacttctctacctgaagcaagagaaaacccacagtggagtagaatattctgaatacaataaaagtggaaaagccctcagccataaagcagccatttttaaacatcagaaaataaaaaacttggttcaacctttcatttgtacttactgtgacaaggctttctcctttaagtcactcctcattagtcataagagaatacatactggagaaaagccatatgaatgcaatgtatgtaagaaaaccttctcccataaggccaacctcatcaaacatcagagaattcacactggggagaaacctttcgagtgtccggaatgtggaaaagctttcacccaccagtcaaacctcattgtacaccagagagcacatatggagaagaagccctatgagtgcagtgaatgtggaaagacatttgcccaaaagtttgaactcaccacacaccagagaattcatacaggagagcgaccctatgagtgtaacgaatgtgcaaaaaccttctttaagaagtcaaaccttatcatacatcagaagattcacacgggggagaaacgctatgagtgcagtgaatgtggaaaatcctttatccagaactcacagctcatcatacacatgagaactcatacaggagagaaaccctatgaatgtactgagtgcggcaaaactttcagccagaggtcaactcttagattacacttgcgaatccacacaggagagaaaccatatgagtgttccgaatgtgggaaggcctttagcaggaagtcccgactcagtgtccatcagagagttcacatcggggagaaaccctgaaactccagccaggtcttactgtggaaaactcctgccag

SEQ ID NO: 200781 - DNA, 3067 bp, Homo sapiens
  Payload ID: 19623
  Gene Name: ZFP1 zinc finger protein
  ENST ID: ENST00000464850
  CDS Start-End: 161-391
cttcccccaccaccagcggcgagtgggtgacagagcccccgtctccgcgcgtcttcgccgccctgcgccgtgacccgctgtggcactgggccacgagtggaggctgcgcccctccagttctgccttcatagttctctgcctttgcccaaaactgcagaaaatgaacaaatcccagggatcagtttcattcacggatgtgactgtggactttacccaggaggaatgggaacaactggacccctctcagaggatcctatacatggatgtgatgctggagaattatagcaacttactttcagtgggtaaggacggttttcagaagtgtggaaggctgatgaccagatggagagagaccacagaaacccagacgagcaggcgaggcaatttttaattcttaagaaccaaaccccaattgaggaaagaggcgatctctttggaaaagcacttaatctgaacacagactttgtttctttaagacaagtaccttataaatatgacttatatgaaaaaactttgaaatataattcagacttgcttaatagtaatagaagctatgcaggaaagcagactgatgagtgtaatgaatttggaaaagcacttctctacctgaagcaagagaaaacccacagtggagtagaatattctgaatacaataaaagtggaaaagccctcagccataaagcagccatttttaaacatcagaaaataaaaaacttggttcaacctttcatttgtacttactgtgacaaggctttctcctttaagtcactcctcattagtcataagagaatacatactggagaaaagccatatgaatgcaatgtatgtaagaaaaccttctcccataaggccaacctcatcaaacatcagagaattcacactggggagaaacctttcgagtgtccggaatgtggaaaagctttcacccaccagtcaaacctcattgtacaccagagagcacatatggagaagaagccctatgagtgcagtgaatgtggaaagacatttgcccaaaagtttgaactcaccacacaccagagaattcatacaggagagcgaccctatgagtgtaacgaatgtgcaaaaaccttctttaagaagtcaaaccttatcatacatcagaagattcacacgggggagaaacgctatgagtgcagtgaatgtggaaaatcctttatccagaactcacagctcatcatacacatgagaactcatacaggagagaaaccctatgaatgtactgagtgcggcaaaactttcagccagaggtcaactcttagattacacttgcgaatccacacaggagagaaaccatatgagtgttccgaatgtgggaaggcctttagcaggaagtcccgactcagtgtccatcagagagttcacatcggggagaaaccctgaaactccagccaggtcttactgtggaaaactcctgccagaactcttcaagcgggtgaaaaacctcatgacagtattgagggaacatgggaattcatactgagatgcaatctctcaactcaaaaatgtattaaaaataggatcccatgagaacattatactggaagttacatgtgatacccagctaaagaatacatatcagaatatatccagttgtaaatagccatacccagttgtactacaatgagctttttaaaatcttgaatgaattgagtattctagacagcagcataagaaatatacaaacagtatcctatgaatttagtggttttatgtggatatgccacaaaacacaagtggtatgctttagatctgcacatgtgaatttagcataatcactgggaatttgaaattcttgtcctctgtgataattaggacataacaagattttccatactaaacatcacatgtgtttttcagtatctctgcaatccagtatgcattccaaatgaaatgtgtaacatttaaagtagcatggaacctacgtctttccctactgcttgctggcatatatcagttggtatgaacattgttcttgagctgcctcttaggaaacagaagacagtgttgaagttttccctgcttctggtttgctgaagattttctagaagcactatttacacaaatatgcaaatgtgaaataaccgatctataacgtgaaggaggcagacatgagctgtactactcagtatgcaccacagaataagagtttgccgtgtaaagacaatatccccattcgtcatgctcttattttcccgtgggatatttgcatacaaatgcatgtctgttaccaaaatattgtgtaacacagacagaaaccacctgtttttgtctttccttgtttcccttaatatttcatgaattgtctagcaaaaatggtaggatgcttctgtagttcacaaatgttacatttcagagactttagaggaaaaattattttaaataactgtcaactgtttcattgctttttaaatttttcacgtgcataaccccctttagaagtaaatttttacactattttgttgtttaaaggaggcatttctacttccttgagttttgctgttgccaacctaaaacatttccctttggaacatgagttataagttattacttttcctttacatgtttacacttttataaaaatcagatttttcagtggtctctccagatattaacaagaattgttgtgtaactcaaagatttgcttttatagacttgatttcaaattcttaagttcagcctttccctatcaatcacaaatcatgtattggaaattataaatggcaaccaaaaactggcttttaaaaaatatttttggatatcattgatgtgctgtcacactatatattgagtgactttctgaacaaatttatccagaacatccatagcccaataagcttttgtctaagttgtcatcttacttactcacaaaggaggggaaaacgttattttcatagctgcttttagaaatgtaaattgtaacagcctccttggacaacattgtgagtctgttttaacattaatatactcttacaacctaggaatctcctgggaatctatccctaaggaataaaaagcgccagcacttaagattatatgtttactaatg

SEQ ID NO: 200782 - DNA, 7489 bp, Homo sapiens
  Payload ID: 19624
  Gene Name: ZFP14 zinc finger protein
  Uniprot ID: Q9HCL3
  ENST ID: ENST00000270001
  CDS Start-End: 117-1718
ttctttccggcttcgctgctggtgtcggctccgagagctctggcttatcaggactccatagttctccaacagagaaatcttgaaaaggactgaccagtttttgcagttctaaaaccatggcccatggttcagtgacattcagggatgtggccatagacttctcacaggaagaatgggaattcctggatcctgctcagagggacttatatagggatgtaatgtgggagaactacagcaacttcatttcactaggaccttccatttctaaaccagatgtgattaccttattggatgaagaaaggaaggaacctgggatggttgtgagggaagggacaagaagatactgccctgatttggagtccagatacaggaccaatactttatctccagaaaaggacatttatgaaatatattcatttcagtgggatataatggaaagaattaaaagctatagccttcagggttccatttttaggaatgattgggaatgcaaaagcaagattgagggggaaaaggaacaacaagagggatattttgggcaagtgaaaattacctctgaaaaaatgaccacttacaaaaggcacaattttcttactgagtatcagatcgttcataatggagaaaaggtgtatgagtgtaaggagtgtaggaagacctttattcgtcgctcaacacttagtcaacacctgagaattcatactggtgagaaaccttataagtgtaaggaatgtgggcaggcctttagacagcgtgcacatcttattcgacatcacaaacttcacaccggtgagaaaccctatgaatgtaaggagtgtgggaaggcctttacagtgctccaagaacttactcaacatcagagacttcatacgggtgaaaaaccctatgaatgtaaggaatgtggaaaggcctttagagtacatcagcaactggctcgacatcagagaattcacactggtgagaaaccctatgaatgtaaggactgtggaaagacctttagacagtgtacacaccttacacgccatcagagacttcatactgctgaaaagctctatgaatgtaaggaatgtgggaaagccttcgtatgtggtccagaccttagagtacatcagaaaattcattttggtgagaaaccctatgaatgtaaggagtgtggaaaggcttttagaatatgccaacaacttactgttcatcagagtattcatactggtgagaaaccctacgaatgtaaggaatgtgggaagacttttagattaagacaacaactagttcgccatcagagaatacatactcgtgagaaaccctatgaatgtatggaatgttggaagacctttagtagttactcacagcttatttcacaccagagcattcatattggtgagagaccctatgaatgtgaagagtgtggaaaggcctttagactgctctcacaacttactcagcatcaaagtattcacactggtgagaaaccttatgaatgtaaggaatgtagaaaaccttttagactgctctcacaacttacccaacatcagagtattcacactggtgagaaaccttatgaatgtaaggaatgtggtaaggcttttagactttattcatttcttactcaacaccagagaattcatactggtgagaagccctacaagtgtaaggagtgtaagaaggcctttagacagcattcacaccttactcagcatcagaagattcataatggaatttaatagaagaaagccttcaaatgtatatgatgttacagaacatcagaaaattcatttttgagaaaatgtgtttcatgctcaattccaagcataataaattttatattagagaaagaatatgttgatttaaaagccttccaacaccatttaaacatggtttatcttcagcaaattcctatgagagaataatgtaatgaatgtaggaaaatctttagccttatctgtcattatctccctttctccacttgattaccagtttgatttattggacaagatactaagcttctgtgcctcattttgctgacttgtaaaatggtaataatagtacttatatgtattagttatttattgctgcgtaataaattaccacagacttagtagcataaaataacatataattatatcttataatttggatcaggagtataggcatgacttagttgggtcctctgcttcagggtctcttgcaaggctacagatttcagccagggctgaggtctcatctgaaggctcaactggggaaggatccacatccagactaacatagttgttacccaatgtatttccgtgaggcctgttgcattgagattctcagtttctagctggctgttggctgaacgctgactgcagctcctggccacaatagcctcatcaacatggctgcttgcttcatcaaggcatgcaagccaaaagggaggacagtctgctagcaagatggaagttaccatcttgtgtaatctaatcatggaagtaacattccctcaccttctactggtagaagtaagttactaggatagtccacactcaagagaacgggatgatacaagagtgtgaataagtcctggagacaggaccactggggggcctgtttagagtcagcctgccacactgtggaataggattgttgcaaggagtaagtagttaatacttggaggaatcacagtcatatagcatgtattctgtaaatattatctgtaattgttattattgtcattagtattagtgaattcacgtaaaaggaagatctgtagacataataaatgtagaaatgcctcctgtcacctctcagaaattattaaacataatttattctaggtaaaatttagattgtagtgaatgtaggaagttcttcagcacttgagctgcattagaaatttcatgccaaaaatgaatttcatgaatgtgaggtcactagtaatacagctgttgaagaattagagggaaataggaaatgattttcccataattccagaaagcaaaaggcttacaatccctgttgtctgaccacagtttaaaattaattagaaactatcaaaaatgtggcttaaaagaaattaaccacctaggaatttaatattgttgtgtatatttatgtgtgtgtataaaactcctgtgggaaagaaacaaaacatcattctataagtcagtatacttttggatgctcaaaatgccatatcttcaaccagtaggagttgtttcaagttgagtttttgatgtgatcccaccaataatttgatagtttacttgattgtggctgcataatttggtaacctatgaaagatgctagagcaccaatgtataatttttttgagacagggtgtcactttgtcccccaggctggagtgcagtggtacaagcacagttcactgtaccctgttcctcctgggctcaagtgattcttccacctaaattttttttttttttttagagaaagggtctcactatgttgcccaggctggtcttgaacttctgggctcaagtgatcctccctccttggcctccaaaggtgctggggttacaggtatgagccaccacacccagcccaactcattattcttgaaatcaataaatcagaggaaaaattgtcatttagtttccttttcccatgtgaaccaaatttcagggtcaccagaagttcatcaaattcaaatgaatttggcctggcacaggggtcacacctgtaatcccagcactttgggaggacaaggtgggtggatcacttgaggccaggagtttgagaccaacctggttaacatggtgaaaccctgtctgtactaaaaatacaaaatttagccaggcatggtggcacacacctgtagtcccaggctgaggtgggaggatcacttgaacccaagaggcagagtttgcagtgagctgagatcgtgccactgcactccagcctgggtgacagagtgagaccctgtctcaaaaaaaaaatttgttttttgaatgggtttttcttttttgaagaagtctaataaatctagaaggaattagaggattagaaaaatcaccattttctagaccttaatggaataatgggtccagaaaacatgatcttcaatgggtactacaactaataggtgaaatattttatagcgagatttttatggtggatctatcaaactggccacctctgaaccctttgatctgttttaaccttaataaaaatgggtctatcagacaacacacttcctgacgtaatgcaataggaagtccacaccaccatctacaaagccttattgctggaataatgaactgaaagcagacagggactagatgaacagtatatggtcatcccttggtatccatggggaattggttccaggatcctccactgatggtaaaatctgaggatgctcaagtcccttgtataaaatggcatagtatgtatttgcatattacctactcacatcttcctgtatactttaaattatctttagatcacttatacctatcacaatgtaaatactatgtaaatagttgttatactgtatttttcaatttgcattatttttattgtattttatttttattgtttttttttgagtattttctatttgagattggttgaatctgcacatatggagggctggctataaagggcaccacaaggaagaagccaaacagatccagaatgtgtgaaattctacagagcaaattacctgatttcttcaactaacaggtagcatgaaaatacaaggggaagggcaaccattaacagattaaaagagacttaaagagacatatcaactaaattcagtatgttggcattacttggacctggtttgaacaaaacataaaaagccattttggagacagtgagggaagtgtggacatggactaaatattaaatgatatttacatatattaatttggttagggattatgtcagtgtgattataaaaaataaaagatcgtatgatatgagatacatactatgaaatgaagatagacacatttggattaaaatattctagcaaaagaaataattggcaaagagagctggaaactaaattggcaacatgttgataatttaagtggagtgttttgttcatggagacttattgttctaatatttctacttttgtatgtgtttgaaatttcaataataaaatgtttaaaatcaaaaccaaaattatagactatgtagaaatgaatgacagtgagatgcctgcacatctaaccttgtcagatataatcaaagttctgttcagtgacaaattaatgccctgtaatgtggtaaggaaatcttatttgtggatacagtcttcatcttcttcacttacccacagcagcaacaccaggcctgtcacacagatgaatgtgttgagggaatgaataagtatttccgtcaagaaaaaggaaacaacaaaataaaaccaacccaagtaaagaacagccaagtggccaggtgcggtggctcatgcctgtaatcccagcactttgggaggccatggcaggtggatcacctgaggtcgggattttgagaccagcctgaccaacactgagaaaccccatctctattaaagatacaaaattagccaggcatggtggtgcatgcctgtaatcccagctacttgggaggctaaggcaggagaatcacttgaatccaggaggcggagtttgtggtgagttgagatcgcgccactgcactccagcctgggtaacagagcaagagtctgtcaaaaaaaaaaaaaaaaaaaaaggaacagccaagtaacagtagaaagtagaaattaagagaatggagaatattagacttgattcaatgttaatagtgattagattttggcagttataatcaaggaagagaaaatgaaagataatacatttagagtattaatgatgataaaagagacacaactctagattatatcaagcagatttttaaaattataaggcaaaactaggccgggcacagtggctcacacctgtaaccccagcactttgggaggccgaggtgggtggatcacttgaagtcaggagttcgagaccagcctgaccaacatagcaaaaccccatctctactaaaaatacaaaaattagcctgtcatggtggcgggcacctgtaatctaagctactggggagcctgaggcaggagaattgcttgaacccaggaggcagaggttgcggtgaaccaagatcacgccactgcactccagcctgggtgacagagtgagaacctgtctcaaaaataataaacataatatggtaaaactatacatgcacacatgcacaaacgtgtatattcattccagtacaagtaaaaatgtaggattgcatttttcccccaaaaggaatatgttttacaattaactcaccgtataacccaaatagattaacaaaaaatgtgtgtgtgtgtgtgtgtgtgtgaactccctgtttaaaaaatctgatacttataaaaactttaaggaatagataatcctaaagattttaccaattaattctgcaaggtaaaataatcctaataaaaattagatgaagatagtttctgaaagcaaattctagaccaccttcattatgaagattctatttttcacaattctaaataaagtttatttagaatttattacaaaatctatctttgctaataggtcagtgtttcttttcccaagcaccaaatacctccagaaagcctgtgtttgacccctaaattcaacattctccagaagtttgcttcaaggaatattaattctcgatggtatttgaaaaaaagatttcttgggaaaataggcaaatgaagcaaaacataaaacatctacttttggccaggcacggtggctcacgcctgtaatcccaacattttgggaggccaaggcgagcagatcacttgaggtcaggagtttgagaccagcctggccaacatggtgaaaccctgtctctactaaaaatacaaaattagctgggcgtggtggcttgcacctgtaatcccagctacttgggaggctgaggcaggagaattgcttgaacccaggaaatggagattgcagtgagctgagattttgccattgcactccaacctgggcaacaagagtgaaactcagtctcaaataaaataaaataaaaatctacttttgaggaattcaaagtatacatgatcagtttgccaaagatttagtaaagacatttttatttaactgagtgtatctcaaatttattgtggaattctcagtccgaatatctggaataggaacagctttgttagatgctaccataaccacaatgaatgtcttcaagggtgtaattttagatatggtgagtggttgtgttgggggcggcataagtcagggcaattttttgcagctcatatcatgctctgaaagtagctacctgctttaatggatggttagtgcttttctatagaatggaaaagattccagcccgatccttgatatgtttgtgttaaacatgcttatatattatattaaacaatgattaaggacataaatgagtttctgtggtaataaagatgctatattgaatatca

SEQ ID NO: 200783 - DNA, 642 bp, Homo sapiens
  Payload ID: 19624
  Gene Name: ZFP14 zinc finger protein
  ENST ID: ENST00000589280
  CDS Start-End: 82-327
agctctggcttatcaggactccatagttctccaacagagaaatcttgaaaaggactgaccagtttttgcagttctaaaaccatggcccatggttcagtgacattcagggatgtggccatagacttctcacaggaagaatgggaattcctggatcctgctcagagggacttatatagggatgtaatgtgggagaactacagcaacttcatttcactagcaggaccttccatttctaaaccagatgtgattaccttattggatgaagaaaggaaggaacctgggatggttgtgagggaagggacaagaagatactgccctggtgagtgagggctgagcaggcattgagaaatcactactgcaggtaatagctaaactgattagggtggaggcacacccttgagatgttggggtctctcttcaaaaagcccctggcctatggaggcagggcttgggacttgaagcaaattaagatcttttaagcctggactagcaaaggaactttctattgatcttgaatgcaacactgtttctcatctttcatatttctatcctactttaaagagaagaactattcctggtagaagaaaaaataaataaatataagagcagaaatcagcaaaatagaaaagaaataaagaaaat

SEQ ID NO: 200784 - DNA, 2429 bp, Homo sapiens
  Payload ID: 19625
  Gene Name: ZFP2 zinc finger protein
  Uniprot ID: Q6ZN57
  ENST ID: ENST00000361362
  CDS Start-End: 531-1916
aaatgtagtctggcgctccgggctgtaagcgccggtcgcggctgtgtcggtcgccgctgctcccgctcctgctgggagaggtttcaggagtcagtgaccttcaaggatgtgtccatagatttctcttgggaagagtggattcaagcagattctgctcagaggatgaccgtgtatggggaggtgatgctggagaactacaggaacccggtctcactgggaaatcacctttccaaacccaatgggacttcccagctggaacgagaactgagtctgatgcaaaaagaaccgcctgagggtggctttcgagattttcttggatattgctgtcagattaatctgacatttagtcctctcattatcctgtcccagtcaaggggagaaagtattgactgagtgctgtgctcagctcttccacagccagcatctcacttacttgacacaaaacatctatagactgggagacaagacttgaaaccaaagagccaactccgaagccgggtattactgaagatttatgccatggggtaacaatggaaagggaaggtatctggcattctactctaggggaaacctgggaacctaataattggttagagggacaacaggatagtcatctgagccaagtgggagttacccataaggaaaccttcactgagatgagagtatgtggaggtaatgaatttgaaagatgttccagtcaggattcaatccttgatacacagcaaagcattcctatggtaaaaaggccccataactgtaattcacatggagaagatgccacacaaaattctgagttaattaaaactcaaagaatgtttgtaggaaagaagatctatgaatgtaatcagtgcagcaaaaccttcagtcagagctcatcccttcttaagcaccagaggattcatactggggagaaaccctataagtgtaatgtatgtgggaaacacttcattgaacgatcctcccttactgtacatcaaagaattcatactggagagaaaccctataaatgtaatgaatgtgggaaagcctttagtcagagcatgaatcttactgtccatcaacgaactcacaccggagagaaaccctatcagtgtaaagagtgtggcaaagccttccataagaattcatctcttattcagcatgaaaggattcatactggagagaaaccctacaaatgtaatgaatgtggtaaagcttttacccaaagcatgaatttgacagttcatcagagaactcatacaggagaaaaaccctatgaatgtaatgaatgtggaaaagccttcagtcaaagcatgcatcttattgtacatcagagaagccatactggagaaaaaccctatgagtgtagtcaatgtggaaaagcctttagtaagagctcaactcttaccctacatcagcgaaatcacactggagaaaaaccttacaaatgtaacaaatgcgggaaatcctttagccaaagtacatatcttatagaacatcagagacttcattctggagtaaaaccttttgaatgtaacgagtgtggaaaagctttcagtaagaattcatctctaactcaacatcggagaattcacactggagagaaaccttatgagtgtatggtgtgtggaaaacatttcactggacgatcatcccttaccgtgcatcaggtcattcacactggagagaaaccttatgagtgcaatgaatgtggaaaggcattcagccagagtgcttaccttattgaacatcaaagaattcatactggtgagaaaccctatgaatgtgatcagtgtggaaaagccttcattaagaattcatcccttacagtgcatcagagaactcatacaggagagaaaccctatcagtgtaatgaatgcggaaaagccttcagccggagtacaaaccttacacgacatcaaagaactcatacgtgaggaatgttttcactggcccttacctcatgattaactcttcagtaataatcatatgagacatacaatgtagaaacctaataaatgtaatgattgtgggaatctttcagttgaagtacaatatgtcatatcagataataccactgcagagaatccatctaaaagtagagaaatcttgattcagaatgtataatttcctttatatcagaaggtttaaatagctaatataaacaatgaagagtcatgctgaagataagttctgttatatcataccgcacattctcctttggctatcagagactttacactggagagaaaaatgtgagagtgtttaactggacagcccagagacctggtatgtagtcctaatctgccactgccttggacaacttgcctacttccaccaggttatggttctttatttggtaaatgaatgattttggagttagaaatcttgtaggagctctgttagctctaaaatgctacaactctataaatataatgaatgctgggaaa

SEQ ID NO: 200785 - DNA, 598 bp, Homo sapiens
  Payload ID: 19625
  Gene Name: ZFP2 zinc finger protein
  ENST ID: ENST00000520660
  CDS Start-End: 530-598
gtagtctggcgctccgggctgtaagcgccggtcgcggctgtgtcggtcgccgctgctcccgctcctgctgggagaggtttcaggagtcagtgaccttcaaggatgtgtccatagatttctcttgggaagagtggattcaagcagattctgctcagaggatgaccgtgtatggggaggtgatgctggagaactacaggaacccggtctcactggcaggaaatcacctttccaaacccaatgggacttcccagctggaacgagaactgagtctgatgcaaaaagaaccgcctgagggtggctttcgagattttcttggatattgctgtcagattaatctgacatttagtcctctcattatcctgtcccagtcaaggggagaaagtattgactgagtgctgtgctcagctcttccacagccagcatctcacttacttgacacaaaacatctatagactgggagacaagacttgaaaccaaagagccaactccgaagccgggtattactgaagatttatgccatggggtaacaatggaaagggaaggtatctggcattctactctaggggaaacctgggaacctaataattggttagaggga

SEQ ID NO: 200786 - DNA, 2154 bp, Homo sapiens
  Payload ID: 19625
  Gene Name: ZFP2 zinc finger protein
  Uniprot ID: Q6ZN57
  ENST ID: ENST00000523286
  CDS Start-End: 415-1800
cccggtctcactgggaaatcacctttccaaacccaatgggacttcccagctggaacgagaactgagtctgatgcaaaaagaaccgcctgagggtggctttcgagccgggcatggttgcgtgcacctgtaatcccagctactcgggaggctgaggtgcaagaatcacttcaacccgggaggctgaggttgcgattttcttggatattgctgtcagattaatctgacatttagtcctctcattatcctgtcccagtcaaggggagaaagtattgactgagtgctgtgctcagctcttccacagccagcatctcacttacttgacacaaaacatctatagactgggagacaagacttgaaaccaaagagccaactccgaagccgggtattactgaagatttatgccatggggtaacaatggaaagggaaggtatctggcattctactctaggggaaacctgggaacctaataattggttagagggacaacaggatagtcatctgagccaagtgggagttacccataaggaaaccttcactgagatgagagtatgtggaggtaatgaatttgaaagatgttccagtcaggattcaatccttgatacacagcaaagcattcctatggtaaaaaggccccataactgtaattcacatggagaagatgccacacaaaattctgagttaattaaaactcaaagaatgtttgtaggaaagaagatctatgaatgtaatcagtgcagcaaaaccttcagtcagagctcatcccttcttaagcaccagaggattcatactggggagaaaccctataagtgtaatgtatgtgggaaacacttcattgaacgatcctcccttactgtacatcaaagaattcatactggagagaaaccctataaatgtaatgaatgtgggaaagcctttagtcagagcatgaatcttactgtccatcaacgaactcacaccggagagaaaccctatcagtgtaaagagtgtggcaaagccttccataagaattcatctcttattcagcatgaaaggattcatactggagagaaaccctacaaatgtaatgaatgtggtaaagcttttacccaaagcatgaatttgacagttcatcagagaactcatacaggagaaaaaccctatgaatgtaatgaatgtggaaaagccttcagtcaaagcatgcatcttattgtacatcagagaagccatactggagaaaaaccctatgagtgtagtcaatgtggaaaagcctttagtaagagctcaactcttaccctacatcagcgaaatcacactggagaaaaaccttacaaatgtaacaaatgcgggaaatcctttagccaaagtacatatcttatagaacatcagagacttcattctggagtaaaaccttttgaatgtaacgagtgtggaaaagctttcagtaagaattcatctctaactcaacatcggagaattcacactggagagaaaccttatgagtgtatggtgtgtggaaaacatttcactggacgatcatcccttaccgtgcatcaggtcattcacactggagagaaaccttatgagtgcaatgaatgtggaaaggcattcagccagagtgcttaccttattgaacatcaaagaattcatactggtgagaaaccctatgaatgtgatcagtgtggaaaagccttcattaagaattcatcccttacagtgcatcagagaactcatacaggagagaaaccctatcagtgtaatgaatgcggaaaagccttcagccggagtacaaaccttacacgacatcaaagaactcatacgtgaggaatgttttcactggcccttacctcatgattaactcttcagtaataatcatatgagacatacaatgtagaaacctaataaatgtaatgattgtgggaatctttcagttgaagtacaatatgtcatatcagataataccactgcagagaatccatctaaaagtagagaaatcttgattcagaatgtataatttcctttatatcagaaggtttaaatagctaatataaacaatgaagagtcatgctgaagataagttctgttatatcataccgcacattctcctttggctatcagagactttacactggagagaaaaatgtgagagtgtttaactggacagcccagagacctggt

SEQ ID NO: 200787 - DNA, 2043 bp, Homo sapiens
  Payload ID: 19625
  Gene Name: ZFP2 zinc finger protein
  Uniprot ID: Q6ZN57
  ENST ID: ENST00000520301
  CDS Start-End: 304-1689
cccggtctcactgggaaatcacctttccaaacccaatgggacttcccagctggaacgagaactgagtctgatgcaaaaagaaccgcctgagggtggctttcgagatggagtctcgctgtgtcacccaggctggagtgcagtggcacaatctcagctcactgcaagctccgcctcccgggttcacaccattctcctgcctcagcctccggagtagctgggactacagactgggagacaagacttgaaaccaaagagccaactccgaagccgggtattactgaagatttatgccatggggtaacaatggaaagggaaggtatctggcattctactctaggggaaacctgggaacctaataattggttagagggacaacaggatagtcatctgagccaagtgggagttacccataaggaaaccttcactgagatgagagtatgtggaggtaatgaatttgaaagatgttccagtcaggattcaatccttgatacacagcaaagcattcctatggtaaaaaggccccataactgtaattcacatggagaagatgccacacaaaattctgagttaattaaaactcaaagaatgtttgtaggaaagaagatctatgaatgtaatcagtgcagcaaaaccttcagtcagagctcatcccttcttaagcaccagaggattcatactggggagaaaccctataagtgtaatgtatgtgggaaacacttcattgaacgatcctcccttactgtacatcaaagaattcatactggagagaaaccctataaatgtaatgaatgtgggaaagcctttagtcagagcatgaatcttactgtccatcaacgaactcacaccggagagaaaccctatcagtgtaaagagtgtggcaaagccttccataagaattcatctcttattcagcatgaaaggattcatactggagagaaaccctacaaatgtaatgaatgtggtaaagcttttacccaaagcatgaatttgacagttcatcagagaactcatacaggagaaaaaccctatgaatgtaatgaatgtggaaaagccttcagtcaaagcatgcatcttattgtacatcagagaagccatactggagaaaaaccctatgagtgtagtcaatgtggaaaagcctttagtaagagctcaactcttaccctacatcagcgaaatcacactggagaaaaaccttacaaatgtaacaaatgcgggaaatcctttagccaaagtacatatcttatagaacatcagagacttcattctggagtaaaaccttttgaatgtaacgagtgtggaaaagctttcagtaagaattcatctctaactcaacatcggagaattcacactggagagaaaccttatgagtgtatggtgtgtggaaaacatttcactggacgatcatcccttaccgtgcatcaggtcattcacactggagagaaaccttatgagtgcaatgaatgtggaaaggcattcagccagagtgcttaccttattgaacatcaaagaattcatactggtgagaaaccctatgaatgtgatcagtgtggaaaagccttcattaagaattcatcccttacagtgcatcagagaactcatacaggagagaaaccctatcagtgtaatgaatgcggaaaagccttcagccggagtacaaaccttacacgacatcaaagaactcatacgtgaggaatgttttcactggcccttacctcatgattaactcttcagtaataatcatatgagacatacaatgtagaaacctaataaatgtaatgattgtgggaatctttcagttgaagtacaatatgtcatatcagataataccactgcagagaatccatctaaaagtagagaaatcttgattcagaatgtataatttcctttatatcagaaggtttaaatagctaatataaacaatgaagagtcatgctgaagataagttctgttatatcataccgcacattctcctttggctatcagagactttacactggagagaaaaatgtgagagtgtttaactggacagcccagagacctggt

SEQ ID NO: 200788 - DNA, 532 bp, Homo sapiens
  Payload ID: 19625
  Gene Name: ZFP2 zinc finger protein
  ENST ID: ENST00000520805
  CDS Start-End: 507-532
gctgtaagcgccggtcgcggctgtgtcggtcgccgctgctcccgctcctgctgggagagggagtcagtgaccttcaaggatgtgtccatagatttctcttgggaagagtggattcaagcagattctgctcagaggatgaccgtgtatggggaggtgatgctggagaactacaggaacccggtctcactggcaggaaatcacctttccaaacccaatgggacttcccagctggaacgagaactgagtctgatgcaaaaagaaccgcctgagggtggctttcgagattttcttggatattgctgtcagattaatctgacatttagtcctctcattatcctgtcccagtcaaggggagaaagtattgactgagtgctgtgctcagctcttccacagccagcatctcacttacttgacacaaaacatctatagactgggagacaagacttgaaaccaaagagccaactccgaagccgggtattactgaagatttatgccatggggtaacaatggaaagggaaggtatctggcattc

SEQ ID NO: 200789 - DNA, 4096 bp, Homo sapiens
  Payload ID: 19626
  Gene Name: ZFP28 zinc finger protein
  Uniprot ID: Q8NHY6
  ENST ID: ENST00000301318
  CDS Start-End: 72-2678
cgggcgggtgtggccaggggtgtgggtctgtgagggaccggtcggaagggcgtcgcgcggcctcgggtgacatgcggggggcggcgagcgcgagtgtccgcgagccgacgccgctcccgggtagaggcgccccccgcacaaagccccgggcgggccgaggcccgactgtagggactccagccaccttggccctccctgcccggggaaggccgcgctcaaggaatggcctcgcatccaaaggccagcgaggagcggcccctacggggcctgggcacagagctctgccttccagggacactgctcttccccaggagagaaacaagaagctggaggctgtggggacaggaattgaacctaaagccatgtcccagggcttggtgacatttggggatgtggctgtagatttctcccaagaggagtgggagtggctgaaccccattcagaggaacttgtacaggaaggtgatgttggagaactacaggaacctggcatcgctgggactttgtgtttctaagcccgatgtgatctcctcgttggaacaaggaaaagagccttggacagtgaagcgaaagatgacaagagcctggtgcccagacttgaaggctgtgtggaagatcaaggagttacctctcaagaaggacttctgcgaaggaaagctatcccaggcagtgataacagagagactcacaagctataatctggagtactctctgttaggggaacactgggattatgatgctctgtttgagacacagccgggcttggtgactatcaaaaacctggctgttgacttccgccagcagctacacccagctcagaagaatttctgtaagaatgggatatgggagaacaacagtgacctgggatcagcaggacattgtgtggctaagccagatttagtctctttactagagcaagagaaggagccctggatggtgaagcgagagctgacaggaagcctgttctcaggccagcgatctgtacatgagacccaggaattatttccaaagcaagattcatatgctgaaggggtaacagacagaacctcaaacactaaacttgattgttccagtttcagagaaaattgggattctgactatgtgtttggaaggaagcttgcagtaggtcaagagacacaattcaggcaagagccaattactcataacaaaaccctctctaaggaaagagaacgtacatataacaaatctggaagatggttctatttggacgattcagaagagaaagttcataatcgtgattcaattaaaaattttcaaaaaagttcagtggtaataaaacaaacaggcatctatgcaggaaaaaagcttttcaagtgtaatgaatgtaagaaaacttttacccagagctcatctcttactgttcatcagagaattcacactggagagaaaccttataaatgtaatgaatgtgggaaggcctttagtgacggctcatcctttgcccgacaccagagatgtcacactggcaagaagccctatgagtgcattgagtgtgggaaagctttcatacagaacacatcccttatccgtcactggagatactatcatactggggagaaaccctttgattgcatcgattgtgggaaagccttcagtgaccacatagggcttaatcaacacaggagaattcatactggagagaaaccttacaaatgtgatgtatgtcacaaatccttcaggtatggttcctcccttactgtacatcaaaggattcataccggagaaaaaccatatgaatgtgatgtttgcagaaaagccttcagccatcatgcatcactcactcaacatcaaagagtacattctggagaaaagccttttaagtgtaaagagtgcggaaaagcttttaggcagaatatacaccttgccagtcatttaaggattcatactggggagaagccttttgaatgtgcggagtgtggaaaatccttcagcatcagttctcagcttgccactcatcagagaatccatactggagagaagccctatgaatgtaaggtttgtagtaaagcgttcacccagaaggctcaccttgcacagcatcagaaaacccatacaggagagaaaccatatgagtgcaaggaatgcggtaaagccttcagccagaccacacacctcattcaacatcagagagttcacactggtgagaaaccctataaatgtatggaatgtgggaaggcctttggtgataactcatcctgtactcaacatcaaagactgcacactggccaaagaccttatgaatgtattgagtgtggaaaggcattcaagacaaaatcctcccttatttgtcatcgcagaagtcatactggagaaaaaccttatgaatgcagtgtgtgtggcaaagcctttagtcatcgtcaatcccttagtgtacatcagagaatccattctggaaagaaaccatatgaatgtaaggaatgtaggaaaaccttcatccaaattggacaccttaatcaacataagagagttcatactggagagagatcttataactataagaaaagcagaaaagtcttcaggcaaactgctcacttagctcatcatcagcgaattcatactggagagtcgtcaacatgcccctctttaccttccacgtcaaatcctgtggatctgtttcccaaatttctctggaatccatcctccctcccatcaccatagcctcgagacgtcatttctgtttgactactccagcagtttaaaaccccatctccctgcccttttgttttctttttgtcccttattagttagttcttcacataagtgtaaatgtaacttattcactcctcttgtaaaacttatagtttctttaaattggttaatgtgtgagatgtgctcagcacagtgcctggtccatagtaagtgctcagtaaacttagctgttttaaaaactttgtatttgaacattgaaaagttacagtagtcagctctgataaaaaaatgatgcagtagggtgagggtaggaaaaagcacattttctatcaggaacagaattctccagtagtgggtgaggttttgcctttgttggttttaaaacttgattctataatgccaagttagttttgtggctttccatctgaccctatgtgaatgtaaggtgatgtgaccttgttggtgagaaaattaaactttacatttgacttgatttgttttagaaagtctagggaccatgaatgaataggccagctgggacaaatgaatttaaaaaatcagaaaaatgcaagatttatatgcatgaagttaaaacaactgacgttactcaagaattagaaaactttgcaagatttgacttgtttaaaaatcacatttataagtgaaccgtattaaaacttttaaggaaccattcattgtgaggtaaactgatccagaataggggtcagcaaactatgactcatggccacagtctcactgactgtttttgtatggtccatgatctagaatttaaaaaaattttaaagggttgaaaaaagtgaaaagaatattttcaacatgaaaattatatgaaatttaagttttggtgtctgtaaataaagttttgttggcttcagccacacagtgatttacaccttgattgtgctgcttccaggctgtagcagcagagttgagcagttgtgacaggagaccatgtggcctgcagagcccaaatatctactgtctgatcctacacagaaaatgtgtgtgatccctgctatggagcagaggttatcaaactaaagcccatggaccaaatcctatctgctgcttgtttttgtaaatagagttttatcaaaccacagccatgcttacttgtttagctattgactatggctgctttagacaactgtgacagactatatggctcgcaaaactgcaaatatttcctatcctttaacagaaagtttgccaacctctgctctagagtagagaaaaatgtataaaagattttaattttatgagggcaatacaactgtcacatcagaaacaagaaaacaaatgataaaggaactcatttatcaatagaggtgaaaggaaattattaaactatattgaaaaataaagatgtcaataaaaggagaaatgatatttttctagatgaaata

SEQ ID NO: 200790 - DNA, 533 bp, Homo sapiens
  Payload ID: 19626
  Gene Name: ZFP28 zinc finger protein
  ENST ID: ENST00000589836
  CDS Start-End: 1-441
accttggccctccctgcccggggaaggccgcgctcaaggaatggcctcgcatccaaaggccagcgaggagcggcccctacggggcctgggcacagagctctgccttccagggacactgctcttccccaggagagaaacaagaagctggaggctgtggggacaggaattgaacctaaagccatgtcccagggcttggtgacatttggggatgtggctgtagatttctcccaagaggagtgggagtggctgaaccccattcagaggaacttgtacaggaaggtgatgttggagaactacaggaacctggcatcgctgggactttgtgtttctaagcccgatgtgatctcctcgttggaacaaggaaaagagccttggacagtgaagcgaaagatgacaagagcctggtgcccagatcattcatctcttcttgagactagttaattgtgaagacttacatttttaaggccaggatctggacttttattagttagcatcgtaataaaaaaaaaggagacttgaaggctgtgtggaag

SEQ ID NO: 200791 - DNA, 3475 bp, Homo sapiens
  Payload ID: 19626
  Gene Name: ZFP28 zinc finger protein
  Uniprot ID: Q8NHY6
  ENST ID: ENST00000591844
  CDS Start-End: 67-1116
gggtgtggccaggggtgtgggtctgtgagggaccggtcggaagggcgtcgcgcggcctcgggtgacatgcggggggcggcgagcgcgagtgtccgcgagccgacgccgctcccgggtagaggcgccccccgcacaaagccccgggcgggccgaggcccgactgtagggactccagccaccttggccctccctgcccggggaaggccgcgctcaaggaatggcctcgcatccaaaggccagcgaggagcggcccctacggggcctgggcacagagctctgccttccagggacactgctcttccccaggagagaaacaagaagctggaggctgtggggacaggaattgaacctaaagccatgtcccagggcttggtgacatttggggatgtggctgtagatttctcccaagaggagtgggagtggctgaaccccattcagaggaacttgtacaggaaggtgatgttggagaactacaggaacctggcatcgctgggactttgtgtttctaagcccgatgtgatctcctcgttggaacaaggaaaagagccttggacagtgaagcgaaagatgacaagagcctggtgcccagacttgaaggctgtgtggaagatcaaggagttacctctcaagaaggacttctgcgaaggaaagctatcccaggcagtgataacagagagactcacaagctataatctggagtactctctgttaggggaacactgggattatgatgctctgtttgagacacagccgggcttggtgactatcaaaaacctggctgttgacttccgccagcagctacacccagctcagaagaatttctgtaagaatgggatatgggagaacaacagtgacctgggatcagcaggacattgtgtggctaagccagatttagtctctttactagagcaagagaaggagccctggatggtgaagcgagagctgacaggaagcctgttctcaggtgagtgcaggagagcctggtgtggaaaatctactgcaagagagagcggagcttttaccaaaaaggctgcatcctcactaatatacagtaggaaactttacccagggtctctgggtctggaaagaaaattgaactctgggagttccaaataattctttcctcctcctttgcccccttctctccagtaactgccatttccctgaagttccttcttttcttggccactgggacgtgtatcatccacttgcttccttaaatgatcttttctggaccctgatgcacttttgagctgacttccaaaggttttctcttctgtggttaaatggcctattgttttcatcatgcatccattcctgtgagaaccacaaattgaaagttatgggattgagccactctgctgagtattggcaggcgattggaaaaagggagaattacacataaatgtaagccatcagtgaattactctaatggaaaggataagacatgtttatggatagcttgcatgaagtagagtttgcagaatttcaaatagggcattatagagacaaaggagatgttgttcccagtggtgtctatgttttagtaggacaggtgggtagaagttgaattgcaagaaggtggaagtaaaggatcttttcctcttgatgcacaagggaaagaaaggaaatttccatagaaaataatggtttgtagaaaatgtaattgtttactgtttggcaaaagaatataaaaccgtgacgttatcacaacatacaccttagatccatttaagtcaggataaacacacattttttcacatagtagaaattacagtgtatattcagttacgcatacacgtttttcatgtggattccacgttgtatataccattgctcacttaggttgctttacatttcttagtattaaagatacaattataatagatttttttcaagttaagtgaaaactacacattttggggattgctgtattcctggatatgagcacctgctaggctctgaaagtttttttgtttttggtgactagcaacaattagatgtatgagtttaattgcatcttgaaagtattggttatttacatgaaaacttttgctcattatttgttgaaagattatacactaaaattattctttttttatgaaagaagttgaacattttttcgtaaatttggtttttctcttatcttcttgtaaaatgtctgtcatttgtacccagttctctcttgtgtgttaaatattttcttaacagtctcagtgactgctatgtatataagcatactaattctgtgatatattgtctcaaactattttcacatatggcaataagagttttaattttaattaggtcttttaaaattatgacatgtaaaaattttcaatttttatatagtccagtatattatttctaatgtgatttctcctatttgtgtggctaacaacttgacacatatagttctatttcatttttaatgactatttagtattatatgaatatatataatttatttaaattatttactgttgagtatatttaaacatttaggaggtcttctccagttttcacctataatcaacagtggtccagtttgtacatatcttcttgcttacatgtcagaatatttcttgaagatatatgcttggaaatgaatttgcatggtcgaagtatatgtatttttaaagtgtcatggatattttgctgtaccgttggtaaagaatatatgagaatactgtttctagacatcatcaccaatatgggtattttgtagtttaaaaaaaattttgccaagctgctagatgaaaaatgttttatttaatttgcatttccccaactacttacgatgttgagaatatgtgctcttaaatctgtttagagtttgtattctattcatagtgtgtttatactcattagtcacatttctattgggttgtatattttcctgtatttatgcaacattgatatgaatgctattttttaataagtttgataaaatttttccccaattttgtgtggtctagaagtttgcatatggtatttcttactatatagtagcttaacttgggaattatcttcatttatagaagcacgtactttgttgattttttcatttgtttcactcctatctcttaaaaaatgaatagatgtatagtcccatttgaatcatataatacatttgtttgaccttctgtaacttaattatttctctctcctttatcaccttccttccttttctttctttccttctcatttttcccttctttccttacctttctcttctgtattttgctgtgtggcctgttttttgtttgttttatttacatatttttattatagaagagtacacataaaatttaaccattttgaagtgtacaattcagtgacagtatattatgtgaggtgatatggtaattagcttgattgtggcaaacatttcaccatgtataagcatatcaaaacattttataccttaaatatatacaatttttatttgtcaactatgcctcaataaagctgg

SEQ ID NO: 200792 - DNA, 5206 bp, Homo sapiens
  Payload ID: 19627
  Gene Name: ZFP3 zinc finger protein
  Uniprot ID: Q96NJ6
  ENST ID: ENST00000318833
  CDS Start-End: 337-1845
atgattccggggctgaagtgggcatcgacgggtgcactttgctgttccagggagccggctcggcaggcggcggcgacgtggaacttgggctagggctagaaccggcgaaaagcaagccggaaaaggcaagggggcgtcggtgcgctgaccacctgttcctccagcggagtgcgacgcgcgccgattggctggagtgccgcccgggtaccggaagtggccgatgcccgtcgccagtgacaccgggacaacagctgcgggctctgtgcgagcggcccagcagcgcggagcctcagcggagtgagcgagcgcggggcagtagcggcctgcgattgtgagatggggactgagaacaaggaggtgattcccaaggaagaaatttctgaagaatctgagccacatgggtcattattagaaaaatttccaaaagtggtttaccaaggtcatgagtttggagcaggatgtgaagaagacatgttggagggacattcgagagagtccatggaagaggttatagagcagatgtctcctcaggagagagactttccatcagggttgatgatctttaagaaatcaccctcaagtgagaaagaccgggagaataatgagagtgagagaggctgcagtcccagcccaaatctggttacacatcagggagatacaacagagggagttagtgcatttgctacctctggccaaaacttcctagagattttagaatctaacaaaacacagagaagttctgtgggagaaaagcctcatacatgtaaagaatgtgggaaagcctttaatcagaactcacatctcatccagcatatgagagttcatagtggagaaaaaccctttgaatgtaaagaatgtggaaagacatttggaactaattcaagccttcgacggcacctgagaattcatgctggagaaaaaccctttgcttgtaatgaatgtggaaaggccttcattcagagttcacaccttattcaccatcatagaattcatactggagagagaccctataaatgtgaagaatgtggtaaagccttcagtcaaaattcagcccttattctacaccagagaatccatactggagagaaaccatatgaatgtaatgaatgtgggaagacctttagggttagttcacagcttattcagcatcagagaattcatactgaagaaagataccatgaatgcaatgagtgtggcaaagccttcaagcatagctcaggccttattagacaccagaaaattcatactggagaaaaaccatatctgtgtaatgaatgtgggaagggcttcgggcagagttctgagcttatccggcatcagagaattcatacaggggacaaaccctatgaatgtaatgaatgtgggaaaacttttggccagaactcagagattattagacatattagaattcatactggtgagaagccctatgtatgtaaggaatgtgggaaggccttcagggggaactcagaacttcttagacatgagagaattcacactggagagaaaccctatgaatgctttgagtgtggaaaggctttcaggcggacctctcaccttattgtccaccagagaattcatactggagagaaaccccatcaatgtaatgagtgtgcaagaaccttttgggataattctgagctgcttctccaccagaaaattcatattggagagaaaccttatgaatgtagcgagtgtgagaaaacatttagccagcattcccaacttatcatacatcagagaattcacactggagagaagccttatgagtgccaagaatgtcagaagacttttagtcggagctctcacctcctccgacatcaaagtgttcactgtatggagtaatctgcaaaataggaaagcttttagtggaaaagctaaagtccaacttattcatttgttcataatatgcaaatatgcaccccaagtattcaaatccaatgaatggacagaacctcctctgtcctcccactgattttaaatagttggttgaagaagatgaggcacttttttttttttttttttaagcattggggtcttgctctgttgcccaggatgggatgcagtggcacagtcgtaactcactgcttccttgaactcctgggctcaaacagtcctcctgcctcagccttccaaatagctaggactgcaggcactaatgaggcacttttatgaattattcattgagaggtttcagtgtgctaagttaaatcataaaagctctttcaggccttaatttcccctctgtccttccttccccttctcctcccccagtggatcacataacaaacattaagggtctgtaccagccatctttcctaaattactcttcagcaaaattgtgggaacaggattccaccacctcctaagaatgagagttgactcattgactgttaccccctgaaatattagaaagtcataatttagaagacacacctcattctcctgtccactgtttagcattggaataatttagtaagctgttattagcttcaaagtcgtccagccctgctatgaagttactttagaagatggcagcattaatgaagaagcaggctcatttcacatctgtcaggcttccttattcatctgaagaggctgccatgatggaggaactgacaggcaatttacaacgggattataagtgaaggccttagaatccagaggggccgattaggcaacaccaggggataaacaattgaggtcacactgctcggcatgggcagaagcagctcttcaggagctgtccacacttcaggggtgctcagactgactgctcctaagaattctgctgcatatatttttagccccatctcctgccactgctgacagatattgtgacagtaagtagcagacaggactgtggcttcacctcctccgggcacctggctacagtgatgagtcagttcacctgatgacaaaccagggtctggccttgccaaagcacttaagttctcatgacctggaccgcactggaggccctggctaagtcaggatgtcgtagcctcttcttggttttgccccttggccttgaaattcttttttcttgaataactttaaaaaaatagagataaagtcttgctatgttgcccaggctggtcttgaatgcctgggctccagcaatctttttgcctcaacttcccaaagtattgagattacaggtgtgagctaccatgcccggccttgaaattctttcttcgctatgtctgcatgttttttgtgttctgtatttatttcttctccaaggaaacagcctacattttccatgtgtccatgtttctgaggccgtgggtgacagtgggaattgcactaatgggggcccaacaggcctgggggctggtcttagcgctagaccttgaacaaggcacttcacctgctggtctccaattttctcctctgtaaaatgaaagagttgaactaagtgatctcaaaagtttcaaccagcccgataattccttaattctttaaaaatttaactttatatatctttattattctttaacctcatctttgttacactaatattagtcactaatatttattgagtgtttactacctgacaggcagagtgccagtttacattttaattttcacatcatttctatgatgtgggtactcatttttttaaagctttatgaaggtataatttacgtactataaaattcacctgttttaagtgttcagttgaatgatttttaatttacatagtggtgcaaccatcaatgatgtgggtattcttaccccaatttaaaagataagaaggggcagtgttaagtaattgacccatgattccacagctagtaagagcgacagccaagactccaaacctggttgatgctcttaaccactgtgctatgccgcaggtaggcagattcattactgccttatctgaaaccctttgcacagtttctattactgatttctatgtagatttgaatataacaaatttaaatcatgtccttggtaacagaactgatcacagccaaaaaaaattcaccaaatgggtttattctgtactccaatataggtgtcttcccaggtttatatccttggcttgagaaaagggttgtacaaatagatgattgcagagtttccacatccttccagatacctctgcctctagcagtcacactcttagtaagggaagttgtttgatttacttcttcccttaggttgattacaagtgaagtgcgccgtcttattcctttttcattgctggagcacaaattgaattgtgcccagaccgtatctttctcacatgaaacctggatctcacctatcccttccatgcctgattcccgtgtttgcatattttatttccacatttacctcttgtcagccctgacagagaatttggcaccccttcaagcttctcctaaacaatctatgcacacaaacacccctgagcaatatggacttcactgaagatagtgtgtaagcaaaggagaagagttcacattgtgcatcctattagacattttgttctcagaagtaccttactggccaaaccaatgaaggttttcctcttgtcctcccctctcaaggctcagtcacctcaacttctttttgcctactagatatccaatccatcacctcgcctcccctggccctagctcaattaccctcttaaacccattcctgctcagcaaaacttcctctagttcaccattcattcatttgaacattaggaggcaatttagtgacctgttgtacctgaccatgttcttaagggggaggtctcacgtctcattcccagaaaagtctaccatatatagatacatattccccgccccgccccagatttctggtgaatgaaatcacttgtatcttattaggtacatatacgcaaatccttaacctcaattctctgtcctcttcatgtcttacccagatatctcaggaagatttctcttttccttctgtttgcctccctcttcgacttacttgggagtcagcatctgaccacagtcgtgactggtaatgatgatttgtgcaaatactatcaaggaaaggacatgaattgtcttaattttagacccattaaaaaaccgcacaggcctcaatcttaaaagtcctatctaaatacccagaaatacccttcagaatttttgaagctatgcccatgtacaaaattttcttccttccctaattttaatggtatactaacaccttaggtaaataaaatatttctttactattttattga

SEQ ID NO: 200793 - DNA, 6090 bp, Homo sapiens
  Payload ID: 19628
  Gene Name: ZFP30 zinc finger protein
  Uniprot ID: Q9Y2G7
  ENST ID: ENST00000351218
  CDS Start-End: 559-2118
tggggctgggagccgggcgccactgtggccgctgcttttctgagggaaaagagcgcggagtgggccaggttttgcaggccgggccaaggtggagaaaaggttcctgtggagcctcaggccggtgtgctttttttcccgggactgagcttctgcagccctgaggcctggaggcccgggcggtagtaactgtgccggaccaggttcgtgggtgcggcctgtggtgcagttggagaccgaggccccgcgcatcctcgtccgcgcttcagccacttaggctcggccgtagcgaaaaggcccaagagggaagtcagaggtggcggttagttggggccagggaagcgtggagggtgggttccaatcgagtcaagaaaagcctggggtgtcctgaactctgcctgcttccccagccctgccagtttccagagaaggcgcttgagaaggagaaacgaatcgctgctgctcttctaaaagccggttccctctctggtgtctgtggaccctgcttctgaagtacatgaaccttgaggaaaattgaccagttctagcagttctaaaatcatggctcgtgatttggtgatgttcagagatgtggctgtagacttttctcaggaagaatgggaatgcctgaactcatatcagaggaatttgtacagagatgtgatattagagaactatagcaacttggtgtcactggcaggatgttctatttctaagccagatgtgatcaccctattggaacaagggaaagagccctggatggttgtgagggatgagaaaagaagatggactctagatttggaatccagatatgacactaaaaagttatttcaaggaaaggatatttatgaaatgaacttatctcagtggaaggtaatggaaagaattaaaagctgtggacttgaagaacaagaaagtcctcatgaggtgtgtttcaggcaagtgacaaaaaccacctctgaaaaaatgcctacttacagaaaactcacatctcttcctctgtatcagaaaagtcataacagagagaaaccctacgaatgtggggaatgtgggaaggcttttagagtacgacaacaacttactttccatcaaagaattcatactggtgagaaaccctatgaatgtaaagaatgtggaaaagcctttagacagtgtgcccacctcagtcgacatcagagaattcatacttctgacaaactctatgaatgtaaaaaatgtggaaagatcttcacatgtggctcagaccttcgagtacatcagagaattcatattggtgagaagccgtatgaatgtaaagaatgtgggaaagcctttagagttagaggacaacttaatctccatcaaaggattcacacgggtgagaaaccctatgaatgtaaagaatgtgggaaggcctttaggcagtatgcacaccttactcgacatcagagactgaacattgctgagaagtgctatgagtgtaaggaatgtggtcaggcctttctgtgtagtacaggccttcgactacatcacaaacttcatactggagaaaaaccctatgaatgtaaggagtgtggaaaggcctttagagtgcggcagcaacttactctccatcagagaattcacactggtgagaagccttatgattgtaaggaatgtgggaagactttcagtcgtggctatcatctaactctccatcagagaatacatactggtgaaaagccctatgaatgtaaggaatgtcagaagttctttcgtcgttactcagaacttatttcacatcagggtattcacattggagagaaaccttatgaatgtaaggaatgtgggaaggcatttaggctgttctcacagcttactcaacatcagagtattcattttggtgagaaaccctttaagtgtaaggaatgtgagaagacttttagactgctttcacaacttacccaacatcaaagtattcatactggtgaaaagccctatgactgtaaggaatgtggaaaggcctttagacttcattcatcactgattcaacatcagagaattcattctggtgagaaaccatacaaatgtaaggaatgtaaaaaggcatttagacaacattcacatcttacttaccatcagcgaattcataatgtaacttaataattattagaactcttcctttgcgaattttatgttgagcataggaagtacattctagaggaaaggtttttgaacgtgggaatcccttttgcttcatgctcacaactaagcataggaagttttatttaaaggaaagaatatgttaatgaacatatagaagcctttcatcacctttgaaaccatgttaaactttaggaaattcatcctagaaaagaactttattacaggactgaatgtggaaaagcttttgatcttacctattattatctccatattcttccatctgtgtatatacacacgaaggttgctagggaaccacttcattctgaaaatgtgtaaatgaaaggaaagtcatttagtctgcatttcctgtaggaactgtatttcagggcaaccagaagttaaggaggtaaagttcttctttattagaaaattccaggctaatgaatgcagaaagaataatagaaaattatattagaaaaactattgtgtaacacataatgaaataatggatctaggcatgattctctgtacaggttgacaccattcagtgaaggttgtgaactttatagtgaatagatgagactgacaacgtctgaacccactcatcatctcaacttcacaaaaagcaagagagtaaaaattacgtgcctcctaatgtgctacagtaagatatacacatcttgccaaaaatattgaacctgaatttaagcctcaagagccaactcccagtttagagaaaattcaaggaatggaagagtaaattacatgacacaaaaaggagcaattaaatctaaaataagggtaattctacaagaggaatcacctggtttcccaaccaataaaatggcattttaagaaataaggtggaactcctaggtattgacagacttgagacatcagtcaaatgcaatgaaacagtggtttttacttagatcatgagttgaacaaacatgtaaaagaagagatacttaacaataattgggagaatggaatattgacaatattagataatattaagaaactttgttatgtgtgataatagcattgtggttatgtaaaagtgtatttgttagagataatttctgaagtctatacacaggagatgatatatctggaatgtccttttgttcatacaaaagaaaaatgaggatgaataacaagtttggcaaaatgatggtaacctaagtcttggatacatggtttttatttgttttgtttttgctattctacttttgtgtatttaaaattttccatgatgttcttttaaagatcaaattatccatgaaattatagccagtttaaaatgaattattttaaaaaaaatttctggctgggcccggtggctcatgcctgtaatcccagcactttgggaggccggtgggcagatcatgaggtcaggagttcgagaccagcctgaccatcatggtgaaacctcatctccactaaaaatacaaaaattagccaggcgtggtcacatgcgcctgtaatcccagctactcgggcagctgagacaggagaatcacttgaacccaggaggcagaggttgcagtgagccgagatcacgccattgcactccagcctgggcaacaagagcaaaactctatctcaaagaaaaaaagaaaatttctacatattaaaacttgtggatgttgccaaagctctacacattgggattggaatattaattacactataatgacgataatgtattcaggaagttaaaatgtaggtccacattttatttagttgacctctctatctctatattatagtacccatggtatgcaccttttttttttttttttttgagacggagtctcgctctttcgcccaggctggcgtgcagtggcacagtctcggctcactgcaagctctgcctcccgggttcaagccattctcctccctcagacttccgagtggctgggattacaggcgcccgccaccacaccaggttgatttttgtatttttagtagagatggggtttcaccatgttggccaagctggtctcaactcctgacctcaggtgatccacctgccttggcctcccaaggtgctgggattacaggcgtgagccaccatgcccgactctcacttcatatgtttaaagaatgagtaaaagaaagcaattactactgctaaatgtgggaaataatggactagacctgtactaatatatggtagtcactagcaacctgttgagcacttgaaattgagttattgagcactgaaatgtggctagtccaaattcaaatggtgtttttttgtaaaacacaagattctgaagacttagttattttaaaaaagttaagtatctcaatttttcatattgagtacatattgaaataatattttagatatattggttcaaataaaatacattaaaatgaataacacttttttgtttttaaaattgttataggaaaatttatatatgtagctcacgtatttctattgtcagcgctggcataaacaataaaaagtagacttggtttttttgtgtgtgtttctttaaaagataccaatatagtcaagacctttgcagttttgatcacagaaatatgaaagattacacagctacagctatatgaatgataaaagtgacagctatggatttttaaagttataagttgctatactacatatatgtaatgtgtgtgtgtatagtgtgtaggtatatatatttatatttatacacacactatacatgtattttaaaatattgaaaatccagaattattttatggtaaaaattactaaaattgacttcacatgctgaatgaagagagcctgagtagaccaacaaacaaatgaaaaattaagacggttagaagatacgctttctaaaagaatacatttagaatctaactttaaaaaaaaaaaatcctactctcctgagccagagtggtctcagagagactccgagaacctaattttttacaagtaaaatctttgaagaattggtaattgctaaatttttccaacatactattctacaagactaacctaaaactgattataagaactaggtgaggagggctggcaaaacgaaaatctagacattttccgtatgaagagaaatctggtaattctaatttctatgggaaattatatccaacagtttagaatagaaaatcatttatgtggaataacttggaccagatccatccagctttaattatatatttagattctaggcattctaccttcagaacatcataatgatagtaaaagagatacgattctggcccagtatcatctcaattcatgcttattgtcttttttttttttttttttttagctttctatgtattaagaatggaatgaattttatgtatgtaaaagtgtaacccaacaccttaaaattaccttctcaaaattaataaagacagagttcttataaatgattgcatcagttggacttcggtgatttcaccgtggtcatccattatgaactgtatttgctgttataattgggaagccatgatgttcagtgtattacatcattatattccatttctcaaatggaatatgaaacttgatagcatttgaaaccatttcccaggaaacactagtgcttgatggtatttttagaaagcattctgtggttaaatgagcatattaaaattaataattaagaaaataaaactatagcttctccaaataatgaagtaatgagagtttaattgattttatttaacttaatgtatctgaagcaccttttaccctgtaactttcactcttaatgcttgtgagtatgggatatgaacccattttaacagataagtgctgtaaccaaaacaggtgacagcaaaggtggaaagttcggacctcatgtcaggtggttagttgtgttggaaggtggatgtgaggtatgtttccctggatgtggcatcatgttctaaagtcacctgttctttctgaatattgaactgttgcttttctgcagaaataaaatttctgaatcaaca

SEQ ID NO: 200794 - DNA, 3916 bp, Homo sapiens
  Payload ID: 19628
  Gene Name: ZFP30 zinc finger protein
  Uniprot ID: Q9Y2G7
  ENST ID: ENST00000392144
  CDS Start-End: 588-2147
gtggccgctgcttttctgagggaaaagagcgcggagtgggccaggttttgcaggccgggccaaggtggagaaaaggttcctgtggagcctcaggccggtgtgctttttttcccgggactgagcttctgcagccctgaggcctggaggcccgggcggtagtaactgtgccggaccaggttcgtgggtgcggcctgtggtgcagttggagaccgaggccccgcgcatcctcgtccgcgcttcagccacttaggctcggccgtagcgaaaaggcccaagagggaagtcagaggtgaacgccccaggatgaaggtcccctgcaaaacgctgggacctagatttggggtggcggttagttggggccagggaagcgtggagggtgggttccaatcgagtcaagaaaagcctggggtgtcctgaactctgcctgcttccccagccctgccagtttccagagaaggcgcttgagaaggagaaacgaatcgctgctgctcttctaaaagccggttccctctctggtgtctgtggaccctgcttctgaagtacatgaaccttgaggaaaattgaccagttctagcagttctaaaatcatggctcgtgatttggtgatgttcagagatgtggctgtagacttttctcaggaagaatgggaatgcctgaactcatatcagaggaatttgtacagagatgtgatattagagaactatagcaacttggtgtcactggcaggatgttctatttctaagccagatgtgatcaccctattggaacaagggaaagagccctggatggttgtgagggatgagaaaagaagatggactctagatttggaatccagatatgacactaaaaagttatttcaaggaaaggatatttatgaaatgaacttatctcagtggaaggtaatggaaagaattaaaagctgtggacttgaagaacaagaaagtcctcatgaggtgtgtttcaggcaagtgacaaaaaccacctctgaaaaaatgcctacttacagaaaactcacatctcttcctctgtatcagaaaagtcataacagagagaaaccctacgaatgtggggaatgtgggaaggcttttagagtacgacaacaacttactttccatcaaagaattcatactggtgagaaaccctatgaatgtaaagaatgtggaaaagcctttagacagtgtgcccacctcagtcgacatcagagaattcatacttctgacaaactctatgaatgtaaaaaatgtggaaagatcttcacatgtggctcagaccttcgagtacatcagagaattcatattggtgagaagccgtatgaatgtaaagaatgtgggaaagcctttagagttagaggacaacttaatctccatcaaaggattcacacgggtgagaaaccctatgaatgtaaagaatgtgggaaggcctttaggcagtatgcacaccttactcgacatcagagactgaacattgctgagaagtgctatgagtgtaaggaatgtggtcaggcctttctgtgtagtacaggccttcgactacatcacaaacttcatactggagaaaaaccctatgaatgtaaggagtgtggaaaggcctttagagtgcggcagcaacttactctccatcagagaattcacactggtgagaagccttatgattgtaaggaatgtgggaagactttcagtcgtggctatcatctaactctccatcagagaatacatactggtgaaaagccctatgaatgtaaggaatgtcagaagttctttcgtcgttactcagaacttatttcacatcagggtattcacattggagagaaaccttatgaatgtaaggaatgtgggaaggcatttaggctgttctcacagcttactcaacatcagagtattcattttggtgagaaaccctttaagtgtaaggaatgtgagaagacttttagactgctttcacaacttacccaacatcaaagtattcatactggtgaaaagccctatgactgtaaggaatgtggaaaggcctttagacttcattcatcactgattcaacatcagagaattcattctggtgagaaaccatacaaatgtaaggaatgtaaaaaggcatttagacaacattcacatcttacttaccatcagcgaattcataatgtaacttaataattattagaactcttcctttgcgaattttatgttgagcataggaagtacattctagaggaaaggtttttgaacgtgggaatcccttttgcttcatgctcacaactaagcataggaagttttatttaaaggaaagaatatgttaatgaacatatagaagcctttcatcacctttgaaaccatgttaaactttaggaaattcatcctagaaaagaactttattacaggactgaatgtggaaaagcttttgatcttacctattattatctccatattcttccatctgtgtatatacacacgaaggttgctagggaaccacttcattctgaaaatgtgtaaatgaaaggaaagtcatttagtctgcatttcctgtaggaactgtatttcagggcaaccagaagttaaggaggtaaagttcttctttattagaaaattccaggctaatgaatgcagaaagaataatagaaaattatattagaaaaactattgtgtaacacataatgaaataatggatctaggcatgattctctgtacaggttgacaccattcagtgaaggttgtgaactttatagtgaatagatgagactgacaacgtctgaacccactcatcatctcaacttcacaaaaagcaagagagtaaaaattacgtgcctcctaatgtgctacagtaagatatacacatcttgccaaaaatattgaacctgaatttaagcctcaagagccaactcccagtttagagaaaattcaaggaatggaagagtaaattacatgacacaaaaaggagcaattaaatctaaaataagggtaattctacaagaggaatcacctggtttcccaaccaataaaatggcattttaagaaataaggtggaactcctaggtattgacagacttgagacatcagtcaaatgcaatgaaacagtggtttttacttagatcatgagttgaacaaacatgtaaaagaagagatacttaacaataattgggagaatggaatattgacaatattagataatattaagaaactttgttatgtgtgataatagcattgtggttatgtaaaagtgtatttgttagagataatttctgaagtctatacacaggagatgatatatctggaatgtccttttgttcatacaaaagaaaaatgaggatgaataacaagtttggcaaaatgatggtaacctaagtcttggatacatggtttttatttgttttgtttttgctattctacttttgtgtatttaaaattttccatgatgttcttttaaagatcaaattatccatgaaattatagccagtttaaaatgaattattttaaaaaaaatttctggctgggattacaggcgtgagccaccatgcccgactctcacttcatatgtttaaagaatgagtaaaagaaagcaattactactgctaaatgtgggaaataatggactagacctgtactaatatatggtagtcactagcaacctgttgagcacttgaaattgagttattgagcactgaaatgtggctagtccaaattcaaatggtgtttttttgtaaaacacaagattctgaagacttagttattttaaaaaagttaagtatctcaatttttcatattgagtacatattgaaataatattttagatatattggttcaaataaaatacattaaaatgaataacacttttttgtttttaaaattgttataggaaaatttatatatgtagctcacgtatttctattgtcagcgctggcataaacaataaaaagtagacttgg

SEQ ID NO: 200795 - DNA, 4440 bp, Homo sapiens
  Payload ID: 19628
  Gene Name: ZFP30 zinc finger protein
  Uniprot ID: Q9Y2G7
  ENST ID: ENST00000514101
  CDS Start-End: 388-1947
acagccagcgtcagagtcaggcaccaccgcgcagccttctctgcggcaccatcctaatcccccgctagagaacggcacacgcgcacgcagcagccccgtgcacggaaacactactccgccagcggccaggcactcggtccaggtggcggttagttggggccagggaagcgtggagggtgggttccaatcgagtcaagaaaagcctggggtgtcctgaactctgcctgcttccccagccctgccagtttccagagaaggcgcttgagaaggagaaacgaatcgctgctgctcttctaaaagccggttccctctctggtgtctgtggaccctgcttctgaagtacatgaaccttgaggaaaattgaccagttctagcagttctaaaatcatggctcgtgatttggtgatgttcagagatgtggctgtagacttttctcaggaagaatgggaatgcctgaactcatatcagaggaatttgtacagagatgtgatattagagaactatagcaacttggtgtcactggcaggatgttctatttctaagccagatgtgatcaccctattggaacaagggaaagagccctggatggttgtgagggatgagaaaagaagatggactctagatttggaatccagatatgacactaaaaagttatttcaaggaaaggatatttatgaaatgaacttatctcagtggaaggtaatggaaagaattaaaagctgtggacttgaagaacaagaaagtcctcatgaggtgtgtttcaggcaagtgacaaaaaccacctctgaaaaaatgcctacttacagaaaactcacatctcttcctctgtatcagaaaagtcataacagagagaaaccctacgaatgtggggaatgtgggaaggcttttagagtacgacaacaacttactttccatcaaagaattcatactggtgagaaaccctatgaatgtaaagaatgtggaaaagcctttagacagtgtgcccacctcagtcgacatcagagaattcatacttctgacaaactctatgaatgtaaaaaatgtggaaagatcttcacatgtggctcagaccttcgagtacatcagagaattcatattggtgagaagccgtatgaatgtaaagaatgtgggaaagcctttagagttagaggacaacttaatctccatcaaaggattcacacgggtgagaaaccctatgaatgtaaagaatgtgggaaggcctttaggcagtatgcacaccttactcgacatcagagactgaacattgctgagaagtgctatgagtgtaaggaatgtggtcaggcctttctgtgtagtacaggccttcgactacatcacaaacttcatactggagaaaaaccctatgaatgtaaggagtgtggaaaggcctttagagtgcggcagcaacttactctccatcagagaattcacactggtgagaagccttatgattgtaaggaatgtgggaagactttcagtcgtggctatcatctaactctccatcagagaatacatactggtgaaaagccctatgaatgtaaggaatgtcagaagttctttcgtcgttactcagaacttatttcacatcagggtattcacattggagagaaaccttatgaatgtaaggaatgtgggaaggcatttaggctgttctcacagcttactcaacatcagagtattcattttggtgagaaaccctttaagtgtaaggaatgtgagaagacttttagactgctttcacaacttacccaacatcaaagtattcatactggtgaaaagccctatgactgtaaggaatgtggaaaggcctttagacttcattcatcactgattcaacatcagagaattcattctggtgagaaaccatacaaatgtaaggaatgtaaaaaggcatttagacaacattcacatcttacttaccatcagcgaattcataatgtaacttaataattattagaactcttcctttgcgaattttatgttgagcataggaagtacattctagaggaaaggtttttgaacgtgggaatcccttttgcttcatgctcacaactaagcataggaagttttatttaaaggaaagaatatgttaatgaacatatagaagcctttcatcacctttgaaaccatgttaaactttaggaaattcatcctagaaaagaactttattacaggactgaatgtggaaaagcttttgatcttacctattattatctccatattcttccatctgtgtatatacacacgaaggttgctagggaaccacttcattctgaaaatgtgtaaatgaaaggaaagtcatttagtctgcatttcctgtaggaactgtatttcagggcaaccagaagttaaggaggtaaagttcttctttattagaaaattccaggctaatgaatgcagaaagaataatagaaaattatattagaaaaactattgtgtaacacataatgaaataatggatctaggcatgattctctgtacaggttgacaccattcagtgaaggttgtgaactttatagtgaatagatgagactgacaacgtctgaacccactcatcatctcaacttcacaaaaagcaagagagtaaaaattacgtgcctcctaatgtgctacagtaagatatacacatcttgccaaaaatattgaacctgaatttaagcctcaagagccaactcccagtttagagaaaattcaaggaatggaagagtaaattacatgacacaaaaaggagcaattaaatctaaaataagggtaattctacaagaggaatcacctggtttcccaaccaataaaatggcattttaagaaataaggtggaactcctaggtattgacagacttgagacatcagtcaaatgcaatgaaacagtggtttttacttagatcatgagttgaacaaacatgtaaaagaagagatacttaacaataattgggagaatggaatattgacaatattagataatattaagaaactttgttatgtgtgataatagcattgtggttatgtaaaagtgtatttgttagagataatttctgaagtctatacacaggagatgatatatctggaatgtccttttgttcatacaaaagaaaaatgaggatgaataacaagtttggcaaaatgatggtaacctaagtcttggatacatggtttttatttgttttgtttttgctattctacttttgtgtatttaaaattttccatgatgttcttttaaagatcaaattatccatgaaattatagccagtttaaaatgaattattttaaaaaaaatttctggctgggcccggtggctcatgcctgtaatcccagcactttgggaggccggtgggcagatcatgaggtcaggagttcgagaccagcctgaccatcatggtgaaacctcatctccactaaaaatacaaaaattagccaggcgtggtcacatgcgcctgtaatcccagctactcgggcagctgagacaggagaatcacttgaacccaggaggcagaggttgcagtgagccgagatcacgccattgcactccagcctgggcaacaagagcaaaactctatctcaaagaaaaaaagaaaatttctacatattaaaacttgtggatgttgccaaagctctacacattgggattggaatattaattacactataatgacgataatgtattcaggaagttaaaatgtaggtccacattttatttagttgacctctctatctctatattatagtacccatggtatgcaccttttttttttttttttttgagacggagtctcgctctttcgcccaggctggcgtgcagtggcacagtctcggctcactgcaagctctgcctcccgggttcaagccattctcctccctcagacttccgagtggctgggattacaggcgcccgccaccacaccaggttgatttttgtatttttagtagagatggggtttcaccatgttggccaagctggtctcaactcctgacctcaggtgatccacctgccttggcctcccaaggtgctgggattacaggcgtgagccaccatgcccgactctcacttcatatgtttaaagaatgagtaaaagaaagcaattactactgctaaatgtgggaaataatggactagacctgtactaatatatggtagtcactagcaacctgttgagcacttgaaattgagttattgagcactgaaatgtggctagtccaaattcaaatggtgtttttttgtaaaacacaagattctgaagacttagttattttaaaaaagttaagtatctcaatttttcatattgagtacatattgaaataatattttagatatattggttcaaataaaatacattaaaatgaataacacttttttgtttttaaaattgttataggaaaatttatatatgtagctcacgtatttctattgtcagcgctggcataaacaataaaaagtagacttgg

SEQ ID NO: 200796 - DNA, 583 bp, Homo sapiens
  Payload ID: 19628
  Gene Name: ZFP30 zinc finger protein
  ENST ID: ENST00000588979
  CDS Start-End: 414-583
tccaaaggttccggtgaggcgtcgctgggggcggggcggggctcgcagcctccgcctgtctccgagccgagaaccaaatgaaaaataaaaaggcggaatattgtttttttaaattttggaccgcagtgtccacaggggagcaggcctggattatctttaatggcactggtggcggttagttggggccagggaagcgtggagggtgggttccaatcgagtcaagaaaagcctggggtgtcctgaactctgcctgcttccccagccctgccagtttccagagaaggcgcttgagaaggagaaacgaatcgctgctgctcttctaaaagccggttccctctctggtgtctgtggaccctgcttctgaagtacatgaaccttgaggaaaattgaccagttctagcagttctaaaatcatggctcgtgatttggtgatgttcagagatgtggctgtagacttttctcaggaagaatgggaatgcctgaactcatatcagaggaatttgtacagagatgtgatattagagaactatagcaacttggtgtcactggcaggatgttctatttctaagccagatgtgatcac

SEQ ID NO: 200797 - DNA, 572 bp, Homo sapiens
  Payload ID: 19628
  Gene Name: ZFP30 zinc finger protein
  ENST ID: ENST00000587809
  CDS Start-End: 200-572
gtattctggcgccgctgactcccagggctgggctatcctctgagtcggccctgccagtttccagagaaggcgcttgagaaggagaaacgaatcgctgctgctcttctaaaagccggttccctctctggtgtctgtggaccctgcttctgaagtacatgaaccttgaggaaaattgaccagttctagcagttctaaaatcatggctcgtgatttggtgatgttcagagatgtggctgtagacttttctcaggaagaatgggaatgcctgaactcatatcagaggaatttgtacagagatgtgatattagagaactatagcaacttggtgtcactgggatgttctatttctaagccagatgtgatcaccctattggaacaagggaaagagccctggatggttgtgagggatgagaaaagaagatggactctagatttggaatccagatatgacactaaaaagttatttcaaggaaaggatatttatgaaatgaacttatctcagtggaaggtaatggaaagaattaaaagctgtggacttgaagaacaagaaagtcctcatgaggtgtgtttca

SEQ ID NO: 200798 - DNA, 557 bp, Homo sapiens
  Payload ID: 19628
  Gene Name: ZFP30 zinc finger protein
  ENST ID: ENST00000587199
  CDS Start-End: 548-557
atgtattccgggctaccagcccacaaacgcggcggaaccggttgcggggaggttgcttgaattctctcagctgcgccccctgacctagtagtcgctggcacaagctgcgcccggagacgtgggagcgttctcttgttttccgagtgcgcggactcatcgggtcacagtttatgcttttatgacgcgggaacacaacagatttgagaagcctcggattaaggaataatttatgaagctccgttgactaccgtggagagatcataatttggggttcaagattccagggacccacaaaccgtctccatggaaaaccagaaccagaagcgctgccctatcagaaggattctggaaataacgctggatgaggcagagccacagtcacagatccgatgtcagccctgccagtttccagagaaggcgcttgagaaggagaaacgaatcgctgctgctcttctaaaagccggttccctctctggtgtctgtggaccctgcttctgaagtacatgaaccttgaggaaaattgaccagttctagcagttctaaaatcatggctcgtg

SEQ ID NO: 200799 - DNA, 444 bp, Homo sapiens
  Payload ID: 19628
  Gene Name: ZFP30 zinc finger protein
  ENST ID: ENST00000589018
  CDS Start-End: 96-374
tctaaaagccggttccctctctggtgtctgtggaccctgcttctgaagtacatgaaccttgaggaaaattgaccagttctagcagttctaaaatcatggctcgtgatttggtgatgttcagagatgtggctgtagacttttctcaggaagaatgggaatgcctgaactcatatcagaggaatttgtacagagatgtgatattagagaactatagcaacttggtgtcactgggatgttctatttctaagccagatgtgatcaccctattggaacaagggaaagagccctggatggttgtgagggatgagaaaagaagatggactctaggccctaccttcaaataccatcaccttgggattcgtgtttcaacataggaattgttacgggaacacaaacattcagcccataacagattttatcaaagaagtacttcatgaaatgtaa

SEQ ID NO: 200800 - DNA, 521 bp, Homo sapiens
  Payload ID: 19628
  Gene Name: ZFP30 zinc finger protein
  ENST ID: ENST00000591444
  CDS Start-End: 515-521
ggctgggagccgggcgccactgtggccgctgcttttctgagggaaaagagcgcggagtgggccaggttttgcaggccgggccaaggtggagaaaaggttcctgtggagcctcaggccggtgtgctttttttcccgggactgagcttctgcagccctgaggcctggaggcccgggcggtagtaactgtgccggaccaggttcgtgggtgcggcctgtggtgcagttggagaccgaggccccgcgcatcctcgtccgcgcttcagccacttaggctcggccgtagcgaaaaggcccaagagggaagtcagaggtgaacgccccaggatgaaggtcccctgcaaaacgctgggacctagatttgggccctgccagtttccagagaaggcgcttgagaaggagaaacgaatcgctgctgctcttctaaaagccggttccctctctggtgtctgtggaccctgcttctgaagtacatgaaccttgaggaaaattgaccagttctagcagttctaaaatcatggctc

SEQ ID NO: 200801 - DNA, 1786 bp, Homo sapiens
  Payload ID: 19629
  Gene Name: ZFP36 ring finger protein
  ENST ID: ENST00000597629
  CDS Start-End: 75-1073
ttcctataagtagccggctctcggtgccagcctcagcctgacttcagcgctcccactctcggccgacacccctcatggccaaccgttacaccatggatctgactgccatctacgagagcctcctgtcgctgagccctgacgtgcccgtgccatccgaccatggagggactgagtccagcccaggctggggctcctcgggaccctggagcctgagcccctccgactccagcccgtctggggtcacctcccgcctgcctggccgctccaccagcctagtggagggccgcagctgtggctgggtgcccccaccccctggcttcgcaccgctggctccccgcctgggccctgagctgtcaccctcacccacttcgcccactgcaacctccaccaccccctcgcgctacaagactgagctatgtcggaccttctcagagagtgggcgctgccgctacggggccaagtgccagtttgcccatggcctgggcgagctgcgccaggccaatcgccaccccaaatacaagacggaactctgtcacaagttctacctccagggccgctgcccctacggctctcgctgccacttcatccacaaccctagcgaagacctggcggccccgggccaccctcctgtgcttcgccagagcatcagcttctccggcctgccctctggccgccggacctcaccaccaccaccaggcctggccggcccttccctgtcctccagctccttctcgccctccagctccccaccaccacctggggaccttccactgtcaccctctgccttctctgctgcccctggcacccccctggctcgaagagaccccaccccagtctgttgcccctcctgccgaagggccactcctatcagcgtctgggggcccttgggtggcctggttcggaccccctctgtacagtccctgggatccgaccctgatgaatatgccagcagcggcagcagcctggggggctctgactctcccgtcttcgaggcgggagtttttgcaccaccccagcccgtggcagccccccggcgactccccatcttcaatcgcatctctgtttctgagtgacaaagtgactgcccggtcagatcagctggatctcagcggggagccacgtctcttgcactgtggtctctgcatggaccccagggctgtggggacttgggggacagtaatcaagtaatccccttttccagaatgcattaacccactcccctgacctcacgctggggcaggtccccaagtgtgcaagctcagtattcatgatggtgggggatggagtgtcttccgaggttcttgggggaaaaaaaattgtagcatatttaagggaggcaatgaaccctctcccccacctcttccctgcccaaatctgtctcctagaatcttatgtgctgtgaataataggccttcactgcccctccagtttttatagacctgaggttccagtgtctcctggtaactggaacctctcctgagggggaatcctggtgctcaaattaccctccaaaagcaagtagccaaagccgttgccaaaccccacccataaatcaatgggccctttatttatgacgactttatttattctaatatgattttatagtatttatatatattgggtcgtctgcttcccttgtatttttcttcctttttttgtaatattgaaaacgacgatataattattataagtagactataatatatttagtaatatatattattaccttaaaagtctatttttgtgttttgggcatttttaaataaacaatctgagtgtaagctgg

SEQ ID NO: 200802 - DNA, 444 bp, Homo sapiens
  Payload ID: 19629
  Gene Name: ZFP36 ring finger protein
  ENST ID: ENST00000600033
  CDS Start-End: 1-444
tcatatccggggaggacaagagacccaaaattgggaaacagtgagcctcctgtcgctgagccctgacgtgcccgtgccatccgaccatggagggactgagtccagcccaggctggggctcctcgggaccctggagcctgagcccctccgactccagcccgtctggggtcacctcccgcctgcctggccgctccaccagcctagtggagggccgcagctgtggctgggtgcccccaccccctggcttcgcaccgctggctccccgcctgggccctgagctgtcaccctcacccacttcgcccactgcaacctccaccaccccctcgcgctacaagactgagctatgtcggaccttctcagagagtgggcgctgccgctacggggccaagtgccagtttgcccatggcctgggcgagctgcgccaggccaatcgccaccccaaata

SEQ ID NO: 200803 - DNA, 1699 bp, Homo sapiens
  Payload ID: 19629
  Gene Name: ZFP36 ring finger protein
  ENST ID: ENST00000594442
  CDS Start-End: 1-1030
agcgctcccactctcggccgacacccctcatggccaaccgttacaccatggatctgactgccatctacgaggtgacctcctgtcgctgagccctgacgtgcccgtgccatccgaccatggagggactgagtccagcccaggctggggctcctcgggaccctggagcctgagcccctccgactccagcccgtctggggtcacctcccgcctgcctggccgctccaccagcctagtggagggccgcagctgtggctgggtgcccccaccccctggcttcgcaccgctggctccccgcctgggccctgagctgtcaccctcacccacttcgcccactgcaacctccaccaccccctcgcgctacaagactgagctatgtcggaccttctcagagagtgggcgctgccgctacggggccaagtgccagtttgcccatggcctgggcgagctgcgccaggccaatcgccaccccaaatacaagacggaactctgtcacaagttctacctccagggccgctgcccctacggctctcgctgccacttcatccacaaccctagcgaagacctggcggccccgggccaccctcctgtgcttcgccagagcatcagcttctccggcctgccctctggccgccggacctcaccaccaccaccaggcctggccggcccttccctgtcctccagctccttctcgccctccagctccccaccaccacctggggaccttccactgtcaccctctgccttctctgctgcccctggcacccccctggctcgaagagaccccaccccagtctgttgcccctcctgccgaagggccactcctatcagcgtctgggggcccttgggtggcctggttcggaccccctctgtacagtccctgggatccgaccctgatgaatatgccagcagcggcagcagcctggggggctctgactctcccgtcttcgaggcgggagtttttgcaccaccccagcccgtggcagccccccggcgactccccatcttcaatcgcatctctgtttctgagtgacaaagtgactgcccggtcagatcagctggatctcagcggggagccacgtctcttgcactgtggtctctgcatggaccccagggctgtggggacttgggggacagtaatcaagtaatccccttttccagaatgcattaacccactcccctgacctcacgctggggcaggtccccaagtgtgcaagctcagtattcatgatggtgggggatggagtgtcttccgaggttcttgggggaaaaaaaattgtagcatatttaagggaggcaatgaaccctctcccccacctcttccctgcccaaatctgtctcctagaatcttatgtgctgtgaataataggccttcactgcccctccagtttttatagacctgaggttccagtgtctcctggtaactggaacctctcctgagggggaatcctggtgctcaaattaccctccaaaagcaagtagccaaagccgttgccaaaccccacccataaatcaatgggccctttatttatgacgactttatttattctaatatgattttatagtatttatatatattgggtcgtctgcttcccttgtatttttcttcctttttttgtaatattgaaaacgacgatataattattataagtagactataatatatttagtaatatatattattaccttaaaagtctatttt

SEQ ID NO: 200804 - DNA, 690 bp, Homo sapiens
  Payload ID: 19629
  Gene Name: ZFP36 ring finger protein
  ENST ID: ENST00000594045
  CDS Start-End: 31-246
cagcgctcccactctcggccgacacccctcatggccaaccgttacaccatggatctgactgccatctacgaggtgagtccccgccgcacggcatccccggtacctgcatgcctgagtccgagtccccacctctctagcgccgcaaactccagcccgggacgcttgcctcccttctccaactggggctccctagcgccgcgccctccagcctggggcccctgcctcccgctcagaccagcttggtgatttggagagcctcctgtcgctgagccctgacgtgcccgtgccatccgaccatggagggactgagtccagcccaggctggggctcctcgggaccctggagcctgagcccctccgactccagcccgtctggggtcacctcccgcctgcctggccgctccaccagcctagtggagggccgcagctgtggctgggtgcccccaccccctggcttcgcaccgctggctccccgcctgggccctgagctgtcaccctcacccacttcgcccactgcaacctccaccaccccctcgcgctacaagactgagctatgtcggaccttctcagagagtgggcgctgccgctacggggccaagtgccagtttgcccatggcctgggcgagctgcgccaggccaatcgccaccccaaatacaagacggaactctgtcacaagttctacctccaggg

SEQ ID NO: 200805 - DNA, 3026 bp, Homo sapiens
  Payload ID: 19630
  Gene Name: ZFP36 ring finger protein-like 1
  Uniprot ID: Q07352
  ENST ID: ENST00000336440
  CDS Start-End: 1799-2815
gtgtgttgggggtggtgagaatgcgctctcttcggcccgccccgtcctttccaaagaaacgtgctcataatggggtgacctaattacatcgcaatggaactcaatcttagccactccgcagcaccgggtttcataacagactcggcggcctcgagtgctgggaagaaacgtgcgagggccgaggggggcggcggagcccgcgtggaaatcggaaagaagcgcagccctgcgacttccgcctgggtcatcacgccagcagtcgggccaaggcgcagggggcgggtgggggactcgttaactttttatttgggtgggcggcatccaaacctaacagtatatattttatcattttcaagggagtcatgctccattgcgggcccttcggtttcgtggctcccatgtccccctctccacctcccgccaaaacggcgcagcgtgacaagccatatgttccactccggtgggggcgagagagaagcaacaataagttaaaagtgccgcctccctccacctctttaccttcattcttaccaaagtaaccttttttcattgttctagagtcttgaggtgtgtgtggggaggatggaggaggagggagggttgtggcgccgcccagaattcggagcgcgcgtggaaagtagtgagttgctcggtgggctttttctgggaggaaggggcattcaggaaggattagggttttcttgactaaaaagtttaaagattggatgcgtgaaaagaaacggcacgcctaggcctggtaaaacaaacaatcgtcccgggttgtggtctttttttgcggcgccccccacccgcccacacccggagagcgccggctgcaaagcgagcgcgagtgtcgacgcgtgcggcgcactaaattgtgccgcgctcgcccccgccagaccatgtcctcctggggaaaaagtttccctagtccccccagcagcgcgccccaccctacgccccgctggaaaaaaaacagcaacataaaatcctaggcttgaacattctgtgcgtcccaaatttctaatgtcctcggcctgcccggtttgccgaagggagccgagtgtcgaagagaagtcgggaaaaggtaagttgtgcagacacttggggaagtttcaaggagaccgccagctcaagatggaaaccgcggcccgggcgctaaggacgggcttcagctcccgctggcaaaaagagaaagtcgagcccgccttcctgcccaacaaaaaacaacaacatgacaacaagaaccccggagggagtggaatgagtgacgtcacagccgcgctctgaggctgacaaaggagggggcgcgcccctcccgctctgcgcccgcgcggccccggagagggggcgcctgaagcgccgggtagggaagtcagccgacttgaaacttttcctcttaaagaaaaaaaaaaaaaagttgtgcgcggctcacagtggggttttttttttccgccttcttttctcgtctcccctcccccttcttccttttgaaagtttcttctcctccccctgccccccctccccgcctgaccgcatggctgattcaactccagtgtcaatcaacttctttttcctcctcttcctcatttaaataagtttaaagctcctcctccccccggcccaccaaatctgaactttataaattgggctttgcgcgccccagcccggagtcagaaaggcgaggggcgccgggaactggcgtgtgggactccagacaggagaggctgcgccttccccgcaccgggaccttcgcgacacaccagatcctcgcccctggctcgcgcgaacgcacaggatgaccaccaccctcgtgtctgccaccatcttcgacttgagcgaagttttatgcaagggtaacaagatgctcaactatagtgctcccagtgcagggggttgcctgctggacagaaaggcagtgggcacccctgctggtgggggcttccctcggaggcactcagtcaccctgcccagctccaagttccaccagaaccagctcctcagcagcctcaagggtgagccagcccccgctctgagctcgcgagacagccgcttccgagaccgctccttctcggaagggggcgagcggctgctgcccacccagaagcagcccgggggcggccaggtcaactccagccgctacaagacggagctgtgccgcccctttgaggaaaacggtgcctgtaagtacggggacaagtgccagttcgcacacggcatccacgagctccgcagcctgacccgccaccccaagtacaagacggagctgtgccgcaccttccacaccatcggcttttgcccctacgggccccgctgccacttcatccacaacgctgaagagcgccgtgccctggccggggcccgggacctctccgctgaccgtccccgcctccagcatagctttagctttgctgggtttcccagtgccgctgccaccgccgctgccaccgggctgctggacagccccacgtccatcaccccaccccctattctgagcgccgatgacctcctgggctcacctaccctgcccgatggcaccaataacccttttgccttctccagccaggagctggcaagcctctttgcccctagcatggggctgcccgggggtggctccccgaccaccttcctcttccggcccatgtccgagtcccctcacatgtttgactctccccccagccctcaggattctctctcggaccaggagggctacctgagcagctccagcagcagccacagtggctcagactccccgaccttggacaactcaagacgcctgcccatcttcagcagactttccatctcagatgactaagccagggtctgcaggaaggaaggctgaaaaagcggacgaagattttgacttaagtgggactttgtgatttaattttttcttttttttaagtggggaggaaggggaagctagatggactaggagagacttgattttggtgctaaagttccccagttcatatgtgacatctttttaaaaaaaataacaacaaaaaaaaaatgagagaaaagct

SEQ ID NO: 200806 - DNA, 3190 bp, Homo sapiens
  Payload ID: 19630
  Gene Name: ZFP36 ring finger protein-like 1
  Uniprot ID: Q07352
  ENST ID: ENST00000439696
  CDS Start-End: 303-1319
gtttcttctcctccccctgccccccctccccgcctgaccgcatggctgattcaactccagtgtcaatcaacttctttttcctcctcttcctcatttaaataagtttaaagctcctcctccccccggcccaccaaatctgaactttataaattgggctttgcgcgccccagcccggagtcagaaaggcgaggggcgccgggaactggcgtgtgggactccagacaggagaggctgcgccttccccgcaccgggaccttcgcgacacaccagatcctcgcccctggctcgcgcgaacgcacaggatgaccaccaccctcgtgtctgccaccatcttcgacttgagcgaagttttatgcaagggtaacaagatgctcaactatagtgctcccagtgcagggggttgcctgctggacagaaaggcagtgggcacccctgctggtgggggcttccctcggaggcactcagtcaccctgcccagctccaagttccaccagaaccagctcctcagcagcctcaagggtgagccagcccccgctctgagctcgcgagacagccgcttccgagaccgctccttctcggaagggggcgagcggctgctgcccacccagaagcagcccgggggcggccaggtcaactccagccgctacaagacggagctgtgccgcccctttgaggaaaacggtgcctgtaagtacggggacaagtgccagttcgcacacggcatccacgagctccgcagcctgacccgccaccccaagtacaagacggagctgtgccgcaccttccacaccatcggcttttgcccctacgggccccgctgccacttcatccacaacgctgaagagcgccgtgccctggccggggcccgggacctctccgctgaccgtccccgcctccagcatagctttagctttgctgggtttcccagtgccgctgccaccgccgctgccaccgggctgctggacagccccacgtccatcaccccaccccctattctgagcgccgatgacctcctgggctcacctaccctgcccgatggcaccaataacccttttgccttctccagccaggagctggcaagcctctttgcccctagcatggggctgcccgggggtggctccccgaccaccttcctcttccggcccatgtccgagtcccctcacatgtttgactctccccccagccctcaggattctctctcggaccaggagggctacctgagcagctccagcagcagccacagtggctcagactccccgaccttggacaactcaagacgcctgcccatcttcagcagactttccatctcagatgactaagccagggtagggagggacctcctgcctactccagcccctaccctgcacccacatcccataccctcttctccctacccatcccattccccacaggccctacattaacaaggttaagctcaacccctttcccccagcacctcagaatgtgccctccctctccccctcataaccccacctaacataaggacaagtcaatttgtcagtagcttcttctggcttgaaaccccctccctggattttatagcccacttaccatgcataacagacaagtcccatattttgtcagtagatgcctttttttttccggcttaagccttaagtgccaaatcacaagagaaaaagcagtaacagtttacagaagcaacttagtgccttgtaatctaactttgtcactgtgactacattacctcttcagcgccagagggcacccgtgggcctcccggagcctctgcccatggcggggtggagacccggaaccagcagccccctccactggcgacacaactgcaccttccctcatttcagtctcccgcacacttattcctcctcccctcttcccggtggcacctctccacctgtacccgcccccccaccccccccacccctgccccttggaagagttgttgccagaccagggttttgggggaaacctgtcttgacattcaaaacctttttcttcccgatctgaacccctgttgactaatcttgcctgggtttgtgtaggtctgcaggaaggaaggctgaaaaagcggacgaagattttgacttaagtgggactttgtgatttaattttttcttttttttaagtggggaggaaggggaagctagatggactaggagagacttgattttggtgctaaagttccccagttcatatgtgacatctttttaaaaaaaataacaacaaaaaaaaaatgagagaaaagctaaaaaaaaaaaagtaaggggtgagcagttaatggtattcattccacatacaatatctgtgtaaaacgatttcctgtagaagtagctttaatggtttttgctctagaataccgtaggtctatccttagagcactcacgccatgctttcttccctgggttttaaacttcatataactttcagaaattggagagcaaaaattttgcttgtcactgcacatcaatataaaaaagcttatttaacttatcaaaacgtatttattgccaaactatgcttttttttgttaattttgttcatatttatcgggatgacaaatccatagaatatattcttttatgttaaattatgatcttcatattaatcttaaaattttgtgacgtgtctttttcctttttttccacagttttaatatattattcttcaacgacattttttgtaactttacacttttttggttattttattttaaaaaaatgaaaaattaatttaaaaaaatgcaaaaaactgttggattatttattttagaaattcccccctttgtgttggactgcaaattgagtttctttctctttaggcctttcacaactaggactgagaatgtatgtaaaagttctgtgacagtacagaaggaaaacaactttttatgtatagcttctaaaaggggaaaaaaaaaaaaagagaaaccctttgacttccacgtgcccatctcaagacattccactcacagatttgaggttctggattccaggtctggagttttccaatgttaatgtaaacagaactggcacacacacattaagatgaatgtaattattattcctcttgctggtcactaccgtcgctttctatttctctttctttgtgtgaatttatttaaaagaaaaaaaaactttttgtaacgactatttgcagtttaaaaatcaataaaccccgttttttcaagaaa

SEQ ID NO: 200807 - DNA, 577 bp, Homo sapiens
  Payload ID: 19630
  Gene Name: ZFP36 ring finger protein-like 1
  ENST ID: ENST00000557022
  CDS Start-End: 49-577
agtgcaggtgaggcggcggccagcctggggactgcgcggggtaacaagatgctcaactatagtgctcccagtgcagggggttgcctgctggacagaaaggcagtgggcacccctgctggtgggggcttccctcggaggcactcagtcaccctgcccagctccaagttccaccagaaccagctcctcagcagcctcaagggtgagccagcccccgctctgagctcgcgagacagccgcttccgagaccgctccttctcggaagggggcgagcggctgctgcccacccagaagcagcccgggggcggccaggtcaactccagccgctacaagacggagctgtgccgcccctttgaggaaaacggtgcctgtaagtacggggacaagtgccagttcgcacacggcatccacgagctccgcagcctgacccgccaccccaagtacaagacggagctgtgccgcaccttccacaccatcggcttttgcccctacgggccccgctgccacttcatccacaacgctgaagagcgccgtgccctggccggggcccgggacctctccgctgaccgtccccgcctcc

SEQ ID NO: 200808 - DNA, 727 bp, Homo sapiens
  Payload ID: 19630
  Gene Name: ZFP36 ring finger protein-like 1
  ENST ID: ENST00000557086
  CDS Start-End: 105-727
tttcactttcccccttgcacaaaaccgaacatcccaccccaccaccacctccaagctaaaatacctgggccgcccctccccacgaagggacgcgctccaggcgaatggggagggcccggaagtcgggcctgggacagaggagccggcccaccgcctcccggtcggaagcggcagtgcagggtaacaagatgctcaactatagtgctcccagtgcagggggttgcctgctggacagaaaggcagtgggcacccctgctggtgggggcttccctcggaggcactcagtcaccctgcccagctccaagttccaccagaaccagctcctcagcagcctcaagggtgagccagcccccgctctgagctcgcgagacagccgcttccgagaccgctccttctcggaagggggcgagcggctgctgcccacccagaagcagcccgggggcggccaggtcaactccagccgctacaagacggagctgtgccgcccctttgaggaaaacggtgcctgtaagtacggggacaagtgccagttcgcacacggcatccacgagctccgcagcctgacccgccaccccaagtacaagacggagctgtgccgcaccttccacaccatcggcttttgcccctacgggccccgctgccacttcatccacaacgctgaagagcgccgtgccctggccggggcccgggacctctccgctgaccgtccccgcctccagcatagctt

SEQ ID NO: 200809 - DNA, 3094 bp, Homo sapiens
  Payload ID: 19630
  Gene Name: ZFP36 ring finger protein-like 1
  ENST ID: ENST00000555997
  CDS Start-End: 57-266
aattgcaaaggcatcttctcagtgaagggggcggggtgggctagggctgagtggaaatggtgagagagattattgtagaaaatatctcttccgggaacttagggcaaagagttttattttcaggaatcacatccctgtctcccccaacctcagaccaggcccccaatctcctccccacaagaaaaagcaaaggcagtctgaaaacctgttgccaaaggaagggaacacttctgaaggaggaagttgagagtcttaggccagggtaacaagatgctcaactatagtgctcccagtgcagggggttgcctgctggacagaaaggcagtgggcacccctgctggtgggggcttccctcggaggcactcagtcaccctgcccagctccaagttccaccagaaccagctcctcagcagcctcaagggtgagccagcccccgctctgagctcgcgagacagccgcttccgagaccgctccttctcggaagggggcgagcggctgctgcccacccagaagcagcccgggggcggccaggtcaactccagccgctacaagacggagctgtgccgcccctttgaggaaaacggtgcctgtaagtacggggacaagtgccagttcgcacacggcatccacgagctccgcagcctgacccgccaccccaagtacaagacggagctgtgccgcaccttccacaccatcggcttttgcccctacgggccccgctgccacttcatccacaacgctgaagagcgccgtgccctggccggggcccgggacctctccgctgaccgtccccgcctccagcatagctttagctttgctgggtttcccagtgccgctgccaccgccgctgccaccgggctgctggacagccccacgtccatcaccccaccccctattctgagcgccgatgacctcctgggctcacctaccctgcccgatggcaccaataacccttttgccttctccagccaggagctggcaagcctctttgcccctagcatggggctgcccgggggtggctccccgaccaccttcctcttccggcccatgtccgagtcccctcacatgtttgactctccccccagccctcaggattctctctcggaccaggagggctacctgagcagctccagcagcagccacagtggctcagactccccgaccttggacaactcaagacgcctgcccatcttcagcagactttccatctcagatgactaagccagggtagggagggacctcctgcctactccagcccctaccctgcacccacatcccataccctcttctccctacccatcccattccccacaggccctacattaacaaggttaagctcaacccctttcccccagcacctcagaatgtgccctccctctccccctcataaccccacctaacataaggacaagtcaatttgtcagtagcttcttctggcttgaaaccccctccctggattttatagcccacttaccatgcataacagacaagtcccatattttgtcagtagatgcctttttttttccggcttaagccttaagtgccaaatcacaagagaaaaagcagtaacagtttacagaagcaacttagtgccttgtaatctaactttgtcactgtgactacattacctcttcagcgccagagggcacccgtgggcctcccggagcctctgcccatggcggggtggagacccggaaccagcagccccctccactggcgacacaactgcaccttccctcatttcagtctcccgcacacttattcctcctcccctcttcccggtggcacctctccacctgtacccgcccccccaccccccccacccctgccccttggaagagttgttgccagaccagggttttgggggaaacctgtcttgacattcaaaacctttttcttcccgatctgaacccctgttgactaatcttgcctgggtttgtgtaggtctgcaggaaggaaggctgaaaaagcggacgaagattttgacttaagtgggactttgtgatttaattttttcttttttttaagtggggaggaaggggaagctagatggactaggagagacttgattttggtgctaaagttccccagttcatatgtgacatctttttaaaaaaaataacaacaaaaaaaaaatgagagaaaagctaaaaaaaaaaaagtaaggggtgagcagttaatggtattcattccacatacaatatctgtgtaaaacgatttcctgtagaagtagctttaatggtttttgctctagaataccgtaggtctatccttagagcactcacgccatgctttcttccctgggttttaaacttcatataactttcagaaattggagagcaaaaattttgcttgtcactgcacatcaatataaaaaagcttatttaacttatcaaaacgtatttattgccaaactatgcttttttttgttaattttgttcatatttatcgggatgacaaatccatagaatatattcttttatgttaaattatgatcttcatattaatcttaaaattttgtgacgtgtctttttcctttttttccacagttttaatatattattcttcaacgacattttttgtaactttacacttttttggttattttattttaaaaaaatgaaaaattaatttaaaaaaatgcaaaaaactgttggattatttattttagaaattcccccctttgtgttggactgcaaattgagtttctttctctttaggcctttcacaactaggactgagaatgtatgtaaaagttctgtgacagtacagaaggaaaacaactttttatgtatagcttctaaaaggggaaaaaaaaaaaaagagaaaccctttgacttccacgtgcccatctcaagacattccactcacagatttgaggttctggattccaggtctggagttttccaatgttaatgtaaacagaactggcacacacacattaagatgaatgtaattattattcctcttgctggtcactaccgtcgctttctatttctctttctttgtgtgaatttatttaaaagaaaaaaaaactttttgtaacgactatttgcagtttaaaaatcaataaaccccgttttttcaagaaaca

SEQ ID NO: 200810 - DNA, 633 bp, Homo sapiens
  Payload ID: 19630
  Gene Name: ZFP36 ring finger protein-like 1
  ENST ID: ENST00000553375
  CDS Start-End: 66-633
caccaccacctccaagctaaaatacctgggccgcccctccccacgaagggacgcgctccaggcgaatggggagggcccggaagtcgggcctgggacagaggagccggcccaccgcctcccggtcggaagcggcagtgcagcccggagtcagaaaggcgaggggcgccgggaactggcgtgtgggactccagacaggagaggctgcgccttccccgcaccgggaccttcgcgacacaccagatcctcgcccctggctcgcgcgaacgcacaggatgaccaccaccctcgtgtctgccaccatcttcgacttgagcgaagttttatgcaagggtaacaagatgctcaactatagtgctcccagtgcagggggttgcctgctggacagaaaggcagtgggcacccctgctggtgggggcttccctcggaggcactcagtcaccctgcccagctccaagttccaccagaaccagctcctcagcagcctcaagggtgagccagcccccgctctgagctcgcgagacagccgcttccgagaccgctccttctcggaagggggcgagcggctgctgcccacccagaagcagcccgggggcggccaggtcaactccagccgctacaagacggagctgtgcc

SEQ ID NO: 200811 - DNA, 3696 bp, Homo sapiens
  Payload ID: 19631
  Gene Name: ZFP36 ring finger protein-like 2
  Uniprot ID: P47974
  ENST ID: ENST00000282388
  CDS Start-End: 295-1779
gccgagttccagcagtccgcgagctgccgtcggctccgcggggggggcgggccgggcaccccggggcgcggaggagcgctcctcgcttctctccttcccccctgccgcactccgccggaccctcccgccggcccgcgccgctgcactcgccctctcctctcgccccccggcaaactttcggcccctccccgcccctcgcccgttattcgtcgtggctcaagcccggccacgccgccccaagggctcctcccgacctcccggcctgccgctccggccactgcgggatccagaaacatgtcgaccacacttctgtccgccttctacgatgtcgacttcttgtgcaagacagagaaatccctggccaacctcaacctgaacaacatgctggacaagaaggcggtggggacgcctgtggccgccgcccccagctcgggcttcgcgccgggattcctccgacggcactcggccagcaacctgcatgcactcgcccaccccgcgcccagccccggcagctgctcgcccaagttcccgggcgccgctaacggcagcagctgcggcagcgcggcggccggcggtccgacctcctacggcacccttaaggagccgtcggggggcggcggcacagccctgctcaacaaggagaacaaattccgggaccgctcgtttagcgagaacggcgatcgcagccagcacctcctgcacctgcagcagcagcagaaggggggcggcggctcccagatcaactccacgcgctacaagaccgagctgtgccggcccttcgaggagagcggcacgtgcaagtacggcgaaaagtgccagttcgcgcatggcttccacgagctgcgcagcctgactcgccatccgaagtacaagaccgagctgtgccgcacctttcataccatcggcttctgcccctatgggccgcgctgccacttcatccacaacgcggacgagcggcggcccgcgccgtcggggggcgcctccggggacctgcgtgcctttggcacgcgcgatgcgttgcacctgggcttcccgcgggagccgcggcccaagttgcaccacagcctcagcttctcgggcttcccgtcgggccaccatcagcccccgggcggcctcgagtcgccgctgctgctcgacagccccacgtcgcgcacgccgccgccgccctcctgctcttcggcctcgtcctgctcctcctccgcctcctcctgttcctcggcctccgcggcctccacgccctcgggcgccccgacatgctgcgcctccgcggcggccgcggctgcggccgctctgctgtacggcaccgggggcgccgaggacctgctggcgccgggggccccgtgcgcggcctgctcgtcggcctcgtgcgccaacaacgccttcgccttcggtccggagctcagcagcctcatcacgccgctcgccatccagacccacaactttgccgccgtggccgccgccgcctactaccgcagtcagcagcagcagcagcagcagggcctggcgccccccgcgcagccgccggcgccgcccagcgcgaccctccccgccggggccgccgcacctccctcgccgcccttcagcttccagctgccgcgccgcctgtccgactcgcccgtgttcgacgcgccccccagccccccggactcgctgtcggaccgcgacagctacctaagcggctccctgagctccggcagcctcagcggctctgagtctcccagcctcgaccctggccgccgcctgccaatcttcagccgcctctccatctccgacgactgaggcaagagggcgccagtgaggaggaagggaaggcggttcagagatgttggaggacacccctcgccatctcgcccttgctgggggcacgggagtggggggggtgacatgggccctaggcagactgcaagcccgaccgagcacttggactcgaactctgtgccgggaggggcccccacccctcctttttcggtttcctcttgtctttttttttttatttttattacgaagtttcattctttttgagcaaaaaagtcgaactttttctgttgaacaaaatattcacaacagggcagttgtgatacgaatagaacaaaaaaaaaaaaaaaacacttaaactttgttaggactccgatgagtttgggacttcaggaaaaatcaacccagcaccagcagctaccaaccaccattccatctcttcacttgaacagcattagttaagtccagatgtgggaacccttctcttggaagaagttcctaattgtgtctcagaccggtgtaaacaaaccagccagccgccaccttgctaaacctataagctttttaaaatccaatatattctgccaagaatatgccttgatagttagccctcagcccataggtgttttttgttttttaacagaattatatatgtctgggggtgaaaaaacccttgcattccaaaggtccatactggttacttggtttcattgccaccacttagtggatgttcagtttagaaccattttgtctgctccctctggaagccttgcgcagagcttactttgtaattgttggagaataactgctgaatttttagctgttttgagttgattcgcaccactgcaccacaactcaatatgaaaactatttaacttatttattatcttgtgaaaagtatacaatgaaaattttgttcatactgtatttatcaagtatgatgaaaagcaatagatatatattcttttattatgttaaattatgattgccattattaatcggcaaaatgtggagtgtatgttcttttcacagtaatatatgccttttgtaacttcacttggttattttattgtaaatgagtacaaaattcttaatttaagagattgtatgtaatatttatttcattaatttctttccttgtttacgtaaattttgaaagattgcatgatttcttgacagaaatcgatcttgatgctgtggaagtagtttgaggaacatcctatgagttttcttagaatgtataaaggttgtagcccatccaacttcaaagaaaaaaatgaccacatactttgcaatcaggctgaaatgtggcatgcttttctaattccaactttataaactagcaaaaaagtgtttgcttattccaccagttctactgtgacatactcgagtataaagacatgtagcaataacggggagtggggggggagtctcacagtgcctttggaagggcccgaacttgccttaaatcttcctcaaccaaataagtattttattagtgcttgagagaatctgaatgtaggatgggttcaactgcacaaaaggaaaagatttttaccactttttttatatagatataaagtgaagcaaccgccttagtgctgaaatatgtagtacatgaatatgccttgtttaattacagaaaattccaaaacttgtactatttttttttccatgtagaaaggcaggaatgtctcctaagctttcctggacagcagatgaatgagcggtagctttagtttgtacgtaggtacagttggagcactatatgtactctctggactactttggacagaagtaggtttttgaatgtaacaagataagtcaacttgagttgtaatatattttggggaatcagctcactacaaattgtgactgtaaacattgtactgtaaatgttttgtagttttcccccaataaaatttttgggaaaaaaaggta

SEQ ID NO: 200812 - DNA, 1627 bp, Homo sapiens
  Payload ID: 19631
  Gene Name: ZFP36 ring finger protein-like 2
  ENST ID: ENST00000620081
  CDS Start-End: 65-1543
gccgccccaagggctcctcccgacctcccggcctgccgctccggccactgcgggatccagaaacatgtcgaccacacttctgtccgccttctacgatgtcgacttcttgtgcaagacagagaaatccctggccaacctcaacctgaacaacatgctggacaagaaggcggtggggacgcctgtggccgccgcccccagctcgggcttcgcgccgggattcctccgacggcactcggccagcaacctgcatgcactcgcccaccccgcgcccagccccggcagctgctcgcccaagttcccgggcgccgctaacggcagcagctgcggcagcgcggcggccggcggtccgacctcctacggcacccttaaggagccgtcggggggcggcggcacagccctgctcaacaaggagaacaaattccgggaccgctcgtttagcgagaacggcgatcgcagccagcacctcctgcacctgcagcagcagcagaaggggggcggcggctcccagatcaactccacgcgctacaagaccgagctgtgccggcccttcgaggagagcggcacgtgcaagtacggcgaaaagtgccagttcgcgcatggcttccacgagctgcgcagcctgactcgccatccgaagtacaagaccgagctgtgccgcacctttcataccatcggcttctgcccctatgggccgcgctgccacttcatccacaacgcggacgagcggcggcccgcgccgtcggggggcgcctccggggacctgcgtgcctttggcacgcgcgatgcgttgcacctgggcttcccgcgggagccgcggcccaagttgcaccacagcctcagcttctcgggcttcccgtcgggccaccatcagcccccgggcggcctcgagtcgccgctgctgctcgacagccccacgtcgcgcacgccgccgccgccctcctgctcttcggcctcgtcctgctcctcctccgcctcctcctgttcctcggcctccgcggcctccacgccctcgggcgccccgacatgctgcgcctccgcggcggccgcgctgcggctgctgtacggcaccgggggcgccgaggacctgctggcgccgggggccccgtgcgcggcctgctcgtcggcctcgtgcgccaacaacgccttcgccttcggtccggagctcagcagcctcatcacgccgctcgccatccagacccacaactttgccgccgtggccgccgccgcctactaccgcagtcagcagcagcagcagcagcagggcctggcgccccccgcgcagccgccggcgccgcccagcgcgaccctccccgccggggccgccgcacctccctcgccgcccttcagcttccagctgccgcgccgcctgtccgactcgcccgtgttcgacgcgccccccagccccccggactcgctgtcggaccgcgacagctacctaagcggctccctgagctccggcagcctcagcggctctgagtctcccagcctcgaccctggccgccgcctgccaatcttcagccgcctctccatctccgacgactgaggcaagagggcgccagtgaggaggaagggaaggcggttcagagatgttggaggacacccctcgccatctcgcccttgctggggg

SEQ ID NO: 200813 - DNA, 6266 bp, Homo sapiens
  Payload ID: 19632
  Gene Name: ZFP37 zinc finger protein
  Uniprot ID: Q9Y6Q3
  ENST ID: ENST00000374227
  CDS Start-End: 29-1921
cgctaaggccgccctccgggtagccgccatgtcggtctccagcggcgtccagattctgacaaagccagagaccgtggaccggaggagaagtgcggaaacgaccaaagaggccgggcgaccactggagatggctgtgtccgagcccgaggccagcgccgcggaatggaagcaactggatcctgctcagagcaacctgtataatgatgtgatgctggagaactactgcaaccaagcctcaatggggtgtcaagctcccaaaccagacatgatctccaagttggaaaaaggagaagcaccatggttggggaaggggaaaagacccagtcaaggttgtccaagtaaaatagcaagacccaagcaaaaagaaactgatggaaaagtccagaaagatgatgaccagcttgaaaatatccagaaatctcaaaacaaactcctcagggaagttgcagtcaagaagaaaactcaagctaagaagaatggcagtgactgtggttcactggggaaaaaaaataatttgcataaaaaacatgttccttcaaagaaaaggcttcttaaatttgagtcatgtggaaaaattttgaaacagaatttagatttacctgatcactcaagaaactgtgtaaaaaggaaatctgatgcagctaaagaacacaagaagtcattcaaccatagcttatctgatacaaggaaaggcaaaaagcaaactggaaagaaacatgagaaattatccagccatagctcatctgataagtgtaacaaaactggcaaaaaacatgacaaattatgctgtcatagttcatcccatattaaacaggacaaaattcaaactggagagaaacatgagaaatcacccagccttagctcatctactaagcatgaaaaacctcaagcttgtgtgaaaccctatgaatgtaatcaatgtggaaaggttctcagccataaacaaggactcattgaccatcagagagttcatactggggagaaaccatatgaatgtaatgaatgtgggatagcctttagccaaaagtcacaccttgttgtacatcagagaactcacaccggagaaaaaccatatgaatgtattcagtgtggcaaagcccatggtcataaacatgcactcactgaccatctaagaattcatactggagaaaagccctatgaatgtgctgaatgtgggaaaaccttcagacacagctcaaaccttattcaacatgtgagatctcacacaggtgagaagccatatgaatgtaaggaatgtgggaagtcttttaggtataactcatctcttaccgaacatgtgagaacacatacaggtgaaataccatatgaatgcaatgaatgtggaaaagcctttaagtatagctcatcccttactaaacacatgagaattcatacaggtgagaaaccctttgaatgtaatgaatgtgggaaagctttcagcaagaagtcacacctcattatacatcaaagaactcatactaaggagaaaccttataaatgtaatgagtgtggaaaagcctttggacatagctcatctcttacttaccatatgagaactcatacaggtgaaagtccctttgaatgtaatcaatgtgggaaaggctttaaacaaattgaaggccttactcaacatcagagagttcatactggagagaaaccgtatgagtgtaatgaatgtgggaaagcctttagccaaaagtctcacctcattgtacatcagagaactcatactggggagaaaccttatgaatgtaacgaatgtgaaaaagcctttaatgcaaaatcacagcttgttatacatcagcgatcccacactggagaaaaaccctatgaatgtaatgaatgtgggaaaactttcaaacaaaatgcatccctaaccaaacatgtgaaaactcattcagaagataaatctcatgagtgaagttaatgtgggaaatttgttaactaaatttaaggttttgttgaaccttggaaatatgctgattttaaagagtgttagaaagcctttagcaagatgtcacaccttgttgtacatgagaaactttgaaaatggatcttcatatagaatcagtggatggaaacaagggtttaaacttgatacaaaaccttttataaaaaatattgttttaactactcaattattataaatgatctacatgttcagattgaaattgaaagctttaaaaattgtgaattatttgaatattcaaagcaatggagaaacaagttatatatgctgacagttcctgtgtttcttcttgttttgtacttaagcaccatatattagagttgaatttgcatatctgtttattgccttatgtaaatgagtgtggccatctgtataagcctctttgacattttcacccagctctttcttaatgtctgtgttggcttctgcatcagcagaaatctttttaaaagggttgttatatatgtaaaaaatgttaacaggaaaatgagagaaaataaagcagctgaggatacaaatgtgctggtagggagcgatattcaagatatattgtgaagtgtgaaaaagtaggttgctgaaccatgtatatagtatgttcccctttgtgtacaaaagggtatgtttgtttaacctctgtctcttatctctgtatgtgtatgtatctttgtatgcatatatacatgtatctgtatgtgaatagactttgaaaaaatacagaataaacttcatggtggttgccattgggcagaggagtataggactggggtctaggataggagcaagacttccttgtatatttggatttttaaatcatgcacatgtattatttttataattaaaatattttaatatgcataaatcaacattatttaaggttgtcactgagcccctccacaacatgtgagatcaacatgtgagatctcagattttgacagagttaaaatctttgtatgcttattcatgaatgatgatgaatctaaagtatatagtatgaaacttgatgttgaattcataaagactttttctatcacacacaagttctttcattaacatagtgaattataacagcactgtttctacatttgccattttttgatgttgaattgtgattgcaggtgatgatgaattgtgattgcaggtgaatgaaagtgattttatgaataatcaccctgttttatctcatattcaaagaactaacacacaaacacctcaatcagggaattcgaatgaaacaaatgtcacccctccctgttctcgctcaatattgggcattatttactggatcactgtactctttctgagtgaacccagagttggcctcagaatcattgtgcagcgtgcattccagaaggtactatgcatcaacttggactgtcacaggagacctatttgccattgcacacctggattttttttactcttgagccatagattaaaaatacttctggctgggcatggtgggtgcctgtaatctccagcactgtgggaggccaaggtgggtggatcacttgaggccaggagtttgagatcagactagccaacacaatgaaaccccatctctactaaaaatacaaaaaattatctgggcatgctgtaatccctgtaatcccagccactcaggaggctgaggcaagagagttgcttgcacccaggagatggaggttacagtgcactccagcctgggcagcagagtgaggctctgtctcaaaaaaaagaaatacaaaaaatgcacaaaacttctgaactattttgaaatctaagttgttacactaaaagcagagacataagtacagaaatggttttcaaaaacatcatacctttattttaatacaatattaatttacataatataaaatattataatttggcatgttatcttttatattttttaaagcacaatccctacattatttcatttattcctcagaactaacatatgagcagtaatcgggacttgtctagtcatgttcaatcctgttgagtaaatatttcacctagacagtaatttagcataataatgggccccaaagaaatatgtgcttaaatgccatctttacaaatatttatcattcaagctccttccttcctgacctcatttcagagaattataatgtgttaatataatatattgagaatggaatatgtgttcgtgtatgtgcatgtgcacacatgcatacacatgcacgggttgaaagctcaactcatgaatatatcccctcatttccaagtaacttatttatcacatgggaagaaaatgcaatatgaaagccatttctaccagtaatttcttaacaagtggaaatatagcactatgcacagaatgagtcatcactgtctagagctgtagaaagcctgcactttttagatggatgaaacagttgcaggttatggctatgttgaatttccacatgtcttggggaacccatagtattgccacatctgagacagtgagaattataggtatgcctgaatgatataaatgaatgctgaaagccactttgtgcagtaataaaatgaattaaaagttagcattgatgaatgaggaaaggatgtctaaatacaattggaggttagtataggaaaacagacacacagtggtaagtctgaatcgatacgtaaactctagtgtgcataaaaattgcctgaatgatttgttaaaacacagacttgagaatgcaaattcttgggcctcgtcacagacatattggatcagaaaccctgtgggtgggccttgagaatttgcattttaataagtttccagtggattcctgtgctgctggtctggggaccaccctttgagaaccactaatctaaatcatggtgtaagtaagtttaaaaaattatttttaaactgtttttcagatcctctttaagaaaatgaaggggcataaaagtaaattattattaacagttttgaaacatttatttattcaagtgatatgatcatctaagtgcctgagatacagcagtctacaaaacaaaaagaaagcaaacaaacaaaacaaaaccctgttctcatagaccttaattctagaggaggacataggtaataaataaacaactacaatataaagtataacagatcactggatggcaaaaagcaaaccaaggaaggggagggaagtgttggggaatgtaattttaaatatagtgatgggaagcaggcagtaagcttacttagatggtgacaaaagcaaagacccagagagggtaaaagagcaaaccatgtatatatatatgacggaagagcattccagggatatatcttttagaatctgagggtgtgggaagagaaagatgttaaactcctctgacataaagaagaggaaaaaaagtggaaacatttttttaaatcaagatttaaaaaaaaattacatttgtgataggtagaaaacaatctgtcacacactgcttttggtagttgtgtaagtttgtacaacctaccaaaatgtaaatctgacagtatacatcaaagccttatgatggtcggcagtccatcgaggaatctattctatgttgtacaatcaaggcgtactatgatatttattgcagaacagagagaaatagcatatacattgctagttaattgattaaataaagcatgattccttcaaaaattgagtaatatgacattaaaaaccacaatttcaaactatatttaagaagatacaaataattctttattattacttttactctcaggaatgtgtttgagtgatgcatctccaggcatcaagtgagtaatccaatattgaagaaaattaaaattttccacaaagtcccccttctagaagaatgtgctcatatcttttgaccagaaatgagtcacatgaccacacctagtttcaggtggcttgaggaaattgaatctttctttttttgttttattttgttttgagacaaagtctctgtcacccagactggagtgtgcagtagtgcaatcttggctcattacaatctctacctcccaggcttaagcactcctcccaccttagccttcctagtagctgggactacaggtgcatgccaccaagctaattttttttttttttttttggtggaaacagagttttgccatgttactcaggctggtctcaaacttctgggctcaagtgatctgcccaccttggcctcccaaagtgctgtgattaaaagtgtgagctaccacatttggccaaatctttaatttcttaaccttcatagtaaaggaaataaagagacatgggcattgaaaaatggatgttgtacaaaccaacctgtagcatctaaaatactaaataaaaaacagtttacaaaa

SEQ ID NO: 200814 - DNA, 2451 bp, Homo sapiens
  Payload ID: 19632
  Gene Name: ZFP37 zinc finger protein
  Uniprot ID: Q9Y6Q3
  ENST ID: ENST00000555206
  CDS Start-End: 72-1967
gtgcgctattaccgaagggcgccgccatcgcggctgccggacccgctaaggccgccctccgggtagccgccatgtcggtctccagcggcgtccagattctgacaaagccagagaccgtggaccggaggagaagtgcggaaacgaccaaagaggccgggcgaccactggagatggctgtgtccgagcccgaggccagcgccgcgaaggaatggaagcaactggatcctgctcagagcaacctgtataatgatgtgatgctggagaactactgcaaccaagcctcaatggggtgtcaagctcccaaaccagacatgatctccaagttggaaaaaggagaagcaccatggttggggaaggggaaaagacccagtcaaggttgtccaagtaaaatagcaagacccaagcaaaaagaaactgatggaaaagtccagaaagatgatgaccagcttgaaaatatccagaaatctcaaaacaaactcctcagggaagttgcagtcaagaagaaaactcaagctaagaagaatggcagtgactgtggttcactggggaaaaaaaataatttgcataaaaaacatgttccttcaaagaaaaggcttcttaaatttgagtcatgtggaaaaattttgaaacagaatttagatttacctgatcactcaagaaactgtgtaaaaaggaaatctgatgcagctaaagaacacaagaagtcattcaaccatagcttatctgatacaaggaaaggcaaaaagcaaactggaaagaaacatgagaaattatccagccatagctcatctgataagtgtaacaaaactggcaaaaaacatgacaaattatgctgtcatagttcatcccatattaaacaggacaaaattcaaactggagagaaacatgagaaatcacccagccttagctcatctactaagcatgaaaaacctcaagcttgtgtgaaaccctatgaatgtaatcaatgtggaaaggttctcagccataaacaaggactcattgaccatcagagagttcatactggggagaaaccatatgaatgtaatgaatgtgggatagcctttagccaaaagtcacaccttgttgtacatcagagaactcacaccggagaaaaaccatatgaatgtattcagtgtggcaaagcccatggtcataaacatgcactcactgaccatctaagaattcatactggagaaaagccctatgaatgtgctgaatgtgggaaaaccttcagacacagctcaaaccttattcaacatgtgagatctcacacaggtgagaagccatatgaatgtaaggaatgtgggaagtcttttaggtataactcatctcttaccgaacatgtgagaacacatacaggtgaaataccatatgaatgcaatgaatgtggaaaagcctttaagtatagctcatcccttactaaacacatgagaattcatacaggtgagaaaccctttgaatgtaatgaatgtgggaaagctttcagcaagaagtcacacctcattatacatcaaagaactcatactaaggagaaaccttataaatgtaatgagtgtggaaaagcctttggacatagctcatctcttacttaccatatgagaactcatacaggtgaaagtccctttgaatgtaatcaatgtgggaaaggctttaaacaaattgaaggccttactcaacatcagagagttcatactggagagaaaccgtatgagtgtaatgaatgtgggaaagcctttagccaaaagtctcacctcattgtacatcagagaactcatactggggagaaaccttatgaatgtaacgaatgtgaaaaagcctttaatgcaaaatcacagcttgttatacatcagcgatcccacactggagaaaaaccctatgaatgtaatgaatgtgggaaaactttcaaacaaaatgcatccctaaccaaacatgtgaaaactcattcagaagataaatctcatgagtgaagttaatgtgggaaatttgttaactaaatttaaggttttgttgaaccttggaaatatgctgattttaaagagtgttagaaagcctttagcaagatgtcacaccttgttgtacatgagaaactttgaaaatggatcttcatatagaatcagtggatggaaacaagggtttaaacttgatacaaaaccttttataaaaaatattgttttaactactcaattattataaatgatctacatgttcagattgaaattgaaagctttaaaaattgtgaattatttgaatattcaaagcaatggagaaacaagttatatatgctgacagttcctgtgtttcttcttgttttgtacttaagcaccatatattagagttgaatttgcatatctgtttattgccttatgtaaatgagtgtggccatctgtataagcctctttgacattttcacccagctctttcttaatgtctgtgttggcttctgcatcagca

SEQ ID NO: 200815 - DNA, 1969 bp, Homo sapiens
  Payload ID: 19632
  Gene Name: ZFP37 zinc finger protein
  Uniprot ID: Q9Y6Q3
  ENST ID: ENST00000553380
  CDS Start-End: 1-1938
atgtcggtctccagcggcgtccagattctgacaaagccagagaccgtggaccggaggagaagtgcggaaacgaccaaagaggccgggcgaccactggagatggctgtgtccgagcccgaggccagcgccgcggtatcagtaacattcaaacatgtgactatggcctttacccagaaggaatggaagcaactggatcctgctcagagcaacctgtataatgatgtgatgctggagaactactgcaaccaagcctcaatggggtgtcaagctcccaaaccagacatgatctccaagttggaaaaaggagaagcaccatggttggggaaggggaaaagacccagtcaaggttgtccaagtaaaatagcaagacccaagcaaaaagaaactgatggaaaagtccagaaagatgatgaccagcttgaaaatatccagaaatctcaaaacaaactcctcagggaagttgcagtcaagaagaaaactcaagctaagaagaatggcagtgactgtggttcactggggaaaaaaaataatttgcataaaaaacatgttccttcaaagaaaaggcttcttaaatttgagtcatgtggaaaaattttgaaacagaatttagatttacctgatcactcaagaaactgtgtaaaaaggaaatctgatgcagctaaagaacacaagaagtcattcaaccatagcttatctgatacaaggaaaggcaaaaagcaaactggaaagaaacatgagaaattatccagccatagctcatctgataagtgtaacaaaactggcaaaaaacatgacaaattatgctgtcatagttcatcccatattaaacaggacaaaattcaaactggagagaaacatgagaaatcacccagccttagctcatctactaagcatgaaaaacctcaagcttgtgtgaaaccctatgaatgtaatcaatgtggaaaggttctcagccataaacaaggactcattgaccatcagagagttcatactggggagaaaccatatgaatgtaatgaatgtgggatagcctttagccaaaagtcacaccttgttgtacatcagagaactcacaccggagaaaaaccatatgaatgtattcagtgtggcaaagcccatggtcataaacatgcactcactgaccatctaagaattcatactggagaaaagccctatgaatgtgctgaatgtgggaaaaccttcagacacagctcaaaccttattcaacatgtgagatctcacacaggtgagaagccatatgaatgtaaggaatgtgggaagtcttttaggtataactcatctcttaccgaacatgtgagaacacatacaggtgaaataccatatgaatgcaatgaatgtggaaaagcctttaagtatagctcatcccttactaaacacatgagaattcatacaggtgagaaaccctttgaatgtaatgaatgtgggaaagctttcagcaagaagtcacacctcattatacatcaaagaactcatactaaggagaaaccttataaatgtaatgagtgtggaaaagcctttggacatagctcatctcttacttaccatatgagaactcatacaggtgaaagtccctttgaatgtaatcaatgtgggaaaggctttaaacaaattgaaggccttactcaacatcagagagttcatactggagagaaaccgtatgagtgtaatgaatgtgggaaagcctttagccaaaagtctcacctcattgtacatcagagaactcatactggggagaaaccttatgaatgtaacgaatgtgaaaaagcctttaatgcaaaatcacagcttgttatacatcagcgatcccacactggagaaaaaccctatgaatgtaatgaatgtgggaaaactttcaaacaaaatgcatccctaaccaaacatgtgaaaactcattcagaagataaatctcatgagtgaagttaatgtgggaaatttgttaactaaattt

SEQ ID NO: 200816 - DNA, 4797 bp, Homo sapiens
  Payload ID: 19633
  Gene Name: ZFP41 zinc finger protein
  ENST ID: ENST00000330701
  CDS Start-End: 367-966
agcgggcgggcatttcctgccggtgcctagggccgacggggacgctggcactggtggggagctgttggggggtcccgcatctagggctctcctttcctgcctccggcccccgcgaggggcgcgcgcctctccccgccctccagcagtcctggtagggcccgggcgcgtccgcgctctgcagcgggaggtcctcgtcgcctctcgtctccagccagcaccaagaggatggtggcccttggcctcctggtgcagagcatcagtcccacgctgggagtgtggagaggtgcgtgggaagcaagccattgaggaagtggggccaacagagaggtcagcagccccttagccctcacgcttccaaggaacagaatgatggagaagcctgcaggcagaaaaaagaagacgccgaccccaagggaggaggcagacgtgcagaagagtgcgctcagagaggagaaggtgtccggggacagaaagccacctgagaggcccactgtgcccaggaagccccgcacagagccctgcctgagtcctgaagacgaagagcacgtctttgatgccttcgacgcttcatttaaagatgactttgagggggttcccgtgttcattccttttcagaggaagaaaccctatgagtgcagtgagtgtgggcggatctttaagcacaagacagaccacattcgccatcagagggtccacactggagagaagcccttcaagtgtgcgcagtgcgggaaggccttccggcacagctctgacgtcaccaaacaccagaggactcacacgggagagaagcccttcaaatgcggggagtgcgggaaagcctttaactgcggctccaatctcctgaaacatcagaagacgcacaccggggagaagccctacgaatgcacgcactgtgggaaagcctttgcctacagctcctgtctcatccgccatcagaaacgccaccctcggaagaagccctgagccggggccatctgcggactcgggccctgcggtgcgagcctcgccggacacctgctccgtggctccctcgtgtcccgcgtctgatgggggcgcagggccgtgcgcactgtgttccgtgccctggggacccccggaaaagcagcccagtcagatgtgggaacgtgccagcgagggagagacctttccactgcagagagtctctctgatcaagacaccgcagtgatggagaagccaccagaggctccttgcagccacagagcattttccaagttcccgatggcgaacggggctcagcaccagagaccagggagtattcactgccatccattggacgtgtttgggtcacctcagagcacccagcaggagaggctcctggtgtagtgggcagcccagcacttcccgctgctgcctgcctgtgatgtccactctgcttaagcctttcatctgccgctgaaggccccagtctggactctctgccctctgggtccccgagctctgcagcgagccctgggaccactcatccctgcccagccagcttcagtgcccggggccgcttgtccctgcccggcctctgtgccccaactgtgcttggtcctctggcttctctcctcctgctggagtgccagtccctgagctcagacccccgtccccggaactgggccacaccacgtgccctcttggcccagccttcctcccagagaggcggcctgacttacctggatggacttgggacaaaggttcctcaggaccttggacaccaccacctgctgagcttcccgtcccagccatgcagtggggcccctggggtgccctcggcagcttcggtccagcctgcatctgcccctcggccttccgacgtgggcggtgggccccagccccacagaccagcccagcattcaggctggtagagcagatcacccccaaagcaagaagttccagatgaaatatgcataagaagcagcctcaaaactaacaaaaaagattcgcacattcctcagttagaggaggagcagagatgaagaaaaggagaagaaaagcgctggaaagagaagaaaaggaacctccttctgtgcagcaggctcctggcccagggagtgcggtgtgcggcagagtgcgtgcagggaagcagcctctgaaatcgtgcagggaagcaccctgtgaaatcgtgcagggaagcaccctgtgaaatcgtgcagggaagcaccctgtgaagtcgtgcagggaagcaccctctgaaatcgtgcagggaagcaccctctgaaatcgtgcagggaagcaccctgtgaagtcgtgcagggaagcaccttctgaaatcgtgcagggaagcaccctctgaaatcgtgcagggaagcaccctctgaaatgcctagaaatagctgccgggctttcacttggttcccaaatttcttcaaaggtcaaaaccatcacagtgggcaactttacaccccagtgttcactgtcctcaggccactgcagagccatcctagtggggcagtgggcgcggggcgggggctcctgactccggtgaggtcaccctggaggggagtcccaggaatcagcctgatgttcagaatgccttcctggcatctcagaagtgtactgggggagacgtgaggacctttcagccaagtgtcagcgttcttattgcaggagaacattaaagccacaacccagaaacttctcaggagcatggcgcacccacaccagccccgggctccgcctggacagcacctcctgggccgccctgaccagcagacaccatccttccagcctctcttggccacccggaccagcgggcaccaccctcccagcctcacgcggccaccctgaccagcaggcaccatccttccagccttgctcagtcaccctgacccagagggctgccctgaccagcgggcaccatcctcccagccccactcagctgccctgaccagcgggcaccatcctcccagcctcactcggccagccgagctctgtaggcctcagagtgcagagaacctcaaatgttgtgactttgctctgctgcagggacctgccatggagtgtcccttgtgcgagcattttgagagctatgccagcatccatccctgcaggtcccatccctgagccatttctcaggagagcaggaagggagcagggagaggggtgctcccagccagccccggaaccagaggtctggggacgcagccgaccagccctccttgtctgggcctctgtttcctcttcgacacagggaagcagggaggggccgatcagcgacttaggcctgttggctgtggtggggtccacctgcgtttctggggagcccacggaccctggggtgtacctgggtttcattcccagtgacctctcctattggtccccatttggggcgctgagatgtgatcgtttctttcctgagaatgagctgaggtaaaaacatgctggggaggaagatgggccctgggggcagcgagctgcgcctctgcaccgggagaaaggccgtgtccccagagctgaggcggtggtgggcagggctcctgagaagccggggcagggcagggtgtctctgaggtcaatgaggaacagctgaggtccagggacgcaggaaggatggggtgaactccgggatggggccggcagggagcctcacgcttacagagcctggtgttggcactctcctggcttcctccgcaaacctagccacgtggtcagggagcccgggcctagcagacggcccccaccttgacagaatccccagggtcgtgcgtggcggtgggggcgacttcacagccgagaccgggcctaacgctgctgtctcgcagtcacccctgcaggccgctcagggcagggctctggcctgacgggggttcctggacacgcctctgagccggcagcccctacccgcacccgtgcaccttccacgcccgtctccagcagcccctgcccccacccgcacccctgcacctgccacgcctgtctccggcagcccctgcccgcacccgcacccctgcacctgccacgcccgtctccggcagcacctgccacgcccgtctccggcagcacctgccacgcccgtctccggcagcacctgccacgcccgtctccggcagcccctgcccgcacccgcacccctgcacctgccacgcccgtctccggcagcccctgcctgcacccgcacccctcacggctgtctccggcagcccctgcccgcgcccgcacctctgcacctcccacgcccctctccggcagcccctgcccacacccgcacccctgcacctcccacgcccgtcttgccctggggcccaggtgcaggtctgtgaggagggcagccccgtgctcccgtggccaccgctcagccaaatggattcagcgagggtttttagtgtttgtgcctgtgtccccgtgtgcctgtttcctggtgaggctggatgcctggcatgtctgaacactcacattccccaggcatgcatgtgcagccgccgccgccacccatgtactgtggcgctgacccctcctgtaacagctgtggtcttggcctctcgtgttggtggcagatgtcccatttcccagttactttctgttgtccaaaagtttaactgtcctgccagccaaagctgctgagcattactctgatagaccatcagtccttggtaagtgtcctgtgcatctgggataagcatccgtttgttttcagctgcgctttctgtgacttgctctgcgtgagtcctcggtccacgtgggccgttgcgctggttcccagcctgcccgacacactcactgcgacgcctcccttgcctactgcttgctggcttctgtgttctctgcagtaaacattgatttctgactcga

SEQ ID NO: 200817 - DNA, 3284 bp, Homo sapiens
  Payload ID: 19633
  Gene Name: ZFP41 zinc finger protein
  ENST ID: ENST00000520584
  CDS Start-End: 1081-1680
gggggcggagtcggctggggatggagccgctcgggccgagccctccaccgcccaccatcaccgagtccggcccaggctcctagcgcggccgccggaaggggcgggtcagcgggcgggcatttcctgccggtgcctagggccgacggggacgctggcactggtggggagctgttggggggtcccgcatctagggctctcctttcctgcctccggcccccgcgaggggcgcgcgcctctccccgccctccagcagtcctggtagggcccgggcgcgtccgcgctctgcagcgggaggtcctcgtcgcctctcgtctccagccaggtactcactgggctcctgcctgccgcctccggcccaggacgcgcagcgtcggtatgggccccgccgcctccccgcaccccggcgctccagggatgtggcaagacccggctttgagcacctcccgggcgccggccccgaggccgacctagctctgcacgtgggccgcggggctctgccgttgaaaggagagcctctaactaggagcacgcacgggaccctggcgggcccctccgcctggctcagatgcctggcatctcaggccttggcacagctagcaggcccctggcaggccgtggacccagcaggctgttttagtgcagattgcccctgaatctcaagcccactaatgttccagtctctccatgagacccagatccctgaaagtagtggagggaggcgccagggtgagtgaggttttctaggcagcccttaccgcccacggatacccagagcttcatattacaagtgaagggtcctccgcccagagaggcgacggagctacgctggagttgcacgacagaaccagaaccccagtctttaggggtgtggcaagcgtgggttgcgctgtttgtaactagctaatcactcctgtctacaggcctgtgagcaccaagaggatggtggcccttggcctcctggtgcagagcatcagtcccacgctgggagtgtggagaggtgcgtgggaagcaagccattgaggaagtggggccaacagagaggtcagcagccccttagccctcacgcttccaaggaacagaatgatggagaagcctgcaggcagaaaaaagaagacgccgaccccaagggaggaggcagacgtgcagaagagtgcgctcagagaggagaaggtgtccggggacagaaagccacctgagaggcccactgtgcccaggaagccccgcacagagccctgcctgagtcctgaagacgaagagcacgtctttgatgccttcgacgcttcatttaaagatgactttgagggggttcccgtgttcattccttttcagaggaagaaaccctatgagtgcagtgagtgtgggcggatctttaagcacaagacagaccacattcgccatcagagggtccacactggagagaagcccttcaagtgtgcgcagtgcgggaaggccttccggcacagctctgacgtcaccaaacaccagaggactcacacgggagagaagcccttcaaatgcggggagtgcgggaaagcctttaactgcggctccaatctcctgaaacatcagaagacgcacaccggggagaagccctacgaatgcacgcactgtgggaaagcctttgcctacagctcctgtctcatccgccatcagaaacgccaccctcggaagaagccctgagccggggccatctgcggactcgggccctgcggtgcgagcctcgccggacacctgctccgtggctccctcgtgtcccgcgtctgatgggggcgcagggccgtgcgcactgtgttccgtgccctggggacccccggaaaagcagcccagtcagatgtgggaacgtgccagcgagggagagacctttccactgcagagagtctctctgatcaagacaccgcagtgatggagaagccaccagaggctccttgcagccacagagcattttccaagttcccgatggcgaacggggctcagcaccagagaccagggagtattcactgccatccattggacgtgtttgggtcacctcagagcacccagcaggagaggctcctggtgtagtgggcagcccagcacttcccgctgctgcctgcctgtgatgtccactctgcttaagcctttcatctgccgctgaaggccccagtctggactctctgccctctgggtccccgagctctgcagcgagccctgggaccactcatccctgcccagccagcttcagtgcccggggccgcttgtccctgcccggcctctgtgccccaactgtgcttggtcctctggcttctctcctcctgctggagtgccagtccctgagctcagacccccgtccccggaactgggccacaccacgtgccctcttggcccagccttcctcccagagaggcggcctgacttacctggatggacttgggacaaaggttcctcaggaccttggacaccaccacctgctgagcttcccgtcccagccatgcagtggggcccctggggtgccctcggcagcttcggtccagcctgcatctgcccctcggccttccgacgtgggcggtgggccccagccccacagaccagcccagcattcagggcaggacatcctggtgggccccctggcccggatctccttatgcagccgttcccggtatgtcctgaggctggacggcctcagccagctgtcaccaggagaggaatactcgcactcccagaaatggacatatcaggaggtgaattgttcagaagcaggcatcagagcacgtgtgacgtgtgatcctggatcggaagagttgctttgaaggactttgctgggacgtttggccgacctggattgtagactccaggcacagtcaactgcaggcacagtcaactgcaggcacagtcagcaccagcgcagcagggacggggcggtcctcactgacgtcctcctactgcagatgcacactgaggctcttggccgcagagcgtggcgtctgcagttcatgccaacggtgtgtgcacgtccccggagagtgacagaggagagtggctaaatgtcagtcatggggaatctagagcacaggtgggcacgcttctccgatgaagggtcaggcaggaaatattcttggcactgcagccatacagcctgtgcctcagcacccacgggggaccacagaaggttggggaccactgctttaaacaactagctctcccgtgaagagcaggtccccaccctgctgtgtagggcaacagcagatgtcaatggcatatgaatgaacgagcgtggctgtgccaataaaactttatttacaaacgta

SEQ ID NO: 200818 - DNA, 2651 bp, Homo sapiens
  Payload ID: 19634
  Gene Name: ZFP42 zinc finger protein
  Uniprot ID: Q96MM3
  ENST ID: ENST00000326866
  CDS Start-End: 409-1341
agtttctcctttgttttacgtttgggaggaggtggcattggaaatagcagagtgcttcgcggtaacaggggttggagtgcaatggtgtgatctcagctcactgcaacccctgcctcccaggctccagcgatcctcccacctcagcctcctgaatagctgaccaccagcacactaggcaaacccaccccactcacggcctcccttgggaattcagacctaaccatcgctgagctgaaacaaatgtactgaggctggagcctgtgtgaacagaacagaagaggccttcactctagtagtgctcacagtccagcaggtgtttgctgaagacagcttactcagatcactactgcctggaggtggttgatatatcctggtgtaaaccttcaagaagggcacaggcaggaaaacatgagccagcaactgaagaaacgggcaaagacaagacaccagaaaggcctgggtggaagagcccccagtggggctaagcccaggcaaggcaagtcaagccaagacctgcaggcggaaatagaacctgtcagcgcggtgtgggccttatgtgatggctatgtgtgctatgagcctggccctcaggctctcggaggggatgatttctcagactgttacatagaatgcgtcataaggggtgagttttctcaacccatcctggaagaggactcactttttgagtccttggaatacctaaagaaaggatcagaacaacagctttctcaaaaggttttcgaagcaagctcccttgaatgttctttggaatacatgaaaaaaggggtaaagaaagagcttccacaaaagatagttggagagaattcgcttgagtattctgagtacatgacaggcaagaagcttccgcctggaggaatacctggcattgacctatcagatcctaaacagctcgcagaatttgctagaaagaagccccccataaataaagaatatgacagtctgagcgcaatcgcttgtcctcagagtggatgcactaggaagttgaggaatagagctgccctgagaaagcatctcctcattcatggtccccgagaccacgtctgtgcggaatgtgggaaagcgttcgttgagagctcaaaactaaagagacatttcctggttcatactggagagaagccgtttcggtgcacttttgaagggtgcggaaagcgcttctctctggactttaatttgcgtacgcacgtgcgcatccacacgggggagaaacgtttcgtgtgtccctttcaaggctgcaacaggaggtttattcagtcaaataacctgaaagcccacatcctaacgcatgcaaatacgaacaagaatgaacaagagggaaagtagtcctccaacaggatgaagcagattaacagaagagtgatcagtgacaaacatgcctcattgattattgtttctaggaaggaatttctaaatcaatattgcaaccccaaaagcggttataatttggtgttactaagatgctcctacactttgtgataccgttttaaggacatggtgcatttttttttcttttatttgttttatttagaactttttttatttgttttatttagaactttgtgtgttcttaaagtgtgcttccaacaggaaggtcagtgataaattttcaaaagcataaccttcaatatattatctgttggattattggatataagacttattttcatgtactataaatatgaaaataactttgatttttaattgtgtagtttccatttcttagcttttgccttttaaatttatacttcagccaggcatagtgactgatgcctgtaatcccaacactttgttgggaggccaaagcaggaggatagcttgaggccaggagttccagaccagcctgggcaacatagtgagatcctgtctctacaaaaaaatttgtttttatttgtatttatatatttttatttttgtttttgttggtaggcgtctcgctctgtcacccaggctggagtctagtgtcgtgatcttggctcactgcaacctccacctcccgggttcaagtgattctctggcctcagcctcccaagtagctgggactacaggtgtgtgtcaccacgcccggctaatttttgtatttttagtagagatggggtttcaccatgttggccaggctagtctcaaactcctgacctccagtgatctgcccacctcggcctcccaaagtgctgggattacaggtgtgagccactgtgcctggccccccacaacatgtttaaacttagctaggcctggttgcatacgcctgtgttcccagctactcaggaggctgaagcaggaggatagcttgagcccaggagtttgaggctacagtgagctgtgattgcaccactgtactccagactggataacagcaagagcccatcttttaaaaaaagtaaaaattaaaaatatacttcatggttcatgtcatagccctagagaatgaaaaatttgcagtagatagtcaataaatgaatcagtagttaaatattccttaaagtcaactgtatttcattgtgatttttgttttctttttatcattgtatcaaactatatggaaatcatatggttagatgtgattatttgataatgttagtccatttgaatccattttagatatttcacaattaaagaatatgaaacttcagaaa

SEQ ID NO: 200819 - DNA, 2480 bp, Homo sapiens
  Payload ID: 19634
  Gene Name: ZFP42 zinc finger protein
  Uniprot ID: Q96MM3
  ENST ID: ENST00000509524
  CDS Start-End: 243-1175
agtttctcctttgttttacgtttgggaggaggtggcattggaaatagcagagtgcttcgcggtaacagggacaaatgtactgaggctggagcctgtgtgaacagaacagaagaggccttcactctagtagtgctcacagtccagcaggtgtttgctgaagacagcttactcagatcactactgcctggaggtggttgatatatcctggtgtaaaccttcaagaagggcacaggcaggaaaacatgagccagcaactgaagaaacgggcaaagacaagacaccagaaaggcctgggtggaagagcccccagtggggctaagcccaggcaaggcaagtcaagccaagacctgcaggcggaaatagaacctgtcagcgcggtgtgggccttatgtgatggctatgtgtgctatgagcctggccctcaggctctcggaggggatgatttctcagactgttacatagaatgcgtcataaggggtgagttttctcaacccatcctggaagaggactcactttttgagtccttggaatacctaaagaaaggatcagaacaacagctttctcaaaaggttttcgaagcaagctcccttgaatgttctttggaatacatgaaaaaaggggtaaagaaagagcttccacaaaagatagttggagagaattcgcttgagtattctgagtacatgacaggcaagaagcttccgcctggaggaatacctggcattgacctatcagatcctaaacagctcgcagaatttgctagaaagaagccccccataaataaagaatatgacagtctgagcgcaatcgcttgtcctcagagtggatgcactaggaagttgaggaatagagctgccctgagaaagcatctcctcattcatggtccccgagaccacgtctgtgcggaatgtgggaaagcgttcgttgagagctcaaaactaaagagacatttcctggttcatactggagagaagccgtttcggtgcacttttgaagggtgcggaaagcgcttctctctggactttaatttgcgtacgcacgtgcgcatccacacgggggagaaacgtttcgtgtgtccctttcaaggctgcaacaggaggtttattcagtcaaataacctgaaagcccacatcctaacgcatgcaaatacgaacaagaatgaacaagagggaaagtagtcctccaacaggatgaagcagattaacagaagagtgatcagtgacaaacatgcctcattgattattgtttctaggaaggaatttctaaatcaatattgcaaccccaaaagcggttataatttggtgttactaagatgctcctacactttgtgataccgttttaaggacatggtgcatttttttttcttttatttgttttatttagaactttttttatttgttttatttagaactttgtgtgttcttaaagtgtgcttccaacaggaaggtcagtgataaattttcaaaagcataaccttcaatatattatctgttggattattggatataagacttattttcatgtactataaatatgaaaataactttgatttttaattgtgtagtttccatttcttagcttttgccttttaaatttatacttcagccaggcatagtgactgatgcctgtaatcccaacactttgttgggaggccaaagcaggaggatagcttgaggccaggagttccagaccagcctgggcaacatagtgagatcctgtctctacaaaaaaatttgtttttatttgtatttatatatttttatttttgtttttgttggtaggcgtctcgctctgtcacccaggctggagtctagtgtcgtgatcttggctcactgcaacctccacctcccgggttcaagtgattctctggcctcagcctcccaagtagctgggactacaggtgtgtgtcaccacgcccggctaatttttgtatttttagtagagatggggtttcaccatgttggccaggctagtctcaaactcctgacctccagtgatctgcccacctcggcctcccaaagtgctgggattacaggtgtgagccactgtgcctggccccccacaacatgtttaaacttagctaggcctggttgcatacgcctgtgttcccagctactcaggaggctgaagcaggaggatagcttgagcccaggagtttgaggctacagtgagctgtgattgcaccactgtactccagactggataacagcaagagcccatcttttaaaaaaagtaaaaattaaaaatatacttcatggttcatgtcatagccctagagaatgaaaaatttgcagtagatagtcaataaatgaatcagtagttaaatattccttaaagtcaactgtatttcattgtgatttttgttttctttttatcattgtatcaaactatatggaaatcatatggttagatgtgattatttgataatgttagtccatttgaatccattttagatatttcacaattaaagaatatgaaacttc

SEQ ID NO: 200820 - DNA, 2338 bp, Homo sapiens
  Payload ID: 19634
  Gene Name: ZFP42 zinc finger protein
  Uniprot ID: Q96MM3
  ENST ID: ENST00000618147
  CDS Start-End: 101-1033
agcaggtgtttgctgaagacagcttactcagatcactactgcctggaggtggttgatatatcctggtgtaaaccttcaagaagggcacaggcaggaaaacatgagccagcaactgaagaaacgggcaaagacaagacaccagaaaggcctgggtggaagagcccccagtggggctaagcccaggcaaggcaagtcaagccaagacctgcaggcggaaatagaacctgtcagcgcggtgtgggccttatgtgatggctatgtgtgctatgagcctggccctcaggctctcggaggggatgatttctcagactgttacatagaatgcgtcataaggggtgagttttctcaacccatcctggaagaggactcactttttgagtccttggaatacctaaagaaaggatcagaacaacagctttctcaaaaggttttcgaagcaagctcccttgaatgttctttggaatacatgaaaaaaggggtaaagaaagagcttccacaaaagatagttggagagaattcgcttgagtattctgagtacatgacaggcaagaagcttccgcctggaggaatacctggcattgacctatcagatcctaaacagctcgcagaatttgctagaaagaagccccccataaataaagaatatgacagtctgagcgcaatcgcttgtcctcagagtggatgcactaggaagttgaggaatagagctgccctgagaaagcatctcctcattcatggtccccgagaccacgtctgtgcggaatgtgggaaagcgttcgttgagagctcaaaactaaagagacatttcctggttcatactggagagaagccgtttcggtgcacttttgaagggtgcggaaagcgcttctctctggactttaatttgcgtacgcacgtgcgcatccacacgggggagaaacgtttcgtgtgtccctttcaaggctgcaacaggaggtttattcagtcaaataacctgaaagcccacatcctaacgcatgcaaatacgaacaagaatgaacaagagggaaagtagtcctccaacaggatgaagcagattaacagaagagtgatcagtgacaaacatgcctcattgattattgtttctaggaaggaatttctaaatcaatattgcaaccccaaaagcggttataatttggtgttactaagatgctcctacactttgtgataccgttttaaggacatggtgcatttttttttcttttatttgttttatttagaactttttttatttgttttatttagaactttgtgtgttcttaaagtgtgcttccaacaggaaggtcagtgataaattttcaaaagcataaccttcaatatattatctgttggattattggatataagacttattttcatgtactataaatatgaaaataactttgatttttaattgtgtagtttccatttcttagcttttgccttttaaatttatacttcagccaggcatagtgactgatgcctgtaatcccaacactttgttgggaggccaaagcaggaggatagcttgaggccaggagttccagaccagcctgggcaacatagtgagatcctgtctctacaaaaaaatttgtttttatttgtatttatatatttttatttttgtttttgttggtaggcgtctcgctctgtcacccaggctggagtctagtgtcgtgatcttggctcactgcaacctccacctcccgggttcaagtgattctctggcctcagcctcccaagtagctgggactacaggtgtgtgtcaccacgcccggctaatttttgtatttttagtagagatggggtttcaccatgttggccaggctagtctcaaactcctgacctccagtgatctgcccacctcggcctcccaaagtgctgggattacaggtgtgagccactgtgcctggccccccacaacatgtttaaacttagctaggcctggttgcatacgcctgtgttcccagctactcaggaggctgaagcaggaggatagcttgagcccaggagtttgaggctacagtgagctgtgattgcaccactgtactccagactggataacagcaagagcccatcttttaaaaaaagtaaaaattaaaaatatacttcatggttcatgtcatagccctagagaatgaaaaatttgcagtagatagtcaataaatgaatcagtagttaaatattccttaaagtcaactgtatttcattgtgatttttgttttctttttatcattgtatcaaactatatggaaatcatatggttagatgtgattatttgataatgttagtccatttgaatccattttagatatttcacaattaaagaatatgaaacttc

SEQ ID NO: 200821 - DNA, 1359 bp, Homo sapiens
  Payload ID: 19635
  Gene Name: ZFP57 zinc finger protein
  Uniprot ID: Q9NU63
  ENST ID: ENST00000376881
  CDS Start-End: 1-1359
atggcagctggtgagccaaggtctctcctgttcttccagaagccagtcacctttgaggatgtggcagtgaatttcacccaggaagagtgggactgtctagatgccagccagagggtcctttaccaggatgttatgtcggaaacctttaagaatctaacatctgtggccagaatctttctgcataagccagagctaatcaccaagcttgagcaagaagaggaacagtggagagagacccgggtgcttcaagcatcccaggctgggccaccctttttttgctacacctgtggcaaatgtttcagcaggcgctcctacctctatagccaccagtttgttcacaatcccaagctgactaacagctgcagtcagtgtgggaagttgtttcggagccccaagtccctcagctatcacagacgcatgcatcttggggagaggcccttctgttgcacgctctgtgacaagacctactgtgatgcttctggactaagtcgtcaccgccgcgtccatctgggttaccggccccattcatgctctgtgtgtgggaagagcttccgggaccagtctgagctcaaacgccaccagaagatacaccaaaaccaggagccagtggatggaaaccaggagtgtactttgaggattccaggcacccaggctgaattccagacacccatcgccagaagccagaggtccatccaggggcttttggatgtgaaccatgcaccagtggccaggtcccaggaacccatatttagaactgagggtcctatggcccagaaccaggcatctgtacttaagaaccaagcacctgtgaccaggacccaggcacccatcactggaaccctctgtcaggatgccagatccaactctcatccagtgaagccctcaagactcaatgtcttctgttgcccccattgttctttgacttttagcaagaaatcctatctctccagacaccagaaggcccacctcacagagccgcccaactactgcttccattgcagcaagtctttcagctcattttccaggctggtcagacaccagcagacccactggaagcagaagagctacctttgccctatctgtgacctctcctttggggagaaagagggccttatggatcactggaggggctataaaggcaaggacctgtgccagagcagccaccataaatgccgggtgatcctgggccagtggcttggcttctctcatgatgtccccactatggctggggaggaatggaagcatggaggtgatcaatctccccccaggatccatacccccaggagaagaggcctaagagagaaggcctgcaaaggagacaaaacaaaggaggcagtgagcatcttgaaacataaataa

SEQ ID NO: 200822 - DNA, 1980 bp, Homo sapiens
  Payload ID: 19635
  Gene Name: ZFP57 zinc finger protein
  Uniprot ID: Q9NU63
  ENST ID: ENST00000376883
  CDS Start-End: 413-1963
tccccgggagaccctgtgcccctaaatcgcggtccactgcgcgcgtcaggtttctagaagcagggtagaacagacggcagacacctagcccaggctggtgttgttactaaacaatggcagctggtgagccaagggtgaccagggccctgaactcggtggcccagctttgagggaagcaaaattgttctcaattgtggaagaggagaatttggacagcagaacaaaaaaggaagacagcctcttggagcagatacatttgtcacaggaagccacatcaaaccctggggcctttgctgggcctctccatctgcccagttactgggaggtagatagccccaggaaggaatccagtcaggcctgggcaccaggccaggagtggataaagctagaaagagacaccacagaagagaagatgtttgaacagctgaagccaatcgaacctagagattgctggagggaggcacgggtgaagaagaagccagtcacctttgaggatgtggcagtgaatttcacccaggaagagtgggactgtctagatgccagccagagggtcctttaccaggatgttatgtcggaaacctttaagaatctaacatctgtggccagaatctttctgcataagccagagctaatcaccaagcttgagcaagaagaggaacagtggagagagtttgtccatctcccaaacacagaaggcctttcagaaggcaagaagaaagagcttcgagaacaacatcccagtctgagagatgaggggactagtgatgacaaggtcttccttgcatgcagaggggccggccagtgccccctatctgccccagctgggactatggacaggacccgggtgcttcaagcatcccaggctgggccaccctttttttgctacacctgtggcaaatgtttcagcaggcgctcctacctctatagccaccagtttgttcacaatcccaagctgactaacagctgcagtcagtgtgggaagttgtttcggagccccaagtccctcagctatcacagacgcatgcatcttggggagaggcccttctgttgcacgctctgtgacaagacctactgtgatgcttctggactaagtcgtcaccgccgcgtccatctgggttaccggccccattcatgctctgtgtgtgggaagagcttccgggaccagtctgagctcaaacgccaccagaagatacaccaaaaccaggagccagtggatggaaaccaggagtgtactttgaggattccaggcacccaggctgaattccagacacccatcgccagaagccagaggtccatccaggggcttttggatgtgaaccatgcaccagtggccaggtcccaggaacccatatttagaactgagggtcctatggcccagaaccaggcatctgtacttaagaaccaagcacctgtgaccaggacccaggcacccatcactggaaccctctgtcaggatgccagatccaactctcatccagtgaagccctcaagactcaatgtcttctgttgcccccattgttctttgacttttagcaagaaatcctatctctccagacaccagaaggcccacctcacagagccgcccaactactgcttccattgcagcaagtctttcagctcattttccaggctggtcagacaccagcagacccactggaagcagaagagctacctttgccctatctgtgacctctcctttggggagaaagagggccttatggatcactggaggggctataaaggcaaggacctgtgccagagcagccaccataaatgccgggtgatcctgggccagtggcttggcttctctcatgatgtccccactatggctggggaggaatggaagcatggaggtgatcaatctccccccaggatccatacccccaggagaagaggcctaagagagaaggcctgcaaaggagacaaaacaaaggaggcagtgagcatcttgaaacataaataaatggcctttctgactga

SEQ ID NO: 200823 - DNA, 1980 bp, Homo sapiens; identical to SEQ ID NO: 200822
  Payload ID: 19635
  Gene Name: ZFP57 zinc finger protein
  Uniprot ID: Q9NU63
  ENST ID: ENST00000383628
  CDS Start-End: 413-1963

SEQ ID NO: 200824 - DNA, 1980 bp, Homo sapiens; identical to SEQ ID NO: 200822
  Payload ID: 19635
  Gene Name: ZFP57 zinc finger protein
  Uniprot ID: Q9NU63
  ENST ID: ENST00000446005
  CDS Start-End: 413-1963

SEQ ID NO: 200825 - DNA, 651 bp, Homo sapiens
  Payload ID: 19635
  Gene Name: ZFP57 zinc finger protein
  ENST ID: ENST00000432222
  CDS Start-End: 1-634
ggccaggtcccaggaacccatatttagaactgagggtcctatggcccagaaccaggcatctgtacttaagaaccaagcacctgtgaccaggacccaggcacccatcactggaaccctctgtcaggatgccagatccaactctcatccagtgaagccctcaagactcaatgtcttctgttgcccccattgttctttgacttttagcaagaaatcctatctctccagacaccagaaggcccacctcacagagccgcccaactactgcttccattgcagcaagtctttcagctcattttccaggctggtcagacaccagcagacccactggaagcagaagagctacctttgccctatctgtgacctctcctttggggagaaagagggccttatggatcactggaggggctataaaggcaaggacctgtgccagagcagccaccataaatgccgggtgatcctgggccagtggcttggcttctctcatgatgtccccactatggctggggaggaatggaagcatggaggtgatcaatctccccccaggatccatacccccaggagaagaggcctaagagagaaggcctgcaaaggagacaaaacaaaggaggcagtgagcatcttgaaacataaataaatggcctttctgactga

SEQ ID NO: 200826 - DNA, 1980 bp, Homo sapiens; identical to SEQ ID NO: 200822
  Payload ID: 19635
  Gene Name: ZFP57 zinc finger protein
  Uniprot ID: Q9NU63
  ENST ID: ENST00000416974
  CDS Start-End: 413-1963

SEQ ID NO: 200827 - DNA, 1980 bp, Homo sapiens; identical to SEQ ID NO: 200822
  Payload ID: 19635
  Gene Name: ZFP57 zinc finger protein
  Uniprot ID: Q9NU63
  ENST ID: ENST00000437216
  CDS Start-End: 413-1963

SEQ ID NO: 200828 - DNA, 1980 bp, Homo sapiens; identical to SEQ ID NO: 200822
  Payload ID: 19635
  Gene Name: ZFP57 zinc finger protein
  Uniprot ID: Q9NU63
  ENST ID: ENST00000448114
  CDS Start-End: 413-1963

SEQ ID NO: 200829 - DNA, 1980 bp, Homo sapiens
  Payload ID: 19635
  Gene Name: ZFP57 zinc finger protein
  Uniprot ID: Q9NU63
  ENST ID: ENST00000435906
  CDS Start-End: 413-1963
tccccgggagaccctgtgcccctaaatcgcggtccactgcgcgcgtcaggtttctagaagcagggtagaacagagggcagacacctagcccaggctggtgttgttactaaacaatggcagctggtgagccaagggtgaccagggccctgaactctgtggcccagctttgagggaagcaaaattgttctcaattgtggaagaggagaatttggacagcagaacaaaaaaggaagacagcctcttggagcagatacatttgtcacaggaagccacatcaaaccctggggcctttgctgggcctctccatctgcccagttactgggaggtagatagccccaggaaggaatccagtcaggcctgggcaccaggccaggagtggataaagctagaaagagacaccacagaagagaagatgtttgaacagctgaagccaatcgaacctagagattgctggagggaggcacgggtgaagaagaagccagtcacctttgaggatgtggcagtgaatttcacccaggaagagtgggactgtctagatgccagccagagggtcctttaccaggatgttatgtcggaaacctttaagaatctaacatctgtggccagaatctttctgcataagccagagctaatcaccaagcttgagcaagaagaggaacagtggagagagtttgtccatctcccaaacacagaaggcctttcagaaggcaagaagaaagagcttcgagaacaacatcccagtctgagagatgaggggactagtgatgacaaggtcttccttgcatgcagaggggccggccagtgccccctatctgccccagctgggactatggacaggacccgggtgcttcaagcatcccaggctgggccaccctttttttgctacacctgtggcaaatgtttcagcaggcgctcctacctctatagccaccagtttgttcacaatcccaagctgactaacagctgcagtcagtgtgggaagttgtttcggagccccaagtccctcagctatcacagacgcatgcatcttggggagaggcccttctgttgcacgctctgtgacaagacctactgtgatgcttctggactaagtcgtcaccgccgcgtccatctgggttaccggccccattcatgctctgtgtgtgggaagagcttccgggaccagtctgagctcaaacgccaccagaagatacaccaaaaccaggagccagtggatggaaaccaggagtgtactttgaggattccaggcacccaggctgaattccagacacccatcgccagaagccagaggtccatccaggggcttttggatgtgaaccatgcaccagtggccaggtcccaggaacccatatttagaactgagggtcctatggcccagaaccaggcatctgtacttaagaaccaagcacctgtgaccaggacccaggcacccatcactggaaccctctgtcaggatgccagatccaactctcatccagtgaagccctcaagactcaatgtcttctgttgcccccattgttctttgacttttagcaagaaatcctatctctccagacaccagaaggcccacctcacagagccgcccaactactgcttccattgcagcaagtctttcagctcattttccaggctggtcagacaccagcagacccactggaagcagaagagctacctttgccctatctgtgacctctcctttggggagaaagagggccttatggatcactggaggggctataaaggcaaggacctgtgccagagcagccaccataaatgccgggtgatcctgggccagtggcttggcttctctcatgatgtccccactatggctggggaggaatggaagcatggaggtgatcaatctccccccaggatccatacccccaggagaagaggcctaagagagaaggcctgcaaaggagacaaaacaaaggaggcagtgagcatcttgaaacataaataaatggcctttctgactga

SEQ ID NO: 200830 - DNA, 1870 bp, Homo sapiens
  Payload ID: 19635
  Gene Name: ZFP57 zinc finger protein
  Uniprot ID: Q9NU63
  ENST ID: ENST00000488757
  CDS Start-End: 152-1762
acaggaagccacatcaaaccctggggcctttgctgggcctctccatctgcccagttactgggaggtagatagccccaggaaggaatccagtcaggcctgggcaccaggccaggagtggataaagctagaaagagacaccacagaagagaagatgtttgaacagctgaagccaatcgaacctgtacagaagacgctcccatgggtgggcgaggtagctgccaccctgcaggaagccatgaagagagattgctggagggaggcacgggtgaagaagaagccagtcacctttgaggatgtggcagtgaatttcacccaggaagagtgggactgtctagatgccagccagagggtcctttaccaggatgttatgtcggaaacctttaagaatctaacatctgtggccagaatctttctgcataagccagagctaatcaccaagcttgagcaagaagaggaacagtggagagagtttgtccatctcccaaacacagaaggcctttcagaaggcaagaagaaagagcttcgagaacaacatcccagtctgagagatgaggggactagtgatgacaaggtcttccttgcatgcagaggggccggccagtgccccctatctgccccagctgggactatggacaggacccgggtgcttcaagcatcccaggctgggccaccctttttttgctacacctgtggcaaatgtttcagcaggcgctcctacctctatagccaccagtttgttcacaatcccaagctgactaacagctgcagtcagtgtgggaagttgtttcggagccccaagtccctcagctatcacagacgcatgcatcttggggagaggcccttctgttgcacgctctgtgacaagacctactgtgatgcttctggactaagtcgtcaccgccgcgtccatctgggttaccggccccattcatgctctgtgtgtgggaagagcttccgggaccagtctgagctcaaacgccaccagaagatacaccaaaaccaggagccagtggatggaaaccaggagtgtactttgaggattccaggcacccaggctgaattccagacacccatcgccagaagccagaggtccatccaggggcttttggatgtgaaccatgcaccagtggccaggtcccaggaacccatatttagaactgagggtcctatggcccagaaccaggcatctgtacttaagaaccaagcacctgtgaccaggacccaggcacccatcactggaaccctctgtcaggatgccagatccaactctcatccagtgaagccctcaagactcaatgtcttctgttgcccccattgttctttgacttttagcaagaaatcctatctctccagacaccagaaggcccacctcacagagccgcccaactactgcttccattgcagcaagtctttcagctcattttccaggctggtcagacaccagcagacccactggaagcagaagagctacctttgccctatctgtgacctctcctttggggagaaagagggccttatggatcactggaggggctataaaggcaaggacctgtgccagagcagccaccataaatgccgggtgatcctgggccagtggcttggcttctctcatgatgtccccactatggctggggaggaatggaagcatggaggtgatcaatctccccccaggatccatacccccaggagaagaggcctaagagagaaggcctgcaaaggagacaaaacaaaggaggcagtgagcatcttgaaacataaataaatggcctttctgactgagctctttctttgtgtttagttttcctgaggactgacctctggggtaatgaggctggagtagagggagacaggtgcgtggataaggaaggaa

SEQ ID NO: 200831 - DNA, 1359 bp, Homo sapiens; identical to SEQ ID NO: 200821
  Payload ID: 19635
  Gene Name: ZFP57 zinc finger protein
  Uniprot ID: Q9NU63
  ENST ID: ENST00000548001
  CDS Start-End: 1-1359

SEQ ID NO: 200832 - DNA, 1870 bp, Homo sapiens; identical to SEQ ID NO: 200830
  Payload ID: 19635
  Gene Name: ZFP57 zinc finger protein
  Uniprot ID: Q9NU63
  ENST ID: ENST00000548574
  CDS Start-End: 152-1762

SEQ ID NO: 200833 - DNA, 1359 bp, Homo sapiens; identical to SEQ ID NO: 200821
  Payload ID: 19635
  Gene Name: ZFP57 zinc finger protein
  Uniprot ID: Q9NU63
  ENST ID: ENST00000547542
  CDS Start-End: 1-1359

SEQ ID NO: 200834 - DNA, 1870 bp, Homo sapiens; identical to SEQ ID NO: 200830
  Payload ID: 19635
  Gene Name: ZFP57 zinc finger protein
  Uniprot ID: Q9NU63
  ENST ID: ENST00000553137
  CDS Start-End: 152-1762

SEQ ID NO: 200835 - DNA, 1359 bp, Homo sapiens; identical to SEQ ID NO: 200821
  Payload ID: 19635
  Gene Name: ZFP57 zinc finger protein
  Uniprot ID: Q9NU63
  ENST ID: ENST00000549501
  CDS Start-End: 1-1359

SEQ ID NO: 200836 - DNA, 1870 bp, Homo sapiens; identical to SEQ ID NO: 200830
  Payload ID: 19635
  Gene Name: ZFP57 zinc finger protein
  Uniprot ID: Q9NU63
  ENST ID: ENST00000548769
  CDS Start-End: 152-1762

SEQ ID NO: 200837 - DNA, 1359 bp, Homo sapiens; identical to SEQ ID NO: 200821
  Payload ID: 19635
  Gene Name: ZFP57 zinc finger protein
  Uniprot ID: Q9NU63
  ENST ID: ENST00000552987
  CDS Start-End: 1-1359

SEQ ID NO: 200838 - DNA, 1870 bp, Homo sapiens; identical to SEQ ID NO: 200830
  Payload ID: 19635
  Gene Name: ZFP57 zinc finger protein
  Uniprot ID: Q9NU63
  ENST ID: ENST00000549167
  CDS Start-End: 152-1762

SEQ ID NO: 200839 - DNA, 1870 bp, Homo sapiens; identical to SEQ ID NO: 200830
  Payload ID: 19635
  Gene Name: ZFP57 zinc finger protein
  Uniprot ID: Q9NU63
  ENST ID: ENST00000548337
  CDS Start-End: 152-1762

SEQ ID NO: 200840 - DNA, 1359 bp, Homo sapiens; identical to SEQ ID NO: 200821
  Payload ID: 19635
  Gene Name: ZFP57 zinc finger protein
  Uniprot ID: Q9NU63
  ENST ID: ENST00000547911
  CDS Start-End: 1-1359

SEQ ID NO: 200841 - DNA, 1870 bp, Homo sapiens; identical to SEQ ID NO: 200830
  Payload ID: 19635
  Gene Name: ZFP57 zinc finger protein
  Uniprot ID: Q9NU63
  ENST ID: ENST00000552809
  CDS Start-End: 152-1762

SEQ ID NO: 200842 - DNA, 1359 bp, Homo sapiens; identical to SEQ ID NO: 200821
  Payload ID: 19635
  Gene Name: ZFP57 zinc finger protein
  Uniprot ID: Q9NU63
  ENST ID: ENST00000552898
  CDS Start-End: 1-1359

SEQ ID NO: 200843 - DNA, 749 bp, Homo sapiens
  Payload ID: 19636
  Gene Name: ZFP62 zinc finger protein
  ENST ID: ENST00000504225
  CDS Start-End: 269-749
ttttttttggtcggtgagtgatgatgataagctcccgctgcaggtgtgaatagagaccccggaggtgcgtcctagccctcatctggggaagcgcacctgcatacagacgggtgcaccggggaggaggcgacctgccgcgtgttcctgcaagcagaaaaggagttaactagtgtcacatttgaagacgagcactgaggatgaggaaccaactgaagaatatgaaaatgttggaaatgcagcatctaagtggccaaaagtggaggatcctatgcctgaatctaaggttggtgacacatgtgtttgggatagcaaggtagagaatcaacagaaaaagcctgtggaaaacaggatgaaggaggacaaaagcagcatcagggaagcaatcagcaaagccaagagtacagcaaatataaagacagaacaggaaggtgaggcatctgagaagagcttgcatctgagcccacagcatatcacacaccagactatgcctataggacagagaggcagtgagcaaggcaaacgtgtggagaacattaatggaacctcctaccctagtctacagcagaaaaccaatgctgttaagaaattacataaatgtgatgaatgtgggaaatccttcaaatataattcccgccttgttcaacataaaattatgcacactggggaaaagcgctatgaatgtgatgactgtggagggactttccggagcagctcgagccttcgggtccacaaacggatccacactgggg

SEQ ID NO: 200844 - DNA, 544 bp, Homo sapiens
  Payload ID: 19636
  Gene Name: ZFP62 zinc finger protein
  ENST ID: ENST00000506439
  CDS Start-End: 234-544
gtgcggtccgcgcttttgtcccgctggcggccgggttcccgcggcgccgccacagccagtacgttgccttcttcctcatctctgcagtaactgtcttcatggtttcatagccttctccctgatacccctccccagtgtcacatttgaagacgagcactgaggatgaggaaccaactgaagaatatgaaaatgttggaaatgcagcatctaagtggccaaaagtggaggatcctatgcctgaatctaaggttggtgacacatgtgtttgggatagcaaggtagagaatcaacagaaaaagcctgtggaaaacaggatgaaggaggacaaaagcagcatcagggaagcaatcagcaaagccaagagtacagcaaatataaagacagaacaggaaggtgaggcatctgagaagagcttgcatctgagcccacagcatatcacacaccagactatgcctataggacagagaggcagtgagcaaggcaaacgtgtggagaacattaatggaacctcctaccctagtctacagcagaaaaccaatgctgt

SEQ ID NO: 200845 - DNA, 3415 bp, Homo sapiens
  Payload ID: 19636
  Gene Name: ZFP62 zinc finger protein
  Uniprot ID: Q8NB50
  ENST ID: ENST00000502412
  CDS Start-End: 59-2761
cgtgcggtccgcgcttttgtcccgctggcggccgggttcccgcggcgccgccacagccatgtcacatttgaagacgagcactgaggatgaggaaccaactgaagaatatgaaaatgttggaaatgcagcatctaagtggccaaaagtggaggatcctatgcctgaatctaaggttggtgacacatgtgtttgggatagcaaggtagagaatcaacagaaaaagcctgtggaaaacaggatgaaggaggacaaaagcagcatcagggaagcaatcagcaaagccaagagtacagcaaatataaagacagaacaggaaggtgaggcatctgagaagagcttgcatctgagcccacagcatatcacacaccagactatgcctataggacagagaggcagtgagcaaggcaaacgtgtggagaacattaatggaacctcctaccctagtctacagcagaaaaccaatgctgttaagaaattacataaatgtgatgaatgtgggaaatccttcaaatataattcccgccttgttcaacataaaattatgcacactggggaaaagcgctatgaatgtgatgactgtggagggactttccggagcagctcgagccttcgggtccacaaacggatccacactggggagaagccgtacaagtgtgaggaatgtgggaaagcctacatgtcctactccagccttataaaccacaaaagcacccattctggggagaagaactgtaaatgtgatgaatgtggaaaatccttcaattatagctctgttctggaccagcataaaaggatccacactggggagaagccctatgaatgtggtgagtgtgggaaggccttcaggaacagctctgggctcagagtccacaaaaggatccacacgggggagaagccctatgaatgcgacatctgtgggaaaaccttcagtaacagctctggccttagggtccataaaaggatccacacaggtgagaaaccttacgaatgtgatgagtgtgggaaggccttcattacttgtagaacacttctcaaccataaaagcatccactttggagataaaccctataaatgtgatgagtgtgagaaatcttttaattatagctctcttctcattcagcataaagtcatccacactggagagaaaccttatgaatgtgatgaatgtgggaaggctttcaggaacagctcaggcctcatagtgcataaaaggatccacacaggagagaaaccttacaagtgtgatgtctgtggcaaagcattcagctatagctcaggcctcgcagtccataaaagcattcaccctgggaagaaagcccatgaatgtaaggagtgtgggaaatcctttagttataactcactacttcttcaacacagaactattcataccggagagagaccttatgtatgtgatgtgtgtgggaaaacgttcagaaacaatgcaggcctcaaagtccacaggaggctccatactggggaaaaaccatataagtgtgatgtgtgtgggaaagcctatatctcacgctctagccttaaaaatcacaaaggaatccaccttggggagaagccctataaatgtagctattgtgagaaatccttcaactacagctctgcccttgaacagcataaaaggattcataccagggaaaaaccctttgggtgtgatgagtgtggtaaagctttcagaaataattctggccttaaagtacataaacgaatccacactggggaacgaccttacaaatgtgaagaatgtgggaaagcatacatctctctctcgagccttataaatcataaaagtgtacaccctggggagaagccctttaagtgtgacgagtgtgagaaggccttcatcacataccgaacccttacaaaccacaaaaaagttcatcttggggagaagccctacaaatgtgatgtgtgtgagaaatcttttaattacacatcgctcctttctcagcacagaagggtccacactagagagaaaccctatgaatgtgacaggtgtgagaaggtcttcagaaacaactcaagccttaaagttcataaaagaatccatactggggagaggccctatgaatgtgatgtgtgtggaaaagcctacatctcacactcaagccttattaaccataagagtacccaccctggcaggacaccccatacatgtgatgaatgtggaaaagcttttttctcaagcagaactcttataagccataaaagagtccatcttggggagaaacccttcaagtgtgttgagtgtgggaaatctttcagttacagctctctcctttctcagcacaagaggatccacacaggggagaaaccctatgtgtgtgataggtgtgggaaggccttcaggaacagctcaggcctcacagtgcataaaaggatccacacaggtgagaaaccctatgaatgtgatgagtgtgggaaggcatacatctcacactcaagtcttatcaatcataaaagtgtccaccaggggaagcagccctataattgtgagtgtgggaaatccttcaattatagatcagtccttgaccagcacaaaaggatccacactggaaagaagccataccgatgtaatgagtgtggtaaggcttttaatatcagatcaaatctcaccaagcataaaagaacccatactggagaggaatctttaaatgtgatatatgtgggaagttatagtggcacatcccagaagagaacctatgagggagggaatgccctggatgggggcaggatgaggatgcctctgtagcaggcagagcttaccaagtctctccgaactcaaatggaagaaataccttatgaatgtaagaatgtagggggtcatggcttgtaatttacacagtgtaaatgaaaccatcctagaggattatgaggaatcctttctatgtgattttcaatcatagcaagcaagaaaggctccagtgtcaaggtagttcagctcttacaggatataaaacagtccatacttgagagaaaaacttagatctgagtgatggaatgtgaagcaaatcttcaaaatcagtagacatttctggacataaaacacagatgaggaaagggcttcaattagaagttacgtaatcaccatcagaaagttcatgtttggtaaattctgttactagaaatgtaggaaattcaggtatagctttgaatcccaattacacattggtcagtgggaaaactaagggcctccaacaggcaaattcagggaggataggtttcagggaatataaatttatttaatattagtggtctttaagtataaacttgatgtaattggtttgggagggggcagtgatgatgacttctgaaacaaaatttggatttccttttaggaaaagtagaaagcatagacttacaagtctaacaggagataggagagagtcactcataaaaaatgcaa

SEQ ID NO: 200846 - DNA, 542 bp, Homo sapiens
  Payload ID: 19636
  Gene Name: ZFP62 zinc finger protein
  ENST ID: ENST00000509066
  CDS Start-End: 308-542
ccgctgcaggtgtgaatagagaccccggaggtgcgtcctagccctcatctggggaagcgcacctgcatacagacgggtgcaccggggaggaggcgacctgccgcgtgttcctgcaagcagaaaaggagttaactaggttgccttcttcctcatctctgcagtaactgtcttcatggtttcatagccttctccctgatacccctccccagtgtcacatttgaagacgagcactgaggatgaggaaccaactgaagaatatgaaaatgttggaaatgcagcatctaagtggccaaaagtggaggatcctatgcctgaatctaaggttggtgacacatgtgtttgggatagcaaggtagagaatcaacagaaaaagcctgtggaaaacaggatgaaggaggacaaaagcagcatcagggaagcaatcagcaaagccaagagtacagcaaatataaagacagaacaggaaggtgaggcatctgagaagagcttgcatctgagcccacagcatatcacacaccagactatgcctataggacagagag

SEQ ID NO: 200847 - DNA, 4010 bp, Homo sapiens
  Payload ID: 19636
  Gene Name: ZFP62 zinc finger protein
  Uniprot ID: Q8NB50
  ENST ID: ENST00000512132
  CDS Start-End: 230-2833
gtgcggtccgcgcttttgtcccgctggcggccgggttcccgcggcgccgccacagccagttgccttcttcctcatctctgcagtaactgtcttcatggtttcatagccttctccctgatacccctccccagtgtcacatttgaagacgagcactgaggatgaggaaccaactgaagaatatgaaaatgttggaaatgcagcatctaagtggccaaaagtggaggatcctatgcctgaatctaaggttggtgacacatgtgtttgggatagcaaggtagagaatcaacagaaaaagcctgtggaaaacaggatgaaggaggacaaaagcagcatcagggaagcaatcagcaaagccaagagtacagcaaatataaagacagaacaggaaggtgaggcatctgagaagagcttgcatctgagcccacagcatatcacacaccagactatgcctataggacagagaggcagtgagcaaggcaaacgtgtggagaacattaatggaacctcctaccctagtctacagcagaaaaccaatgctgttaagaaattacataaatgtgatgaatgtgggaaatccttcaaatataattcccgccttgttcaacataaaattatgcacactggggaaaagcgctatgaatgtgatgactgtggagggactttccggagcagctcgagccttcgggtccacaaacggatccacactggggagaagccgtacaagtgtgaggaatgtgggaaagcctacatgtcctactccagccttataaaccacaaaagcacccattctggggagaagaactgtaaatgtgatgaatgtggaaaatccttcaattatagctctgttctggaccagcataaaaggatccacactggggagaagccctatgaatgtggtgagtgtgggaaggccttcaggaacagctctgggctcagagtccacaaaaggatccacacgggggagaagccctatgaatgcgacatctgtgggaaaaccttcagtaacagctctggccttagggtccataaaaggatccacacaggtgagaaaccttacgaatgtgatgagtgtgggaaggccttcattacttgtagaacacttctcaaccataaaagcatccactttggagataaaccctataaatgtgatgagtgtgagaaatcttttaattatagctctcttctcattcagcataaagtcatccacactggagagaaaccttatgaatgtgatgaatgtgggaaggctttcaggaacagctcaggcctcatagtgcataaaaggatccacacaggagagaaaccttacaagtgtgatgtctgtggcaaagcattcagctatagctcaggcctcgcagtccataaaagcattcaccctgggaagaaagcccatgaatgtaaggagtgtgggaaatcctttagttataactcactacttcttcaacacagaactattcataccggagagagaccttatgtatgtgatgtgtgtgggaaaacgttcagaaacaatgcaggcctcaaagtccacaggaggctccatactggggaaaaaccatataagtgtgatgtgtgtgggaaagcctatatctcacgctctagccttaaaaatcacaaaggaatccaccttggggagaagccctataaatgtagctattgtgagaaatccttcaactacagctctgcccttgaacagcataaaaggattcataccagggaaaaaccctttgggtgtgatgagtgtggtaaagctttcagaaataattctggccttaaagtacataaacgaatccacactggggaacgaccttacaaatgtgaagaatgtgggaaagcatacatctctctctcgagccttataaatcataaaagtgtacaccctggggagaagccctttaagtgtgacgagtgtgagaaggccttcatcacataccgaacccttacaaaccacaaaaaagttcatcttggggagaagccctacaaatgtgatgtgtgtgagaaatcttttaattacacatcgctcctttctcagcacagaagggtccacactagagagaaaccctatgaatgtgacaggtgtgagaaggtcttcagaaacaactcaagccttaaagttcataaaagaatccatactggggagaggccctatgaatgtgatgtgtgtggaaaagcctacatctcacactcaagccttattaaccataagagtacccaccctggcaggacaccccatacatgtgatgaatgtggaaaagcttttttctcaagcagaactcttataagccataaaagagtccatcttggggagaaacccttcaagtgtgttgagtgtgggaaatctttcagttacagctctctcctttctcagcacaagaggatccacacaggggagaaaccctatgtgtgtgataggtgtgggaaggccttcaggaacagctcaggcctcacagtgcataaaaggatccacacaggtgagaaaccctatgaatgtgatgagtgtgggaaggcatacatctcacactcaagtcttatcaatcataaaagtgtccaccaggggaagcagccctataattgtgagtgtgggaaatccttcaattatagatcagtccttgaccagcacaaaaggatccacactggaaagaagccataccgatgtaatgagtgtggtaaggcttttaatatcagatcaaatctcaccaagcataaaagaacccatactggagaggaatctttaaatgtgatatatgtgggaagttatagtggcacatcccagaagagaacctatgagggagggaatgccctggatgggggcaggatgaggatgcctctgtagcaggcagagcttaccaagtctctccgaactcaaatggaagaaataccttatgaatgtaagaatgtagggggtcatggcttgtaatttacacagtgtaaatgaaaccatcctagaggattatgaggaatcctttctatgtgattttcaatcatagcaagcaagaaaggctccagtgtcaaggtagttcagctcttacaggatataaaacagtccatacttgagagaaaaacttagatctgagtgatggaatgtgaagcaaatcttcaaaatcagtagacatttctggacataaaacacagatgaggaaagggcttcaattagaagttacgtaatcaccatcagaaagttcatgtttggtaaattctgttactagaaatgtaggaaattcaggtatagctttgaatcccaattacacattggtcagtgggaaaactaagggcctccaacaggcaaattcagggaggataggtttcagggaatataaatttatttaatattagtggtctttaagtataaacttgatgtaattggtttgggagggggcagtgatgatgacttctgaaacaaaatttggatttccttttaggaaaagtagaaagcatagacttacaagtctaacaggagataggagagagtcactcataaaaaatgcaaattgatgaacgtactattgtgatacattagttgaatggatgaaacttttttaaagtttcagatgaactcccataatgaatgatgaatttgtgatgagggataacctggaagtggtattcacacattatgctacaataaaaggttctaccgtggagaggattttgacacattcagtaactaatggaacacaccgtcaacatgaattcgcaccttacatgacagaagtgattcagggattcctatgaatagaaatgctgagaaggaacgcattttattgcagaagctaaaaagctaaagtaccagtcatctagagagaaggaaattaatgtttcttaataatcctgttaaatgtttgattgtttttggaatgtgttattgtaaagatgtcatgcaggacatgtatatgttgtctgttgtaaaatgttaacgaatactttgttcagggctcactctctctttgtcatgaaagccagctccttgtggcgaggtaaagtggaattccaataaagaaattccttaaatc

SEQ ID NO: 200848 - DNA, 3264 bp, Homo sapiens
  Payload ID: 19637
  Gene Name: ZFP64 zinc finger protein
  Uniprot ID: Q9NPA5
  ENST ID: ENST00000216923
  CDS Start-End: 351-2396
gggcaggggcgcatccctcgccacccgcggtcgcccagcacgccgggacgcgcgtggccatccagctccccgggggcgttggggggctccgcgggcctgggcctcgggattcgcccgccgcttccccggggagccgctgctgcaaagccaggttggggcgccgggcccggccagcgccctctaggcagcggaagtgcagcttgctttacatccgtcctccccgcctcgcagagttgggagaaggcagggtggggggtgtggaaaaataaaaggaaaagtccttgcaccatgtagatcagcgtcccccactttggcatcccggccggccggggacctcccagtctgcggccatgaacgcgagcagcgagggcgagagcttcgcgggctcggtgcaaattccaggtggcacaacggtgctggtggagctgactcccgacatccatatctgcggcatctgcaagcagcagtttaacaacctggatgcctttgtagctcacaagcaaagtggctgccagctgacaggcacatccgcagcagcccccagcacggtccagtttgtatcggaggaaacagtgcctgccacccagactcagaccaccaccagaaccatcacctcggagacccagacaatcacagtttcagctccagaatttgtttttgaacatggctatcaaacttacctgcccacggaaagtaatgaaaaccagacagccactgtcatctctctccctgccaagtcacgcaccaaaaagcccacaacaccacctgctcagaaaaggcttaactgttgctatccaggttgccaattcaagactgcttatggcatgaaggacatggagcggcatttaaaaattcacacgggagacaaaccccataagtgtgaagtctgtggcaagtgctttagccggaaagacaagctgaaaactcacatgcggtgccacacgggcgtgaagccctacaagtgtaagacgtgtgactacgccgctgccgacagcagcagcctcaacaagcacctgaggatccactcggacgagcggcccttcaaatgccagatctgcccctacgccagccgcaactccagccagctcactgtccacctgcgatcccacacgggggacgcccccttccagtgctggctctgtagcgccaagttcaaaatcagctcggacttgaaaaggcacatgcgggtgcactcgggggagaagcctttcaagtgcgagttctgcaatgtccgctgcaccatgaaggggaacctcaagtcgcacatccgtatcaagcacagcgggaataacttcaagtgtcctcattgcgacttcctgggtgacagcaaagccaccctccggaagcacagccgcgtgcaccagtcggagcatcctgagaagtgctcggaatgcagctactcctgctccagcaaggccgccctgcgcatccacgagcgtatccactgcaccgaccgccctttcaagtgcaactactgcagcttcgacaccaaacagcccagcaacctgagcaagcacatgaagaagttccatggggacatggttaagactgaggctctagagaggaaggacaccggcaggcagagcagccggcaggtggccaagctggatgccaagaagagtttccactgcgatatatgcgatgcctccttcatgcgggaggactcgctccgcagccacaagagacagcacagtgagtacagtgagagtaagaactcggacgtgaccgttctccagtttcagatcgaccccagcaagcagcccgccacgcccctcactgtgggacacctccaggtgcccctccagcccagccaagtgccccagttcagcgagggaagagtcaaaatcatcgttgggcatcaggtgccccaggcgaacaccatcgtccaggctgccgccgctgcagtgaacatcgtcccgcctgccttggtggcccagaacccagaggaactcccagggaacagccggctgcagatcctgcgccaggtcagtctgatcgccccccctcagtcctcgcggtgtccgagcgaggcgggcgcaatgacccagccggctgtcctgctgaccacccacgagcagacggacggagccactctgcaccagactctcatccccacggcctcaggtggcccccaggaaggctctggcaatcaaactttcattaccagttcgggtattacttgcactgactttgaaggcctaaacgccttgattcaggaggggacagcagaagtgacagtggtgagcgatggaggccagaacatcgcagtggccaccacagcgccaccggtcttctcctcctcttcccagcaagaactacccaagcagacctactccatcattcaaggggcagcccatccagctttgctctgtcccgccgactccattccagattagtgcttaaaaaaacaaaaggagtgggggaaaggaattgagaaaaagaaatcttaagtagaattctctaaaaggtttgctcttaatgttttctttgttttgttttgtttttgagacggagtctcgctctgtttcccaggctggagtgcagtggcgctatcttggctcactgcaacgtccgcctcccaggttcaagcgattctcatgcctcagccctccgagtagctgggaccacaggtgtacgacatcatgactggctaatttttgtatatttagtagagacggggtttcatcatgttgaactcctgacctcaagtgatctgcccacctcagcctcccaaagtgctgggattacaggtgtgagccaccatgcctggccgtggtttgctcttaatgtttttaaggatggttgtgaatccccctggccccataataaattgtaattttatactgcttactataatttttttaacactgtaacaactttgagaccacctctgaatcgtcgcattataactgttgtagaatcttaaatgttaccaagatgattccaatgaggggttggaattaaatgcattaagtagtgaattcatgtgtttgtttccaacttgattttccaactctaataaaggtttctgtccatcttattacatttgtgtagtaaatggtacttcccagcctctcttttgccccattctggaatactccccagagtttgggggtgttcatgttttatacatgtaagtctgttggcatgaaggaccattttctacataatatgacatggatacttgacccaaaaaaaaatgtttagtgctaatgagcagaaaatgaatggttccataataaattgatatctgattaaaatata

SEQ ID NO: 200849 - DNA, 2876 bp, Homo sapiens
  Payload ID: 19637
  Gene Name: ZFP64 zinc finger protein
  Uniprot ID: Q9NPA5
  ENST ID: ENST00000346617
  CDS Start-End: 125-2008
cgcagagttgggagaaggcagggtggggggtgtggaaaaataaaaggaaaagtccttgcaccatgtagatcagcgtcccccactttggcatcccggccggccggggacctcccagtctgcggccatgaacgcgagcagcgagggcgagagcttcgcgggctcggtgcaaattccaggtggcacaacggtgctggtggagctgactcccgacatccatatctgcggcatctgcaagcagcagtttaacaacctggatgcctttgtagctcacaagcaaagtggctgccagctgacaggcacatccgcagcagcccccagcacggtccagtttgtatcggaggaaacagtgcctgccacccagactcagaccaccaccagaaccatcacctcggagacccagacaatcacaggttgccaattcaagactgcttatggcatgaaggacatggagcggcatttaaaaattcacacgggagacaaaccccataagtgtgaagtctgtggcaagtgctttagccggaaagacaagctgaaaactcacatgcggtgccacacgggcgtgaagccctacaagtgtaagacgtgtgactacgccgctgccgacagcagcagcctcaacaagcacctgaggatccactcggacgagcggcccttcaaatgccagatctgcccctacgccagccgcaactccagccagctcactgtccacctgcgatcccacacgggggacgcccccttccagtgctggctctgtagcgccaagttcaaaatcagctcggacttgaaaaggcacatgcgggtgcactcgggggagaagcctttcaagtgcgagttctgcaatgtccgctgcaccatgaaggggaacctcaagtcgcacatccgtatcaagcacagcgggaataacttcaagtgtcctcattgcgacttcctgggtgacagcaaagccaccctccggaagcacagccgcgtgcaccagtcggagcatcctgagaagtgctcggaatgcagctactcctgctccagcaaggccgccctgcgcatccacgagcgtatccactgcaccgaccgccctttcaagtgcaactactgcagcttcgacaccaaacagcccagcaacctgagcaagcacatgaagaagttccatggggacatggttaagactgaggctctagagaggaaggacaccggcaggcagagcagccggcaggtggccaagctggatgccaagaagagtttccactgcgatatatgcgatgcctccttcatgcgggaggactcgctccgcagccacaagagacagcacagtgagtacagtgagagtaagaactcggacgtgaccgttctccagtttcagatcgaccccagcaagcagcccgccacgcccctcactgtgggacacctccaggtgcccctccagcccagccaagtgccccagttcagcgagggaagagtcaaaatcatcgttgggcatcaggtgccccaggcgaacaccatcgtccaggctgccgccgctgcagtgaacatcgtcccgcctgccttggtggcccagaacccagaggaactcccagggaacagccggctgcagatcctgcgccaggtcagtctgatcgccccccctcagtcctcgcggtgtccgagcgaggcgggcgcaatgacccagccggctgtcctgctgaccacccacgagcagacggacggagccactctgcaccagactctcatccccacggcctcaggtggcccccaggaaggctctggcaatcaaactttcattaccagttcgggtattacttgcactgactttgaaggcctaaacgccttgattcaggaggggacagcagaagtgacagtggtgagcgatggaggccagaacatcgcagtggccaccacagcgccaccggtcttctcctcctcttcccagcaagaactacccaagcagacctactccatcattcaaggggcagcccatccagctttgctctgtcccgccgactccattccagattagtgcttaaaaaaacaaaaggagtgggggaaaggaattgagaaaaagaaatcttaagtagaattctctaaaaggtttgctcttaatgttttctttgttttgttttgtttttgagacggagtctcgctctgtttcccaggctggagtgcagtggcgctatcttggctcactgcaacgtccgcctcccaggttcaagcgattctcatgcctcagccctccgagtagctgggaccacaggtgtacgacatcatgactggctaatttttgtatatttagtagagacggggtttcatcatgttgaactcctgacctcaagtgatctgcccacctcagcctcccaaagtgctgggattacaggtgtgagccaccatgcctggccgtggtttgctcttaatgtttttaaggatggttgtgaatccccctggccccataataaattgtaattttatactgcttactataatttttttaacactgtaacaactttgagaccacctctgaatcgtcgcattataactgttgtagaatcttaaatgttaccaagatgattccaatgaggggttggaattaaatgcattaagtagtgaattcatgtgtttgtttccaacttgattttccaactctaataaaggtttctgtccatcttattacatttgtgtagtaaatggtacttcccagcctctcttttgccccattctggaatactccccagagtttgggggtgttcatgttttatacatgtaagtctgttggcatgaaggaccattttctacataatatgacatggatacttgacccaaaaaaaaatgtttagtgctaatgagcagaaaatgaatggttccataataaattgatatctgattaaaatata

SEQ ID NO: 200850 - DNA, 2545 bp, Homo sapiens
  Payload ID: 19637
  Gene Name: ZFP64 zinc finger protein
  Uniprot ID: Q9NTW7
  ENST ID: ENST00000361387
  CDS Start-End: 62-1999
tgtagatcagcgtcccccactttggcatcccggccggccggggacctcccagtctgcggccatgaacgcgagcagcgagggcgagagcttcgcgggctcggtgcaaattccaggtggcacaacggtgctggtggagctgactcccgacatccatatctgcggcatctgcaagcagcagtttaacaacctggatgcctttgtagctcacaagcaaagtggctgccagctgacaggcacatccgcagcagcccccagcacggtccagtttgtatcggaggaaacagtgcctgccacccagactcagaccaccaccagaaccatcacctcggagacccagacaatcacagtttcagctccagaatttgtttttgaacatggctatcaaacttacctgcccacggaaagtaatgaaaaccagacagccactgtcatctctctccctgccaagtcacgcaccaaaaagcccacaacaccacctgctcagaaaaggcttaactgttgctatccaggttgccaattcaagactgcttatggcatgaaggacatggagcggcatttaaaaattcacacgggagacaaaccccataagtgtgaagtctgtggcaagtgctttagccggaaagacaagctgaaaactcacatgcggtgccacacgggcgtgaagccctacaagtgtaagacgtgtgactacgccgctgccgacagcagcagcctcaacaagcacctgaggatccactcggacgagcggcccttcaaatgccagatctgcccctacgccagccgcaactccagccagctcactgtccacctgcgatcccacacggcttcagaacttgatgatgatgttccaaaagcaaactgcctctccactgaaagcactgacactccgaaggcccctgtcatcactcttccctcagaggcaagggaacaaatggccacccttggagagaggacgttcaactgttgctacccaggttgccacttcaaaactgtccatggcatgaaagacttggaccgccatctcagaatccacacgggagacaaaccgcacaagtgtgagttctgtgacaagtgcttcagccggaaggacaacctgaccatgcacatgcggtgccacaccagtgtgaagccacacaagtgtcacctgtgtgactacgctgccgtggacagcagtagcctcaagaagcacctgcggatccactctgatgagcggccgtacaaatgccagctctgcccctatgccagccgcaactccagccagctcaccgtccacctgcgatctcacacgggggatacccccttccagtgctggctctgtagcgccaagttcaaaatcagctcggacttgaaaaggcacatgatcgtgcactcgggggagaagcctttcaagtgcgagttctgcgacgtccgctgcaccatgaaggcgaatctcaaatcgcacatccgcatcaagcacaccttcaaatgtctgcactgtgccttccagggccgggaccgggctgacctcctggagcacagccggctgcaccaggccgaccacccggagaagtgtccagagtgcagctactcctgctccagcgcggccgccctgcgcgtgcacagcagagtccactgtaaggaccgtcccttcaagtgtgacttctgcagcttcgacacgaagcggcccagcagcctggccaagcacgtcgacaaggtgcacagggacgaggccaagacggagaaccgggcccctctgggcaaggaagggctcagagagggcagctcccagcacgtggccaagatcgtgacgcagagggccttccgctgtgagacctgcggcgcctccttcgtcagggatgactctctgagatgccacaagaagcagcacagtgatcagagtgagaacaagaactcagacttggtcaccttcccaccggaaagcggtgcctcgggacagctcagcaccctggtctccgtggggcagctcgaggctcccctagagcccagccaagacctctagctcagccgaagagggtggtcagctgtcggaacttctgaccagtgctgttgcccagccctccagaggtgaggccactgagagacaggctttgggcaccacttctggggctggccgctccaacttcacaggccttcagaggcgatggctgggcgacagtgacgaaagcaaagcaaagcagggctgtggagacactcctcgcatttgtctcttccctccaaggattatctgagcaagtcgacttgttcattcaaaggcggggtctgccaagccctgctctatccaatggggatagcttctacgtaacggattccaattttaaaactgatccatctctgatggaattattaaacttagacgatatagaaaactaaaactaatctctagagtggaaagggttaaagtgaggaaggtgtacgtgaagggtctggggttgctggaaaacttctatttcataacctgggtgatcgttctaagagtgtttgccttatatgtttgtgtggtttcttttacctgttgtcttacaataaaaaaggcagactcatggta

SEQ ID NO: 200851 - DNA, 3040 bp, Homo sapiens
  Payload ID: 19637
  Gene Name: ZFP64 zinc finger protein
  Uniprot ID: Q9NTW7
  ENST ID: ENST00000371515
  CDS Start-End: 133-2172
ccccgcctcgcagagttgggagaaggcagggtggggggtgtggaaaaataaaaggaaaagtccttgcaccatgtagatcagcgtcccccactttggcatcccggccggccggggacctcccagtctgcggccatgaacgcgagcagcgagggcgagagcttcgcgggctcggtgcaaagtggcacaacggtgctggtggagctgactcccgacatccatatctgcggcatctgcaagcagcagtttaacaacctggatgcctttgtagctcacaagcaaagtggctgccagctgacaggcacatccgcagcagcccccagcacggtccagtttgtatcggaggaaacagtgcctgccacccagactcagaccaccaccagaaccatcacctcggagacccagacaatcacagtttcagctccagaatttgtttttgaacatggctatcaaacttacctgcccacggaaagtaatgaaaaccagacagccactgtcatctctctccctgccaagtcacgcaccaaaaagcccacaacaccacctgctcagaaaaggcttaactgttgctatccaggttgccaattcaagactgcttatggcatgaaggacatggagcggcatttaaaaattcacacgggagacaaaccccataagtgtgaagtctgtggcaagtgctttagccggaaagacaagctgaaaactcacatgcggtgccacacgggcgtgaagccctacaagtgtaagacgtgtgactacgccgctgccgacagcagcagcctcaacaagcacctgaggatccactcggacgagcggcccttcaaatgccagatctgcccctacgccagccgcaactccagccagctcactgtccacctgcgatcccacacgggggacgcccccttccagtgctggctctgtagcgccaagttcaaaatcagctcggacttgaaaaggcacatgcgggtgcactcgggggagaagcctttcaagtgcgagttctgcaatgtccgctgcaccatgaaggggaacctcaagtcgcacatccgtatcaagcacagcgggaataacttcaagtgtcctcattgcgacttcctgggtgacagcaaagccaccctccggaagcacagccgcgtgcaccagtcggagcatcctgagaagtgctcggaatgcagctactcctgctccagcaaggccgccctgcgcatccacgagcgtatccactgcaccgaccgccctttcaagtgcaactactgcagcttcgacaccaaacagcccagcaacctgagcaagcacatgaagaagttccatggggacatggttaagactgaggctctagagaggaaggacaccggcaggcagagcagccggcaggtggccaagctggatgccaagaagagtttccactgcgatatatgcgatgcctccttcatgcgggaggactcgctccgcagccacaagagacagcacagtgagtacagtgagagtaagaactcggacgtgaccgttctccagtttcagatcgaccccagcaagcagcccgccacgcccctcactgtgggacacctccaggtgcccctccagcccagccaagtgccccagttcagcgagggaagagtcaaaatcatcgttgggcatcaggtgccccaggcgaacaccatcgtccaggctgccgccgctgcagtgaacatcgtcccgcctgccttggtggcccagaacccagaggaactcccagggaacagccggctgcagatcctgcgccaggtcagtctgatcgccccccctcagtcctcgcggtgtccgagcgaggcgggcgcaatgacccagccggctgtcctgctgaccacccacgagcagacggacggagccactctgcaccagactctcatccccacggcctcaggtggcccccaggaaggctctggcaatcaaactttcattaccagttcgggtattacttgcactgactttgaaggcctaaacgccttgattcaggaggggacagcagaagtgacagtggtgagcgatggaggccagaacatcgcagtggccaccacagcgccaccggtcttctcctcctcttcccagcaagaactacccaagcagacctactccatcattcaaggggcagcccatccagctttgctctgtcccgccgactccattccagattagtgcttaaaaaaacaaaaggagtgggggaaaggaattgagaaaaagaaatcttaagtagaattctctaaaaggtttgctcttaatgttttctttgttttgttttgtttttgagacggagtctcgctctgtttcccaggctggagtgcagtggcgctatcttggctcactgcaacgtccgcctcccaggttcaagcgattctcatgcctcagccctccgagtagctgggaccacaggtgtacgacatcatgactggctaatttttgtatatttagtagagacggggtttcatcatgttgaactcctgacctcaagtgatctgcccacctcagcctcccaaagtgctgggattacaggtgtgagccaccatgcctggccgtggtttgctcttaatgtttttaaggatggttgtgaatccccctggccccataataaattgtaattttatactgcttactataatttttttaacactgtaacaactttgagaccacctctgaatcgtcgcattataactgttgtagaatcttaaatgttaccaagatgattccaatgaggggttggaattaaatgcattaagtagtgaattcatgtgtttgtttccaacttgattttccaactctaataaaggtttctgtccatcttattacatttgtgtagtaaatggtacttcccagcctctcttttgccccattctggaatactccccagagtttgggggtgttcatgttttatacatgtaagtctgttggcatgaaggaccattttctacataatatgacatggatacttgacccaaaaaaaaatgtttagtgctaatgagcagaaaatgaatggttccataataaattgatatctgattaaaatata

SEQ ID NO: 200852 - DNA, 1841 bp, Homo sapiens
  Payload ID: 19637
  Gene Name: ZFP64 zinc finger protein
  Uniprot ID: Q9NTW7
  ENST ID: ENST00000371518
  CDS Start-End: 144-1391
acatccgtcctccccgcctcgcagagttgggagaaggcagggtggggggtgtggaaaaataaaaggaaaagtccttgcaccatgtagatcagcgtcccccactttggcatcccggccggccggggacctcccagtctgcggccatgaacgcgagcagcgagggcgagagcttcgcgggctcggtgcaaattccaggtggcacaacggtgctggtggagctgactcccgacatccatatctgcggcatctgcaagcagcagtttaacaacctggatgcctttgtagctcacaagcaaagtggctgccagctgacaggcacatccgcagcagcccccagcacggtccagtttgtatcggaggaaacagtgcctgccacccagactcagaccaccaccagaaccatcacctcggagacccagacaatcacagtttcagctccagaatttgtttttgaacatggctatcaaacttacctgcccacggaaagtaatgaaaaccagacagccactgtcatctctctccctgccaagtcacgcaccaaaaagcccacaacaccacctgctcagaaaaggcttaactgttgctatccaggttgccaattcaagactgcttatggcatgaaggacatggagcggcatttaaaaattcacacgggagacaaaccccataagtgtgaagtctgtggcaagtgctttagccggaaagacaagctgaaaactcacatgcggtgccacacgggcgtgaagccctacaagtgtaagacgtgtgactacgccgctgccgacagcagcagcctcaacaagcacctgaggatccactcggacgagcggcccttcaaatgccagatctgcccctacgccagccgcaactccagccagctcactgtccacctgcgatcccacacggcttcagaacttgatgatgatgttccaaaagcaaactgcctctccactgaaagcactgacactccgaaggcccctgtcatcactcttccctcagaggcaagggaacaaatggccacccttggagagaggacgttcaactgttgctacccaggttgccacttcaaaactgtccatggcatgaaagacttggaccgccatctcagaatccacacgggagacaaaccgcacaagtgtgagttctgtgacaagtgcttcagccggaaggacaacctgaccatgcacatgcggtgccacaccagtgtgaagccacacaagtgtcacctgtgtgactacgctgccgtggacagcagtagcctcaagaagcacctgcggatccactctgatgagcggccgtacaaatgccagctctgcccctatgccagccgcaactccagccagctcaccgtccacctgcgatctcacacggggtgttgctatgttgcctagatggaatgcagtggcatgatcacagctcactgcagcctcgacctcctggactcaagcaatcctcctcctcctgccccagcctcccaaatagctgggaccacaggcatgtgccaccacgcccagctaatttttttattttttatagaaacgaggtcttgctctgttgcccaggctggtctcaaactcgtgggctcaagtgattctcctgccttagccttctgaaatgctatgattacaggcacgagccaccgtgcctggcctatttttttaatatttttaaagatttgtaaaacaaagaagcatgtatggaccacaaagcctagtactacctggctctttaccaaaaaaaaaaaaaaaaaaattgccacatccaggtcagtagaacataaattatgtaaaaacttgatcactacacatttagtgattttgctgaaatcaacacaaaaaaaa

SEQ ID NO: 200853 - DNA, 2234 bp, Homo sapiens
  Payload ID: 19637
  Gene Name: ZFP64 zinc finger protein
  Uniprot ID: Q9NTW7
  ENST ID: ENST00000371523
  CDS Start-End: 408-1688
ctgcgcttctgaaattttaatgggcaaacgaatcacctggggatctcgttaaaatgcagacacggtttctcaaactttaatgtgcatgcgaatcacctggggatcttgttaaaatgcagattctgattcagcgggtctggggtagagcccgagagtctgcatttctaacgagctcccaggtggcgcgggctgcccgggagcggaccgcaagtccgcgggactcctggggtcttggctccaggccaatcagccgtcaggactcttgataaatcgccctgctcggctgatgagcagaattgccgggacatgcgcgttccggccgaaggggggtaatttccgaactccgggaattcgttgtgtgaagtaggccactcctagggacgcgcggggagcccggtcctcgcgccatgtcgcggcgcaagcaggccaagccccagcacctcaactccgaggagccgcggcctgcgcgccgggagtgtgcggaggtggccccgcaggtggcgggggagccggcttcagaacttgatgatgatgttccaaaagcaaactgcctctccactgaaagcactgacactccgaaggcccctgtcatcactcttccctcagaggcaagggaacaaatggccacccttggagagaggacgttcaactgttgctacccaggttgccacttcaaaactgtccatggcatgaaagacttggaccgccatctcagaatccacacgggagacaaaccgcacaagtgtgagttctgtgacaagtgcttcagccggaaggacaacctgaccatgcacatgcggtgccacaccagtgtgaagccacacaagtgtcacctgtgtgactacgctgccgtggacagcagtagcctcaagaagcacctgcggatccactctgatgagcggccgtacaaatgccagctctgcccctatgccagccgcaactccagccagctcaccgtccacctgcgatctcacacgggggatacccccttccagtgctggctctgtagcgccaagttcaaaatcagctcggacttgaaaaggcacatgatcgtgcactcgggggagaagcctttcaagtgcgagttctgcgacgtccgctgcaccatgaaggcgaatctcaaatcgcacatccgcatcaagcacaccttcaaatgtctgcactgtgccttccagggccgggaccgggctgacctcctggagcacagccggctgcaccaggccgaccacccggagaagtgtccagagtgcagctactcctgctccagcgcggccgccctgcgcgtgcacagcagagtccactgtaaggaccgtcccttcaagtgtgacttctgcagcttcgacacgaagcggcccagcagcctggccaagcacgtcgacaaggtgcacagggacgaggccaagacggagaaccgggcccctctgggcaaggaagggctcagagagggcagctcccagcacgtggccaagatcgtgacgcagagggccttccgctgtgagacctgcggcgcctccttcgtcagggatgactctctgagatgccacaagaagcagcacagtgatcagagtgagaacaagaactcagacttggtcaccttcccaccggaaagcggtgcctcgggacagctcagcaccctggtctccgtggggcagctcgaggctcccctagagcccagccaagacctctagctcagccgaagagggtggtcagctgtcggaacttctgaccagtgctgttgcccagccctccagaggtgaggccactgagagacaggctttgggcaccacttctggggctggccgctccaacttcacaggccttcagaggcgatggctgggcgacagtgacgaaagcaaagcaaagcagggctgtggagacactcctcgcatttgtctcttccctccaaggattatctgagcaagtcgacttgttcattcaaaggcggggtctgccaagccctgctctatccaatggggatagcttctacgtaacggattccaattttaaaactgatccatctctgatggaattattaaacttagacgatatagaaaactaaaactaatctctagagtggaaagggttaaagtgaggaaggtgtacgtgaagggtctggggttgctggaaaacttctatttcataacctgggtgatcgttctaagagtgtttgccttatatgtttgtgtggtttcttttacctgttgtcttacaataaaaaaggcagactcatggta

SEQ ID NO: 200854 - DNA, 710 bp, Homo sapiens
  Payload ID: 19637
  Gene Name: ZFP64 zinc finger protein
  ENST ID: ENST00000395979
  CDS Start-End: 27-422
aggacccctcagaggctgttttcgggatgcgcgggcacccgagtctccggcctccttggcactgggcttcggctgcgcgcctggaaggtggcttcttgccttggggttacgtttcaaatgcgttgtccagggaaggcctcaccgaggagcggacgttcgagcgaagacccgaaggatgggagggagcgagctgtgcagcttcagaacttgatgatgatgttccaaaagcaaactgcctctccactgaaagcactgacactccgaaggcccctgtcatcactcttccctcagaggcaagggaacaaatggccacccttggagagaggacgttcaactgttgctacccaggttgccacttcaaaactgtccatggcatgaaagacttggaccgccatctcagaatccacacggccagctgctgagaagagaaataagacctgctgaagcaaaggagtgccataatctatgccaggattacaaactgcagcccatgggcaactcagcctgttggcatgctccttcatttacctattgcttgcagctttctggccttacaagaggtagttgttacagggactgtagggtgcacaaagcctaaaatactatctttttgttttgtttttttctctgagacagagtcctgctctgtcacccaggctagaatgcagtggtgcaatctcagttcattgcgacccctgcctcccaggttc

SEQ ID NO: 200855 - DNA, 762 bp, Homo sapiens
  Payload ID: 19637
  Gene Name: ZFP64 zinc finger protein
  ENST ID: ENST00000395989
  CDS Start-End: 100-762
ggattcctctagccactcctctcaagagctagtcaacgagtttgcctcccaaacacgctggaaggatgctcagaggacccctcagaggctgttttcgggatgcgcgggcacccgagtctccggcctccttggcactgggcttcggctgcgcgcctggaaggtggcttcttgccttggggttacgtttcaaatgcgttgtccagggaaggcctcaccgaggagcggacgttcgagcgaagacccgaaggatgggagggagcgagctgtgcagcttcagaacttgatgatgatgttccaaaagcaaactgcctctccactgaaagcactgacactccgaaggcccctgtcatcactcttccctcagaggcaagggaacaaatggccacccttggagagaggacgttcaactgttgctacccaggttgccacttcaaaactgtccatggcatgaaagacttggaccgccatctcagaatccacacgggagacaaaccgcacaagtgtgagttctgtgacaagtgcttcagccggaaggacaacctgaccatgcacatgcggtgccacaccagtgtgaagccacacaagtgtcacctgtgtgactacgctgccgtggacagcagtagcctcaagaagcacctgcggatccactctgatgagcggccgtacaaatgccagctctgcccctatgccagccgcaactccagccagctcaccgtccacctgcgatctcacacgggggatacccccttccagtgctggctc

SEQ ID NO: 200856 - DNA, 445 bp, Homo sapiens
  Payload ID: 19637
  Gene Name: ZFP64 zinc finger protein
  ENST ID: ENST00000456175
  CDS Start-End: 1-361
agagaggacgttcaactgttgctacccaggttgccacttcaaaactgtccatggcatgaaagacttggaccgccatctcagaatccacacgggagacaaaccgcacaagtgtgagttctgtgacaagtgcttcagccggaaggacaacctgaccatgcacatgcggtgccacaccagtgtgaagccacacaagtgtcacctgtgtgactacgctgccgtggacagcagtagcctcaagaagcacctgcggatccactctgatgagcggccgtacaaatgccagctctgcccctatgccagccgcaactccagccagctcaccgtccacctgcgatctcacacggggccgggaccgggctgacctcctggagcacagccggctgcaccaggccgaccacccggagaagtgtccagagtgcagctactcctgctccagcgcggccgc

SEQ ID NO: 200857 - DNA, 2104 bp, Homo sapiens
  Payload ID: 19638
  Gene Name: ZFP69 zinc finger protein
  Uniprot ID: Q49AA0
  ENST ID: ENST00000372705
  CDS Start-End: 295-1875
gatgggaatgtggagcagaccctcgtccactccggaggccgagggtcctccgggcttccgaaggaagccgacctcaacgctggacgcttcttggagaatgattgcgttgagtggagatgtggtctgtctataaaaggccgggagggaacaatatctgttaccactcagtccgtctctaaagagacactctttaccgctgaaaacctcaagagtgagcactcccacgcccccgtctctggtcctacctgggtccaaggccgatgtgaagtggacaagtccagtaaggcaggcatcatgccacagcagctcctgatcaccctgcctaccgaggccagcacctgggtgaagctgcaacatccaaagaaggccgtggagggggcgcccctgtgggaggatgtgactaaaatgtttgaaggagaagctctgctgtctcaggatgctgaggacgtaaagacccagagagaaagtttagaggatgaagtgacccctggactcccgacagcagaatcccaggaattgttgactttcaaggacatatctattgacttcacccaggaagagtgggggcagctggctcctgctcaccagaatctataccgagaggtgatgctggagaactacagcaacttggtgtcagtgggatatcaactttccaaacctagtgtgatatcccagttagagaaaggagaagagccatggatggcagagaaagaaggcccaggagatcccagttcagacttgaagagtaaaatagaaaccattgagtcaactgcaaagagtaccatttcacaggagcgcttatatcatggcattatgatggaaagtttcatgagggatgatataatttattccacgttgagaaaagtctccacatatgatgatgtcttagaaaggcaccaggaaacttgtatgagagatgtgagacaagccatcttgacccataagaagagagtccaagaaactaacaaatttggggaaaatatcattgtgcattcaaatgttattattgaacagaggcaccataaatatgatacacctacaaagcggaacacatacaaattagatttgattaatcatccaacaagttacataagaacaaaaacctatgaatgtaatatatgtgaaaaaatcttcaaacaacctattcaccttactgaacatatgagaattcatactggtgagaaacctttcagatgtaaggaatgtggaagggcctttagtcaaagtgcatccctcagtacacaccagagaatccatactggtgagaaaccctttgaatgtgaggaatgtgggaaagccttcagacatcgctcatcacttaatcagcatcatagaactcacactggggagaaaccctatgtatgtgataaatgtcagaaagctttcagccagaacattagcttggttcaacatttgaggactcattctggagagaaaccttttacttgcaatgaatgtgggaaaacctttagacagattagacaccttagtgaacatataagaattcataccggggagaagccctatgcatgcactgcatgttgtaaaacctttagtcatagagcgtatctaacacatcaccagagaatccatactggggagagaccctacaaatgtaaagaatgtggaaaagcctttaggcagaggatacaccttagcaaccataaaactgttcatacaggagtgaaagcatatgaatgcaaccgctgtggaaaagcctataggcatgattcatcctttaaaaaacatcagagacatcacactggagaaaaaccttacgaatgtaacgaatgtggaaaagccttcagctataactcttcacttagtcgacatcatgaaatacacaggaggaacgccttccgaaataaggtgtaaaaacagatatttgacttgagaacaaaagccaagtgtaaattggtgatttagagtgctttaaaatttcaggactcagatatgaggaattgatgtaatgatgccaacttttaatttttcccattgtaaataaacattacattgacaggtattgactactaacacctctaaaaagtacttaagattaaaatctggtccttaaaattaaatgaattcagcattatgaaaaatt

SEQ ID NO: 200858 - DNA, 2871 bp, Homo sapiens
  Payload ID: 19638
  Gene Name: ZFP69 zinc finger protein
  Uniprot ID: Q49AA0
  ENST ID: ENST00000372706
  CDS Start-End: 1007-2587
gggcgcgcgctgcttcccgggagagggcgggctccgtggcagccccctgtgggcggagccggcggccggggctcacaacccgccggaagacgcgcgggttgtggcagctgcagcgggaccgcgtggggtgggccccgggaccgccagggctgcagcgagagcggccggcggtgcaagcggccgggagggcgcggccggaggcagaggccaggcgagacacccggctgcggcctaagaggccaggctgggtgggcttggctgcagccgccagccccgtgttaaagcggcagccagggaggtgtatcctccccggggtctgcaagacgccggctcagggcatccctcccattccggccctcaaagcctcgctcctgggggcgctgctgggaaagcccacccgcctgggcgggcccttgatgggaatgtggagcagaccctcgtccactccggaggccgagggtcctccgggcttccgaaggaagccgacctcaacgctggacgcttcttggagaatgattgcgttgagtggagatgtggtctgtctataaaaggccgggagggaacaatatctgttaccactcagtccgtctctaaagagacactctttaccgctgaaaacctcaagagtgagcactcccacgcccccgtctctggtcctacctgggtccaaggccgatgtgattctggagttctggagacaagtgcttctggatccctcttcccttcccttttgctcctctaaagagtatggagacatgaactcaaacctaactaactggctgcctcccaaagaaagtgcttgatttaaaggggagtttgttttccagaattgttaaagtcacatcagtctctaggaacccccaggtcctggtgctgcagggacacaccagagtcctgagggcaggtgattggaatctgagcaacaccccacaactgtgaagcgtctcatcaagagcttctggcaatttcctcaccagaagtggacaagtccagtaaggcaggcatcatgccacagcagctcctgatcaccctgcctaccgaggccagcacctgggtgaagctgcaacatccaaagaaggccgtggagggggcgcccctgtgggaggatgtgactaaaatgtttgaaggagaagctctgctgtctcaggatgctgaggacgtaaagacccagagagaaagtttagaggatgaagtgacccctggactcccgacagcagaatcccaggaattgttgactttcaaggacatatctattgacttcacccaggaagagtgggggcagctggctcctgctcaccagaatctataccgagaggtgatgctggagaactacagcaacttggtgtcagtgggatatcaactttccaaacctagtgtgatatcccagttagagaaaggagaagagccatggatggcagagaaagaaggcccaggagatcccagttcagacttgaagagtaaaatagaaaccattgagtcaactgcaaagagtaccatttcacaggagcgcttatatcatggcattatgatggaaagtttcatgagggatgatataatttattccacgttgagaaaagtctccacatatgatgatgtcttagaaaggcaccaggaaacttgtatgagagatgtgagacaagccatcttgacccataagaagagagtccaagaaactaacaaatttggggaaaatatcattgtgcattcaaatgttattattgaacagaggcaccataaatatgatacacctacaaagcggaacacatacaaattagatttgattaatcatccaacaagttacataagaacaaaaacctatgaatgtaatatatgtgaaaaaatcttcaaacaacctattcaccttactgaacatatgagaattcatactggtgagaaacctttcagatgtaaggaatgtggaagggcctttagtcaaagtgcatccctcagtacacaccagagaatccatactggtgagaaaccctttgaatgtgaggaatgtgggaaagccttcagacatcgctcatcacttaatcagcatcatagaactcacactggggagaaaccctatgtatgtgataaatgtcagaaagctttcagccagaacattagcttggttcaacatttgaggactcattctggagagaaaccttttacttgcaatgaatgtgggaaaacctttagacagattagacaccttagtgaacatataagaattcataccggggagaagccctatgcatgcactgcatgttgtaaaacctttagtcatagagcgtatctaacacatcaccagagaatccatactggggagagaccctacaaatgtaaagaatgtggaaaagcctttaggcagaggatacaccttagcaaccataaaactgttcatacaggagtgaaagcatatgaatgcaaccgctgtggaaaagcctataggcatgattcatcctttaaaaaacatcagagacatcacactggagaaaaaccttacgaatgtaacgaatgtggaaaagccttcagctataactcttcacttagtcgacatcatgaaatacacaggaggaacgccttccgaaataaggtgtaaaaacagatatttgacttgagaacaaaagccaagtgtaaattggtgatttagagtgctttaaaatttcaggactcagatatgaggaattgatgtaatgatgccaacttttaatttttcccattgtaaataaacattacattgacaggtattgactactaacacctctaaaaagtacttaagattaaaatctggtccttaaaattaaatgaattcagcattatgaaaaattcataacagtttttttctgatttcatggtggattaataaattattcttcatgggta

SEQ ID NO: 200859 - DNA, 2029 bp, Homo sapiens
  Payload ID: 19639
  Gene Name: ZFP69 zinc finger protein B
  Uniprot ID: Q9UJL9
  ENST ID: ENST00000361584
  CDS Start-End: 298-1902
gggctgctgagagtaaatacttggcgcctccagctgctggccaaggagacagatggagctcaagttgggagatacgccctgagagccgatgatagacacaagtccagatctcggattttgatactgtatgttccctgggttcctgagagaggacattgaggagtaggagtcggcgattaaggagatcggtacaattgggaagcctcctgtcagagcttccagcaatttcctcatcagaggtggacaagccctatgggctaagacagagggtcctcagaaaggagtgcggacgccgtcatgctgcagcagctcctgatcaccctgcccaccgaggccagcacctgggtgaagttgcgtcatccaaaggcggccacggagcgggtggccctgtgggaggatgtgactaagatgtttaaagcagaagctctgctgtctcaggatgctgatgagacccagggcgaaagtttagagagtagagtgacccttggatccctgacagcagaatcccaggaactgttaaccttcaaggacgtatctgtggacttcactcaggaggagtgggggcagctggcccctgctcaccggaatctgtaccgggaggtgatgctggagaactatgggaacctggtctcagtgggatgtcagctttccaaacctggcgtgatttcccagttggagaaaggagaagaaccatggctgatggagagagatatttcaggagttccaagttcagacttgaagagcaaaacaaaaaccaaagagtcagccttacagaatgatatttcgtgggaagaactacattgtggcctaatgatggaaagatttacaaaaggaagcagcatgtattccaccttgggaagaatctccaaatgtaataagctagaaagccaacaagagaaccaaagaatgggtaaggggcaaatccccctgatgtgcaagaaaacattcactcaggagagaggccaagagtctaatagatttgagaaaagaattaatgtgaagtcagaagttatgccaggaccaataggtcttccaagaaaaagagatcgtaaatatgacacacctggaaagagaagcagatacaacatagatttagttaatcattcaaggagttatacaaaaatgaaaacctttgagtgtaatatttgtgaaaaaatcttcaaacagcttattcaccttactgaacacatgagaattcataccggggagaaacctttcagatgtaaggaatgtggaaaagcctttagccaaagttcatctcttattccgcatcagagaattcatactggtgagaaaccctatgaatgtaaggagtgtgggaaaaccttcagacatccttcatcgcttactcaacatgttagaattcataccggggaaaagccctatgaatgtagggtatgtgagaaagccttcagccagagcattggactgatccagcatttgagaactcatgttagagagaaaccttttacatgcaaagactgtggaaaagcgtttttccagattagacaccttaggcaacatgagattattcatactggtgtgaaaccctatatttgtaatgtatgtagtaaaaccttcagccatagtacatacctaactcaacaccagagaactcatactggagaaagaccatataaatgtaaggaatgtgggaaagcctttagccagagaatacatctttctatccatcagagagtccatactggagtaaaaccttatgaatgcagtcattgtgggaaagcctttaggcatgattcatcctttgctaaacatcagagaattcatactggagaaaaaccttatgattgtaatgagtgtggaaaagccttcagctgtagttcatcccttattagacactgcaaaacacatttaagaaataccttcagcaatgttgtgtgaaatatactaaacatcaaagaatctatgttggagcacaagattctaaatcagtggttccctgatccctcaaaaatccatttgtttttggatttccaaaaacgaacattaaaaaaaaatggtttggcac

SEQ ID NO: 200860 - DNA, 2109 bp, Homo sapiens
  Payload ID: 19639
  Gene Name: ZFP69 zinc finger protein B
  Uniprot ID: Q9UJL9
  ENST ID: ENST00000411995
  CDS Start-End: 376-1980
ggccgcgcagtgccggaacccggctgcagcggtgggaaggcgggggcgtgccggcccagcggggagaggcatctgcaggggctgctgagagtaaatacttggcgcctccagctgctggccaaggagacagatggagctcaagttgggagatacgccctgagagccgatgatagacacaagtccagatctcggattttgatactgtatgttccctgggttcctgagagaggacattgaggagtaggagtcggcgattaaggagatcggtacaattgggaagcctcctgtcagagcttccagcaatttcctcatcagaggtggacaagccctatgggctaagacagagggtcctcagaaaggagtgcggacgccgtcatgctgcagcagctcctgatcaccctgcccaccgaggccagcacctgggtgaagttgcgtcatccaaaggcggccacggagcgggtggccctgtgggaggatgtgactaagatgtttaaagcagaagctctgctgtctcaggatgctgatgagacccagggcgaaagtttagagagtagagtgacccttggatccctgacagcagaatcccaggaactgttaaccttcaaggacgtatctgtggacttcactcaggaggagtgggggcagctggcccctgctcaccggaatctgtaccgggaggtgatgctggagaactatgggaacctggtctcagtgggatgtcagctttccaaacctggcgtgatttcccagttggagaaaggagaagaaccatggctgatggagagagatatttcaggagttccaagttcagacttgaagagcaaaacaaaaaccaaagagtcagccttacagaatgatatttcgtgggaagaactacattgtggcctaatgatggaaagatttacaaaaggaagcagcatgtattccaccttgggaagaatctccaaatgtaataagctagaaagccaacaagagaaccaaagaatgggtaaggggcaaatccccctgatgtgcaagaaaacattcactcaggagagaggccaagagtctaatagatttgagaaaagaattaatgtgaagtcagaagttatgccaggaccaataggtcttccaagaaaaagagatcgtaaatatgacacacctggaaagagaagcagatacaacatagatttagttaatcattcaaggagttatacaaaaatgaaaacctttgagtgtaatatttgtgaaaaaatcttcaaacagcttattcaccttactgaacacatgagaattcataccggggagaaacctttcagatgtaaggaatgtggaaaagcctttagccaaagttcatctcttattccgcatcagagaattcatactggtgagaaaccctatgaatgtaaggagtgtgggaaaaccttcagacatccttcatcgcttactcaacatgttagaattcataccggggaaaagccctatgaatgtagggtatgtgagaaagccttcagccagagcattggactgatccagcatttgagaactcatgttagagagaaaccttttacatgcaaagactgtggaaaagcgtttttccagattagacaccttaggcaacatgagattattcatactggtgtgaaaccctatatttgtaatgtatgtagtaaaaccttcagccatagtacatacctaactcaacaccagagaactcatactggagaaagaccatataaatgtaaggaatgtgggaaagcctttagccagagaatacatctttctatccatcagagagtccatactggagtaaaaccttatgaatgcagtcattgtgggaaagcctttaggcatgattcatcctttgctaaacatcagagaattcatactggagaaaaaccttatgattgtaatgagtgtggaaaagccttcagctgtagttcatcccttattagacactgcaaaacacatttaagaaataccttcagcaatgttgtgtgaaatatactaaacatcaaagaatctatgttggagcacaagattctaaatcagtggttccctgatccctcaaaaatccatttgtttttggatttccaaaaacgaacattaaaaaaaaatggtttggcacaa

SEQ ID NO: 200861 - DNA, 1976 bp, Homo sapiens
  Payload ID: 19639
  Gene Name: ZFP69 zinc finger protein B
  ENST ID: ENST00000484445
  CDS Start-End: 367-762
ggccgcgcagtgccggaacccggctgcagcggtgggaaggcgggggcgtgccggcccagcggggagagggggctgctgagagtaaatacttggcgcctccagctgctggccaaggagacagatggagctcaagttgggagatacgccctgagagccgatgatagacacaagtccagatctcggattttgatactgtatgttccctgggttcctgagagaggacattgaggagtaggagtcggcgattaaggagatcggtacaattgggaagcctcctgtcagagcttccagcaatttcctcatcagaggtggacaagccctatgggctaagacagagggtcctcagaaaggagtgcggacgccgtcatgctgcagcagctcctgatcaccctgcccaccgaggccagcacctgggtgaagttgcgtcatccaaaggcggccacggagcgggtggccctgtgggaggatgtgactaagatgtttaaagcagaaggaactgttaaccttcaaggacgtatctgtggacttcactcaggaggagtgggggcagctggcccctgctcaccggaatctgtaccgggaggtgatgctggagaactatgggaacctggtctcagtgggatgtcagctttccaaacctggcgtgatttcccagttggagaaaggagaagaaccatggctgatggagagagatatttcaggagttccaagttcagacttgaagagcaaaacaaaaaccaaagagtcagccttacagaatgatatttcgtgggaagaactacattgtggcctaatgatggaaagatttacaaaaggaagcagcatgtattccaccttgggaagaatctccaaatgtaataagctagaaagccaacaagagaaccaaagaatgggtaaggggcaaatccccctgatgtgcaagaaaacattcactcaggagagaggccaagagtctaatagatttgagaaaagaattaatgtgaagtcagaagttatgccaggaccaataggtcttccaagaaaaagagatcgtaaatatgacacacctggaaagagaagcagatacaacatagatttagttaatcattcaaggagttatacaaaaatgaaaacctttgagtgtaatatttgtgaaaaaatcttcaaacagcttattcaccttactgaacacatgagaattcataccggggagaaacctttcagatgtaaggaatgtggaaaagcctttagccaaagttcatctcttattccgcatcagagaattcatactggtgagaaaccctatgaatgtaaggagtgtgggaaaaccttcagacatccttcatcgcttactcaacatgttagaattcataccggggaaaagccctatgaatgtagggtatgtgagaaagccttcagccagagcattggactgatccagcatttgagaactcatgttagagagaaaccttttacatgcaaagactgtggaaaagcgtttttccagattagacaccttaggcaacatgagattattcatactggtgtgaaaccctatatttgtaatgtatgtagtaaaaccttcagccatagtacatacctaactcaacaccagagaactcatactggagaaagaccatataaatgtaaggaatgtgggaaagcctttagccagagaatacatctttctatccatcagagagtccatactggagtaaaaccttatgaatgcagtcattgtgggaaagcctttaggcatgattcatcctttgctaaacatcagagaattcatactggagaaaaaccttatgattgtaatgagtgtggaaaagccttcagctgtagttcatcccttattagacactgcaaaacacatttaagaaataccttcagcaatgttgtgtgaaatatactaaacatcaaagaatctatgttggagcacaagattctaaatcagtggttccctgatccctcaaaaatccatttgtttttggatt

SEQ ID NO: 200862 - DNA, 2623 bp, Homo sapiens
  Payload ID: 19640
  Gene Name: ZFP82 zinc finger protein
  Uniprot ID: Q8N141
  ENST ID: ENST00000392161
  CDS Start-End: 244-1842
gcgcagcccgttaggccccggggattgtggcgtgacccggcagcggcttcctccgttcgggcatcgctgtgcctcgggttcgcgccccgagtgagcagtcctggcccggagcgtcggtcctggtaatctgtaggaaaagcgctgcggcccagggggtaaagagagatcagcctctgtggactcggtgcttctcctggcaagtaaaccccaaggaggactgaccagttcttgaatttctataccatggcccttcgatcagtgatgttcagtgatgtatccatagacttctctccagaagagtgggaatacctggacttggaacaaaaggacttgtacagagatgtcatgttggagaactacagcaacttggtctcactgggatgcttcatttctaaaccagatgtgatttcctcattggagcaaggaaaagagccttggaaagttgtgaggaaaggaagaagacaatatccagatttggagaccaagtatgagaccaagaagttatctttagaaaatgacatttatgaaataaatttatcccagtggaagataatggaaagaattgaaaaccatggccttaagggtctcattttaaaaaatgattgggaatccacaggaaaaattgaaggacaggagagacctcaagaaggatacttcagtagtgtgaaaatgccatctgaaaaggtgtcctcttaccagaaacgcacatctgttactccacatcagagacttcattttgttgataaaccctatgaatgtaaggaatgtgggaaggcgttcagagtgcgccaacagcttacttttcatcacagaattcatactggtgaaaaaccgtatgaatgtaaggaatgtgggatggccttcagacagactgcacaccttactcgacatcagagacttcattctggtgaaaaactctatgaatgtaaggaatgtggggaagctttcatatgtggtgcagatcttagagtacatcagaaaatgcatattggtgagaagccctatgaatgtaaagaatgtgggaaggcttttagggtacgaggacaacttactctgcatcagaggattcatactggtgagaaaccctatgtgtgtaaagagtgtggaaaagcctttagacagtacgcacacctgactcggcatcagaagcttaatagtgctgacaggctctatgaatgcaaagaatgtgggaaggcctttttgtgtggctctggtcttagagtacatcacaaacttcatactggtgagaaaccctatgaatgtaaggaatgcgggaaggcctttagagtgcgacaacaactaacactccatcagagaattcatactggtgagaaaccctatgaatgtaaggaatgtggaaagacctttagccgtggttatcatcttattctccatcacagaattcatactggtgaaaaaccttacgaatgtaaggaatgctggaaagcctttagtcgctactcacaacttatttcacatcagagtattcatattggtgttaagccctatgactgtaaggaatgcgggaaggccttcagactactttcacaactcacacagcatcagagtattcatattggtgagaaaccttataaatgtaaggaatgtggcaaggcctttagattgcgccaaaaacttactctacatcagagcattcatactggcgaaaaaccctttgagtgtaaggaatgtaggaaggcctttagacttaattcatcccttattcaacatctgagaattcattctggtgagaaaccctatgaatgtaaggaatgtaagaaggcctttaggcaacattcacaccttactcatcatctgaaaattcataatgtaaaaatctaagaaagtcttttcaacttctgtgttatagaacattctatgaatgtagtaattaatctattttgctccatacatgcaactgcgttggcattagaggttttataccattaaaagagtgtgacaatgtattgtagtccatcatcactcaaacctgaaacttcagcatatttgttctaaaaactaatcctgttataagaatgaaaaagacatttaccgtcatccctatcccatcactttgtgtcatactggacaagacgcttaactgctctgtgctataattttttaatttatgacatggtcatataagagtgcagcagtttgacacactttcaatcaagaggtggaatctacatccctctgttgtatacaggaatctacatccctctgtgactgcttcgcccagtagaatatggtagacgtactgctgtgctggtttcttgactcagactttactggtagggttacttcatctcatgaaatgacagaactgtcttgttacaaagtctggctactttgctgaagagaccacatgaagaggccctgaaactacgtagagagggagaggcacctgctgaaccctgtcttcttgacatccaccaagataccagacatttgagtgaaattttggatccaccagaccagccaccagctaaatgccagtgagcgacttggtaacctgaactgatgccatgtagaatggaagaattgaccagctgagcccctggcccaaatttctgacccacaaaaacatgagatataataaaatggttgttgttttaagcca

SEQ ID NO: 200863 - DNA, 1360 bp, Homo sapiens
  Payload ID: 19640
  Gene Name: ZFP82 zinc finger protein
  ENST ID: ENST00000445543
  CDS Start-End: 1-148
agagccttggaaagttgtgaggaaaggaagaagacaatatccagatgctgcgataaccaaaaggacttcgaagatgaaaatgtcagcattatggcagatgtatgattactggtatggtgaggaaagcaactcccatcatgctttgtaaccagctgcttgctttttttgaatgatacttttcaatagaatagaaagcccactagtcctatcttttatatatacattatatgtatttaaactttcttattgatcaatatttaggtgataagcattttctcactgtgaaaaataccttattgaataggtctgtgtttattactgtacataagcaagagtttctctaaggtatttatcaaaagtaggattgctcagtcatagttaatatttactttcaacctcactagatactgtcatagaagtagagagcatcagtatgctcccagtgcacaatcccttcaaccagtgaaatatgttttccttatttccttatatccttacttctggtatgcatagtaatattttcctggttaatagtgaattgggcatattttcacatctgaatattggctaaacgctgtaacttgccaatttatgtctttgcctgtgttcctttaaaaaagcttttaaaatataagaattataagattcttaaaaaataaaattctagatagtagtcctttgttataaatggacttaccttctcccatattgtatttatgttgatattgtcatatgaatacgttaaatgtggatacaatcatagctttcattattacctaataatcttttaaattttattttttactagactcttggttttctaggcaatcaggtgtgtcaactgcaaatagatataattttgtttttttctaaatatagtgattattttttaaattattgttattgtaatagagtctccaaaacaaggtttagtattcatggtgataccaggcatctggtcattttctccaatttaatgaaaattacttggtgtaatgtttactctaggtctgagataaatagattttgtagctcagttgtctcagttcttgtttaacttttttttttattagaaatatctgctaaatatagtcagatgcctttttggctcattgatatgatgtttttctccttgagtttgttaatgtgacaagttgtactgtagtcattaaggcaggtatgttagaatgaaccagaatgttcgatgagcaagaatgaacaaatagaccaatggaacaaaataaagagccctgaagtagatctctctctctatatatatgtggttgtctaatttgtgataaagtttcctcggccatgtggttgggaaatggtggtcttttcaataaaaagcactggatca

SEQ ID NO: 200864 - DNA, 4384 bp, Homo sapiens
  Payload ID: 19641
  Gene Name: ZFP90 zinc finger protein
  Uniprot ID: Q8TF47
  ENST ID: ENST00000398253
  CDS Start-End: 36-1946
ctcctgccccggagccgggccctggcgaggcaggaatggccccgaggcctccgaccgccgcgccccaggaatcagtgacattcaaagatgtgtctgtggacttcacccaggaagaatggtaccatgtcgaccctgctcagaggagcttatacagggatgtgatgctggagaactatagccacctggtttctcttggatatcaagtttccaagccagaggtgatcttcaaattggagcaaggagaagagccatggatatcagagggagaaatccaacgacctttctatccagactggaagaccaggcctgaagtcaaatcatcacatttgcagcaggatgtatcagaagtatcccactgcacacatgatctcttacatgctacattagaagactcctgggatgttagcagccagttagacaggcaacaggaaaactggaagagacatctgggatcagaggcatccacccagaagaaaataattacaccacaagaaaattttgagcaaaataaatttggtgaaaattctagattgaacaccaatttggttacacaactgaacattcctgcaagaataaggcctagtgaatgtgagacccttggaagcaatttgggacataatgcagacttacttaatgagaataatattcttgcaaaaaagaaaccctataagtgtgataaatgtagaaaagcctttattcatagatcatcgcttactaaacatgagaaaacacataaaggagagggagctttccctaatggaacagatcaaggaatttatcctggaaagaaacaccatgaatgtaccgactgtgggaaaacctttctctggaagacacagcttactgagcatcagagaattcacactggggagaaaccctttgaatgcaatgtatgtggaaaggccttcaggcatagctcatctcttggtcagcatgagaatgctcataccggagagaaaccctatcagtgtagtctctgtgggaaagccttccagcgcagctcctcccttgttcaacaccagcgaattcacactggagagaaaccctatcgatgtaatctatgtgggaggtcctttaggcatggcacatccctcactcaacacgaggtcacacacagtggagagaagcccttccagtgtaaggaatgtgggaaagcctttagtcgatgttcttcccttgtccaacatgagaggactcatactggagagaaaccttttgaatgtagcatatgtgggagggcttttggtcagagcccatccctttataaacatatgaggattcataagagaggcaaaccttaccaaagcagtaactacagcatagatttcaagcacagcacatctctcactcaagatgaaagcactcttaccgaagtgaaatcctaccattgtaatgactgtggggaagactttagtcacattacagactttactgaccatcagaggatccatactgcagagaacccctatgattgtgagcaggcttttagtcagcaagctatttctcatcctggagagaaaccctatcaatgtaatgtatgtgggaaagctttcaaaaggagtacaagtttcatagagcatcacagaattcatactggagagaaaccctatgaatgtaatgagtgtggagaagcctttagtcgacgctcatcgcttactcaacatgagagaacccacactggagagaaaccctatgaatgtattgactgtgggaaagcctttagtcaaagttcatctctcattcagcatgagagaactcatactggagagaagccctatgaatgtaatgaatgtgggagagccttccgaaaaaaaaccaacctgcatgatcatcagagaattcatactggagaaaaaccctattcttgtaaggaatgtgggaaaaacttcagccgaagttcagctcttactaaacaccagagaattcatactcgaaataaactctaggaaccgtgaaattaaggaatttgcagaatgctttagctaaaatgttctgattcaggatcagaggattcttagagagcttgggaatgtaatgaattacgtgtgtgtttatacgttgtgtgtggagaaaactgccagtagacagattttttttttttaacataaagacacattctcagatctgattacagactagtgtaaaaacagctacatgtatgtagctggttggggatgatatgcctgtatgttggactttgcttttgaatatatgtatgcaggatatcatcaagtttcaacatcttgacttgtgacccccaatgtcaacagcttttttaaaaagcaaattcctgcagtaatgaccaaaacccattttaaaaattgcttgacaactgcactcaactgcagctcttacattaacttcaccatggaaaccagttccaactccaggaagtcaccattcaaagaattagatcaactagcccaaccacttcattgtacagatgaagactgaaagccaaagatgtgaagtggtttccacagtatgatacagcctataagggtaaagctgggttaaaaatgcaggtttcctggatttggggccccatggccttgccagtgaaaaggttatttttggactcagagggctttaaaataaattttaagatgtatcagatacacaaacatttaatgggcacctatgggttggacactttgagaattcttaaaagtataagtgggagcaaaatgtatgcaaatttatcacaaactatttaaagcaacttcttggaggcttacaaaccacaatttaacagaaactgtagatggttgaactactagtgacttttttccccttttcccagttacaattatactttcagctaacatatgccagtttcacagaactattaagtccccttattgtactttttatggcatgcccatgaaaaagcactttcttaagcctacagtatcagatcaatgggaaaacaacagaaaactaagaggagaattttcccgttaattttcttgcagaaaagttaagtctaattgcccattgccataaattttgccttgtactcagagaagcaacatgcactggctcattttatgtgcaaagaaaagatttcaccattaaaaaaattaacttggctaggtatggtgtctcacacctgtaatcccagcactttgggtggctaaggcagatagactgcttgaacccaggagttcaagaccagcctggacaacatggtgaaaccccatctctttaaaaaaaaaaaaaaatccaaaaattagctgggcatggtggcatgcagtggtagtcccagctactcaggaggctgaggtgggaggatcactggaacccgggagcagagactgcagtgagctgagatcacactactgcattccagcctgagcaacagagcaagacacacacacatcaatttattttagttgtataatgcttttctattagtaaagcatcagctaagcttcagtggcctgctccatcccctaatgactcccatgggctatcctaaaggaacttccagaacctttgttggtgtgttgacattgaccatgcagaccaatttgggcacaactggacattgattccttttacacaagagctgcctcccaaagatagataaattttcccagccctaaatatgaatcatggggcaagatattggtcgtattgatggtgaacctttcctactggattctttgcatgccacatagcaggattcattgcctttctctcatcatggatggcatgcagcagcacccaagtattcttcattctttgcagggaaaaaattgtgcatgggggctgaaatgtaatatgtgtagctcaattagtctctcctctgtgatgcaaaatggaatattcaatggcagatctgcccttctgagatgctgaccatccaaaacaccttgtttatggtgcaccatgattagctcacacacaatgccaaggctgtgcttctattatctgatacatagtttgacaatgggtaattctactcagaccctccctactgattggctaggatgcctgtcaggaactcattatgctactggttgtttggggatccccatagtggactactttcaggaatggcatgaattgtaaccaactgagtgctgcccccactgttacggaagtttataaaaccttagttccagaagacccaaaggagagtactggtttgtgtttggtgcttggcctagatccagccaccactctgaaactcagcacatcttcattgacagggagggagcccaggacatatgtgtggctcattgaccagaaggctttcttagtcccaacagccatgaaccatgcacttatggatacccagccttttagggctacgtgaaatgcatccttgtaacatcattgtattctttcaataaatagccttctgagttgaatggga

SEQ ID NO: 200865 - DNA, 556 bp, Homo sapiens
  Payload ID: 19641
  Gene Name: ZFP90 zinc finger protein
  ENST ID: ENST00000569323
  CDS Start-End: 91-273
gcggggtggggtcggtgttgcagcggggtgagtgggccctgtcctttctccccagctcctgccccggagccgggccctggcgaggcaggaatggccccgaggcctccgaccgccgcgccccaggaatcagtgacattcaaagatgtgtctgtggacttcacccaggaagaatggtaccatgtcgaccctgctcagaggagcttatacagggatgtgatgctggagaactatagccacctggtttctcttgagttcctgaggatcaaggactagtactgacttgtccttaggagggttctttgtccacttgcacaaacaaccaaatcttgtgtatttacccatgagcaggatatcaagtttccaagccagaggtgatcttcaaattggagcaaggagaagagccatggatatcagagggagaaatccaacgacctttctatccagactggaagaccaggcctgaagtcaaatcatcacatttgcagcaggatgtatcagaagtatcccactgcacacatgatctcttacatgctacattagaagactcctgggatgt

SEQ ID NO: 200866 - DNA, 2512 bp, Homo sapiens
  Payload ID: 19641
  Gene Name: ZFP90 zinc finger protein
  Uniprot ID: Q8TF47
  ENST ID: ENST00000563169
  CDS Start-End: 232-2142
caggcgcacttccagttctgccccaccgctgcggccattgtccgaccccggtgcggctgaggcccctttgggcagcccctccgcagatcagaattggagataaccgaggcttcggcgggggcgggaggagctgcccgaggctctgggtgggccggaggtcgcgaaatccggagccccccagaggcggtgattctgactcctgccccggagccgggccctggcgaggcaggaatggccccgaggcctccgaccgccgcgccccaggaatcagtgacattcaaagatgtgtctgtggacttcacccaggaagaatggtaccatgtcgaccctgctcagaggagcttatacagggatgtgatgctggagaactatagccacctggtttctcttggatatcaagtttccaagccagaggtgatcttcaaattggagcaaggagaagagccatggatatcagagggagaaatccaacgacctttctatccagactggaagaccaggcctgaagtcaaatcatcacatttgcagcaggatgtatcagaagtatcccactgcacacatgatctcttacatgctacattagaagactcctgggatgttagcagccagttagacaggcaacaggaaaactggaagagacatctgggatcagaggcatccacccagaagaaaataattacaccacaagaaaattttgagcaaaataaatttggtgaaaattctagattgaacaccaatttggttacacaactgaacattcctgcaagaataaggcctagtgaatgtgagacccttggaagcaatttgggacataatgcagacttacttaatgagaataatattcttgcaaaaaagaaaccctataagtgtgataaatgtagaaaagcctttattcatagatcatcgcttactaaacatgagaaaacacataaaggagagggagctttccctaatggaacagatcaaggaatttatcctggaaagaaacaccatgaatgtaccgactgtgggaaaacctttctctggaagacacagcttactgagcatcagagaattcacactggggagaaaccctttgaatgcaatgtatgtggaaaggccttcaggcatagctcatctcttggtcagcatgagaatgctcataccggagagaaaccctatcagtgtagtctctgtgggaaagccttccagcgcagctcctcccttgttcaacaccagcgaattcacactggagagaaaccctatcgatgtaatctatgtgggaggtcctttaggcatggcacatccctcactcaacacgaggtcacacacagtggagagaagcccttccagtgtaaggaatgtgggaaagcctttagtcgatgttcttcccttgtccaacatgagaggactcatactggagagaaaccttttgaatgtagcatatgtgggagggcttttggtcagagcccatccctttataaacatatgaggattcataagagaggcaaaccttaccaaagcagtaactacagcatagatttcaagcacagcacatctctcactcaagatgaaagcactcttaccgaagtgaaatcctaccattgtaatgactgtggggaagactttagtcacattacagactttactgaccatcagaggatccatactgcagagaacccctatgattgtgagcaggcttttagtcagcaagctatttctcatcctggagagaaaccctatcaatgtaatgtatgtgggaaagctttcaaaaggagtacaagtttcatagagcatcacagaattcatactggagagaaaccctatgaatgtaatgagtgtggagaagcctttagtcgacgctcatcgcttactcaacatgagagaacccacactggagagaaaccctatgaatgtattgactgtgggaaagcctttagtcaaagttcatctctcattcagcatgagagaactcatactggagagaagccctatgaatgtaatgaatgtgggagagccttccgaaaaaaaaccaacctgcatgatcatcagagaattcatactggagaaaaaccctattcttgtaaggaatgtgggaaaaacttcagccgaagttcagctcttactaaacaccagagaattcatactcgaaataaactctaggaaccgtgaaattaaggaatttgcagaatgctttagctaaaatgttctgattcaggatcagaggattcttagagagcttgggaatgtaatgaattacgtgtgtgtttatacgttgtgtgtggagaaaactgccagtagacagattttttttttttaacataaagacacattctcagatctgattacagactagtgtaaaaacagctacatgtatgtagctggttggggatgatatgcctgtatgttggactttgcttttgaatatatgtatgcaggatatcatcaagtttcaacatcttgacttgtgacccccaatgtcaacagcttttttaaaaagcaaattcctgcagtaatgaccaaaacccatttt

SEQ ID NO: 200867 - DNA, 4664 bp, Homo sapiens
  Payload ID: 19641
  Gene Name: ZFP90 zinc finger protein
  ENST ID: ENST00000564558
  CDS Start-End: 219-401
agttctgccccaccgctgcggccattgtccgaccccggtgcggctgaggcccctttgggcagcccctccgcagatcagaattggagataaccgaggcttcggcgggggcgggaggagctgcccgaggctctgggtgggccggaggtcgcgaaatccggagccccccagaggcggtgattctgactcctgccccggagccgggccctggcgaggcaggaatggccccgaggcctccgaccgccgcgccccaggaatcagtgacattcaaagatgtgtctgtggacttcacccaggaagaatggtaccatgtcgaccctgctcagaggagcttatacagggatgtgatgctggagaactatagccacctggtttctcttgagttcctgaggatcaaggactagtactgacttgtccttaggagggttctttgtccacttgcacaaacaaccaaatcttgtgtatttacccatgagcaggatatcaagtttccaagccagaggtgatcttcaaattggagcaaggagaagagccatggatatcagagggagaaatccaacgacctttctatccagactggaagaccaggcctgaagtcaaatcatcacatttgcagcaggatgtatcagaagtatcccactgcacacatgatctcttacatgctacattagaagactcctgggatgttagcagccagttagacaggcaacaggaaaactggaagagacatctgggatcagaggcatccacccagaagaaaataattacaccacaagaaaattttgagcaaaataaatttggtgaaaattctagattgaacaccaatttggttacacaactgaacattcctgcaagaataaggcctagtgaatgtgagacccttggaagcaatttgggacataatgcagacttacttaatgagaataatattcttgcaaaaaagaaaccctataagtgtgataaatgtagaaaagcctttattcatagatcatcgcttactaaacatgagaaaacacataaaggagagggagctttccctaatggaacagatcaaggaatttatcctggaaagaaacaccatgaatgtaccgactgtgggaaaacctttctctggaagacacagcttactgagcatcagagaattcacactggggagaaaccctttgaatgcaatgtatgtggaaaggccttcaggcatagctcatctcttggtcagcatgagaatgctcataccggagagaaaccctatcagtgtagtctctgtgggaaagccttccagcgcagctcctcccttgttcaacaccagcgaattcacactggagagaaaccctatcgatgtaatctatgtgggaggtcctttaggcatggcacatccctcactcaacacgaggtcacacacagtggagagaagcccttccagtgtaaggaatgtgggaaagcctttagtcgatgttcttcccttgtccaacatgagaggactcatactggagagaaaccttttgaatgtagcatatgtgggagggcttttggtcagagcccatccctttataaacatatgaggattcataagagaggcaaaccttaccaaagcagtaactacagcatagatttcaagcacagcacatctctcactcaagatgaaagcactcttaccgaagtgaaatcctaccattgtaatgactgtggggaagactttagtcacattacagactttactgaccatcagaggatccatactgcagagaacccctatgattgtgagcaggcttttagtcagcaagctatttctcatcctggagagaaaccctatcaatgtaatgtatgtgggaaagctttcaaaaggagtacaagtttcatagagcatcacagaattcatactggagagaaaccctatgaatgtaatgagtgtggagaagcctttagtcgacgctcatcgcttactcaacatgagagaacccacactggagagaaaccctatgaatgtattgactgtgggaaagcctttagtcaaagttcatctctcattcagcatgagagaactcatactggagagaagccctatgaatgtaatgaatgtgggagagccttccgaaaaaaaaccaacctgcatgatcatcagagaattcatactggagaaaaaccctattcttgtaaggaatgtgggaaaaacttcagccgaagttcagctcttactaaacaccagagaattcatactcgaaataaactctaggaaccgtgaaattaaggaatttgcagaatgctttagctaaaatgttctgattcaggatcagaggattcttagagagcttgggaatgtaatgaattacgtgtgtgtttatacgttgtgtgtggagaaaactgccagtagacagattttttttttttaacataaagacacattctcagatctgattacagactagtgtaaaaacagctacatgtatgtagctggttggggatgatatgcctgtatgttggactttgcttttgaatatatgtatgcaggatatcatcaagtttcaacatcttgacttgtgacccccaatgtcaacagcttttttaaaaagcaaattcctgcagtaatgaccaaaacccattttaaaaattgcttgacaactgcactcaactgcagctcttacattaacttcaccatggaaaccagttccaactccaggaagtcaccattcaaagaattagatcaactagcccaaccacttcattgtacagatgaagactgaaagccaaagatgtgaagtggtttccacagtatgatacagcctataagggtaaagctgggttaaaaatgcaggtttcctggatttggggccccatggccttgccagtgaaaaggttatttttggactcagagggctttaaaataaattttaagatgtatcagatacacaaacatttaatgggcacctatgggttggacactttgagaattcttaaaagtataagtgggagcaaaatgtatgcaaatttatcacaaactatttaaagcaacttcttggaggcttacaaaccacaatttaacagaaactgtagatggttgaactactagtgacttttttccccttttcccagttacaattatactttcagctaacatatgccagtttcacagaactattaagtccccttattgtactttttatggcatgcccatgaaaaagcactttcttaagcctacagtatcagatcaatgggaaaacaacagaaaactaagaggagaattttcccgttaattttcttgcagaaaagttaagtctaattgcccattgccataaattttgccttgtactcagagaagcaacatgcactggctcattttatgtgcaaagaaaagatttcaccattaaaaaaattaacttggctaggtatggtgtctcacacctgtaatcccagcactttgggtggctaaggcagatagactgcttgaacccaggagttcaagaccagcctggacaacatggtgaaaccccatctctttaaaaaaaaaaaaaaatccaaaaattagctgggcatggtggcatgcagtggtagtcccagctactcaggaggctgaggtgggaggatcactggaacccgggagcagagactgcagtgagctgagatcacactactgcattccagcctgagcaacagagcaagacacacacacatcaatttattttagttgtataatgcttttctattagtaaagcatcagctaagcttcagtggcctgctccatcccctaatgactcccatgggctatcctaaaggaacttccagaacctttgttggtgtgttgacattgaccatgcagaccaatttgggcacaactggacattgattccttttacacaagagctgcctcccaaagatagataaattttcccagccctaaatatgaatcatggggcaagatattggtcgtattgatggtgaacctttcctactggattctttgcatgccacatagcaggattcattgcctttctctcatcatggatggcatgcagcagcacccaagtattcttcattctttgcagggaaaaaattgtgcatgggggctgaaatgtaatatgtgtagctcaattagtctctcctctgtgatgcaaaatggaatattcaatggcagatctgcccttctgagatgctgaccatccaaaacaccttgtttatggtgcaccatgattagctcacacacaatgccaaggctgtgcttctattatctgatacatagtttgacaatgggtaattctactcagaccctccctactgattggctaggatgcctgtcaggaactcattatgctactggttgtttggggatccccatagtggactactttcaggaatggcatgaattgtaaccaactgagtgctgcccccactgttacggaagtttataaaaccttagttccagaagacccaaaggagagtactggtttgtgtttggtgcttggcctagatccagccaccactctgaaactcagcacatcttcattgacagggagggagcccaggacatatgtgtggctcattgaccagaaggctttcttagtcccaacagccatgaaccatgcacttatggatacccagccttttagggctacgtgaaatgcatccttgtaacatcattgtattctttcaataaatagccttctgagttgaatggg

SEQ ID NO: 200868 - DNA, 485 bp, Homo sapiens
  Payload ID: 19641
  Gene Name: ZFP90 zinc finger protein
  ENST ID: ENST00000562156
  CDS Start-End: 175-485
acttccagttctgccccaccgctgcggccattgtccgaccccggtgcggctgaggcccctttgggcagcccctccgcagatcagaattggagataaccgaggcttcggcgggggcgggaggagctgcccgaggctctggctcctgccccggagccgggccctggcgaggcaggaatggccccgaggcctccgaccgccgcgccccaggaatcagtgacattcaaagatgtgtctgtggacttcacccaggaagaatggtaccatgtcgaccctgctcagaggagcttatacagggatgtgatgctggagaactatagccacctggtttctcttggatatcaagtttccaagccagaggtgatcttcaaattggagcaaggagaagagccatggatatcagagggagaaatccaacgacctttctatccagactggaagaccaggcctgaagtcaaatcatcacatttgcagcaggatgtatcaga

SEQ ID NO: 200869 - DNA, 648 bp, Homo sapiens
  Payload ID: 19641
  Gene Name: ZFP90 zinc finger protein
  ENST ID: ENST00000576805
  CDS Start-End: 201-383
gtccgaccccggtgcggctgaggcccctttgggcagcccctccgcagatcagaattggagataaccgaggcttcggcgggggcgggaggagctgcccgaggctctgggtgggccggaggtcgcgaaatccggagccccccagaggcggtgattctgagtgcgcggctcctgccccggagccgggccctggcgaggcaggaatggccccgaggcctccgaccgccgcgccccaggaatcagtgacattcaaagatgtgtctgtggacttcacccaggaagaatggtaccatgtcgaccctgctcagaggagcttatacagggatgtgatgctggagaactatagccacctggtttctcttgagttcctgaggatcaaggactagtactgacttgtccttaggagggttctttgtccacttgcacaaacaaccaaatcttgtgtatttacccatgagcaggatatcaagtttccaagccagaggtgatcttcaaattggagcaaggagaagagccatggatatcagagggagaaatccaacgacctttctatccagactggaagaccaggcctgaagtcaaatcatcacatttgcagcaggatgtatcagaagtatcccactgcacacatgatctcttacatgctacatt

SEQ ID NO: 200870 - DNA, 538 bp, Homo sapiens
  Payload ID: 19641
  Gene Name: ZFP90 zinc finger protein
  ENST ID: ENST00000569109
  CDS Start-End: 439-538
acgcccccgccctccccttccagcccgtggctcggcgacttacagggagggagaacatggctgctggcttttagcacctggtgggtttcgcgccttgcaactcgacaactgccgggacggagtctggctgcgcgaccccctgcggcaggtgctgggcgaggcgcctcccctgcaactagcctgccgcttccctcccggcacccccgccgccagccccgagcgcggacctggagcggagaagagagagtcttgctctgttgcccaggccggagtgcaatggtgcaatgtcagcttactgcaacctccacctcccaggttcaagccatcctcctgcctcagcctcctgagtagctgggagccatcacgcccagctagccatcttctaattttcattccttcaaagctcctgccccggagccgggccctggcgaggcaggaatggccccgaggcctccgaccgccgcgccccaggaagaatggtaccatgtcgaccctgctcagaggagcttatacagggatgtgatgctggagaactata

SEQ ID NO: 200871 - DNA, 505 bp, Homo sapiens
  Payload ID: 19641
  Gene Name: ZFP90 zinc finger protein
  ENST ID: ENST00000573113
  CDS Start-End: 1-309
gaatcagtgacattcaaagatgtgtctgtggacttcacccaggaagaatggtaccatgtcgaccctgctcagaggagcttatacagggatgtgatgctggagaactatagccacctggtttctcttggatatcaagtttccaagccagaggtgatcttcaaattggagcaaggagaagagccatggatatcagagggagaaatccaacgacctttctatccaggatttgtctgcctcctgccgctgtcgctaccatctgggagtaagggcgaaagaagacagaaacttccaagaaagaatcctgagtgatgtcagcaagaatggctaagtaaggacctccagaagttctctgccccgtacaagccatgcaaatactgacaaaactgtgagaatcagatttttcacaactctggaacatttattccagcaagcagcaaatgttccccttgcagcaagctaggaaacatttatttaaaaaaaaaaaaaaaaagcatttcattaacaa

SEQ ID NO: 200872 - DNA, 717 bp, Homo sapiens
  Payload ID: 19641
  Gene Name: ZFP90 zinc finger protein
  ENST ID: ENST00000571382
  CDS Start-End: 581-717
ggctgctggcttttagcacctggtgggtttcgcgccttgcaactcgacaactgccgggacggagtctggctgcgcgaccccctgcggcaggtgctgggcgaggcgcctcccctgcaactagcctgccgcttccctcccggcacccccgccgccagccccgagcgcggacctggagcggagaagagaggtcggtgcctccaacccggggccgcggtcgaggggcgcgcgtcgttgctctgggactcactgtcgaccaacccccattcctcaggggctcggctccttccccaaggctcaggacgtagagcttgggcggggccccctgcccagcagcagtcagcggagctgcacgagtcagactccacttctggtgcacctggtaccttgagtcttgctctgttgcccaggccggagtgcaatggtgcaatgtcagcttactgcaacctccacctcccaggttcaagccatcctcctgcctcagcctcctgagtagctgggagccatcacgcccagctagccatcttctaattttcattccttcaaagctcctgccccggagccgggccctggcgaggcaggaatggccccgaggcctccgaccgccgcgccccaggaatcagtgacattcaaagatgtgtctgtggacttcacccaggaagaatggtaccatgtcgaccctgctcagaggagcttatacagggatgtgatgctggagaa

SEQ ID NO: 200873 - DNA, 199 bp, Homo sapiens
  Payload ID: 19641
  Gene Name: ZFP90 zinc finger protein
  ENST ID: ENST00000573161
  CDS Start-End: 1-159
ggccccgaggcctccgaccgccgcgccccaggtggcacttacctcttaggacctggtacagagcctaccttgaagtgttctctccctctcccaatcttttgtgctttgagcgcctgcagcacctcaccttactgtgtattgtctcatattgtgctctaataaataacgcttttaaaataaactgaaccgtattcaagga

SEQ ID NO: 200874 - DNA, 543 bp, Homo sapiens
  Payload ID: 19641
  Gene Name: ZFP90 zinc finger protein
  ENST ID: ENST00000573685
  CDS Start-End: 233-543
acttccagttctgccccaccgctgcggccattgtccgaccccggtgcggctgaggcccctttgggcagcccctccgcagatcagaattggagataaccgaggcttcggcgggggcgggaggagctgcccgaggctctgggtgggccggaggtcgcgaaatccggagccccccagaggcggtgattctgagtgcgcggctcctgccccggagccgggccctggcgaggcaggaatggccccgaggcctccgaccgccgcgccccaggaatcagtgacattcaaagatgtgtctgtggacttcacccaggaagaatggtaccatgtcgaccctgctcagaggagcttatacagggatgtgatgctggagaactatagccacctggtttctcttggatatcaagtttccaagccagaggtgatcttcaaattggagcaaggagaagagccatggatatcagagggagaaatccaacgacctttctatccagactggaagaccaggcctgaagtcaaatcatcacatttgcagcaggatgtatcaga

SEQ ID NO: 200875 - DNA, 4636 bp, Homo sapiens
  Payload ID: 19641
  Gene Name: ZFP90 zinc finger protein
  Uniprot ID: Q8TF47
  ENST ID: ENST00000570495
  CDS Start-End: 293-2203
cgggcctctgggaagtgtagttcgcgcgcccggcgtggacccggggttgcaggagcgaggctccgagtgcgcaggcgcacttccagttctgccccaccgctgcggccattgtccgaccccggtgcggctgaggcccctttgggcagcccctccgcagatcagaattggagataaccgaggcttcggcgggggcgggaggagctgcccgaggctctgggtgggccggaggtcgcgaaatccggagccccccagaggcgctcctgccccggagccgggccctggcgaggcaggaatggccccgaggcctccgaccgccgcgccccaggaatcagtgacattcaaagatgtgtctgtggacttcacccaggaagaatggtaccatgtcgaccctgctcagaggagcttatacagggatgtgatgctggagaactatagccacctggtttctcttggatatcaagtttccaagccagaggtgatcttcaaattggagcaaggagaagagccatggatatcagagggagaaatccaacgacctttctatccagactggaagaccaggcctgaagtcaaatcatcacatttgcagcaggatgtatcagaagtatcccactgcacacatgatctcttacatgctacattagaagactcctgggatgttagcagccagttagacaggcaacaggaaaactggaagagacatctgggatcagaggcatccacccagaagaaaataattacaccacaagaaaattttgagcaaaataaatttggtgaaaattctagattgaacaccaatttggttacacaactgaacattcctgcaagaataaggcctagtgaatgtgagacccttggaagcaatttgggacataatgcagacttacttaatgagaataatattcttgcaaaaaagaaaccctataagtgtgataaatgtagaaaagcctttattcatagatcatcgcttactaaacatgagaaaacacataaaggagagggagctttccctaatggaacagatcaaggaatttatcctggaaagaaacaccatgaatgtaccgactgtgggaaaacctttctctggaagacacagcttactgagcatcagagaattcacactggggagaaaccctttgaatgcaatgtatgtggaaaggccttcaggcatagctcatctcttggtcagcatgagaatgctcataccggagagaaaccctatcagtgtagtctctgtgggaaagccttccagcgcagctcctcccttgttcaacaccagcgaattcacactggagagaaaccctatcgatgtaatctatgtgggaggtcctttaggcatggcacatccctcactcaacacgaggtcacacacagtggagagaagcccttccagtgtaaggaatgtgggaaagcctttagtcgatgttcttcccttgtccaacatgagaggactcatactggagagaaaccttttgaatgtagcatatgtgggagggcttttggtcagagcccatccctttataaacatatgaggattcataagagaggcaaaccttaccaaagcagtaactacagcatagatttcaagcacagcacatctctcactcaagatgaaagcactcttaccgaagtgaaatcctaccattgtaatgactgtggggaagactttagtcacattacagactttactgaccatcagaggatccatactgcagagaacccctatgattgtgagcaggcttttagtcagcaagctatttctcatcctggagagaaaccctatcaatgtaatgtatgtgggaaagctttcaaaaggagtacaagtttcatagagcatcacagaattcatactggagagaaaccctatgaatgtaatgagtgtggagaagcctttagtcgacgctcatcgcttactcaacatgagagaacccacactggagagaaaccctatgaatgtattgactgtgggaaagcctttagtcaaagttcatctctcattcagcatgagagaactcatactggagagaagccctatgaatgtaatgaatgtgggagagccttccgaaaaaaaaccaacctgcatgatcatcagagaattcatactggagaaaaaccctattcttgtaaggaatgtgggaaaaacttcagccgaagttcagctcttactaaacaccagagaattcatactcgaaataaactctaggaaccgtgaaattaaggaatttgcagaatgctttagctaaaatgttctgattcaggatcagaggattcttagagagcttgggaatgtaatgaattacgtgtgtgtttatacgttgtgtgtggagaaaactgccagtagacagattttttttttttaacataaagacacattctcagatctgattacagactagtgtaaaaacagctacatgtatgtagctggttggggatgatatgcctgtatgttggactttgcttttgaatatatgtatgcaggatatcatcaagtttcaacatcttgacttgtgacccccaatgtcaacagcttttttaaaaagcaaattcctgcagtaatgaccaaaacccattttaaaaattgcttgacaactgcactcaactgcagctcttacattaacttcaccatggaaaccagttccaactccaggaagtcaccattcaaagaattagatcaactagcccaaccacttcattgtacagatgaagactgaaagccaaagatgtgaagtggtttccacagtatgatacagcctataagggtaaagctgggttaaaaatgcaggtttcctggatttggggccccatggccttgccagtgaaaaggttatttttggactcagagggctttaaaataaattttaagatgtatcagatacacaaacatttaatgggcacctatgggttggacactttgagaattcttaaaagtataagtgggagcaaaatgtatgcaaatttatcacaaactatttaaagcaacttcttggaggcttacaaaccacaatttaacagaaactgtagatggttgaactactagtgacttttttccccttttcccagttacaattatactttcagctaacatatgccagtttcacagaactattaagtccccttattgtactttttatggcatgcccatgaaaaagcactttcttaagcctacagtatcagatcaatgggaaaacaacagaaaactaagaggagaattttcccgttaattttcttgcagaaaagttaagtctaattgcccattgccataaattttgccttgtactcagagaagcaacatgcactggctcattttatgtgcaaagaaaagatttcaccattaaaaaaattaacttggctaggtatggtgtctcacacctgtaatcccagcactttgggtggctaaggcagatagactgcttgaacccaggagttcaagaccagcctggacaacatggtgaaaccccatctctttaaaaaaaaaaaaaaatccaaaaattagctgggcatggtggcatgcagtggtagtcccagctactcaggaggctgaggtgggaggatcactggaacccgggagcagagactgcagtgagctgagatcacactactgcattccagcctgagcaacagagcaagacacacacacatcaatttattttagttgtataatgcttttctattagtaaagcatcagctaagcttcagtggcctgctccatcccctaatgactcccatgggctatcctaaaggaacttccagaacctttgttggtgtgttgacattgaccatgcagaccaatttgggcacaactggacattgattccttttacacaagagctgcctcccaaagatagataaattttcccagccctaaatatgaatcatggggcaagatattggtcgtattgatggtgaacctttcctactggattctttgcatgccacatagcaggattcattgcctttctctcatcatggatggcatgcagcagcacccaagtattcttcattctttgcagggaaaaaattgtgcatgggggctgaaatgtaatatgtgtagctcaattagtctctcctctgtgatgcaaaatggaatattcaatggcagatctgcccttctgagatgctgaccatccaaaacaccttgtttatggtgcaccatgattagctcacacacaatgccaaggctgtgcttctattatctgatacatagtttgacaatgggtaattctactcagaccctccctactgattggctaggatgcctgtcaggaactcattatgctactggttgtttggggatccccatagtggactactttcaggaatggcatgaattgtaaccaactgagtgctgcccccactgttacggaagtttataaaaccttagttccagaagacccaaaggagagtactggtttgtgtttggtgcttggcctagatccagccaccactctgaaactcagcacatcttcattgacagggagggagcccaggacatatgtgtggctcattgaccagaaggctttcttagtcccaacagccatgaaccatgcacttatggatacccagccttttagggctacgtgaaatgcatccttgtaacatcattgtattctttcaataaatagccttctgagttgaa

SEQ ID NO: 200876 - DNA, 579 bp, Homo sapiens
  Payload ID: 19641
  Gene Name: ZFP90 zinc finger protein
  ENST ID: ENST00000576305
  CDS Start-End: 439-579
acgcccccgccctccccttccagcccgtggctcggcgacttacagggagggagaacatggctgctggcttttagcacctggtgggtttcgcgccttgcaactcgacaactgccgggacggagtctggctgcgcgaccccctgcggcaggtgctgggcgaggcgcctcccctgcaactagcctgccgcttccctcccggcacccccgccgccagccccgagcgcggacctggagcggagaagagagagtcttgctctgttgcccaggccggagtgcaatggtgcaatgtcagcttactgcaacctccacctcccaggttcaagccatcctcctgcctcagcctcctgagtagctgggagccatcacgcccagctagccatcttctaattttcattccttcaaagctcctgccccggagccgggccctggcgaggcaggaatggccccgaggcctccgaccgccgcgccccaggaatcagtgacattcaaagatgtgtctgtggacttcacccaggaagaatggtaccatgtcgaccctgctcagaggagcttatacagggatgtgatgctggagaactat

SEQ ID NO: 200877 - DNA, 650 bp, Homo sapiens
  Payload ID: 19641
  Gene Name: ZFP90 zinc finger protein
  ENST ID: ENST00000571809
  CDS Start-End: 152-334
gcggccattgtccgaccccggtgcggctgaggcccctttgggcagcccctccgcagatcagaattggagataaccgaggcttcggcgggggcgggaggagctgcccgaggctctggctcctgccccggagccgggccctggcgaggcaggaatggccccgaggcctccgaccgccgcgccccaggaatcagtgacattcaaagatgtgtctgtggacttcacccaggaagaatggtaccatgtcgaccctgctcagaggagcttatacagggatgtgatgctggagaactatagccacctggtttctcttgagttcctgaggatcaaggactagtactgacttgtccttaggagggttctttgtccacttgcacaaacaaccaaatcttgtgtatttacccatgagcaggatatcaagtttccaagccagaggtgatcttcaaattggagcaaggagaagagccatggatatcagagggagaaatccaacgacctttctatccagactggaagaccaggcctgaagtcaaatcatcacatttgcagcaggatgtatcagaagtatcccactgcacacatgatctcttacatgctacattagaagactcctgggatgttagcagccagttagacaggcaacaggaaaactg

SEQ ID NO: 200878 - DNA, 560 bp, Homo sapiens
  Payload ID: 19641
  Gene Name: ZFP90 zinc finger protein
  ENST ID: ENST00000564323
  CDS Start-End: 215-496
acttccagttctgccccaccgctgcggccattgtccgaccccggtgcggctgaggcccctttgggcagcccctccgcagatcagaattggagataaccgaggcttcggcgggggcgggaggagctgcccgaggctctgggtgggccggaggtcgcgaaatccggagccccccagaggcgctcctgccccggagccgggccctggcgaggcaggaatggccccgaggcctccgaccgccgcgccccaggaatcagtgacattcaaagatgtgtctgtggacttcacccaggaagaatggtaccatgtcgaccctgctcagaggagcttatacagggatgtgatgctggagaactatagccacctggtttctcttggatatcaagtttccaagccagaggtgatcttcaaattggagcaaggagaagagccatggatatcagagggagaaatccaacgacctttctatccagcagtgtatttcaacaggaaggaataggggacttttgtactttggatttctttcagactggaagaccaggcctgaagtcaaatcatcacat

SEQ ID NO: 200879 - DNA, 695 bp, Homo sapiens
  Payload ID: 19641
  Gene Name: ZFP90 zinc finger protein
  Uniprot ID: Q8TF47
  ENST ID: ENST00000611381
  CDS Start-End: 190-531
ggccattgtccgaccccggtgcggctgaggcccctttgggcagcccctccgcagatcagaattggagataaccgaggcttcggcgggggcgggaggagctgcccgaggctctgggtgggccggaggtcgcgaaatccggagccccccagaggcgctcctgccccggagccgggccctggcgaggcaggaatggccccgaggcctccgaccgccgcgccccaggaatcagtgacattcaaagatgtgtctgtggacttcacccaggaagaatggtaccatgtcgaccctgctcagaggagcttatacagggatgtgatgctggagaactatagccacctggtttctcttggatatcaagtttccaagccagaggtgatcttcaaattggagcaaggagaagagccatggatatcagagggagaaatccaacgacctttctatccaggatttgtctgcctcctgccgctgtcgctaccatctgggagtaagggcgaaagaagacagaaacttccaagaaagaatcctgagtgatgtcagcaagaatggctaagtaaggacctccagaagttctctgccccgtacaagccatgcaaatactgacaaaactgtgagaatcagatttttcacaactctggaacatttattccagcaagcagcaaatgttccccttgcagcaagctaggaaacatttattt

SEQ ID NO: 200880 - DNA, 5220 bp, Homo sapiens
  Payload ID: 19642
  Gene Name: ZFP91 zinc finger protein
  Uniprot ID: Q96JP5
  ENST ID: ENST00000316059
  CDS Start-End: 172-1884
ggggtggggggggcgccctcggagccgggcggaggggaggggggaaagaggagcgcagggtgagagtgagccgcaggcttcgggaggcgagggggcggggggagcagcgccgaggccgccgcctccgcctccgccgcctaggactagggggtgggggacggacaagccccgatgccgggggagacggaagagccgagacccccggagcagcaggaccaggaagggggagaggcggccaaggcggctccggaggagccccaacaacggccccctgaggcggtcgcggcggcgcctgcagggaccactagcagccgcgtgctgaggggaggtcgggaccgaggccgggccgctgcggccgccgccgccgcagctgtgtcccgccggaggaaggccgagtatccccgccggcggaggagcagccccagcgccaggcctcccgacgtccccgggcagcagccccaggccgcgaagtccccgtctccagttcagggcaagaagagtccgcgactcctatgcatagaaaaagtaacaactgataaagatcccaaggaagaaaaagaggaagaagacgattctgccctccctcaggaagtttccattgctgcatctagacctagccggggctggcgtagtagtaggacatctgtttctcgccatcgtgatacagagaacacccgaagctctcggtccaagaccggttcattgcagctcatttgcaagtcagaaccaaatacagaccaacttgattatgatgttggagaagagcatcagtctccaggtggcattagtagtgaagaggaagaggaggaggaagaagagatgttaatcagtgaagaggagataccattcaaagatgatccaagagatgagacctacaaaccccacttagaaagggaaaccccaaagccacggagaaaatcagggaaggtaaaagaagagaaggagaagaaggaaattaaagtggaagtagaggtggaggtgaaagaagaggagaatgaaattagagaggatgaggaacctccaaggaagagaggaagaagacgaaaagatgacaaaagtccacgtttacccaaaaggagaaaaaagcctccaatccagtatgtccgttgtgagatggaaggatgtggaactgtccttgcccatcctcgctatttgcagcaccacattaaataccagcatttgctgaagaagaaatatgtatgtccccatccctcctgtggacgactcttcaggcttcagaagcaacttctgcgacatgccaaacatcatacagatcaaagggattatatctgtgaatattgtgctcgggccttcaagagttcccacaatctggcagtgcaccggatgattcacactggcgagaagccattacaatgtgagatctgtggatttacttgtcgacaaaaggcatctcttaattggcacatgaagaaacatgatgcagactccttctaccagttttcttgcaatatctgtggcaaaaaatttgagaagaaggacagcgtagtggcacacaaggcaaaaagccaccctgaggtgctgattgcagaagctctggctgccaatgcaggcgccctcatcaccagcacagatatcttgggcactaacccagagtccctgacgcagccttcagatggtcagggtcttcctcttcttcctgagcccttgggaaactcaacctctggagagtgcctactgttagaagctgaagggatgtcaaagtcatactgcagtgggacggaacgggtgagcctgatggctgatgggaagatctttgtgggaagcggcagcagtggaggcactgaagggctggttatgaactcagatatactcggtgctaccacagaggttctgattgaagattcagactctgccggaccttagtggacaggaagacttggggcatgggacagctcagactttgtatttaaaagttaaaaaggacaaaaaaaaaatctaaagcatttaaaatctagtgaaataactgaagggcctgctctttccattgtggatcacagcacacacatacatacaccctccacctccccatcccctgttctccctctgttgctccccttataaaattgatgttgtctttaccagaaaggtagacaaaaaagaagcagcagcagctcttaaagtgagggttattctcatactcggttccagccatcagcagacttcctgctcatcggcagatccccctttccaacctgtaactctgatgtgctctggatcagcttttaacttttaatcatatattactgtcttctaaatcccttctcctcctctactgctgccctatggttctggctcctaccccctgcggcacacttatcttcaaataccatagaattctaatctctggaggctggcagcttgacttggcactttagggccccttagcagggtgagctgttaaaacagcacacatctctcatcccctcttcctttattcccccctgggtttcagaaaggaaggatatatggggaccacctcccccttctttgatcccagcatctcagtccccctcccaaccctccatatggctctcaatggtgctcacttgcttggaagcaggctcccaatagggagggggctgccctctacagtctctttgactgtaagacagggctctgtatcagtgagacgatgagaaaagtcccaggctaatggcagaaatttgcactttgaacatgtgtgtttttgtgttgtggaacctgagattccttatttattaacaggaagtctgattttttttttttggagtctttgttgctatattttgtggggctgggagagagagattagattattttgacatgggatcccttccataacaggtactttgaaggcaagacatagggttgaagaagcacagccagcctctgaaatcatagctctccagtggcttttaaagaaagctggtcctcagcactaacaaaatcactacaatagcctagtgcttttttggaagcctttttagggaagaatgttaggttcatggtaactagtatgctctttgagatttttacagtgttgaaacttaagaattttgagagggtgaggagggttgttcagaatctaaattacagatagatgattgtttcttgtgaatttgtttcttttcctttttttttgtccctaccatttccttacatttcccttggggcccatctctggctccttgctttttgtttcttgctttgctttatcagttcattccagctccctgttagtgaaggacactgctgttagtgaaggaacaaagtctatgagtcctaaaattttaagtcaaagaaaactgctctgtttcccctttagtaacacttctgaagaggaaaaacttcaatagccaaagttaataatcctatataataattgctttggctttcacctaaaattctgggcatcacaatttccttgggatagaggttgtgttggggaatagattgcttattgctgttcactggagagaaaaggtagtgtttttgtacaaggtcataccgccagaagccccaaatcctattttggctcatcttcaggtaaagagtaattcctatcctgtgtgcctcagaagctagaatcgaaggcttaccctattcattgtttattgtcagaaatgcatgatggctcttggaaagaatgacgttttgctggaaaaaaaaaaaagaacagtttgtgtttcacaaacatggcttatcaattttttcaaagaattcttttttcccaaaaagaggagtaacaaaatgtcatttctgaaagaggcttactttataccaactagtgtcagcatttgggatgccagggaacagagagtgagacacctacaatcaccagtctcaaatgcgctattgtttcttttcagagtgttgcagatttgccatttctccataatatggggatagaaaatggaataaagatagaagggatgtagaatatgctttcctgccaacatggtttggagtcgactttggtatattgactagatttgaaaatacaagattgattagatgaatctacaaaaaagttgtcctcctctcaggtcccttttacactttttgactaactagcatctatattccacacttagcttttttgtcacacttatcctttgtctccgtaaatttcatttgcagtggttagtcatcagatattttagccacctacacaaaagcaaactgcatttttaaaaatctttctgagatgggagaaaatgtattctcctttcctataccgctctcccaacaaaaaaacaactagttagttctactaattagaaacttgctgtactttttcttttcttttaggggtcaaggaccctctttatagctaccatttgcctacaataaattattgcagcagtttgcaatactaaaatattttttatagactttatatttttccttttgataaagggatgctgcatagtagagttggtgtaattaaactatctcagccgtttccctgctttcccttctgctccatatgcctcattgtccttccagggagctcttttaatcttaaagttctacatttcatgctcttagtcaaattctgttacctttttaataactcttcccactgcatatttccatcttgaattggtggttctaaattctgaaactgtagttgagatacagctatttaatatttctgggagatgtgcatccctcttctttgtggttgcccaaggttgttttgcgtaactgagactccttgatatgcttcagagaatttaggcaaacactggccatggccgtgggagtactgggagtaaaataaaaatatcgaggtatagactagcatccacatagagcacttgaacctcctttgtacctgtttggggaaaaagtataatgagtgtactaccaatctaactaagattattatagtctggttgtttgaaataccatttttttctccttttgtgtttttcccactttccaatgtactcaagaaaattgaacaaatgtaatggatcaatttaaaatattttatttcttaaaagccttttttgcctgttgtaatgtgcaggacccttctcctttcatgggagagacaggtagttacctgaatataggttgaaaaggttatgtaaaaagaaattataataaaagggatactttgcttttcaaatctttgttttctcttattctaggtaaggcatattaaaaataaatatgtaaagaagaaaaataaaagttgtcttcatggaa

SEQ ID NO: 200881 - DNA, 2319 bp, Homo sapiens
  Payload ID: 19643
  Gene Name: ZFP91-CNTF readthrough (NMD candidate)
  ENST ID: ENST00000389919
  CDS Start-End: 111-1700
gagagtgagccgcaggcttcgggaggcgagggggcggggggagcagcgccgaggccgccgcctccgcctccgccgcctaggactagggggtgggggacggacaagccccgatgccgggggagacggaagagccgagacccccggagcagcaggaccaggaagggggagaggcggccaaggcggctccggaggagccccaacaacggccccctgaggcggtcgcggcggcgcctgcagggaccactagcagccgcgtgctgaggggaggtcgggaccgaggccgggccgctgcggccgccgccgccgcagctgtgtcccgccggaggaaggccgagtatccccgccggcggaggagcagccccagcgccaggcctcccgacgtccccgggcagcagccccaggccgcgaagtccccgtctccagttcagggcaagaagagtccgcgactcctatgcatagaaaaagtaacaactgataaagatcccaaggaagaaaaagaggaagaagacgattctgccctccctcaggaagtttccattgctgcatctagacctagccggggctggcgtagtagtaggacatctgtttctcgccatcgtgatacagagaacacccgaagctctcggtccaagaccggttcattgcagctcatttgcaagtcagaaccaaatacagaccaacttgattatgatgttggagaagagcatcagtctccaggtggcattagtagtgaagaggaagaggaggaggaagaagagatgttaatcagtgaagaggagataccattcaaagatgatccaagagatgagacctacaaaccccacttagaaagggaaaccccaaagccacggagaaaatcagggaaggtaaaagaagagaaggagaagaaggaaattaaagtggaagtagaggtggaggtgaaagaagaggagaatgaaattagagaggatgaggaacctccaaggaagagaggaagaagacgaaaagatgacaaaagtccacgtttacccaaaaggagaaaaaagcctccaatccagtatgtccgttgtgagatggaaggatgtggaactgtccttgcccatcctcgctatttgcagcaccacattaaataccagcatttgctgaagaagaaatatgtatgtccccatccctcctgtggacgactcttcaggcttcagaagcaacttctgcgacatgccaaacatcatacagatcaaagggattatatctgtgaatattgtgctcgggccttcaagagttcccacaatctggcagtgcaccggatgattcacactggcgagaagccattacaatgtgagatctgtggatttacttgtcgacaaaaggcatctcttaattggcacatgaagaaacatgatgcagactccttctaccagttttcttgcaatatctgtggcaaaaaatttgagaagaaggacagcgtagtggcacacaaggcaaaaagccaccctgaggtgctgattgcagaagctctggctgccaatgcaggcgccctcatcaccagcacagatatcttgggcactaacccagagtccctgacgcagccttcagatggtcagggtcttcctcttcttcctgagcccttgggaaactcaacctctggagagtgcctactgttagaagctgaagggatgtcaaagtcatactgcagtgggacggaacggagcattcaccgctgacccctcaccgtcgggacctctgtagccgctctatctggctagcaaggaagattcgttcagacctgactgctcttacggaatcctatgtgaagcatcagggcctgaacaagaacatcaacctggactctgcggatgggatgccagtggcaagcactgatcagtggagtgagctgaccgaggcagagcgactccaagagaaccttcaagcttatcgtaccttccatgttttgttggccaggctcttagaagaccagcaggtgcattttaccccaaccgaaggtgacttccatcaagctatacatacccttcttctccaagtcgctgcctttgcataccagatagaggagttaatgatactcctggaatacaagatcccccgcaatgaggctgatgggatgcctattaatgttggagatggtggtctctttgagaagaagctgtggggcctaaaggtgctgcaggagctttcacagtggacagtaaggtccatccatgaccttcgtttcatttcttctcatcagactgggatcccagcacgtgggagccattatattgctaacaacaagaaaatgtagcagttagtcccttctctcttccttgctttctcttctaatggaat

SEQ ID NO: 200882 - DNA, 1788 bp, Homo sapiens
  Payload ID: 19643
  Gene Name: ZFP91-CNTF readthrough (NMD candidate)
  ENST ID: ENST00000422974
  CDS Start-End: 1-1065
aagaccggttcattgcagctcatttgcaagtcagaaccaaatacagaccaacttgattatgatgttggagaagagcatcagtctccaggtggcattagtagtgaagaggaagaggaggaggaagaagagatgttaatcagtgaagaggagataccattcaaagatgatccaagagatgagacctacaaaccccacttagaaagggaaaccccaaagccacggagaaaatcagggaaggtaaaagaagagaaggagaagaaggaaattaaagtggaagtagaggtggaggtgaaagaagaggagaatgaaattagagaggatgaggaacctccaaggaagagaggaagaagacgaaaagatgacaaaagtccacgtttacccaaaaggagaaaaaagcctccaatccagtatgtccgttgtgagatggaaggatgtggaactgtccttgcccatcctcgctatttgcagcaccacattaaataccagcatttgctgaagaagaaatatgtatgtccccatccctcctgtggacgactcttcaggcttcagaagcaacttctgcgacatgccaaacatcatacagatcaaagggattatatctgtgaatattgtgctcgggccttcaagagttcccacaatctggcagtgcaccggatgattcacactggcgagaagccattacaatgtgagatctgtggatttacttgtcgacaaaaggcatctcttaattggcacatgaagaaacatgatgcagactccttctaccagttttcttgcaatatctgtggcaaaaaatttgagaagaaggacagcgtagtggcacacaaggcaaaaagccaccctgaggtgctgattgcagaagctctggctgccaatgcaggcgccctcatcaccagcacagatatcttgggcactaacccagagtccctgacgcagccttcagatggtcagggtcttcctcttcttcctgagcccttgggaaactcaacctctggagagtgcctactgttagaagctgaagggatgtcaaagtcatactgcagtgggacggaacggttgagttaagggatggctttcacagagcattcaccgctgacccctcaccgtcgggacctctgtagccgctctatctggctagcaaggaagattcgttcagacctgactgctcttacggaatcctatgtgaagcatcagggcctgaacaagaacatcaacctggactctgcggatgggatgccagtggcaagcactgatcagtggagtgagctgaccgaggcagagcgactccaagagaaccttcaagcttatcgtaccttccatgttttgttggccaggctcttagaagaccagcaggtgcattttaccccaaccgaaggtgacttccatcaagctatacatacccttcttctccaagtcgctgcctttgcataccagatagaggagttaatgatactcctggaatacaagatcccccgcaatgaggctgatgggatgcctattaatgttggagatggtggtctctttgagaagaagctgtggggcctaaaggtgctgcaggagctttcacagtggacagtaaggtccatccatgaccttcgtttcatttcttctcatcagactgggatcccagcacgtgggagccattatattgctaacaacaagaaaatgtagcagttagtcccttctctcttccttgctttctcttctaatggaatatgcgtagttccctggggcctcgctttcccatcttaaatttctaaaaacagttaagacaacaggcattttctt

SEQ ID NO: 200883 - DNA, 6105 bp, Homo sapiens
  Payload ID: 19644
  Gene Name: ZFP92 zinc finger protein
  Uniprot ID: A6NM28
  ENST ID: ENST00000338647
  CDS Start-End: 2-1252
gatggcagccattctcctgaccacgagacccaaggtgccagtatcttttgaggatgtgtccgtgtacttcacaaagacagaatggaagcttctggacctcagacaaaaggtcctctacaagcgggtgatgctggagaactatagccatttggtgtcactgggattttccttctccaagcctcacctgatctcccaattggaacgaggggaaggaccctgggtagcagacatccccagaacctgggccaccgcaggattgcacataggtgacagaacacagagcaagacgtcgacttcaacgcagaagcattctggacgacaactccccggggccgatccacaaggtggcaaggaggggcaggcggcgaggtcgtctgtgctccagagaggtgcccagggcttggggcagagttcggctgcggggccgcagggccccaaaggcgcggagaagcggtacctgtgccagcagtgtgggaaggccttcagccgcagctccaacctcatcaagcaccgcatcatccacagtggcgagaagccttacgcgtgccccgagtgcggcaagctgtttcgccgcagcttcgcgctcctggagcaccagcgcatccacagcggcgagaagccctacgcctgccccgagtgcagcaagaccttcacgcgcagctccaacctcatcaagcaccaggtcatccacagcggcgagcggcccttcgcctgcggcgactgcggcaaactgttccgccgcagcttcgcgctcctggagcacgcgcgcgtgcacagcggcgagcggccctacgcgtgcccagagtgcggcaaggccttcagccgcagctccaacctcatcgagcaccagcgcacgcaccgcggcgagaagccctacgcctgcggccagtgcgccaaggccttcaagggcgtctcgcagctcatccaccaccagcgcagccacagcggcgagcggcccttcgcgtgccgcgagtgcggcaaggccttccgtggccgttcgggcctcagccagcaccggcgcgtgcacagcggtgagaagccctacgagtgcagcgactgcggcaaggccttcggccggcgcgccaacctattcaagcaccaggcagtgcacggcgccaggcgccctgcgaaggcggagacggcgcggaggctagcgggccctgggagcaccggccctgggagcgcggtggcggccaccagccccccgcggccgagcacagccgccaggccttccaggcccagccgccgctgactccccgccagcgcacccagggcgcggccggtctgcgtggggggccttcctggggacgtcgaggctcagcccccttcaggtgggaagaccgccctcccagggcctcgattgcggccacagccctgacctctttggccatcagaagaccccaggcagagcctcaccctgaggctgagaaacgcaggaaggactcagaaccgaggactgccgcctgccctggctcctccatcaacggcagtgcgggctgggaatggaggccctctactccctcctgagtcctgggccttgcaactgaggcacatagatggcacctgggccactcgtccctgagccacaggtactatcgagtgtgcacaggcgtgcgtggaggggatgcgtgaaccatccctcggatttgcatcagaatcgcctgctgcgggtagggaggaggccacgtgaggccagtgaggccagccagcgcggggcacgctggctttgagttacagaagagtggtgcatttcctccctgggggtcgttcccctcgccctaagagttgttagtgttcccaagtagaagatactgaaagcactttaatcctttaagcgcttatattgcaggtgggggaggcgctaaagttagcacagaggcaagaggctccctgaatgttggcataggatggggggctgtgccagaaaactcccgccttgtctgggtggccccagctgcttctgggaggaggagcagcgcccaggccccatcatccctgagcaccagtggttctgggaatggctagcccaggccctgcagagaggataagacccttcaagtcactcacaattggacatttgtagctagccaccctccaggctttgctttcccccctgcccgcccactgccttctgctccccagaccccaccagcaaaggccaccctggcctctctgtcccctgtccccctgccccgccccaccaccagtgcctaaagcttcgcacttacctgctcctccccatcaggcagcctctcttgcggctggtgacgattaggaggaaagccagacgggttaggaatttgcacttaggcaacagagcaagcccaggaacgaatctttcatcgaatgtcttttgcgtgacattttgtagaatactggacgttccgttgctttgattgtttttgtattcaggggtaatgtatattgaaaatagagattttgccatatcagagtatcagggattcactccctaaataagagtccccccagccctctgagaagacctcaggcaggagaaagggggccaccccaggcctgcccccagatgagtgtggtggcaagcctggcccctcttctccctacaacgatgcagtccacccctcttccccttagccctgcagaaacagggcagactcttcaaatggcactttactgaaagccaaggggaattctcaaggaaaagtctcagggctggcagaggcagctgctggcaggccttatcctagttccccagcgctgtccccagagctgggctcaggagctctgccccttggtgctctcagcccagcgtcctggtcagcggccacctccttccagccctgtcccctcccaggggagagggggtttttcatccacaaggcctgagggcaggtgggtggtaggcgtggtggaggggggaggttcaaagacagctggctcctatcaggagagtgtgggaagacccaaacatacaggattccctcggagaatgctgcttggagtgccagtcactaggacaactccagaaataatgttatacacacacacacacacacacacacacacacacacacacacgatatatatagttttatgaaaacttctagagttcttgtaagttgcacttataccgtagcctccttcagtgtgtccctattccccatcctgtgattgcgttcttgtctgcaagctggtctcataagcccacaagtgtgtgtcatgcctgtccccatgtccttgatgccaagcccggtgctggtaatcagtaagcatgagtgaaataggtcttgcagtcctagcacctcagactcaggcttgggaccattgtcggctccagccttgccttgaggcaatccgaagcatctacgactttgggttttccagaaaaagaagtattaggaatggtgtatttgaagtccctgatgaggccattgggaagtctgggtttttctgctgtgcagacagtctttgcaagggctggcatgggcccagaaatgcaatcctcgtgcagagtaggtgcctgtggcaggaggccatgcaattgggctctagtcttgcttcattcaactgaaccaggaaagaaacagatccacgcactctgatacccatttccgttgttctaggaggtaaatgatttcgttcctacaagccagacagtagccagctttcactaaagaagaatcgactccttagtatcttgtcatgccattggttctgatgcataagtgaaccctgtttttaacggaagctccttttttttcacctcaggacctacccaagactgtctagatactggcaggacaaggtacaggagttttcagcagaaagtggagttgccaggagagatgctgggcacttgcactgtgactttggagtgccgggaaaagttccagggtccccagtgcttacttagataaatggcatttaaaatagtgcagccttttatcattgcttagtctaatttagctccccataatgacattctcactgcaaggtggtcattgctatcattttcttttgggtgtggcagttaggtatgccacgtgagctgaacgggtttcacatggaatcaaagtcagaatgttcgaaaaggacatttgtgtttttccttcaatggtgccttgaaattgggctccctccctcttgctgtgtggggaactgggagggtatagcccaagcttgctttgtgatggacagctagaatgtaaaagcttaaactatggggaaagtcttgcctgttttccaaggcttcctccaccctgccaccgaagaacttacctggatgccaacctgggacccctttgtctttgggcttttgccctttgaaactgtgaatgcttcaagagccacataaatgctctggcagtgtctccatgtaactagtaaattgtcctggctggattcgttgtgaaatggaactgtcccatttactttggttgcaaataaggaagatgtatgagtattggcctggaaatgagccctctagtgtagagaggttattctgagggtttaaactacatggataggccttgggttcaaggttacaggaaaggctgtaagcctgagattgtggggaatggccagagctgggctttgggtgttccttgtgggggtccctgtgaaggtaagacagaaaggcattctgggtgagctgcctcgggtcagcccaggggtgcaggctcctctgactgggaccacaggcagccacccgaggccactcagatgccgtgactctgagaccagagggaagggaggctgggcctggtcccctgtgttcctcagcaaagtgccacatcagtctcctgagaacacagctgtgtgttctttccagtcgcttctgttcccagacttcaggcaacatggcagctcccatacttgccagggtagttggaagggcagctctggagacaggaagtggaggtagaagcaaaggaagggagtccttggctgggaagtgcttgggttcggacagacagggaagaagggaaagtatgaggtgtgttcagggaagcttagaagggcagagaggtttcagtaggacatgtatgggctaaagggtcagttagaaccagagtatggagagtctgggatgccatatacaaaagtttgggctctaacagtctcctgatgaggagcaattttccaaaacatgaaagaattattctaagaatgacaaagggaagttaatataaattatgactaccacagggtttgaatttacacactgaccaccacaaattttataactgtagtcgtctcgatggttgtgatgcccatgaggtgttgggctgggggcatgatgacgctgaggcaacatgagaggggacgtctttgacaccagggccccagccacgtgtctcaggggctcccacttgccatgggactcgcagctggttccatccgatgccagccccagtgcatctatcactgtcttcacaaaacgggggtcctccaggagttctggacagctgctctgcagattcttatatacctttaatcgaaggccttggacttttgagaggagcgcagtgccctccttttgtgttcaggaaggccaaattagagccttctccaccgccggggaatattcatgtgggaaatggaggcctgctgcagacctgaaggtcaatgattgtttaatctttctttgacagcattatgaaggtataatgggcatacaagaaactgcacgtctttaaagtgtacagttggagggtttttggcatgtgtggacacccatgaaacctcccccataatcaagacagtgaattgatccgccactcccaaaagtggccttgcgcctccagcaacccctctttcctgctcctcactgtcccccatccccaccgccactgcttggcttgctgtcactatagattaattcccattttctagaattccatagaaatggactcatacagtgtatgtctggcctctttcactcagcacaattcttttttcatcaggtgtttttgtgcatatcagtactccatttttttttattgttggtaggatcccattgtatgggtggaccacaatacctgttgaatacctgttgatggacatttgggttgttaccaggttttggccatgacaaataaagctgctgtgaacatttgtgtacca

SEQ ID NO: 200884 - DNA, 1257 bp, Homo sapiens
  Payload ID: 19645
  Gene Name: ZHX1-C8orf76 readthrough
  Uniprot ID: Q96EF9
  ENST ID: ENST00000357082
  CDS Start-End: 95-973
ggagaagacagactgctgctttggacctgttggtaatgatggcctgagctaaacatctaactagaagggatacccttccatttcaaagaacagaatgctaaggaagctgtggcaatggttttatgaagaaacagaaagcagtgatgatgttgaagtgctgactctcaagaaattcaaaggagacctggcctacagacgacaagagtatcagaaagcactgcaggagtattccagtatctctgaaaaattgtcatcaaccaattttgccatgaaaagggatgtccaggaaggtcaggctcggtgtctggctcacctgggtaggcatatggaggcgctggagattgctgcaaacttggaaaataaagcaaccaacacagaccatttaaccacggtactctacctccagcttgctatttgttcaagtttgcagaacttggagaaaacaattttctgcctgcagaaactgatttctttgcatccttttaatccttggaactggggcaaattggcagaggcttacctgaatctggggccagctctttcagcagcacttgcgtcatctcagaaacagcacagtttcacctcaagtgacaaaactatcaaatccttctttccacactcaggaaaagactgtcttttgtgttttcctgaaaccttgcctgagagctctttattttctgtggaagcgaatagcagtaatagccagaaaaatgagaaagctctgacaaatatccaaaactgtatggcagaaaagagagaaacagtgttgatagagactcagctgaaagcatgtgcctcttttatacgaaccaggcttctgcttcagtttacccaacctcagcaaacatcgtttgctttggagaggaacttaaggactcagcaggaaattgaagataaaatgaaagggttcagcttcaaagaagacactttgctgttgatagctgaggtgagtgtatccctcgggtttatgtgaaacgaagcatcatagatattttccctggctctgatagcattttttataaagcagggccaaatttaatctactgaaggacttgtctccctcctctgtgtgccttttgatcactcagcaatcaccaaggcggcctcttgatcggcattcccctgcagcgtgcgggaccgcaggggctgtgtttcatgtacttgtcagtgcttgttagcacctgcctgcctgaacatcatcaatgcccaataattgtttgtttcagtgctgaataaatgaatgaatgaatgcttaca

SEQ ID NO: 200885 - DNA, 581 bp, Homo sapiens
  Payload ID: 19645
  Gene Name: ZHX1-C8orf76 readthrough
  Uniprot ID: Q96EF9
  ENST ID: ENST00000622816
  CDS Start-End: 162-581
aaagtgcagccggtttgaaatgcaagatggcggcggcgtggcgctgagaggcgcggcggcccctgcaggagaagacagactgctgctttggacctgttggtaatgatggcctgagctaaacatctaactagaagggatacccttccatttcaaagaacagaatgctaaggaagctgtggcaatggttttatgaagaaacagaaagcagtgatgatgttgaagtgctgactctcaagaaattcaaaggagacctggcctacagacgacaagagtatcagaaagcactgcaggagtattccagtatctctgaaaaattgtcatcaaccaattttgccatgaaaagggatgtccaggaaggtcaggctcggtgtctggctcacctgggtaggcatatggaggcgctggagattgctgcaaacttggaaaataaagcaaccaacacagaccatttaaccacggtactctacctccagcttgctatttgttcaagtttgcagaacttggagaaaacaattttctgcctgcagaaactgatttctttgcatccttttaatccttggaactggggcaaattggcagag

SEQ ID NO: 200886 - DNA, 5241 bp, Homo sapiens
  Payload ID: 19646
  Gene Name: Zic family member 1
  Uniprot ID: Q15915
  ENST ID: ENST00000282928
  CDS Start-End: 730-2073
atgattgctgctatcagtctcgcgctcaccgcccggctgaggaggtgaaagtttctccccaggaagataaaccgcaaaagacaatattgtgcatgatttgcgccttttctttggctttttctttctttcttcacccccccacccacttttttttttttttttttcaaaaagcagagagggaaaaacggagagtgaaggagcgaggaggcgagcgtgagagaaaggagagagagagaaaagaaagggcgaggggctagtggagaagtaaggaggggcgcgctgcgcgaggcggagagagggcgaagcagtcgcggcactggcgctcacattcctctatgctacaaatccaggaggaagtttttttttagggggctgagatgctccatgcctttccccgggcagccttgacgcgcggccctctcggcagagactgagcggcgagaaagtgcgagccgggccggcagaatctgcctggcgggcgctggagcctgcgttactcgcggcccgcagccgtccggctactttgcgtttggcccggccagcgcccgggcgcgccgcgccattgcctgcaggctaggacttcgcgaggtgggtcgactccccctccctcctcctcttcttcctcctcttcctcctcctcttgttcctcctcctcctcccgattttccctcctcggctggcgagggtggggggggcgggggaggccggggctcgccccgagcagccacgatgctcctggacgccggcccccagtacccagcgatcggcgtgaccacctttggcgcgtcccgccaccactccgcgggcgacgtggccgaacgagacgtgggcctgggcatcaacccgttcgccgacggcatgggcgccttcaagctcaaccccagttcgcacgagctggcttcggccggccagacggccttcacgtcgcaggcgccaggctacgcggctgctgcggccctgggccatcaccatcacccgggccacgtcggctcctattccagcgcagccttcaactccacgcgggactttctgttccgcaaccggggttttggcgacgcggcggcggcagccagcgcacagcacagcctctttgctgcatcggccgggggcttcgggggcccacacggccacacggacgccgcgggccacctcctcttccccgggcttcacgagcaggctgccggccacgcgtcgcctaacgtggtcaacgggcagatgaggctcggcttctcgggggacatgtacccgcgaccggagcagtacggccaggtgaccagcccgcgttcggagcactatgctgcgccgcagctgcacggctacgggcccatgaacgtgaacatggccgcgcatcacggcgccggcgccttcttccgctacatgcgccaacccatcaagcaagagctcatctgcaagtggatcgagcccgagcagctggccaaccccaaaaagtcgtgcaacaaaactttcagcaccatgcacgagctagttacgcacgtcaccgtggagcacgtaggtggcccggagcagagtaatcacatctgcttctgggaggagtgtccgcgcgagggcaagcccttcaaagccaaatacaaactggttaaccacatccgcgtgcacacgggcgagaagccctttccctgccccttccctggctgtggcaaggtcttcgcgcgctccgagaatttaaagatccacaaaaggacgcacacaggggagaagcccttcaagtgcgagtttgagggctgtgaccggcgcttcgctaacagcagcgaccgcaagaagcacatgcacgtgcacacgagcgacaagccctatctttgcaagatgtgcgacaagtcctacacgcatcccagttcgctgcgcaaacacatgaaggtccacgaatcctcctcgcagggctcgcagccttcgccggccgccagctctggctacgaatcctccacgcctcccaccatcgtgtctccctccacagacaacccgaccacaagctccttatcgccctcctcctccgcagtccaccacacagccggccacagtgcgctctcttccaattttaacgaatggtacgtttaaaatcagaaacaaaacatcgaacaaaaccctatttaagagactgatcacacacgtatacacaacattactgaaagaaccctgcgaatcaaaacaacccccacacagaccccgcaatccttttttaaaaaatctgccaatagacccaggacgagtaagagaggaagcatcaaccttttaaaaatttcctttcgctttcattatttttctttttttggcaaaggcttggtacccaaggtgcggtagggggtcgagggggaggaggccacctgaccaaatgccgccaaccccgagggccagtttcttgtcgaattggtacgggctctctggggcttcggcttctttttttctttgttttcttgtaaatacagaattattagcttaaaactgtactgttgaattctgtaaatagttatatctcggttggagcgggtgggtgggattgtggcgttgtggtctttgcattgggggaggggggagggaccggatgggcggggggagggggagggggaggggtgggcggccgaaagccaactgtttgtactgaatggcaagaatgttctagtaaatgtgtaccaaaatgtgaattactttgtacgattacagtctccacgtcgacctaacccaatattattggtattaatgtgctttttttgtataaagtgcaaacatttcgtcccaaagtctaagtactttagtgcagtaaaatgttgtttcatgtcctgtcaagaattcgtatagtacgagcctggatctgcgtgtcaaactgttccatttgtttatgtaaagtgatattaaaaaagatataaactataactgtccgttacttttggcaaaagatacaaccacataatgtatataattcctagtttccatatttatccgcatgtaaagggccggtttatccatgttacagctcttcaatatttatggctagaagaactcgtatgtacactttagtttccagaactgtttggtaacctttcgtaccttattaaagattcttaaatctccgtgattgtggtaggaatttcttcttcacccaccagcaacctgctgcctcttctgccagtcttaaagggtctccagaaaagctctccagtctcccttgccttccctttctgtcactgcaggtcgtataaacgtgataaatgaatgctaccctgctggctctccgagagagtgtaattagtatttatatcaaaatttatgaaacaaattttcggccgcagtataatttaaatgacctttgcagatgtagaataacaaccataaaaataacaggaatagattgcacaggcgacatcaatattaatgtagacgaattgtcagaagctcaggggctcgctctgcaacattgcaaatgaacttgcagccgagggttccgctgccccctagattaaattccccgggctgaaactgagttgcagatttacaatatcatattttaaattgctgtcttcaattaaaccatttatgaccataactaattttcaggatgtcgatgcatgcttttccaggccttccttctttgtacaaaagtaaatgtccataaagcgtttcacttatattcttcaaacatgatgctaatttaaattaattacttcctatgatatgttattattcctatgattttgccactgttattagttctctcaaaaatacatctagggaagaggattattttaagtaatttgattatctttctatctcttttatttatttctcatttacttaagaaattcgttccattggttggcattgatacagtaaatttgtaaatgaggagacaatataaaaaatctaaattacttgtgcttaatgactgtagcagaatgccttttctctaaatcagattgtctttcttgcagtttagtttgatagatttgcaagctatgctgcttccatgaagttagctgcgctggtaggaacgcaggcttctttgtctctggttgtagcttgcatgatcgccccattaggcagacaacgtagccggagatcacaaatcaggcccttggctgtagttgctagtgtgtggaggtgcagagcaggtggcagaaactgacctcactgggcaagggtggccatggacctgattctttaatgcactctatgtgttcaggaagccacaggccatatttgactctgagaaagaaaacaagaggaaaaaccccacaaagtataacaaccccttaagatacatctattttaaagtgaaattaatttttcagtttataccattggccaattacaagataaaaatgttcaatttctttaagaatcctttgttgacttgtcttttcatctcttgctatttatatttgtcactgtttcaacaaagtcttatttgctgaggaaggactttgctgcacttactgtaccacatcaaacactggggagggtggtgtttaactttttaaaaaatgttattctgattataacaataatattggcttttttcatgaaaagagcgccaccttgcaaggtttagtgagatttatggaagttgaatacctaagcaggaattgctgctagctccaaaaatttgcgaagcaaaagctagccccaattggtttggaagtttgaaactgattaacagatttgcatttgaagtgactccagacattaggtccagacattagttaaaaatagaaagaggaataaagacatctcttctctctagaaaagataacaccacaattaataatccttcccactttcattgagatcagcttgtctgataacctgatatgagtgtgataatgataaacatgataatagtggtacttttgtaattttgctggtgcatttaagaagatagtaaatgatgagttcatcttttcttcgaacattcctattcctagatgtagtttacctcaaattgggaattataactgtctaatttttgttgtgtacctgatgccccttttgctttaataccacagtgtaacaattaaatatcacactatgacatatgatttaagtaggatattttaaagataaattttaggggtaaatgtttacttcaaaatgactccatatttcaaatatctgtttagactgtgaaggccaaataatttttaagaaaacatttgaagagtagtgtgtttgcatttgtgaataatcttactcacagcaagtaaacgtaataaaagccaacatttaagccaa

SEQ ID NO: 200887 - DNA, 539 bp, Homo sapiens
  Payload ID: 19646
  Gene Name: Zic family member 1
  ENST ID: ENST00000488404
  CDS Start-End: 1-410
atcctttcggtgcggacagtcgccttcaaagccaggccccggattcaggggagaagcccttcaagtgcgagtttgagggctgtgaccggcgcttcgctaacagcagcgaccgcaagaagcacatgcacgtgcacacgagcgacaagccctatctttgcaagatgtgcgacaagtcctacacgcatcccagttcgctgcgcaaacacatgaaggtccacgaatcctcctcgcagggctcgcagccttcgccggccgccagctctggctacgaatcctccacgcctcccaccatcgtgtctccctccacagacaacccgaccacaagctccttatcgccctcctcctccgcagtccaccacacagccggccacagtgcgctctcttccaattttaacgaatggtacgtttaaaatcagaaacaaaacatcgaacaaaaccctatttaagagactgatcacacacgtatacacaacattactgaaagaaccctgcgaatcaaaacaacccccacacagaccccgcaatccttttttaaaaaa

SEQ ID NO: 200888 - DNA, 2983 bp, Homo sapiens
  Payload ID: 19647
  Gene Name: Zic family member 2
  Uniprot ID: O95409
  ENST ID: ENST00000376335
  CDS Start-End: 294-1892
ccgcctggctttggactcttctcctcctccacctcctcctcctcctcccgcgccgccgcctcctcctcctcttcctctccgcgccttcgctacgcgcccggccgcccgaggcagatccaggcggcggcggaggcggcgggcgcaggagagcggctcccagggctgaagtggccgccaccaccgccgcctgcgcctggagcccggtggccgccggacgcaccgcgcggatcgggagcgggagtcgaggcggcgcggaggcgcagggctcgcaggggcgggcgggcgcgctggccatgctcctggacgcgggtccgcagttcccggccatcggggtgggcagcttcgcgcgccaccatcaccactccgccgcggcggcggcggcggctgccgccgagatgcaggaccgtgaactgagcctggcggcggcgcagaacggcttcgttgactccgccgccgcgcacatgggagccttcaagctcaacccgggcgcgcacgagctgtccccgggccagagctcggcgttcacgtcgcagggccccggcgcctaccccggctccgctgcggctgccgctgcggccgcagcgctcgggccccacgccgcgcacgttggctcctactctgggccgcccttcaactccacccgggacttcctgttccgcagccgcggcttcggggactcggcgccgggcggcgggcagcacgggctgttcgggccgggcgcgggcggcctgcaccacgcgcactcggacgcgcagggccacctcctcttcccgggcctgccagagcagcacgggccgcacggctcgcagaatgtgctcaacgggcagatgcgcctcgggctgcccggcgaggtgttcgggcgctcggagcaataccgccaggtggccagcccgcggaccgacccctactcggcggcgcaactccacaaccagtacggccccatgaatatgaacatgggtatgaacatggcagcagccgcggcccaccaccaccaccaccaccaccaccaccccggtgcctttttccgctatatgcggcagcagtgcatcaagcaggagctaatctgcaagtggatcgaccccgagcaactgagcaatcccaagaagagctgcaacaaaactttcagcaccatgcacgagctggtgacacacgtctcggtggagcacgtcggcggcccggagcagagcaaccacgtctgcttctgggaggagtgtccgcgcgagggcaagcccttcaaggccaaatacaaactggtcaaccacatccgcgtgcacacaggcgagaaacccttcccctgccccttcccgggctgtggcaaagtcttcgcgcgctccgagaacctcaagatccacaaaaggacccacacaggggagaagccgttccagtgtgagtttgagggctgcgaccggcgcttcgccaacagcagcgacaggaagaagcacatgcacgtccacacctccgataagccctatctctgcaagatgtgcgacaagtcctacacgcaccccagctcgctgcggaagcacatgaaggtccatgagtcctccccgcagggctctgaatcctccccggccgccagctccggctatgagtcgtccacgcccccggggctggtgtcccccagcgccgagccccagagcagctccaacctgtccccagcggcggcggcagcggcggcggcggctgcggcggcggcggccgcggtgtccgcggtgcaccggggcggaggctcgggcagtggcggcgcgggaggcggctcaggcggcggcagcggcagtggcgggggcggcggcggggcgggcggcgggggcggcggcagctctggcgggggcagcgggacagccgggggtcacagcggcctctcctccaacttcaatgaatggtacgtgtgacgggtcggggcctctctccctctccctgtccccaccccagcgcagcagccctccccgcagctagcagcgagggcaccttgtgatcatgttgttaaaattatgaatctgatttttatgatgatgaaaattttaccagcagaaggattttttaaagttttttttttttttttaataataatctaggcatgaagagcaaaaatatcccttccggagtctttgaagctgaaaatataaaacaaataaaaaataaaaaaataaaaacccacaaaaatgttgaaccaaacctccctgctaatctccatgcccacgttctttcccaccctgttcccagtcttctgacaaactgtgtacatagcggactcctcctttctcctccgaggtggttttaaaggctttttggtgtatagaagtttgtccatttgtaaaactccggattgcgttcctccccgccttccgccccttcccttccctaaagtgatgggctttctcttttctctttttagtttacccggtttctttttaagtaatgtggaagaaaatggtttattttgtattgtggtattgaatattgtgttcctttttatgaggcaacctgattgtaaacttcatgtaactatagactggaaaaaatgagccgtgccaaagtctcccttctgtttcttcagcacattgacccatagcacacacatacacaccaccaccaacaacgcttgtgaatgtatttttctgttagctgggtttacatgtgatgttttagtgcttttgcaagttcaatttgttagttcctgtatgaaagattgtgggggaaaaataaacgtcgtgccgttagctttttccgtaataacacccttccttctgtaaatacccgttaccatatttatccatttgtaattaaattatggtattaacttgctacagaggaaacaatatttataaagaatgtttcttaactataaatatgtacaattgtgggcataaactgtttcagattttttatttgaaggttttaagtggtttgatcatttcttgtgatgttttgagagtaatgcatacagaaatataataaaatgtgttgaaactgcatgaacata

SEQ ID NO: 200889 - DNA, 1596 bp, Homo sapiens
  Payload ID: 19647
  Gene Name: Zic family member 2
  ENST ID: ENST00000620342
  CDS Start-End: 1-1596
atgctcctggacgcgggtccgcagttcccggccatcggggtgggcagcttcgcgcgccaccatcaccactccgccgcggcggcggcggcggctgccgccgagatgcaggaccgtgaactgagcctggcggcggcgcagaacggcttcgttgactccgccgccgcgcacatgggagccttcaagctcaacccgggcgcgcacgagctgtccccgggccagagctcggcgttcacgtcgcagggccccggcgcctaccccggctccgctgcggctgccgctgcggccgcagcgctcgggccccacgccgcgcacgttggctcctactctgggccgcccttcaactccacccgggacttcctgttccgcagcgcggcttcggggactgcgccgggcggcgggcagcacgggctgttcgggccgggcgcgggcggcctgcaccacgcgcactcggacgcgcagggccacctcctcttcccgggcctgccagagcagcacgggccgcacggctcgcagaatgtgctcaacgggcagatgcgcctcgggctgcccggcgaggtgttcgggcgctcggagcaataccgccaggtggccagcccgcggaccgacccctactcggcggcgcaactccacaaccagtacggccccatgaatatgaacatgggtatgaacatggcagcagccgcggcccaccaccaccaccaccaccaccaccaccccggtgcctttttccgctatatgcggcagcagtgcatcaagcaggagctaatctgcaagtggatcgaccccgagcaactgagcaatcccaagaagagctgcaacaaaactttcagcaccatgcacgagctggtgacacacgtctcggtggagcacgtcggcggcccggagcagagcaaccacgtctgcttctgggaggagtgtccgcgcgagggcaagcccttcaaggccaaatacaaactggtcaaccacatccgcgtgcacacaggcgagaaacccttcccctgccccttcccgggctgtggcaaagtcttcgcgcgctccgagaacctcaagatccacaaaaggacccacacaggggagaagccgttccagtgtgagtttgagggctgcgaccggcgcttcgccaacagcagcgacaggaagaagcacatgcacgtccacacctccgataagccctatctctgcaagatgtgcgacaagtcctacacgcaccccagctcgctgcggaagcacatgaaggtccatgagtcctccccgcagggctctgaatcctccccggccgccagctccggctatgagtcgtccacgcccccggggctggtgtcccccagcgccgagccccagagcagctccaacctgtccccagcggcggcggcagcggcggcggcggctgcggcggcggcggccgcggtgtccgcggtgcaccggggcggaggctcgggcagtggcggcgcgggaggcggctcaggcggcggcagcggcagtggcgggggcggcggcggggcgggcggcgggggcggcggcagctctggcgggggcagcgggacagccgggggtcacagcggcctctcctccaacttcaatgaatggtacgtgtga

SEQ ID NO: 200890 - DNA, 3469 bp, Homo sapiens
  Payload ID: 19648
  Gene Name: Zic family member 3
  Uniprot ID: O60481
  ENST ID: ENST00000287538
  CDS Start-End: 551-1954
ttactctggaggcgaagaggctgggactcgcgcggcgagcggcaagcggcgagtaacgagcctgcctactgcccgctgcccgcctgcccggccgctagccggctccgccacttggcgcagcccagcccggaggccggtacccagggagcctcctggccccgcggttctgtgcactcggggagaggaggggtgcccgggacaggattggcaaactccgccctccacttactattttgcttatttttctttgtgcgcgcctgttagtttgttaaaccagatctagtccgagtcttttctcctcccttctcctccctcctcctccccccgccaacaccccctccctgctctttcttcccctcctccctcctatccctctgcaggagactcttgcagtgacggaaagttgcagcccctggtagcgccttgggggtctccccgcagtgtccaaccgccgccacccctttccgactacggcacttcggagatctcctccttcgccggtaccctctctcacttcggccggatcgcctgtgcccagaacgtcccacccatgacgatgctcctggacggaggcccgcagttccctgggctgggagtgggcagcttcggcgcgccgcgccaccacgagatgcccaaccgtgagccggcaggcatggggctgaatcccttcggggactcaacccacgccgccgccgccgccgccgccgccgctgccttcaagctgagccctgccgcggcgcacgatctatcttcaggccagagctcggctttcacgccgcagggttcgggctacgccaacgccctgggccaccatcaccaccaccatcaccatcatcaccacaccagccaggtgcccagctacggtggcgctgcctctgccgccttcaactcaacgcgcgagtttctgttccgccagcgcagctccgggctcagtgaggcggcctcgggtggcgggcagcacgggctcttcgccggctcggcgagcagcctgcatgctccagctggcatccccgagccccctagctacttgctgtttcccgggctgcatgagcagggcgctgggcacccgtcgcccacagggcacgtggacaacaaccaggtccacctggggctgcgtggggagctgttcggccgtgctgacccataccgcccagtggccagcccgcgcacggacccctacgcggccggcgctcagtttcctaactacagccccatgaacatgaacatgggagtgaacgtggcggcccaccacgggcccggcgccttcttccgttatatgcggcagcctatcaagcaggagctgtcgtgcaagtggatcgacgaggctcagctgagccggcccaagaagagctgcgaccggaccttcagcaccatgcatgagctggtgacacatgtcaccatggagcatgtggggggcccggagcagaacaaccacgtctgctactgggaggagtgcccccgggagggcaagtctttcaaggcgaagtacaaactggtcaaccacatccgagtgcacacgggcgagaagcccttcccatgccccttcccgggctgcgggaagatctttgcccgttctgagaacctcaagatccacaagaggacccacacaggtgagaaacctttcaaatgtgaatttgaaggctgtgacagacgctttgccaacagcagcgaccgtaagaagcacatgcatgtgcatacctcggacaagccctatatctgcaaagtgtgcgacaagtcctacacgcacccgagctccctgcgcaaacacatgaaggttcatgaatctcaagggtcagattcctcccctgctgccagttcaggctatgaatcttccactccacccgctatagcttctgcaaacagtaaagataccactaaaaccccttctgcagttcaaactagcaccagccacaaccctggacttcctcctaattttaacgaatggtacgtctgaggacaaacacaaaccctgttaattatagaatggaccaaatacatttttaaaagaaaactgagaccaatcagatggaaatggagttttaaggcaagaggccatatatagggctacatcttgttaattgcaattgtccaggaaggttttgggcaagatccaaaagtagccatgcccttttctcaggatagaaaatatgttttggcatttgaagcattttttacaaaatctttacactactttttcttccccttcctcttgctctctgcacaccccattcttaaactcctccaattcattttaacacttgtcctgtttcttgagaggaagttatagaaggcttgttggtggtggtgatgttaaactgatggaaattctttttcgccttagtggtgattgtttaaactctcacagtcttaaaccgtgccaaagtcctgttatgtcttgaacttttcctcaaagcattacacttgtgaatgtatttttgtctaatagggtcgaaactgttgttcagtattttttcaggctgaggatgtgatgttactctacacattgtgacgtttagtatacagttgccttttgtaataactttttttttgtaaatacatatccattgatgccatatttatcgtttgtaatttaattattgctacaagtgccgggaactgaacaatatttatggataaatgttttctaacaaattctgtacagcttttgattataactgctttagcattaaaaattgttttgaaagaagaacacaatttacaattttggaaccactgactcctttctcttgttttgtaacagccttcttctacaaagaggagatgtgagcaaattaaatcttgtttgttggtatttataactcactcagatcccttttttaattgttaaattatttttctattacagtataaattccttacagtgtcagtttccatctgggaagactctcctttctttatctctatctcagatggttgtttaactgcgagtttaaatgtgtttgtcctggattttcggcatgcaaatcaaatattactgatcaattcagttagtggccatgacatctcaatcttgtacttcaaagactgagaagctggatttaatcatccctgccctacatatataaacataaggtaacctactgaattttatgtcccttagttctttattaccttacataaaaatgaaaattgcggcaggatgcatgtctgtctgttctatctagagatcacccatatacctatatatgtttgtatctatgacttatctaatctgcctatcaatctatctagtagctatctatatattttcaaaagatagcttatgtctaaaacagtggtgatgagtaaggccagttgagcattgcttacttatggttaaagtgcttcttaaaagaaccatagtccatttacaattttggaaggcaaaggctgatttgtttgctgtatatagttcaattcataattatcgcaattatccataacatttatatagcggtgtaataactgc

SEQ ID NO: 200891 - DNA, 1968 bp, Homo sapiens
  Payload ID: 19648
  Gene Name: Zic family member 3
  Uniprot ID: O60481
  ENST ID: ENST00000370606
  CDS Start-End: 175-1548
gcaggagactcttgcagtgacggaaagttgcagcccctggtagcgccttgggggtctccccgcagtgtccaaccgccgccacccctttccgactacggcacttcggagatctcctccttcgccggtaccctctctcacttcggccggatcgcctgtgcccagaacgtcccacccatgacgatgctcctggacggaggcccgcagttccctgggctgggagtgggcagcttcggcgcgccgcgccaccacgagatgcccaaccgtgagccggcaggcatggggctgaatcccttcggggactcaacccacgccgccgccgccgccgccgccgccgctgccttcaagctgagccctgccgcggcgcacgatctatcttcaggccagagctcggctttcacgccgcagggttcgggctacgccaacgccctgggccaccatcaccaccaccatcaccatcatcaccacaccagccaggtgcccagctacggtggcgctgcctctgccgccttcaactcaacgcgcgagtttctgttccgccagcgcagctccgggctcagtgaggcggcctcgggtggcgggcagcacgggctcttcgccggctcggcgagcagcctgcatgctccagctggcatccccgagccccctagctacttgctgtttcccgggctgcatgagcagggcgctgggcacccgtcgcccacagggcacgtggacaacaaccaggtccacctggggctgcgtggggagctgttcggccgtgctgacccataccgcccagtggccagcccgcgcacggacccctacgcggccggcgctcagtttcctaactacagccccatgaacatgaacatgggagtgaacgtggcggcccaccacgggcccggcgccttcttccgttatatgcggcagcctatcaagcaggagctgtcgtgcaagtggatcgacgaggctcagctgagccggcccaagaagagctgcgaccggaccttcagcaccatgcatgagctggtgacacatgtcaccatggagcatgtggggggcccggagcagaacaaccacgtctgctactgggaggagtgcccccgggagggcaagtctttcaaggcgaagtacaaactggtcaaccacatccgagtgcacacgggcgagaagcccttcccatgccccttcccgggctgcgggaagatctttgcccgttctgagaacctcaagatccacaagaggacccacacaggtgagaaacctttcaaatgtgaatttgaaggctgtgacagacgctttgccaacagcagcgaccgtaagaagcacatgcatgtgcatacctcggacaagccctatatctgcaaagtgtgcgacaagtcctacacgcacccgagctccctgcgcaaacacatgaagtgttgtcctgcttggtatccgggacagtctctaattcctgacgaagaacttgatactgacgttggtatgcagcagccagccctccataacactacctatcctaaatgcagggttaatgccgaacctactgtgcaagaaatgatttactgatgaggtttcaaagaaaaccacatcaatttggatgtctgttaccttgaagtgatcattttaagagtagtagcttcttccctaggtataaaaagactattttcttcttttggtgtatttcatcctgtgttgagcaatcatttgtgaaatgaaaaagcaaaaaaactccccccactttaggatttataaatgggaagatggaggtgaagactggcctaattcataacccagtatgcattatctcatgcattgtgttgaccttggtgaaaatctttttcaaataccagcattctatatgtagaactaaagtgtttaaaactagaaacatgaattgttgttttgttaattttatgtttgtgttcagaaagcaatacccaggatccctttaatttttgtttgacttaaataaaaccatttaaatta

SEQ ID NO: 200892 - DNA, 4331 bp, Homo sapiens
  Payload ID: 19649
  Gene Name: Zic family member 4
  Uniprot ID: Q8N9L1
  ENST ID: ENST00000383075
  CDS Start-End: 514-1518
acacaacaagggaggggacctaaggggggaagggtagctgttgggagggggagagggaaaataattcttcaaaaaagaaaagtcagtcttctcctctccagtccgtggaaaatccaacggggacgttgacaagagggtatttttaggaaacacatccaaatatacagggtaagagtgaatgtgagaaaaaaaaaagttgtgggttgtagaagttatcaagtgggatttgcggcgctctctgcaggaaacgcgaacggctccagttcaaagccacatgcaccaacgtgacatataagccattaaaatatcatcctgacggctcatttctgcttcatcatacattccctaactgcttcctgaaagctggaaaaggagaagtgaaggatgaccgcctcgctggaaccacaaaagagaggcttggaggggtttgtggtcccctctcagccaccccgaaatgatgtgcagaaatgaggcgatcctggcaacaggtggagtggggctcaaagtcagaaaatgagatacaagacatccttggtgatgaggaaacgattacggctttaccgaaacactcttaaagagtcaagtagcagctctggacaccatggcccccagctcaccgccgcctccagcccctcggtgttcccgggcctccacgaggagcctccccaggcctcccccagccgtcctttgaatggactcctgcgtctggggctccctggagacatgtacgcgcggccggagcccttcccgccagggcctgcggcccgcagcgacgccctggcagctgccgcagccctgcatggctacgggggcatgaacctgacggtgaacctcgctgcgccccacggtcctggcgctttcttccgctacatgcgccagcccatcaaacaggagctcatctgcaagtggctggcggccgacggcaccgcgaccccgagcctctgctccaaaactttcagcaccatgcacgagctggtcacgcacgtcaccgtggagcacgtcggcggcccggaacaggccaaccacatttgcttctgggaggagtgtccgcgccagggaaagcccttcaaagccaaatacaaacttgtaaatcacatccgcgtgcacacgggcgagaagcccttcccttgtcctttcccggggtgtgggaaggtctttgctagatcagaaaatctcaaaatacacaaacgaactcacacaggcgagaagcccttcagatgcgagttcgagggctgcgagcggcgcttcgccaacagcagcgaccgtaagaagcattcgcacgtgcacactagcgacaagccatacacgtgcaaggtgcggggctgcgacaagtgctacacgcaccccagctcgctgcgtaagcacatgaaggtgcacgggcgctcgccgccgcccagctctggctacgattcggctacaccgtctgccctcgtgtcgccctcgtcggactgcggccacaagtcccaggtggcctcctcggcggcggtggcggcgcgtaccgccgacttgagcgaatgatgtccaccgcgttgctcgcaaggtaatctcgctccgcgcagctgagcgccccgcatctcgcgcctgctacatcaaagggcccgcgcacaaagcagtgtttcttcgccacggtgcatcttcatggtaagttaggatttctatggcaatgtgcaagtcgcactgaaatcctgaaaggccaagcctggagcccgtccaggcttttcattaaggacataatatttacgtctaacagaccttttttcttgtgtatacaagtatatatttttgtttgacgcggactaaatcattttcatttaatttccggtaaacaaaacccacgcgaatgggcacttgtacccgatcataataaaaatggataataatgtgaaggaagaaaagagccgcttgaatcgccgctcagccccctttgtttctgctttctgcggtgatcagagggcgcgtttgggtttgatggcgagtttctaaaggcgaggaaatggtttgtaagaggggaaagaaaaggagaaaggtctaatcaagctcgggttgttcaaagagtcgggttttggggttgaaagtgtgagtttgacggtgcatcagcatgccgcgttaggctcgccatggaaatacgcgcggggagcggccgcttcaaaggcggcacacttcactacagacactctattaagatacatttgcgctgacctttgctttcacgccatttaatactgtcactgcgctctccagtatatacttcctttctagaacccgacttgcccacgtttaggggttcactctgcaccctgatgtgggaggctttggcgcaggggacactttcaggaaagggaggagcacaaggactctgtgcatcttgactgcaccccaaagaggctccaggatcaggagtgaaagattttaaagcagcctccgaagcttaacaaatgagcattccaagctcagttttgtgcaaatcgcctttctgactcttgagtaggatggaggcttaaatttaatggcgacttggggggaagggagccaccctgggggagtctgaggagttcagactgtgcccttgggaatttccactctggctttccgtgccactcttcttcctttccatcccaaaagtctcttgcggcccctgaaacttgtttctttctaaggcagggtgtgtggtacccttaggcctggactagtcctagatgcaaactcaagagcccaaggccaaggggatgtggggaagatggcaggaaagttagaagtccatgttcccttaattgtcttgttgtttattttatccaagtaccccagtgaataggggaaaaataaacacagtgaaaaaaaaaatcaaacagtggagtcttctttagtgccagtccttgtggttgaataaaaaggatggtccgctttctattgagctgagaaatctttgaagtgggagttattatctgagacattcctgcttgtcgtcctaacaacgctgatgaaacgtaaaaggttctttgtcagcgatttgttctcctctctgtcaaactccctctgccccgttagtttcaaaccgtttctaaagagataaaaatcaaacttcttttaaaacaatatccacacactgcatcaatacataactttaggtctaagtcttgctaagggataaacaaaagcaatgcctagacatcagggtcagggcctggtctggtgaagtatgcagaagttggggggccctcgggacaagctttgggacatgaggaaaagaatgcagagagggtgcaagcagaatacataccctaagtccataattgtgtttctgcttctttctgctctggtttgcattcaatcagcccaagttgggtcacatagatgggtttcctttgggtacccctcaggctcctaatattcttgcccaggatccttggaacttaagaatgcagccaagcaattgttaatatctcctgctccttcaaagccacctctgctaaaaatagacccattgtgtgtttcttctcactagcagcaatcaacaagccctttctgccgttaataagaaggagaatagctgaaggagagagatattttattaatttcctgtttccttcagaatcttggcaattgaagtttagaaggtttggtctacaacacagtgatcgaaaatgcatgtaaatgcccatccttcccttcattcacgtgtgaagttgttcattttatattgtgcccagcaaagaaactttcacccagttcaggtttccccaaaactcctgtggtggttttaaaggtggtttaaataaataaggatgtgctggtccccctactctgtgtgtgctgaataaatggcttgtaaagaagtttttccaagctgtaacccatgctgttattatagttgctgcaaaatgttcttcctgatattgattttatttgttaactgaaggtctccatatgtttgtttatattgctaatttatgagaaaatgtaataattgcaatgaatgtgaattatacagacaggcaaacattttgtaatcataattcacatatacacaaaagcctggctgaaatctttagactatttgtaccctctctacccacactgtttgtgatttatcatctgtctctttagtgtcagttaaattatgaactaacttgaaaataaaagttgtttgactgaaagtgattgttgaatgaacaacaaagttgaaagccatggcttgatcttgtaaatatataaatgtaaatgatattaaatctgtgattccttttccctccaaaggcttttgtgtacatggcgctgcatttggctattttctttggaaataaataatgtgatgtttctcttcctcttttgaa

SEQ ID NO: 200893 - DNA, 3979 bp, Homo sapiens
  Payload ID: 19649
  Gene Name: Zic family member 4
  Uniprot ID: Q8N9L1
  ENST ID: ENST00000425731
  CDS Start-End: 50-1168
gaaagaaagctaggactggctcaaaggttggatctgaaagttggggttgatgaatggcccatgtcaaagtcttaggaaagcggaggggcttttggagggttgcacttcggccgtcaccgtcttcaggaaactccctttggattccaaggctcaaagtcagaaaatgagatacaagacatccttggtgatgaggaaacgattacggctttaccgaaacactcttaaagagtcaagtagcagctctggacaccatggcccccagctcaccgccgcctccagcccctcggtgttcccgggcctccacgaggagcctccccaggcctcccccagccgtcctttgaatggactcctgcgtctggggctccctggagacatgtacgcgcggccggagcccttcccgccagggcctgcggcccgcagcgacgccctggcagctgccgcagccctgcatggctacgggggcatgaacctgacggtgaacctcgctgcgccccacggtcctggcgctttcttccgctacatgcgccagcccatcaaacaggagctcatctgcaagtggctggcggccgacggcaccgcgaccccgagcctctgctccaaaactttcagcaccatgcacgagctggtcacgcacgtcaccgtggagcacgtcggcggcccggaacaggccaaccacatttgcttctgggaggagtgtccgcgccagggaaagcccttcaaagccaaatacaaacttgtaaatcacatccgcgtgcacacgggcgagaagcccttcccttgtcctttcccggggtgtgggaaggtctttgctagatcagaaaatctcaaaatacacaaacgaactcacacaggcgagaagcccttcagatgcgagttcgagggctgcgagcggcgcttcgccaacagcagcgaccgtaagaagcattcgcacgtgcacactagcgacaagccatacacgtgcaaggtgcggggctgcgacaagtgctacacgcaccccagctcgctgcgtaagcacatgaaggtgcacgggcgctcgccgccgcccagctctggctacgattcggctacaccgtctgccctcgtgtcgccctcgtcggactgcggccacaagtcccaggtggcctcctcggcggcggtggcggcgcgtaccgccgacttgagcgaatgatgtccaccgcgttgctcgcaaggtaatctcgctccgcgcagctgagcgccccgcatctcgcgcctgctacatcaaagggcccgcgcacaaagcagtgtttcttcgccacggtgcatcttcatggtaagttaggatttctatggcaatgtgcaagtcgcactgaaatcctgaaaggccaagcctggagcccgtccaggcttttcattaaggacataatatttacgtctaacagaccttttttcttgtgtatacaagtatatatttttgtttgacgcggactaaatcattttcatttaatttccggtaaacaaaacccacgcgaatgggcacttgtacccgatcataataaaaatggataataatgtgaaggaagaaaagagccgcttgaatcgccgctcagccccctttgtttctgctttctgcggtgatcagagggcgcgtttgggtttgatggcgagtttctaaaggcgaggaaatggtttgtaagaggggaaagaaaaggagaaaggtctaatcaagctcgggttgttcaaagagtcgggttttggggttgaaagtgtgagtttgacggtgcatcagcatgccgcgttaggctcgccatggaaatacgcgcggggagcggccgcttcaaaggcggcacacttcactacagacactctattaagatacatttgcgctgacctttgctttcacgccatttaatactgtcactgcgctctccagtatatacttcctttctagaacccgacttgcccacgtttaggggttcactctgcaccctgatgtgggaggctttggcgcaggggacactttcaggaaagggaggagcacaaggactctgtgcatcttgactgcaccccaaagaggctccaggatcaggagtgaaagattttaaagcagcctccgaagcttaacaaatgagcattccaagctcagttttgtgcaaatcgcctttctgactcttgagtaggatggaggcttaaatttaatggcgacttggggggaagggagccaccctgggggagtctgaggagttcagactgtgcccttgggaatttccactctggctttccgtgccactcttcttcctttccatcccaaaagtctcttgcggcccctgaaacttgtttctttctaaggcagggtgtgtggtacccttaggcctggactagtcctagatgcaaactcaagagcccaaggccaaggggatgtggggaagatggcaggaaagttagaagtccatgttcccttaattgtcttgttgtttattttatccaagtaccccagtgaataggggaaaaataaacacagtgaaaaaaaaaatcaaacagtggagtcttctttagtgccagtccttgtggttgaataaaaaggatggtccgctttctattgagctgagaaatctttgaagtgggagttattatctgagacattcctgcttgtcgtcctaacaacgctgatgaaacgtaaaaggttctttgtcagcgatttgttctcctctctgtcaaactccctctgccccgttagtttcaaaccgtttctaaagagataaaaatcaaacttcttttaaaacaatatccacacactgcatcaatacataactttaggtctaagtcttgctaagggataaacaaaagcaatgcctagacatcagggtcagggcctggtctggtgaagtatgcagaagttggggggccctcgggacaagctttgggacatgaggaaaagaatgcagagagggtgcaagcagaatacataccctaagtccataattgtgtttctgcttctttctgctctggtttgcattcaatcagcccaagttgggtcacatagatgggtttcctttgggtacccctcaggctcctaatattcttgcccaggatccttggaacttaagaatgcagccaagcaattgttaatatctcctgctccttcaaagccacctctgctaaaaatagacccattgtgtgtttcttctcactagcagcaatcaacaagccctttctgccgttaataagaaggagaatagctgaaggagagagatattttattaatttcctgtttccttcagaatcttggcaattgaagtttagaaggtttggtctacaacacagtgatcgaaaatgcatgtaaatgcccatccttcccttcattcacgtgtgaagttgttcattttatattgtgcccagcaaagaaactttcacccagttcaggtttccccaaaactcctgtggtggttttaaaggtggtttaaataaataaggatgtgctggtccccctactctgtgtgtgctgaataaatggcttgtaaagaagtttttccaagctgtaacccatgctgttattatagttgctgcaaaatgttcttcctgatattgattttatttgttaactgaaggtctccatatgtttgtttatattgctaatttatgagaaaatgtaataattgcaatgaatgtgaattatacagacaggcaaacattttgtaatcataattcacatatacacaaaagcctggctgaaatctttagactatttgtaccctctctacccacactgtttgtgatttatcatctgtctctttagtgtcagttaaattatgaactaacttgaaaataaaagttgtttgactgaaagtgattgttgaatgaacaacaaagttgaaagccatggcttgatcttgtaaatatataaatgtaaatgatattaaatctgtgattccttttccctccaaaggcttttgtgtacatggcgctgcatttggctattttctttggaaataaataatgtgatgtttctcttcctcttttg

SEQ ID NO: 200894 - DNA, 1774 bp, Homo sapiens
  Payload ID: 19649
  Gene Name: Zic family member 4
  Uniprot ID: Q8N9L1
  ENST ID: ENST00000484399
  CDS Start-End: 337-1341
gagaagtgatccagacctcttagaagttgggttggggctgccttatgggtggacagggatctctagggaacctcacacccatttcccccagaagcaaaagagtaaattctattattgccaaccaaccaggacttttccatgccagacatcctgccatgaggaaatttcagagcgaggacgcccagcatgccgcccttctgtaggaatgcaaagttaggcctcctttctttcctgatttgtgctggaaggagcttattacctttggggaagaatgccttttggttagaaagaattgaaaataataataccctctgggaaaaggctcaaagtcagaaaatgagatacaagacatccttggtgatgaggaaacgattacggctttaccgaaacactcttaaagagtcaagtagcagctctggacaccatggcccccagctcaccgccgcctccagcccctcggtgttcccgggcctccacgaggagcctccccaggcctcccccagccgtcctttgaatggactcctgcgtctggggctccctggagacatgtacgcgcggccggagcccttcccgccagggcctgcggcccgcagcgacgccctggcagctgccgcagccctgcatggctacgggggcatgaacctgacggtgaacctcgctgcgccccacggtcctggcgctttcttccgctacatgcgccagcccatcaaacaggagctcatctgcaagtggctggcggccgacggcaccgcgaccccgagcctctgctccaaaactttcagcaccatgcacgagctggtcacgcacgtcaccgtggagcacgtcggcggcccggaacaggccaaccacatttgcttctgggaggagtgtccgcgccagggaaagcccttcaaagccaaatacaaacttgtaaatcacatccgcgtgcacacgggcgagaagcccttcccttgtcctttcccggggtgtgggaaggtctttgctagatcagaaaatctcaaaatacacaaacgaactcacacaggcgagaagcccttcagatgcgagttcgagggctgcgagcggcgcttcgccaacagcagcgaccgtaagaagcattcgcacgtgcacactagcgacaagccatacacgtgcaaggtgcggggctgcgacaagtgctacacgcaccccagctcgctgcgtaagcacatgaaggtgcacgggcgctcgccgccgcccagctctggctacgattcggctacaccgtctgccctcgtgtcgccctcgtcggactgcggccacaagtcccaggtggcctcctcggcggcggtggcggcgcgtaccgccgacttgagcgaatgatgtccaccgcgttgctcgcaaggtaatctcgctccgcgcagctgagcgccccgcatctcgcgcctgctacatcaaagggcccgcgcacaaagcagtgtttcttcgccacggtgcatcttcatggtaagttaggatttctatggcaatgtgcaagtcgcactgaaatcctgaaaggccaagcctggagcccgtccaggcttttcattaaggacataatatttacgtctaacagaccttttttcttgtgtatacaagtatatatttttgtttgacgcggactaaatcattttcatttaatttccggtaaacaaaacccacgcgaatgggcacttgtacccgatcataataaaaatggataataatgtgaaggaagaaaagagccgcttgaatcgccgctcagccccctttgtttctgctttctgcggtgatcaga

SEQ ID NO: 200895 - DNA, 925 bp, Homo sapiens
  Payload ID: 19649
  Gene Name: Zic family member 4
  Uniprot ID: Q8N9L1
  ENST ID: ENST00000491672
  CDS Start-End: 444-830
aaaaaagaaaagtcagtcttctcctctccagtccgtggaaaatccaacggggacgttgacaagagggtatttttaggaaacacatccaaatatacagggtaagagtgaatgtgagaaaaaaaaaagttgtgggttgtagaagttatcaagtgggatttgcggcgctctctgcaggaaacgcgaacggctccagttcaaagccacatgcaccaacgtgacatataagccattaaaatatcatcctgacggctcatttctgcttcatcatacattccctaactgcttcctgaaagctggaaaaggagaagtgaaggatgaccgcctcgctggaaccacaaaagagaggcttggaggggtttgtggtcccctctcagccaccccgaaatgatgtgcagaaatgaggcgatcctggcaacaggtggagtggggctcaaagtcagaaaatgagatacaagacatccttggtgatgaggaaacgattacggctttaccgaaacactcttaaagagtcaagcgagaagcccttcagatgcgagttcgagggctgcgagcggcgcttcgccaacagcagcgaccgtaagaagcattcgcacgtgcacactagcgacaagccatacacgtgcaaggtgcggggctgcgacaagtgctacacgcaccccagctcgctgcgtaagcacatgaaggtgcacgggcgctcgccgccgcccagctctggctacgattcggctacaccgtctgccctcgtgtcgccctcgtcggactgcggccacaagtcccaggtggcctcctcggcggcggtggcggcgcgtaccgccgacttgagcgaatgatgtccaccgcgttgctcgcaaggtaatctcgctccgcgcagctgagcgccccgcatctcgcgcctgctacatcaaagggcccgcgcacaaagcag

SEQ ID NO: 200896 - DNA, 500 bp, Homo sapiens
  Payload ID: 19649
  Gene Name: Zic family member 4
  ENST ID: ENST00000484586
  CDS Start-End: 268-500
ccacttggatttggcctgtggttcaacaagttaaacaactgcttgttctgtgggcagacatccccattgacagaggacttgctgtgtttgtccagcctgagaccttttcaatgactgtttttctttctaggccaaattgagggtgggggccggatagatgcttctgtctggctgctcaactgcctcagccttgcctgacagatgcagaggtcctcaggatggctttaagtatttaaggcggccaatggcttggctcaaagtcagaaaatgagatacaagacatccttggtgatgaggaaacgattacggctttaccgaaacactcttaaagagtcaagtagcagctctggacaccatggcccccagctcaccgccgcctccagcccctcggtgttcccgggcctccacgaggagcctccccaggcctcccccagccgtcctttgaatggactcctgcgtctggggctccctggagacatgtacgcgcggccggagccctt

SEQ ID NO: 200897 - DNA, 565 bp, Homo sapiens
  Payload ID: 19649
  Gene Name: Zic family member 4
  ENST ID: ENST00000463250
  CDS Start-End: 361-565
gcttcatcatacattccctaactgcttcctgaaagctggaaaaggagaagtgaaggatgaccgcctcgctggaaccacaaaagagaggcttggaggggtttgtggtcccctctcagccaccccgaaatgatgtgcagaaatgaggcgatcctggcaacaggtggagtgggggtcaaagcgccaagttagcccagatggcagcaagacgatggaacttctccgccccaacctgacggcagatgccgcctgagtccacctcagggcggctccttgccctccctcaccctggtcctgcctcaggaagctgactgctgggatctgctctctgcgcgcggccagcagtgggctcaaagtcagaaaatgagatacaagacatccttggtgatgaggaaacgattacggctttaccgaaacactcttaaagagtcaagtagcagctctggacaccatggcccccagctcaccgccgcctccagcccctcggtgttcccgggcctccacgaggagcctccccaggcctcccccagccgtcctttgaatggactcctgcgtctggggctccctg

SEQ ID NO: 200898 - DNA, 929 bp, Homo sapiens
  Payload ID: 19649
  Gene Name: Zic family member 4
  ENST ID: ENST00000462748
  CDS Start-End: 242-929
gcagaggatgagtccatcccttcttcccaggaggagggaaaaggggtacaaatggggctcccactggcacaggaaccaggagcagtttgttgcctgcctgccttcccttctctccttgtgaattgcctgggtgccccaccgtgggcacaagaatggaagtcgtggcccagagcttccctcgcgaaaaatgagcaaggcgggtgccgggagggggcctttacaggaggctcaaagtcagaaaatgagatacaagacatccttggtgatgaggaaacgattacggctttaccgaaacactcttaaagagtcaagtagcagctctggacaccatggcccccagctcaccgccgcctccagcccctcggtgttcccgggcctccacgaggagcctccccaggcctcccccagccgtcctttgaatggactcctgcgtctggggctccctggagacatgtacgcgcggccggagcccttcccgccagggcctgcggcccgcagcgacgccctggcagctgccgcagccctgcatggctacgggggcatgaacctgacggtgaacctcgctgcgccccacggtcctggcgctttcttccgctacatgcgccagcccatcaaacaggagctcatctgcaagtggctggcggccgacggcaccgcgaccccgagcctctgctccaaaactttcagcaccatgcacgagctggtcacgcacgtcaccgtggagcacgtcggcggcccggaacaggccaaccacatttgcttctgggaggagtgtccgcgccagggaaagcccttcaaagccaaatacaaacttgtaaatcacatccgcgtgcacacgggcgagaagcccttcccttgtcctttcccggggtgtgggaaggtctttgctagatcagaaaatctcaaaatacacaaacgaactcacacag

SEQ ID NO: 200899 - DNA, 1481 bp, Homo sapiens
  Payload ID: 19649
  Gene Name: Zic family member 4
  Uniprot ID: Q8N9L1
  ENST ID: ENST00000473123
  CDS Start-End: 164-1168
gaaagaaagctaggactggctcaaaggttggatctgaaagttggggttgatgaatggcccatgtcaaagtcttaggaaagcggaggggcttttggagggttgcacttcggccgtcaccgtcttcaggaaactccctttggattccaaggctcaaagtcagaaaatgagatacaagacatccttggtgatgaggaaacgattacggctttaccgaaacactcttaaagagtcaagtagcagctctggacaccatggcccccagctcaccgccgcctccagcccctcggtgttcccgggcctccacgaggagcctccccaggcctcccccagccgtcctttgaatggactcctgcgtctggggctccctggagacatgtacgcgcggccggagcccttcccgccagggcctgcggcccgcagcgacgccctggcagctgccgcagccctgcatggctacgggggcatgaacctgacggtgaacctcgctgcgccccacggtcctggcgctttcttccgctacatgcgccagcccatcaaacaggagctcatctgcaagtggctggcggccgacggcaccgcgaccccgagcctctgctccaaaactttcagcaccatgcacgagctggtcacgcacgtcaccgtggagcacgtcggcggcccggaacaggccaaccacatttgcttctgggaggagtgtccgcgccagggaaagcccttcaaagccaaatacaaacttgtaaatcacatccgcgtgcacacgggcgagaagcccttcccttgtcctttcccggggtgtgggaaggtctttgctagatcagaaaatctcaaaatacacaaacgaactcacacaggcgagaagcccttcagatgcgagttcgagggctgcgagcggcgcttcgccaacagcagcgaccgtaagaagcattcgcacgtgcacactagcgacaagccatacacgtgcaaggtgcggggctgcgacaagtgctacacgcaccccagctcgctgcgtaagcacatgaaggtgcacgggcgctcgccgccgcccagctctggctacgattcggctacaccgtctgccctcgtgtcgccctcgtcggactgcggccacaagtcccaggtggcctcctcggcggcggtggcggcgcgtaccgccgacttgagcgaatgatgtccaccgcgttgctcgcaaggtaatctcgctccgcgcagctgagcgccccgcatctcgcgcctgctacatcaaagggcccgcgcacaaagcagtgtttcttcgccacggtgcatcttcatggtaagttaggatttctatggcaatgtgcaagtcgcactgaaatcctgaaaggccaagcctggagcccgtccaggcttttcattaaggacataatatttacgtctaacagaccttttttcttgtgtatacaagtatatatttttgtttgacgcggactaaatcattttcatttaatttccggtaaacaaaa

SEQ ID NO: 200900 - DNA, 4152 bp, Homo sapiens
  Payload ID: 19649
  Gene Name: Zic family member 4
  Uniprot ID: Q8N9L1
  ENST ID: ENST00000525172
  CDS Start-End: 187-1341
gagaagtgatccagacctcttagaagttgggttggggctgccttatgggtggacagggatctctagggaacctcacacccatttcccccagaagcaaaagagtaaattctattattgccaaccaaccaggacttttccatgccagacatcctgccatgaggaaatttcagagcgaggacgcccagcatgccgcccttctgtaggaatgcaaagttaggcctcctttctttcctgatttgtgctggaaggagcttattacctttggggaagaatgccttttggttagaaagaattgaaaataataataccctctgggaaaaggctcaaagtcagaaaatgagatacaagacatccttggtgatgaggaaacgattacggctttaccgaaacactcttaaagagtcaagtagcagctctggacaccatggcccccagctcaccgccgcctccagcccctcggtgttcccgggcctccacgaggagcctccccaggcctcccccagccgtcctttgaatggactcctgcgtctggggctccctggagacatgtacgcgcggccggagcccttcccgccagggcctgcggcccgcagcgacgccctggcagctgccgcagccctgcatggctacgggggcatgaacctgacggtgaacctcgctgcgccccacggtcctggcgctttcttccgctacatgcgccagcccatcaaacaggagctcatctgcaagtggctggcggccgacggcaccgcgaccccgagcctctgctccaaaactttcagcaccatgcacgagctggtcacgcacgtcaccgtggagcacgtcggcggcccggaacaggccaaccacatttgcttctgggaggagtgtccgcgccagggaaagcccttcaaagccaaatacaaacttgtaaatcacatccgcgtgcacacgggcgagaagcccttcccttgtcctttcccggggtgtgggaaggtctttgctagatcagaaaatctcaaaatacacaaacgaactcacacaggcgagaagcccttcagatgcgagttcgagggctgcgagcggcgcttcgccaacagcagcgaccgtaagaagcattcgcacgtgcacactagcgacaagccatacacgtgcaaggtgcggggctgcgacaagtgctacacgcaccccagctcgctgcgtaagcacatgaaggtgcacgggcgctcgccgccgcccagctctggctacgattcggctacaccgtctgccctcgtgtcgccctcgtcggactgcggccacaagtcccaggtggcctcctcggcggcggtggcggcgcgtaccgccgacttgagcgaatgatgtccaccgcgttgctcgcaaggtaatctcgctccgcgcagctgagcgccccgcatctcgcgcctgctacatcaaagggcccgcgcacaaagcagtgtttcttcgccacggtgcatcttcatggtaagttaggatttctatggcaatgtgcaagtcgcactgaaatcctgaaaggccaagcctggagcccgtccaggcttttcattaaggacataatatttacgtctaacagaccttttttcttgtgtatacaagtatatatttttgtttgacgcggactaaatcattttcatttaatttccggtaaacaaaacccacgcgaatgggcacttgtacccgatcataataaaaatggataataatgtgaaggaagaaaagagccgcttgaatcgccgctcagccccctttgtttctgctttctgcggtgatcagagggcgcgtttgggtttgatggcgagtttctaaaggcgaggaaatggtttgtaagaggggaaagaaaaggagaaaggtctaatcaagctcgggttgttcaaagagtcgggttttggggttgaaagtgtgagtttgacggtgcatcagcatgccgcgttaggctcgccatggaaatacgcgcggggagcggccgcttcaaaggcggcacacttcactacagacactctattaagatacatttgcgctgacctttgctttcacgccatttaatactgtcactgcgctctccagtatatacttcctttctagaacccgacttgcccacgtttaggggttcactctgcaccctgatgtgggaggctttggcgcaggggacactttcaggaaagggaggagcacaaggactctgtgcatcttgactgcaccccaaagaggctccaggatcaggagtgaaagattttaaagcagcctccgaagcttaacaaatgagcattccaagctcagttttgtgcaaatcgcctttctgactcttgagtaggatggaggcttaaatttaatggcgacttggggggaagggagccaccctgggggagtctgaggagttcagactgtgcccttgggaatttccactctggctttccgtgccactcttcttcctttccatcccaaaagtctcttgcggcccctgaaacttgtttctttctaaggcagggtgtgtggtacccttaggcctggactagtcctagatgcaaactcaagagcccaaggccaaggggatgtggggaagatggcaggaaagttagaagtccatgttcccttaattgtcttgttgtttattttatccaagtaccccagtgaataggggaaaaataaacacagtgaaaaaaaaaatcaaacagtggagtcttctttagtgccagtccttgtggttgaataaaaaggatggtccgctttctattgagctgagaaatctttgaagtgggagttattatctgagacattcctgcttgtcgtcctaacaacgctgatgaaacgtaaaaggttctttgtcagcgatttgttctcctctctgtcaaactccctctgccccgttagtttcaaaccgtttctaaagagataaaaatcaaacttcttttaaaacaatatccacacactgcatcaatacataactttaggtctaagtcttgctaagggataaacaaaagcaatgcctagacatcagggtcagggcctggtctggtgaagtatgcagaagttggggggccctcgggacaagctttgggacatgaggaaaagaatgcagagagggtgcaagcagaatacataccctaagtccataattgtgtttctgcttctttctgctctggtttgcattcaatcagcccaagttgggtcacatagatgggtttcctttgggtacccctcaggctcctaatattcttgcccaggatccttggaacttaagaatgcagccaagcaattgttaatatctcctgctccttcaaagccacctctgctaaaaatagacccattgtgtgtttcttctcactagcagcaatcaacaagccctttctgccgttaataagaaggagaatagctgaaggagagagatattttattaatttcctgtttccttcagaatcttggcaattgaagtttagaaggtttggtctacaacacagtgatcgaaaatgcatgtaaatgcccatccttcccttcattcacgtgtgaagttgttcattttatattgtgcccagcaaagaaactttcacccagttcaggtttccccaaaactcctgtggtggttttaaaggtggtttaaataaataaggatgtgctggtccccctactctgtgtgtgctgaataaatggcttgtaaagaagtttttccaagctgtaacccatgctgttattatagttgctgcaaaatgttcttcctgatattgattttatttgttaactgaaggtctccatatgtttgtttatattgctaatttatgagaaaatgtaataattgcaatgaatgtgaattatacagacaggcaaacattttgtaatcataattcacatatacacaaaagcctggctgaaatctttagactatttgtaccctctctacccacactgtttgtgatttatcatctgtctctttagtgtcagttaaattatgaactaacttgaaaataaaagttgtttgactgaaagtgattgttgaatgaacaacaaagttgaaagccatggcttgatcttgtaaatatataaatgtaaatgatattaaatctgtgattccttttccctccaaaggcttttgtgtacatggcgctgcatttggctattttctttggaaataaataatgtgatgtttctcttcctcttttg

SEQ ID NO: 200901 - DNA, 4639 bp, Homo sapiens
  Payload ID: 19650
  Gene Name: Zic family member 5
  Uniprot ID: Q96T25
  ENST ID: ENST00000267294
  CDS Start-End: 235-2226
ggggcgaatccccgctgggtcgagggcctgaacgggagccaatcgagcagccgaggctactgccaatcacgcggctccctccaatcccacccgtgccatttccaaaatctcggtcccactgtgcagctcaaatgtggtgttcactctgccaatcgctggaggatagagtgggaacaggaataagcagagttaagaggccaggacaaaagaagttaaagagcgcccaatacatacatgtttttgaaggcgggcagagggaataaagtccccccagtgagggtctatgggcctgattgtgtagttctgatggagccccctttgagcaagaggaacccgccagcgctgagattagcggatttggcaacggctcaggtccagccgcttcagaatatgacaggcttcccggcgctggccggcccgcccgcccactcccaactccgggccgccgtcgcgcacctccgcctgcgggacctgggcgctgaccccggcgtggccaccactccgctcggacccgagcacatggcccaggcgagcacgctgggcctcagccctccctcccaggcgttcccggcacacccggaggctccggcagccgccgcccgtgctgcagccttggtcgcgcaccccggcgcgggcagctacccctgcggcgggggcagcagtggcgcgcagccctccgcgcccccgcccccagcccctcctcttcctcccaccccttcaccccctccccctcccccgcctcctcctcctcctgccctctcgggctacaccaccaccaacagtggcggcggcggcagcagcggcaaaggccacagcagggacttcgtcctccggagggacctttccgccacggcccccgcggcggccatgcacggggccccgctcggaggggagcagcggtccggcaccggctccccccagcacccggccccgcctccccactcggccggcatgttcatctccgccagcggcacctacgcgggcccggacggcagcggcggcccggcgctcttccccgcgctgcacgacacgccgggggccccaggcggccacccgcacccgctcaacggccagatgcgcctggggctggcggcggcagcggcagccgcggcggctgagctgtacggccgcgccgaaccgcccttcgcgccgcgctctggggacgcgcactacggggcggttgcggccgcagcggcggccgccctgcacggctacggagccgtgaacttaaacctgaacctggcggctgcggcggccgcagcagcggccgggcccgggccccacctgcagcaccacgcgccgcccccggcgccgccgccgccgccggcgcccgcgcagcacccgcaccagcaccacccccacctcccaggggcggctggggccttcctgcgctacatgcggcagccaatcaagcaggagctcatctgcaagtggatcgaccccgacgagctggccgggctgccgccgccgccgccgccgccgccgccgccgccgccaccgcccccggccggcggcgccaagccctgctccaaaactttcggcaccatgcacgagctggtgaatcacgtcacggtggagcacgtgggaggccccgagcagagcagccacgtctgcttctgggaggactgtccgcgcgagggcaagcccttcaaggccaaatacaagctcatcaaccacatccgcgtgcacaccggcgagaagccctttccctgccctttccccggctgcggcaaggtcttcgcgcgctccgagaacctcaagatccacaagcgtactcatacaggggaaaagcctttcaaatgtgaatttgatggctgtgacaggaagtttgccaatagcagtgatcggaagaaacattcccatgtccacaccagtgacaagccctactactgcaagattcgaggctgtgacaaatcctacactcacccaagctccctgaggaagcacatgaagattcactgcaagtccccgccaccttctccaggaccccttggttactcatcagtggggactccagtgggcgcccccttgtcccctgtgctggacccagccaggagtcactccagcactctgtcccctcaggtgaccaacctcaatgagtggtacgtttgccaggccagtggggcccccagccacctccacaccccttccagcaacggaaccacctctgagactgaagatgaggaaatttacgggaaccctgaagttgtgcggacgatacattagaatttattattaataataataagtgaaataataagtgggagtccttggaccacatcctaacctgagacaatgccgagcctgagacaaacccgtgactcagacttgccaccgggtctaattagccctatttattcagtatgaaaccctatggtgtttgtacatttaattaatttaattaagatatttgggcttttttttttttttttcttaaaaaacaaacaaaaaacaaccaagctggacttgtacattgcaggaggatggggctgggggcaaattgtaccaaggaaaatgaatggagagattagttaatggcgatacacactgccgatgcaatatatatatatatatatatatacatatatatatatattattttttttaaaagggggagaaaaagagcattaagtcagaacttaacacagcaccaaggccctctgcatttcccagagtgcctctcaaatgcctttgacaccataccatgggctgcttttgagcctccttgttggaccctaattctgccaaggcctcttgattgtaaaccacacacctgctgcattgccaacagatcctgttccgtacctgtgtccaaaaacatttgtaaaaaccctttgagtttaatatttgtaatttttaatttccactcttttattactgatcttagcttaatacaatatttttatacaggattatttcttcagtatcctactgtgtgattttaaaaaaagatgcagcaaccttaatatatctccatatcttgtgctactgtgattgttcaagcaaaagtggagagaagaaaagctgctgcaaaagacaactgtgaaactgtgatattttataaaatagaagaaattcaagtgctttctttttcctatatgtttttttttttttatctgaattctcagatactgcctcctaactgtgtccaaacttcttgtgtaataaagagattctgttttcgatcctaagttctttgggatgccaacattcacagtcaagtcttgaggaggtgtgatgatggcatcatgcctatttttttggaaagctgttgtttttaaaacaggccaacacctcttttatactgttgtatcagccttttaaaaagtctatttttcaatgcctgaaactgcattttaatgcattttcttccacctgagcactgagcacaccaaactggaatccatttgaaaatgacagtgtgtgaagtgtatgatttacattaaaagaggggagggagttgccatacatattaaaaatttttaaaaggtttatagttaccaccaaacactgatgaatgtgtgacctttgccagagctgtcaagctaggataaaaaaggtcaaggacctaggacaataactcttagtcgatttattttcggttggtacaacacatctcctgtgcaaaatgtagtccatcagaaacatcctacagatacactaaagagcactaatttatccttagagaccccgaagacaccccctccccagggtttgtagaaatttgttttgtgtgctgtgagtggttgatgtagtcttgtcattgttaataacttgtatgtgaacactattatttgtacagttgaattaatttattttcagacatcatcctttttttttttctttcctggaagagttcaaagcacaccaaagaattatattatacattttggtgaaagattgtcatttatgatccatggtttatttaaaaaaaaaaggaaagaaaatggaaaaatatatttttaagcttacttgaatgaacaacgtaatgtgaaaaccaagactcttcctgcatgtcttttttgcattgtgttgataagattatatatagtttatagatatattatattactagtacagtgcatggtgctgtcacttggaaagcctttcaatgttgtcttcagattgttgtgatgaatatgaaacatgcagaccctcctttataaagaaaaagaccttaaaacttgaatatgagataattttacattttaaaagtttatttgattttcatattattcactttcaaagccctttcaaatagaaaaggtatgaacttttggggggataatttatgtatcgtaaacttattagaacaaaatattcctgatgtataatgagttgttttatttatacaactttttcaatggtagtttgcactattctttattatgctacaggtttatttattatgaaacaaaggaatatgtattttatgtattttaccatgcataggttaactctttgccacagatttattggttcttgatacacctaaaataaaaaaaaatgtgtacctccaatagagagcaagcaagaatgattatgaagtaacaaatttaataaaggtattcttgttattattgcttatgttttacataatggcatatctctcatacaaatagaacaggttgctaatgga

SEQ ID NO: 200902 - DNA, 1335 bp, Homo sapiens
  Payload ID: 19651
  Gene Name: zinc activated ligand-gated ion channel
  Uniprot ID: Q401N2
  ENST ID: ENST00000334586
  CDS Start-End: 84-1322
aattgctcagctgccagagaagtgactggaatagaggttgtagcttaggcaccgctgctccctccagtccctccgtgcagccgatgatggccctatggtccctgctccatctcaccttcctggggttcagcattaccttgctgttggtccacgggcagggcttccaagggacagcagccatctggccatccctcttcaacgtcaacttgtccaagaaggttcaggaaagcatccagatcccgaacaatgggagtgcgcccctgctcgtggatgtgcgggtgtttgtctccaacgtgtttaatgtggacatcctgcgatacacaatgtcctccatgctgctgcttaggctgtcctggctggacactcgcctggcctggaacactagtgcacacccgcggcacgccatcacgctgccctgggagtctctctggacaccaaggctcaccatcctggaggcgctctgggtggactggagggaccagagcccccaggctcgagtagaccaggacggccacgtgaagctcaacctggccctcgccacggagaccaactgcaactttgagctcctccacttcccccgggaccacagcaactgcagcctcagcttctacgctctcagcaacacggcgatggagttagagttccaggcccacgtggtgaacgagattgtgagtgtcaagagggaatacgtagtttatgatctgaagacccaagtcccaccccagcagctggtgccctgcttccaggtgacgctgaggctgaagaacacggcgctcaagtccatcatcgctctcttggtgcctgcagaggcactgctgttggctgacgtgtgcggggggttgctgcccctccgggccattgagcgcataggctacaaggtgacattgctgctgagttacctcgtcctccactcctccctggtgcaggccctgcccagctcctcctcctgcaacccactgctcatttactacttcaccatcctgctgctgctgctcttcctcagcaccatagagactgtgctgctggctgggctgctggcccggggcaaccttggggccaagagcggccccagcccagccccgagaggggaacagcgagagcacggcaacccagggcctcatcctgctgaagagccctccagaggagtaaaggggtcacagagaagctggcctgagactgctgaccgcatcttcttcctcgtgtatgtggttggggtgctgtgcacccaattcgtctttgcaggaatctggatgtgggcagcgtgcaagtctgacgcagcccctggagaggctgcaccccatggcaggcggcctagactgtaaaggggcagggcct

SEQ ID NO: 200903 - DNA, 1291 bp, Homo sapiens
  Payload ID: 19651
  Gene Name: zinc activated ligand-gated ion channel
  Uniprot ID: Q401N2
  ENST ID: ENST00000421794
  CDS Start-End: 38-418
aggcaccgctgctccctccagtccctccgtgcagccgatgatggccctatggtccctgctccatctcaccttcctggggttcagcattaccttgctgttggtccacgggcagggcttccaagggacagcagccatctggccatccctcttcaacgtcaacttgtccaagaaggttcaggaaagcatccagatcccgaacaatgggagtgcgcccctgctcgtggatgtgcgggtgtttgtctccaacgtgtttaatgtgtcttctgtcctccccagagcaactgccctccacagccatggcgactgcagtggctcggccccttgcagcaaggccagaggctcaggttgccatggcctcactcctggaaaccacctgaaggtgcagccaccctgtataaacccatcaggtgacatctaacttggcagagaagtcctacccttccctccatgagagaccacagcggtagccctggggatcctgcttcagctgtgagatgatagactgacgagcctgtgaccacttctccctccatcatgaagtggtgcaaagtacatttatttttacaatgaaagctcatctatgaatctgataaaggccttccttcaactggagacaatttgggatgttgcaaaacaagcgatggagttagagttccaggcccacgtggtgaacgagattgtgagtgtcaagagggaatacgtagtttatgatctgaagacccaagtcccaccccagcagctggtgccctgcttccaggtgacgaggcactgctgttggctgacgtgtgcggggggttgctgcccctccgggccattgagcgcataggctacaaggtgacattgctgctgagttacctcgtcctccactcctccctggtgcaggccctgcccagctcctcctcctgcaacccactgctcatttactacttcaccatcctgctgctgctgctcttcctcagcaccatagagactgtgctgctggctgggctgctggcccggggcaaccttggggccaagagcggccccagcccagccccgagaggggaacagcgagagcacggcaacccagggcctcatcctgctgaagagccctccagaggagtaaaggggtcacagagaagctggcctgagactgctgaccgcatcttcttcctcgtgtatgtggttggggtgctgtgcacccaattcgtctttgcaggaatctggatgtgggcagcgtgcaagtctgacgcagcccctggagaggctgcaccccatggcaggcggcctagactgtaaaggggcagggcct

SEQ ID NO: 200904 - DNA, 2167 bp, Homo sapiens
  Payload ID: 19651
  Gene Name: zinc activated ligand-gated ion channel
  Uniprot ID: Q401N2
  ENST ID: ENST00000425015
  CDS Start-End: 84-884
aattgctcagctgccagagaagtgactggaatagaggttgtagcttaggcaccgctgctccctccagtccctccgtgcagccgatgatggccctatggtccctgctccatctcaccttcctggggttcagcattaccttgctgttggtccacgggcagggcttccaagggacagcagccatctggccatccctcttcaacgtcaacttgtccaagaaggttcaggaaagcatccagatcccgaacaatgggagtgcgcccctgctcgtggatgtgcgggtgtttgtctccaacgtgtttaatgtggacatcctgcgatacacaatgtcctccatgctgctgcttaggctgtcctggctggacactcgcctggcctggaacactagtgcacacccgcggcacgccatcacgctgccctgggagtctctctggacaccaaggctcaccatcctggaggcgctctgggtggactggagggaccagagcccccaggctcgagtagaccaggacggccacgtgaagctcaacctggccctcgccacggagaccaactgcaactttgagctcctccacttcccccgggaccacagcaactgcagcctcagcttctacgctctcagcaacacgggtgctgacagggcaggggctgcagggttgaggaggggaggaggaaggtgggggaggggaactcccaggtctgtggtgcaggggcagggtgcggggcaaggggaaggggcaaaggcagacagaaggcgaactcccaggtctgtgttcagagcagtctaccccaggcttaggcgggcagcacctgctctcccactgcgccccccactcgagtggcagcccatctctgtgctcagcggtagcctcagggcccctctctagggtgacagactcaaacattcgcagcagctctgcaatcccagaggtccgagcacatcagtcttctgtcctccccagagcaactgccctccacagccatggcgactgcagtggctcggccccttgcagcaaggccagaggctcaggttgccatggcctcactcctggaaaccacctgaaggtgcagccaccctgtataaacccatcaggtgacatctaacttggcagagaagtcctacccttccctccatgagagaccacagcggtagccctggggatcctgcttcagctgtgagatgatagactgacgagcctgtgaccacttctccctccatcatgaagtggtgcaaagtacatttatttttacaatgaaagctcatctatgaatctgataaaggccttccttcaactggagacaatttgggatgttgcaaaacaagcgatggagttagagttccaggcccacgtggtgaacgagattgtgagtgtcaagagggaatacgtagtttatgatctgaagacccaagtcccaccccagcagctggtgccctgcttccaggtgacgctgaggctgaagaacacggcgctcaagtccatcatcgctctcttggtgcctgcagaggcactgctgttggctgacgtgtgcggggggttgctgcccctccgggccattgagcgcataggctacaaggtgacattgctgctgagttacctcgtcctccactcctccctggtgcaggccctgcccagctcctcctcctgcaacccactgctcatttactacttcaccatcctgctgctgctgctcttcctcagcaccatagagactgtgctgctggctgggctgctggcccggggcaaccttggggccaagagcggccccagcccagccccgagaggggaacagcgagagcacggcaacccagggcctcatcctgctgaagagccctccagaggagtaaaggggtcacagagaagctggcctgagactgctgaccgcatcttcttcctcgtgtatgtggttggggtgctgtgcacccaattcgtctttgcaggaatctggatgtgggcagcgtgcaagtctgacgcagcccctggagaggctgcaccccatggcaggcggcctagactgtaaaggggcagggcctgggctgcacaccttaggatgaagtttgctttcccatggctgggggcgggccatgacagggcctctggattaagccaccctgagctctccctccgctagcacacaagcacagagcgtgaaataaacccatctccagtgc

SEQ ID NO: 200905 - DNA, 2479 bp, Homo sapiens
  Payload ID: 19652
  Gene Name: zinc and ring finger 1, E3 ubiquitin protein ligase
  Uniprot ID: Q8ND25
  ENST ID: ENST00000320619
  CDS Start-End: 636-1472
cggcgaggagcgccggcgagcgcagcccgggaccgagcggggcggcgcggctggcggggccggcggcggctgaagcgagagcgcgacgcgacgcgaccgcggcttcccgagctgcgcctggccgcccagcgccgcggcccgcccgaggcctggaggggtccgggccgccgtccatggtcgcggcgtcctgaggcgggggacgcgcccggcgcccccggccctcctccgcctcctcccgcggggcgggcggcctcctccggcgcctccccgcgcccgcccgccgctcgccgccgcctccctccctccttccctgcggctcccccggctttcggagcccgggggcggcctgtggcgcgcggagcccgcgccggactgcgcctctttggaccttgaggggaaacatgcgtttgccttggatcgtttgaaattctgagtttgggatccccgcccgcccgcctgcctcttccgccccgcgggttttttccttttttccttttgctttttttccttttctccctccgggtctcctttttgactccctccccctttatgctcgcccagccctccccctgctgctgagaagtgggggagggtctcggcctccaggttcccgccccaccggggcccgggcgagcatggggggcaagcagagcacggcggcccgctcccggggccccttcccgggggtctccaccgatgacagcgccgtgccgccgccgggaggggcgccccatttcgggcactaccggacgggcggcggggccatggggctgcgcagccgctcggtcagctcggtggcaggcatgggcatggaccccagcacggccgggggggtgccctttggcctctacacccccgcctcccggggcaccggcgactccgagagggcgcccggcggcggagggtctgcgtccgactccacctatgcccatggcaatggttaccaggagacgggcggcggtcaccatagagacgggatgctgtacctgggctcccgagcctcgctggcggatgctctacctctgcacatcgcacccaggtggttcagctcgcatagtggtttcaagtgccccatttgctccaagtctgtggcttctgacgagatggaaatgcactttataatgtgtttgagcaaacctcgcctctcctacaacggaagaatacaaagaagcctcagaggggctcagcctgagaaaacctggctctcaggaagaactttgcaagagcagccgtggaggacagagtgctcttgggcccccatggcccaaatgcagagttacccccactgccctgtggagaaccgggaagatgatgtgctgactaaagacgcgggtgagtgtgtgatctgcctggaggagctgctgcagggggacacgatagccaggctgccctgcctgtgcatctatcacaaaagctgcatagactcgtggtttgaagtgaacagatcttgtccggaacaccctgcggactgacctgcgggcttgcttgctgactcctctcaaagggacagagcgcccctgctccagggaggaggctcaccggaccctggggcagagctgagcttgggacaccagcgggaacagggcaccccttctgcactgacttccagatcatggttctcccttcctccctgaggacaccaaattggatgagagcaagtttgagagaagaatgaatcaactgctatccttcccctcacccctcagcccaggagggaaagggcattttctttttcatctttgaaaggcattgtgggtctgtctttaaagtgtttacaaaaaaaaattatataaaaaaaaagtctagtgtcgactggtgttttccctcgtgatgtttacagcttgctgtttgctgcccagccataacccactcagtgacagacgaacacagctaaggcctcgctgccagccttctgacggcgggcgagcacacggtctcttcccctgccccaactggccctctccaccaccaacttctctactttgggtttgtttggttttttccctctatttttctggctggttttttgctcttttctccccttgagaccctaatatcttgacttcattgccaaaaaacaacccattgagaactttcttcctactgatcccatctcttttcccttctttcctcctggttccggtcagttcagaggatttaacaatcacaagtgtcctgcaaaaatgcctgaacattattcttaggccctcgtggattttttttttcagaaaacttaaacaaaaaaagacttactaagaaatatgtacagctacccctgttttcaggcactatgtttgagaacattttagccattgatgttcacacgtggcatcagcccatgcaagataggtttctgtatttatatattaaaatacaaaaaaaaacttataaaatgtttaaaaaaatgttcaaagcttgggagaaaagctttcttcattagtcaaggtgttttgatatggtattaaaatgtctaataaaa

SEQ ID NO: 200906 - DNA, 4620 bp, Homo sapiens
  Payload ID: 19652
  Gene Name: zinc and ring finger 1, E3 ubiquitin protein ligase
  Uniprot ID: Q8ND25
  ENST ID: ENST00000335325
  CDS Start-End: 643-1326
tccacggcggcgaggagcgccggcgagcgcagcccgggaccgagcggggcggcgcggctggcggggccggcggcggctgaagcgagagcgcgacgcgacgcgaccgcggcttcccgagctgcgcctggccgcccagcgccgcggcccgcccgaggcctggaggggtccgggccgccgtccatggtcgcggcgtcctgaggcgggggacgcgcccggcgcccccggccctcctccgcctcctcccgcggggcgggcggcctcctccggcgcctccccgcgcccgcccgccgctcgccgccgcctccctccctccttccctgcggctcccccggctttcggagcccgggggcggcctgtggcgcgcggagcccgcgccggactgcgcctctttggaccttgaggggaaacatgcgtttgccttggatcgtttgaaattctgagtttgggatccccgcccgcccgcctgcctcttccgccccgcgggttttttccttttttccttttgctttttttccttttctccctccgggtctcctttttgactccctccccctttatgctcgcccagccctccccctgctgctgagaagtgggggagggtctcggcctccaggttcccgccccaccggggcccgggcgagcatggggggcaagcagagcacggcggcccgctcccggggccccttcccgggggtctccaccgatgacagcgccgtgccgccgccgggaggggcgccccatttcgggcactaccggacgggcggcggggccatggggctgcgcagccgctcggtcagctcggtggcaggcatgggcatggaccccagcacggccgggggggtgccctttggcctctacacccccgcctcccggggcaccggcgactccgagagggcgcccggcggcggagggtctgcgtccgactccacctatgcccatggcaatggttaccaggagacgggcggcggtcaccatagagacgggatgctgtacctgggctcccgagcctcgctggcggatgctctacctctgcacatcgcacccaggtggttcagctcgcatagtggtttcaagtgccccatttgctccaagtctgtggcttctgacgagatggaaatgcactttataatgtgtttgagcaaacctcgcctctcctacaacgatgatgtgctgactaaagacgcgggtgagtgtgtgatctgcctggaggagctgctgcagggggacacgatagccaggctgccctgcctgtgcatctatcacaaaagctgcatagactcgtggtttgaagtgaacagatcttgtccggaacaccctgcggactgacctgcgggcttgcttgctgactcctctcaaagggacagagcgcccctgctccagggaggaggctcaccggaccctggggcagagctgagcttgggacaccagcgggaacagggcaccccttctgcactgacttccagatcatggttctcccttcctccctgaggacaccaaattggatgagagcaagtttgagagaagaatgaatcaactgctatccttcccctcacccctcagcccaggagggaaagggcattttctttttcatctttgaaaggcattgtgggtctgtctttaaagtgtttacaaaaaaaaattatataaaaaaaaagtctagtgtcgactggtgttttccctcgtgatgtttacagcttgctgtttgctgcccagccataacccactcagtgacagacgaacacagctaaggcctcgctgccagccttctgacggcgggcgagcacacggtctcttcccctgccccaactggccctctccaccaccaacttctctactttgggtttgtttggttttttccctctatttttctggctggttttttgctcttttctccccttgagaccctaatatcttgacttcattgccaaaaaacaacccattgagaactttcttcctactgatcccatctcttttcccttctttcctcctggttccggtcagttcagaggatttaacaatcacaagtgtcctgcaaaaatgcctgaacattattcttaggccctcgtggattttttttttcagaaaacttaaacaaaaaaagacttactaagaaatatgtacagctacccctgttttcaggcactatgtttgagaacattttagccattgatgttcacacgtggcatcagcccatgcaagataggtttctgtatttatatattaaaatacaaaaaaaaacttataaaatgtttaaaaaaatgttcaaagcttgggagaaaagctttcttcattagtcaaggtgttttgatatggtattaaaatgtctaataaaagatggcactgcgtgattttattttaatgaagtgttatacaatcaagaaatgggggcaagggcctgccccccactccctcacctacctccttagcattccttcaggctgctactcggggctccaggtgtgtgaattggtcctcagatagtcaggcctgggtggagggagtggcaagtcaggcgtgcctcctacaagcttcctaacctcttaagcatcatggaaccagtcagccctctgtggagtcattgtgctggacctctgaaaagatctgcaggggccaagatgttgcagccaccggaggctgcaaggatgtgggttcttccaggtgtgggcccagcccccctccttccagcctttgctccccatcccacgttccactcgccctgcctgttgttcagtttgcgtctcagtgctgactcacgggcatgcttcattgaggcccaggaagaggccctggtttggggctgtgccagctcagagcccttgaaccagaaccaactgctcaggctcacaaaagttggcaaaatgcgggctgggcaggcagctcggggcagggagcagcagtgcaggcctggcctgtgtccccgtgcccagcgggctcccggagcagcattccagagcctcctgcagagccagcgaaggaaagctctagagggagacgactccaccgcctctctgctctgacccttctcaggcccgcctgatgtgctggaccatccccctgctgccacggcccctggctccgcagtcaccctccatcagatgcttccagaagcacctactctgtgcaagggcattcacaacaggccagtgggcaaacgtgagccagggccagcggagaaacactaaagaagactcggtggttcagagcctgggtctcagcgcgggacccgtctggggtgaagaccttggggctgttgtgagtcggtggcaggaacgtgggctctagactgtgcattcaggctctcctacttggcagaatgatcttggggaaacgacttcatctgaacttcagatatttcacatgtgaagcggggacaaaaccatgcagctcagaggtccctgtgggggctgggggagctgccctgcaggtcttggcacatgcacagcaggctccccatagctttgtcaccacaaagggcactgttctattcacagcacctcctgcttctgcctggcaactgtgtctccctgtgctatatttaattccaccagcaaagctggcgaggcagggcccagccctgaaggagatctccttgcctgacccctggacctggaaatggaggcttcatgtgcccgccttggcggcttaagcctgctgctttggcagtgccatgggtgagccgagcagctgtgaggtgggtggggcagggctgtagcccacgccgggtgctattccaggctctaggggctggtgctcatccccacccccagcgacttccgtcctacctggcatgctgcagccctctgccggctgtggtgtcctctgaatttggacccaggttgcctgctcttgttgtgggggtgggattggggctgtctgtgtttcccaggtggagctcatgtttgtgatcctctatctggacagctctccagaatcctgtgttgcccctgttctgcctttctgggatgggagagaaggtgagggagccggcgagcaggttctaccctctctgctaagggcctagcacactttgatgaggttcctggacgtgagaccctcacaaagaccaaccattcctctaatagccatttaacggtactgcagttcatgggaaaatgtcctcattcttaggagatagatgctggattatataggtgaatgccttcaagaaatgtgtaatttaattccaaatagttccccccaaaatacacaaagcaaataaggccaaaatgttcattgttgaatctgcagtggctggtatttcagtgaacagtgtacttgttctttcaacttttctgtatgtttggaatttttcttaataaaagattgtgggaaatggtcatttgctgagcgcctcctagttgccaggcactggagggcgcatcaaagaagagtcctacccaggagggagagcgcagctgctgcaggattctcgcctggaagagtgggtggctggctggctggctggaaggggaggggcgagagggctgtctcggtgatgagcacacgcgtgctggggtggtttggggagagggctgagatttgtcaccagtgagcccttggcacggtctctgctccccaccagggcagcacgggacagaaacgtcacggaggagtagcctc

SEQ ID NO: 200907 - DNA, 1234 bp, Homo sapiens
  Payload ID: 19652
  Gene Name: zinc and ring finger 1, E3 ubiquitin protein ligase
  Uniprot ID: Q8ND25
  ENST ID: ENST00000567962
  CDS Start-End: 328-1011
ccctgcggctcccccggctttcggagcccgggggcggcctgtggcgcgcggagcccgcgccggactgcgcctctttggaccttgaggggaaacatgcgtttgccttggatcgtttgaaattctgagtttgggatccccgcccgcccgcctgcctcttccgccccgcgggttttttccttttttccttttgctttttttccttttctccctccgggtctcctttttgactccctccccctttatgctcgcccagccctccccctgctgctgagaagtgggggagggtctcggcctccaggttcccgccccaccggggcccgggcgagcatggggggcaagcagagcacggcggcccgctcccggggccccttcccgggggtctccaccgatgacagcgccgtgccgccgccgggaggggcgccccatttcgggcactaccggacgggcggcggggccatggggctgcgcagccgctcggtcagctcggtggcaggcatgggcatggaccccagcacggccgggggggtgccctttggcctctacacccccgcctcccggggcaccggcgactccgagagggcgcccggcggcggagggtctgcgtccgactccacctatgcccatggcaatggttaccaggagacgggcggcggtcaccatagagacgggatgctgtacctgggctcccgagcctcgctggcggatgctctacctctgcacatcgcacccaggtggttcagctcgcatagtggtttcaagtgccccatttgctccaagtctgtggcttctgacgagatggaaatgcactttataatgtgtttgagcaaacctcgcctctcctacaacgatgatgtgctgactaaagacgcgggtgagtgtgtgatctgcctggaggagctgctgcagggggacacgatagccaggctgccctgcctgtgcatctatcacaaaagctgcatagactcgtggtttgaagtgaacagatcttgtccggaacaccctgcggactgacctgcgggcttgcttgctgactcctctcaaagatcatggttctcccttcctccctgaggacaccaaattggatgagagcaagtttgagagaagaatgaatcaactgctatccttcccctcacccctcagcccaggagggaaagggcattttctttttcatctttgaaaggcattgtgggtctgtctttaaagtgtttacaaaaaaaaattatataaaaaaaaa

SEQ ID NO: 200908 - DNA, 1069 bp, Homo sapiens
  Payload ID: 19652
  Gene Name: zinc and ring finger 1, E3 ubiquitin protein ligase
  ENST ID: ENST00000566250
  CDS Start-End: 328-957
ccctgcggctcccccggctttcggagcccgggggcggcctgtggcgcgcggagcccgcgccggactgcgcctctttggaccttgaggggaaacatgcgtttgccttggatcgtttgaaattctgagtttgggatccccgcccgcccgcctgcctcttccgccccgcgggttttttccttttttccttttgctttttttccttttctccctccgggtctcctttttgactccctccccctttatgctcgcccagccctccccctgctgctgagaagtgggggagggtctcggcctccaggttcccgccccaccggggcccgggcgagcatggggggcaagcagagcacggcggcccgctcccggggccccttcccgggggtctccaccgatgacagcgccgtgccgccgccgggaggggcgccccatttcgggcactaccggacgggcggcggggccatggggctgcgcagccgctcggtcagctcggtggcaggcatgggcatggaccccagcacggccgggggggtgccctttggcctctacacccccgcctcccggggcaccggcgactccgagagggcgcccggcggcggagggtctgcgtccgactccacctatgcccatggcaatggttaccaggagacgggcggcggtcaccatagagacgggatgctgtacctgggctcccgagcctcgctggcggatgctctacctctgcacatcgcacccaggtggttcagctcgcatagtggtttcaagtgccccatttgctccaagtctgtggcttctgacgagatggaaatgcactttataatgtgtttgagcaaacctcgcctctcctacaacgatgatgtgctgactaaagacgcgggtgagtgtgtgatctgcctggaggagctgctgcagggggacacgatagccaggctgccctgcctgtgcatctatcacaaaaggtaggaggggttggcaaggtagcttagtgcaccccacctcccagaggggcggacccccatctccagccattctgtctcctttggttatgggatgacctctcccccgacctctggct

SEQ ID NO: 200909 - DNA, 964 bp, Homo sapiens
  Payload ID: 19652
  Gene Name: zinc and ring finger 1, E3 ubiquitin protein ligase
  ENST ID: ENST00000568351
  CDS Start-End: 1-236
atgatgtgctgactaaagacgcgggtgagtgtgtgatctgcctggaggagctgctgcagggggacacgatagccaggctgccctgcctgtgcatctatcacaaaagggacagagcgcccctgctccagggaggaggctcaccggaccctggggcagagctgagcttgggacaccagcgggaacagggcaccccttctgcactgacttccagatcatggttctcccttcctccctgaggacaccaaattggatgagagcaagtttgagagaagaatgaatcaactgctatccttcccctcacccctcagcccaggagggaaagggcattttctttttcatctttgaaaggcattgtgggtctgtctttaaagtgtttacaaaaaaaaattatataaaaaaaaagtctagtgtcgactggtgttttccctcgtgatgtttacagcttgctgtttgctgcccagccataacccactcagtgacagacgaacacagctaaggcctcgctgccagccttctgacggcgggcgagcacacggtctcttcccctgccccaactggccctctccaccaccaacttctctactttgggtttgtttggttttttccctctatttttctggctggttttttgctcttttctccccttgagaccctaatatcttgacttcattgccaaaaaacaacccattgagaactttcttcctactgatcccatctcttttcccttctttcctcctggttccggtcagttcagaggatttaacaatcacaagtgtcctgcaaaaatgcctgaacattattcttaggccctcgtggattttttttttcagaaaacttaaacaaaaaaagacttactaagaaatatgtacagctacccctgttttcaggcactatgtttgagaacattttagccattgatgttcacacgtggcatcagcccatgcaagataggtttctgtattta

SEQ ID NO: 200910 - DNA, 485 bp, Homo sapiens
  Payload ID: 19652
  Gene Name: zinc and ring finger 1, E3 ubiquitin protein ligase
  ENST ID: ENST00000568511
  CDS Start-End: 328-485
cttccaggacatctgtttcctctgttacacattgctgcaagaagcaaaacttgtttctgctttggagcctttgagatgaagagaaaaatcttcaagctttcagaagccaaaggaacaaattattaaggaaaagagtcacactggcaccagatttcctatttacaacaccaagaagctagaagatggtggaatttcatctacagaccacggggataaaaggaatgcagctcaagcatcctgtacccaggcaagctatccattcagctgtcagaatgaaagaaaggtttcaagtgccccatttgctccaagtctgtggcttctgacgagatggaaatgcactttataatgtgtttgagcaaacctcgcctctcctacaacgatgatgtgctgactaaagacgcgggtgagtgtgtgatctgcctggaggagctgctgcagggggacacgatagccaggctgccctgcctgtgcatctatcacaaaag

SEQ ID NO: 200911 - DNA, 3460 bp, Homo sapiens
  Payload ID: 19653
  Gene Name: zinc and ring finger 2, E3 ubiquitin protein ligase
  Uniprot ID: Q8NHG8
  ENST ID: ENST00000323037
  CDS Start-End: 1052-1780
gcgggccacgtgcgggaggaggggccgccttctggttggcgcccggtgtccgttcctcctatcggcgtaggccccgcgaggaagacaagggcgcgccctggctgggagggcgtggccagagacctgtccatcaccgagtccacgagtggcagcacctaccacaccgcagtaccttggcgaggcggagcaggggcaggcaggtcgcggaagggggaggcggagcaaggccggcgggagccaatcggcctggcggcacgagggggcgggggcggggtcaacgcgcgcgacccaaacacacgggccgggcgcaccctgcagccgcgccgctccgcggccttccggcgcggggccggggaacctcctccccatctgcgcaccccccgccttcgcggcccagatcctcccgccagcccggcccctccttcgcagggggagcgaggcgacggttgccgggaagcgcgcgccacctctccctcccatttttcgttctcccctcgcgcgccacccgtttttcctctttctccgttaataacagctgggtggctgggggaggagggaaggtggccccggcggagtctgggcgggcgcctcccactcagccgccagccgccgtgggagccggaggatggcggcggtagcagcggccgcccgagaggaggcggtgccgagatcgggggcgccgagcgcggcagcagagagcggtagcggcccgtcgtggcgcaccagaaccgaaaccagcggcagccgcacggccacttgagccgccccttcctgctggagccagcgaggggtgcctgcagccgggaccccttcctctccgcgtctcctcgtctcccgcgcccgcgtcaggccgtcggcctcgcccgccgccccaagaagagcgcgccgggcgccgactgcccctctggacgccgggcggcggccctggacgtgcgggggcctctctgggccggccgcggcgcctgggccctgccctctagctcccgcgctcgctcccgccctcccggctctcggggcgcagcgcgcgggcccggcccggggcagggcggacatgggcgccaaacagagcggcccggccgccgctaacggccgcacgcgcgcgtactcgggctcggatctaccttccagtagcagcggaggcgccaatgggaccgcgggcggcggcgggggcgctcgggccgccgccgcggggaggttcccggctcaggtgcccagcgcgcaccagcccagcgcctccggcggcgccgcggcggccgcggcggccccggcagccccggcggccccgcgcagccgctccctcggcggggccgtggggagcgtggcgtcgggggcccgcgcggcgcagtcccccttcagcatcccgaacagcagcagcggcccgtacggctcgcaggactcggtgcacagcagccctgaggacggcggcggcggccgggaccggccggtgggcgggagccccggcgggccgcgcctggtgatcggctccttaccagctcacctctcgccgcacatgtttggaggatttaagtgccctgtatgctcaaaatttgtatcctcagatgaaatggatttgcatcttgtaatgtgtttaacaaagccacgaataacctataatgaggatgtactgagtaaagatgctggggaatgtgcaatatgccttgaagaattgcagcagggagatactatagcacgactgccttgtctatgcatatatcataaaggctgcatagatgaatggtttgaagtaaatagatcttgccctgagcacccttcagattaagcgtcagcttcctgttttataggttttcttgtcttgacaagatgcttgaaaaaccaagaggatatgaaaatctgtctctggagaaacaaagacgcaggcatactcagccagaaatctgagttttgtgagacttggtaatacagagatggacaatcgtactggggtaaaaaaaccctgctgaagagaggacagtgaccacagaactcagtgtaccaaacatgcatacaaaggacacacagggattttgaaaatgctgcacatcccttaatagtcatctacataggtaatactgataaacattttgtattcagacgccaaagttaactgatttaaaagttgatttactttttattaagttctccagagctgcacaactagttatgttttgatttgttttgttttttaatttggggtctctttgttttccccaacataatgttcataatgtttctgcattcatctgttcttaaattgaaaaacatataatttacttcttataaattgaagtcttaaatgtgaaaccaagaaatgtaatcaagcagtaaaaacatctgaatgtagaccatgatctcaagttcttccattttctcccccacgagtggaaaatagacttctacataggaaagctaaaatatgttaatatttttaaattaaaggtttaatatcagaatgcagtccaaagagcaaatcatattacataattacattttaattaaatatagaatattctactgaattgcaatttattaaatattcttatcctcttaaataaaactgctcaacagttaatcagcagtgaatcatcttgcagctatgcaatttaaaaaaaatacagattaccaatttcaagtgctgccagctaaaataactgttttaacgggtatcttttgtttgttcttttcacttaattattttattgtgctttgcatctccaggcagttctctcacatttgggtaaaatgtttagcaggctgtaaacttaagaaaagggtaaaataaaattttctggagaggaacttggaatttgagggagattttatatacctttaaaaactgtaatttaattgggatgccaggtttatagcaatttgcaactttaattttccagataatctggaggttagcatttgataaatgattttttaaagtagatatgaagattttgttaatttataatttattcatgtgttattactgtaattgaaaatgttatagacacttttaaattcagtttgtgtagaaagaaatgtgttaaacaaaattatgttaataaatattcccacataatacatctgaatggttaaaaatactggaagagttgtcagggctacaatagtgaatgtccttttttttaatatcaaaaatatcgataagtaggttttgtgttttcaacgtagggaaaatgttatcagtgaataggtggtgtactttacttggtataatttaaagttgcacagtaagtactgtttccttattttaatctttctttactcataatgtatttaagaatttgctgttttatttaacgctgctactcttaatcttctctaaatttttccccctactttcttgcttctgtttcacattttttaaaagggcaagtacaggagcaactgctgctacccagaaaaatgtgtgtattataaataattaaagagtttttaattgctttctgtatga

SEQ ID NO: 200912 - DNA, 2667 bp, Homo sapiens
  Payload ID: 19654
  Gene Name: zinc and ring finger 3
  Uniprot ID: Q9ULT6
  ENST ID: ENST00000402174
  CDS Start-End: 94-2604
gcacagaagtttgctgcatcactggtgagctggggagtgtcctgtgtggtgtccacttaatcttactaggaaggatcccctcatttcaacaagatgcacccactgggcctatgtaataacaatgacgaagaggacttgtatgaatatggctgggtaggagtggtgaagctggaacagccagaattggacccgaaaccatgcctcactgtcctaggcaaggccaagcgagcagtacagcggggagctactgcagtcatctttgatgtgtctgaaaacccagaagctattgatcagctgaaccagggctctgaagacccgctcaagaggccggtggtgtatgtgaagggtgcagatgccattaagctgatgaacatcgtcaacaagcagaaagtggctcgagcaaggatccagcaccgccctcctcgacaacccactgaatactttgacatggggattttcctggctttcttcgtcgtggtctccttggtctgcctcatcctccttgtcaaaatcaagctgaagcagcgacgcagtcagaattccatgaacaggctggctgtgcaggctctagagaagatggaaaccagaaagttcaactccaagagcaaggggcgccgggaggggagctgtggggccctggacacactcagcagcagctccacgtccgactgtgccatctgtctggagaagtacattgatggagaggagctgcgggtcatcccctgtactcaccggtttcacaggaagtgcgtggacccctggctgctgcagcaccacacctgcccccactgtcggcacaacatcatagaacaaaagggaaacccaagcgcggtgtgtgtggagaccagcaacctctcacgtggtcggcagcagagggtgaccctgccggtgcattaccccggccgcgtgcacaggaccaacgccatcccagcctaccctacgaggacaagcatggactcccacggcaaccccgtcaccttgctgaccatggaccggcacggggagcagagcctctattccccgcagacccccgcctacatccgcagctacccacccctccacctggaccacagcctggccgctcaccgctgcggcctggagcaccgggcctactccccagcccaccccttccgcaggcccaagttgagtggccgcagcttctccaaggcagcttgcttctcccagtatgagaccatgtaccagcactactacttccagggcctcagctacccggagcaggaggggcagtccccacctagcctcgcaccccggggcccggcccgtgcctttcctccgagcggcagtggcagcctgctcttccccaccgtggtgcacgtggccccgccctcccacctggagagcggcagcacgtccagcttcagctgctatcacggccaccgctcggtgtgcagtggctacctggccgactgcccaggcagcgacagcagcagcagcagcagctccggccagtgccactgttcctccagtgactctgtggtagactgcactgaggtcagcaaccagggcgtgtacgggagctgctccaccttccgcagctccctcagcagcgactatgaccccttcatctaccgcagccggagcccctgtcgtgccagtgaggcggggggctcgggcagctcgggccggggacctgccctgtgcttcgagggctccccgcctcccgaggagctcccggcggtgcacagtcatggtgctgggcggggcgagccttggccgggccctgcctctccctcgggggatcaggtgtccacctgcagcctggagatgaactacagcagcaactcctccctggagcacagggggcccaatagctctacctcagaagtggggctcgaggcttctcctggggccgcccctgacctcaggaggacctggaaggggggccacgagttgccgtcgtgtgcctgctgctgcgagccccagccctccccagccgggcctagcgccggagcagctggcagcagcaccttgttcctggggccccacctctacgagggctctggcccggcgggtggggagccccagtcaggaagctcccagggcttgtacggccttcaccccgaccatttgcccaggacagatggggtgaaatacgagggtctgccctgctgcttctatgaagagaagcaggtggcccgcgggggcggagggggcagcggctgctacactgaggactactcggtgagtgtgcagtacacgctcaccgaggaaccaccgcccggctgctaccccggggcccgggacctgagccagcgcatccccatcattccagaggatgtggactgtgatctgggcctgccctcggactgccaagggacccacagcctcggctcctggggtgggacgcgaggcccggataccccacggccccacaggggcctgggagcaacccgggaagaggagcgggctctgtgctgccaggctagggccctactgcggcctggctgccctccggaggaggcgggtgctgtcagggccaacttccctagtgccctccaggacactcaggagtccagcaccactgccactgaggctgcaggaccgagatctcactcagcagacagcagcagcccgggagcctgagctcaggaggaactcttacctggaaattgggaactgtatggagactccaaactgacttctttc

SEQ ID NO: 200913 - DNA, 2878 bp, Homo sapiens
  Payload ID: 19654
  Gene Name: zinc and ring finger 3
  Uniprot ID: Q9ULT6
  ENST ID: ENST00000406323
  CDS Start-End: 25-2535
ttttctttccattttatttcctagatgcacccactgggcctatgtaataacaatgacgaagaggacttgtatgaatatggctgggtaggagtggtgaagctggaacagccagaattggacccgaaaccatgcctcactgtcctaggcaaggccaagcgagcagtacagcggggagctactgcagtcatctttgatgtgtctgaaaacccagaagctattgatcagctgaaccagggctctgaagacccgctcaagaggccggtggtgtatgtgaagggtgcagatgccattaagctgatgaacatcgtcaacaagcagaaagtggctcgagcaaggatccagcaccgccctcctcgacaacccactgaatactttgacatggggattttcctggctttcttcgtcgtggtctccttggtctgcctcatcctccttgtcaaaatcaagctgaagcagcgacgcagtcagaattccatgaacaggctggctgtgcaggctctagagaagatggaaaccagaaagttcaactccaagagcaaggggcgccgggaggggagctgtggggccctggacacactcagcagcagctccacgtccgactgtgccatctgtctggagaagtacattgatggagaggagctgcgggtcatcccctgtactcaccggtttcacaggaagtgcgtggacccctggctgctgcagcaccacacctgcccccactgtcggcacaacatcatagaacaaaagggaaacccaagcgcggtgtgtgtggagaccagcaacctctcacgtggtcggcagcagagggtgaccctgccggtgcattaccccggccgcgtgcacaggaccaacgccatcccagcctaccctacgaggacaagcatggactcccacggcaaccccgtcaccttgctgaccatggaccggcacggggagcagagcctctattccccgcagacccccgcctacatccgcagctacccacccctccacctggaccacagcctggccgctcaccgctgcggcctggagcaccgggcctactccccagcccaccccttccgcaggcccaagttgagtggccgcagcttctccaaggcagcttgcttctcccagtatgagaccatgtaccagcactactacttccagggcctcagctacccggagcaggaggggcagtccccacctagcctcgcaccccggggcccggcccgtgcctttcctccgagcggcagtggcagcctgctcttccccaccgtggtgcacgtggccccgccctcccacctggagagcggcagcacgtccagcttcagctgctatcacggccaccgctcggtgtgcagtggctacctggccgactgcccaggcagcgacagcagcagcagcagcagctccggccagtgccactgttcctccagtgactctgtggtagactgcactgaggtcagcaaccagggcgtgtacgggagctgctccaccttccgcagctccctcagcagcgactatgaccccttcatctaccgcagccggagcccctgtcgtgccagtgaggcggggggctcgggcagctcgggccggggacctgccctgtgcttcgagggctccccgcctcccgaggagctcccggcggtgcacagtcatggtgctgggcggggcgagccttggccgggccctgcctctccctcgggggatcaggtgtccacctgcagcctggagatgaactacagcagcaactcctccctggagcacagggggcccaatagctctacctcagaagtggggctcgaggcttctcctggggccgcccctgacctcaggaggacctggaaggggggccacgagttgccgtcgtgtgcctgctgctgcgagccccagccctccccagccgggcctagcgccggagcagctggcagcagcaccttgttcctggggccccacctctacgagggctctggcccggcgggtggggagccccagtcaggaagctcccagggcttgtacggccttcaccccgaccatttgcccaggacagatggggtgaaatacgagggtctgccctgctgcttctatgaagagaagcaggtggcccgcgggggcggagggggcagcggctgctacactgaggactactcggtgagtgtgcagtacacgctcaccgaggaaccaccgcccggctgctaccccggggcccgggacctgagccagcgcatccccatcattccagaggatgtggactgtgatctgggcctgccctcggactgccaagggacccacagcctcggctcctggggtgggacgcgaggcccggataccccacggccccacaggggcctgggagcaacccgggaagaggagcgggctctgtgctgccaggctagggccctactgcggcctggctgccctccggaggaggcgggtgctgtcagggccaacttccctagtgccctccaggacactcaggagtccagcaccactgccactgaggctgcaggaccgagatctcactcagcagacagcagcagcccgggagcctgagctcaggaggaactcttacctggaaattgggaactgtatggagactccaaactgacttctttcaaaaaacaaaaacaaaaaatttttttagctttgacaaacacacaaaagtggtaataaagagagccctccttgtcaacccaaaatgtgagccccctgtggcaaaaccaccccctaccccattaacaaatcaacagacaaaattctccgagtcctttgcctcttttgataacatgttgttctgttttgtaaagtgtgtgtgcttggggttccgaggtgtgggattgagttctctgctttgtttttttttaagatattgtatgtaaatgtaaaaagttattta

SEQ ID NO: 200914 - DNA, 6851 bp, Homo sapiens
  Payload ID: 19654
  Gene Name: zinc and ring finger 3
  Uniprot ID: Q9ULT6
  ENST ID: ENST00000544604
  CDS Start-End: 176-2986
agatgaaagggccgcggcgcgacggccgggggagccgagctgagcctgcgacccacaaagccgccgccgccgccgccgtgatggggctgtgaggcgtccgcccgcgttcggtcctcagccggcccgcgactatgcccggccgcgcccgccctccgcgccctcccgccgcaggaccatgaggccgcgctcgggcgggcgcccaggggccacgggccgccgccgccgccgcctgcgccgccgcccccgcggcctccggtgcagccgcctgccgccgccgccgccgctgccgctgctgctcgggctgctgctggcggccgcggggcccggcgcggcgcgggccaaggagacggcgttcgtggaggtggtgctgttcgagtcgagcccaagcggcgattacaccacctacaccaccggcctcacgggccgcttctcgcgggccggggccacgctcagcgccgagggcgagatcgtgcagatgcacccactgggcctatgtaataacaatgacgaagaggacttgtatgaatatggctgggtaggagtggtgaagctggaacagccagaattggacccgaaaccatgcctcactgtcctaggcaaggccaagcgagcagtacagcggggagctactgcagtcatctttgatgtgtctgaaaacccagaagctattgatcagctgaaccagggctctgaagacccgctcaagaggccggtggtgtatgtgaagggtgcagatgccattaagctgatgaacatcgtcaacaagcagaaagtggctcgagcaaggatccagcaccgccctcctcgacaacccactgaatactttgacatggggattttcctggctttcttcgtcgtggtctccttggtctgcctcatcctccttgtcaaaatcaagctgaagcagcgacgcagtcagaattccatgaacaggctggctgtgcaggctctagagaagatggaaaccagaaagttcaactccaagagcaaggggcgccgggaggggagctgtggggccctggacacactcagcagcagctccacgtccgactgtgccatctgtctggagaagtacattgatggagaggagctgcgggtcatcccctgtactcaccggtttcacaggaagtgcgtggacccctggctgctgcagcaccacacctgcccccactgtcggcacaacatcatagaacaaaagggaaacccaagcgcggtgtgtgtggagaccagcaacctctcacgtggtcggcagcagagggtgaccctgccggtgcattaccccggccgcgtgcacaggaccaacgccatcccagcctaccctacgaggacaagcatggactcccacggcaaccccgtcaccttgctgaccatggaccggcacggggagcagagcctctattccccgcagacccccgcctacatccgcagctacccacccctccacctggaccacagcctggccgctcaccgctgcggcctggagcaccgggcctactccccagcccaccccttccgcaggcccaagttgagtggccgcagcttctccaaggcagcttgcttctcccagtatgagaccatgtaccagcactactacttccagggcctcagctacccggagcaggaggggcagtccccacctagcctcgcaccccggggcccggcccgtgcctttcctccgagcggcagtggcagcctgctcttccccaccgtggtgcacgtggccccgccctcccacctggagagcggcagcacgtccagcttcagctgctatcacggccaccgctcggtgtgcagtggctacctggccgactgcccaggcagcgacagcagcagcagcagcagctccggccagtgccactgttcctccagtgactctgtggtagactgcactgaggtcagcaaccagggcgtgtacgggagctgctccaccttccgcagctccctcagcagcgactatgaccccttcatctaccgcagccggagcccctgtcgtgccagtgaggcggggggctcgggcagctcgggccggggacctgccctgtgcttcgagggctccccgcctcccgaggagctcccggcggtgcacagtcatggtgctgggcggggcgagccttggccgggccctgcctctccctcgggggatcaggtgtccacctgcagcctggagatgaactacagcagcaactcctccctggagcacagggggcccaatagctctacctcagaagtggggctcgaggcttctcctggggccgcccctgacctcaggaggacctggaaggggggccacgagttgccgtcgtgtgcctgctgctgcgagccccagccctccccagccgggcctagcgccggagcagctggcagcagcaccttgttcctggggccccacctctacgagggctctggcccggcgggtggggagccccagtcaggaagctcccagggcttgtacggccttcaccccgaccatttgcccaggacagatggggtgaaatacgagggtctgccctgctgcttctatgaagagaagcaggtggcccgcgggggcggagggggcagcggctgctacactgaggactactcggtgagtgtgcagtacacgctcaccgaggaaccaccgcccggctgctaccccggggcccgggacctgagccagcgcatccccatcattccagaggatgtggactgtgatctgggcctgccctcggactgccaagggacccacagcctcggctcctggggtgggacgcgaggcccggataccccacggccccacaggggcctgggagcaacccgggaagaggagcgggctctgtgctgccaggctagggccctactgcggcctggctgccctccggaggaggcgggtgctgtcagggccaacttccctagtgccctccaggacactcaggagtccagcaccactgccactgaggctgcaggaccgagatctcactcagcagacagcagcagcccgggagcctgagctcaggaggaactcttacctggaaattgggaactgtatggagactccaaactgacttctttcaaaaaacaaaaacaaaaaatttttttagctttgacaaacacacaaaagtggtaataaagagagccctccttgtcaacccaaaatgtgagccccctgtggcaaaaccaccccctaccccattaacaaatcaacagacaaaattctccgagtcctttgcctcttttgataacatgttgttctgttttgtaaagtgtgtgtgcttggggttccgaggtgtgggattgagttctctgctttgtttttttttaagatattgtatgtaaatgtaaaaagttatttaaatatatattttaaagaaccctaactgccaacttttgctgaaaaagaaaaaaaaatcactgctgcattaaatgaaccacatcatgtgtagatactgttgtctccctgaagggagctcaggcctttgaaaagctcagggcttcacctgccttagaaaatgaaccagaaacttgaagtaaagctagttgataggggtacaggctctgaggagcagtgcaaaactgcctctttctttctcgtggcaaatcccaatgtacacgatttcaggtctcagacgccatgcctctccagcccacgcctttaggcaggtgatggcagcagctaggaatagggtgtacatgatccacagccctgcggagccaggtcaagccgctgctatgaaagctccagggtgatggggacgattctgcccagtgtcctcagtctgtcccctcaggtcatggtcccaagtgaaatgacagagttcacagccctggtcttggctgaggtccaggtcatagtaagggcatgttcttggggccctcgacctgaactctgaccctccgggcagggaagaggaggttgtcccctttggttgtcctggctttggagtcctttgcaaaaatattttgggccccctgccactggctgcagaaatggctcgacggggtgtgtggggacagacacccagaaggaatgtacttttgtggccttggtgtccgatggggctgggggagagtgctctccactgacccagcagcacacccatgtgcagtgcgcctgcatctgtgtgggggcagccacaccccttggctgctgcttccttgggctgcctttctgggggcatgtgactggacctacgaggtctgcactgagctccatttgaatgatacctttcctatcccatttcccccacggaagcaccgcttcagggttattcagtcctctgcctcatggctgaaattgctcatctcgtctgcagatgtctactatcctgtctacctaatgcactattatgtattgattctccatgagacagagagagagagagactatcagatagtttacacccaaagggtaggtttttgtatatttttccagccttttttattaaggggaaggggagagtttaaaaacccaaaccgttgtggttttaaggtgtttcatttttaaaagggagagagaatctatttaaagctatttcagatcagggattgtcatccttttttgtccaatgtattccttgttctttaaaaaaattttttttagaggaaactaatattagtctttgtgttcactaactcttctggtcacttgtatttatttattcattcattcatcagatatttgttgccatctgaaagaactggcccagtgggtctgaaagctcgcttgagaataggaaacttgagacctggccccctgtgggtaggagaacaaggaccacctgggttctccagtcttgaacgagaatctcactcttatcagaatgtttttcttaacctcagcgtatgatgaggaaatttacttatctctagctaggatttgacaaattccaacatcaaatgatcaaaacatttgccactgaggcttcactggtgagatccgttctccgtcctcgggtgcagtcccttgggggctgctcctcggactgcgccccgcacacctgttatcgagggtgtgagaagcgcctaagctggtgacatgtgatctgggacgccttcatttctcgggccaggagtagcagctgctaaggacagcagcttgcattgcgtggttttagggaagcagggtctggcttttaatatgaactgcaaaaagcagcttctcactgatatttttttgttgttgtttctggggggtttttttgttttgtttttaatgcctttgagtgcatattttcttcctcgtctgaaaccgaactcccaaagtggctttctttagccctggctggaaaaccacctctcaatagccttaagcaataaatagatgagtagagaatgtggcttcaactgggcttattaaagtaagtgtgtctagttttcacttgaacaagtgatagctgcagatggcgaaagaaacccatttaatttttgtagcttacaggtggtagaaacaaaaatgcaattttaaaaccttaaataccaaataccaaccattgccttttttttttttgagatggaattttgctcttgtcacccaggctggagtgcaatggcgcgatctcacctcactgcaacctctgcctcccgggtccaagtgattctcctgcctcagcctcccaagtagctgggattacaggcatgcgccaccacacccagctaattttgtatttttggtagagacagggtatctccatgttggtcaggctggtcttggattcccgacctcaggtgatccgcccacctcggcctcccaaagtgctgggattacaggcgtgagccaccatgcctgcccagcaataccaaccattgtcttttaaattcgtgttggcttctcagacagggagatcactggaataaaataaccgatggtcttattttgtcacacgtaaatcaaaagaaatgtcctctttgaagttgtaagactccaccaatgacagacacccttttcggtggactctgagtggtgtgtagtggttttatagccatggaaactaggagtatctcactttccactgagaacccctgcccccaatccctctaagttggggtgtggcagttgggcagggtcaagtgacccagccctggctgtaggacagccatatacagtgaagagttctagaaccagctaaaaatggaagtttgggtgtttaccaacaaggtacctctttatggatgcagccccagtaagctggctttaactctcagctccttccctgtctcctcctaatccaagcccttttataaaataaagccccttctgtcccactgctcacatacttatgtgctgctagtctctactcgaagttcgtgcaggactaatgcttttaaaatgaggtctaaaaaataattactagtcgagactattattctttaaacagaactgcctttttctactctttatgtaaactctttctattgtgttggtctaacaaggcactattttaaaattttttaatttttcccatagcacttaaaagagattttgtaaagaccttgctgtaaagattttgtaataaaatggtctaagggctctttttccaacattaccatttttaaaaaatgttttaaaagctagaagacaacttatgtatattctgtatatgtatagcagcacatttcatttatggaaatatgttctcagaatatttatttactaatatatttatcttaagccatgtcttatgttgagagtgtgacattgttggaataatcattgaaaatgactaacacaagaccctgtaaatacatgataattgcacacagattttacatatttgcagaccaaaaatgatttaaaacaagttgtagtcttctatggttttgtaacaaattgtacacatgactgtaaaaaaaaaatacaattttatcaagtatgtgtt

SEQ ID NO: 200915 - DNA, 1426 bp, Homo sapiens
  Payload ID: 19655
  Gene Name: zinc and ring finger 4
  Uniprot ID: Q8WWF5
  ENST ID: ENST00000222033
  CDS Start-End: 62-1351
atctgccagaaaggccacctgcgccagcacctcctgagaccggccttcaaagacacgacgcatgccgctctgccgtccggagcacttaatgcctagagccagcagggtcccagtggccgcgtcactgcctctgagccacgcggtcattccaactcaactgccctcgcgtcctggccacaggccccctgggagaccccggagatgcccaaaggcctcatgcctgccgcctccagtgggacctagcagcacacagacagcgaagcgggtgaccatggggtggccacggccgggccgagccctcgtggcagtcaaagccttgctggtcttgtcgctgctccaggtgcccgcgcaggcagtggtacgggccgtgctggaagacaactcgagctcggtggactttgcggatctgccggcgctgttcggcgtccccctggcccccgagggcatacggggctacctgatggaggtcaagccagccaacgcgtgccatcccatcgaggccccgcgactgggcaaccgctctctgggcgccatcgtgctgatccgccgctacgactgcaccttcgacctcaaggtgctgaacgcccagcgcgccggcttcgaggcggccatcgtgcacaacgtccactccgacgacctcgtgagcatgacccacgtctacgaggacttgaggggccagatcgccatcccctcagtgttcgtgagcgaggccgcctcgcaggacctgcgggtcatcctgggctgcaacaagtcggcccacgcgctgctcctgcccgacgacccaccgtgccacgacctgggctgtcaccccgtgctgaccgtgtcctgggtgctgggctgtaccctggccctggtcgtatcagccttctttgtcctgaaccacctgtggctctgggcccaggcctgctgcagccacagacggccggtgaagacgtctacctgccagaaggcccaggtccgcaccttcacgtggcacaacgacctgtgtgccatctgcctggatgagtatgaggagggcgaccaactcaagatcctgccctgctcccacacctaccactgcaaatgcattgacccctggttctcccaagccccccggcgctcctgccccgtgtgcaaacagtcggtggccgccacagaagacagctttgactccaccacctacagcttcagggacgaggacccctccctaccgggccaccggccccccatctgggccattcaagtccagctacgctcccggaggctggagctgctgggccgcgccagtccccactgccactgcagcaccacgtccctggaggcagagtataccactgtctcctcagcccctcctgaggcccctggtcagtaaagatctagggcagggaggggggtgcaatgaggaatgtttctggtctgaaaagaataaagtgggtttgaaagcgga

SEQ ID NO: 200916 - DNA, 7732 bp, Homo sapiens
  Payload ID: 19656
  Gene Name: zinc binding alcohol dehydrogenase domain containing 2
  Uniprot ID: Q8N4Q0
  ENST ID: ENST00000322342
  CDS Start-End: 291-1424
ttcaaaccaaaacaaaaagattaaaggagcagcggccggggcggcagcggtccccaggccgggacacccggggtggtgcgcccgggttcgcgggggctgcgccggcgccggggaggcggggggagcgggagcgggcgacgcggggaaggggggagccagggggagggcgccggccggaggaggggcggacccgcccgccctagccgagcagagcacagccgagccgagcggcccgggcgggggccgaccccggccagcgtcggcgcagagagcgggcggaggcgcaggccatgctgcggctggtgcccaccggggcccgggccatcgtggacatgtcgtacgcccgccacttcctggacttccagggctccgccattccccaagccatgcagaagctggtggtgacccggctgagccccaacttccgcgaggccgtcaccctgagccgggactgcccggtgccgctccccggggacggagacctcctcgtccggaaccgatttgttggtgttaacgcatctgacatcaactattcagcaggccgctatgacccctcagttaagcctccctttgacataggtttcgaaggcattggggaggtggtggccctaggcctctctgctagtgccagatacacagttggccaagctgtggcttacatggcacctggttcttttgctgagtacacagttgtgcctgccagcattgcaactccagtgccctcagtgaaacccgagtatcttaccctgctggtaagtggcaccaccgcatacatcagcctgaaagagctcggaggactgtcggaagggaaaaaagttttggtgacagcagcagctgggggaacgggccagtttgccatgcagctttcaaagaaggcaaagtgccatgtaattggaacctgctcttctgatgaaaagtctgcttttctgaaatctcttggctgtgatcgtcctatcaactataaaactgaacccgtaggtaccgtccttaagcaggagtaccctgaaggtgtcgatgtggtctatgaatctgttgggggagccatgtttgacttggctgtagacgccctggctacgaaagggcgcttgatagtaatagggtttatctctggctaccaaactcctactggcctttcgcctgtgaaagcaggaacattgccagccaaactgctcaagaaatctgccagcgtacagggcttcttcctgaaccattacctttctaagtatcaagcagccatgagccacttgctcgagatgtgtgtgagcggagacctggtttgtgaggtggaccttggagatctgtctccagagggcaggtttactggcctggagtccatattccgtgctgtcaattatatgtacatgggaaaaaacactggaaaaattgtagttgaattacctcactctgtcaacagtaagctgtaaaaacagaacaatgacataaatcaagggagaaagaaaatgggcactttatgtctcagaattactcaaatcaatttatttttagttggtaatggatataatatttcttaaaacaaaagtaaggtgttaatgaataggtctctccttctcctcctcctcctcctcttcccttgggggaaaaaaaaaaatgtgctaataaaacttccctccatggctaagagggaaaacgcttacattcaattctttagtcatggatggtctcgttccagatgttattgttccagggaactaaattcattcctgatgccagatctgatcgagtcagtatgtcttcagcttgatcagattttaaaatcagttttgaaagtggttcccgacttctttgctttgggagaatttggtcttatgctcataagcagttcatgagtgacaagtgtagcaaaagccagccatatattttcagaatctatatcctcaggaaatggtcctttttttttctataaatcaccaaccaactatctaaatggacatttgggggaattccctcccaaatttgattttgttattagaaaaatgattccgtgaacacagatgtgttttgaagaagtagcacgtaatggcttttatctaccatcaacctgataaggcacatgtgaaatggaaatgttctctttcctctgaagcagcaaattaatgttgaaaacttacatagacagaaagtaggttttggaaagggaaaccacagagattagggggacttaaaattaatataggcacaggaaagagaaaagtgtgcgctccattctcagtgggggttcaccacaaaacacgggccccaggagggaagcgctgtctaggcacacggcaaggccttagtaacagcatgctacactgctcgaggtacggtatgtcccatcgccctgtgcaccgtagagacctcagtcatctcaaggaagaatacatttgcttctccttagaggcgttcgaactagaagctatgcgttacctctgattctggaaacagaatagcagccactcattctgcattcccatttttctctccacgtgttctggtggaatgagatgctccttggcactatagcctgatgtcccacattgacccactgaccacacaggaaaagcagcgaaacctgcaccctctcttctgagtcacgcctgtggctcatcggcttccctcttaacctttagtgccctgaagactgctgccgctgtcaccgttgcgctgaaaccccatgggcccgttctgattgaaggtgaagcccaccagattatttttcaaagtcttaggtttcggtgtatctaacctgctcagtaaatatggacgcaattaaagatgctctaggaaatttggggactgtatttaatttttctttccttccatctgaggagcaaggaaatcctactgctgaatagctgttagtatctattttacaagatttactcattttcaggtacctaatgtagctgctagcatgcatgcacaacaatacaatttatatggtaaatggaaccaaataatggcttcactgaatgttatggctgcactgaagggaaatgtcacggtaaatagctgccaaattatggatcatgccgaagtgtcacaactgcactaaagacaaatagcactagaggctattgccactgtgacgcttttgagttatgaagaagggtagcggcctgatgcgaggctctttgtgtcctcattatagcaaagggttactggtgcaggggactaggaaaaacccgtccagtgtggtgcttagttattcatccatccctttcagacctaacagccacagccacacggaaagagactttgcctcacttttacattcacaaacaaacaaaggaggggggagcaggttttatgaatgtaactgtgcacaggaaatgactggtaatggaaaaaatgttgtaataaaataatctaatcaaagaatattattaaatttaacatagtctatgtccaaaaggcttagttgcttcttatgcagatagatgtgtgaaatctaagcagtaatgtactttctccctttgtaaagacttggggagtaaggacattaccaactaaattgcttcttcgaaactgaagtgagtcccggtttgtttcattttaatgggagggtaataaagatgaaagaccaacattttaactgatggatcccttaagctacagaatagaaatttattgtgttttgagggaatatactaaatgcagctatgtaaaaataaaattcaaacgcccaggattaaaataaaatataatctgaaaacctcatgttctctctttccccaaactaagaaagtgcactgcatgctgttttcacttattcttagaaaacaagcatgaaagattccgcccattcagataatgccaaaaatatgtttaaacttttttttattcttttgaaaaatgatttgtaaattgagggtcatagttcagcatcagtttcatcttctgggattattgttcaagaccagcctctaatgggaggtgaaacggtacgatggtctcaacacctttcttctgaactgtaatacatatcacaaaaagtacatccataattcagggcaattgtcagtctttttagagaaggggccagggtggaacaatcccagtgagtaaattatttctcagcgtggacttctctgcatgtcgggcttaaggtcaccagccgggcagggtggaaggagcttgcctctttgagaaaccaaggagtcccagtgatctgttaccatttggttatgacttctaaagagccaaatgctattccttcaagcctgttttgcaggcagaaaataccagcagtgtcatttaggggttcctttgatgatgactactgctgttaactgacctcagcattaaaaaaaaaaaaattcagggaatagtttgcaaagaaatgaaggaagttttgcatgatatattctataacttgtcattatatgatttcatctggatgaagttcctcaggagtaggatagagcctctgtaaatggtcattagtattacattctgtgtttatctaatgaaagtgcagtgacaagtagctgcttcttattaaaatgaaaatcctgcattatgtacttgaggaacattccagctaatgaggatgtaatgtcctcagtacaacgcagaccttctttttgtgttcaccaccacaagatgctggaagcttgacaaatgatatcatttaagacacatgcctgccttagggacctggtttttggcttcctgtttctggcttttatttgggtaacgtttataatggccacccgacttgtacctgggtaatgttttaaccccttccccagagttctcaattagcatgaatttactacagtcagagtttcctttaaattggggtgggggtgctaagcactgaaaatatctttcttgattactttaccatgtggacatatgggataaatactgtatttcagatttacataaaagtagattagtaatgcacagctttcagaataaaaactgataaaaaagaccaagcactatcaactttggacagtaatttcctaggtgttaaacaagttttctgaatacaatctggatgcaaaacggcctgatttgatgaattcataattttcttctgtatactttcattttattaaatattttattacttggttaaacacaagaattatctatgtaaacttcatgggcttttttgttgaaagttagatgttcagtaactaatttcccagttatggcccagaattaaacatttatgatcatatttcagaagtcaaaatacaaaactggattatcaaaacggttggtgtggtcactttaaactggactatcagtatggttgccgtggtcactttaagcgggattatcagtacggttggtgtggtcactttggtttatcatcaatacagttggtgtggtcactttaaactggattaccaatatggttggtgtggtcgctttaaagtttgttttcattttttttctatttttaattcttacgggtatatagaaggtgtatatatttatggggtacatgagatgtcttgaaacaggcatgcaatgtgaaataaataagcacatcatggagaatggggtgtctacctcctcaagcatttatccattgagttgcaaacaatccagctacactcagttatttaaaaatgtacagttattattgcttatagtcaccctgtttgctatcaaatagtaggtcttactctatttttttcattttaaactttgaattttatttttcctaggcttatagcatcatgctatcccccttgtaaaaggaggaatgcttggcatgagaaccttactgctgttaccatgaacaaactatggaatgttggcaaaagaaaaaaaaaagttacacaaaacacacaaataacattttaataatatgtatcagatcaagtgattcttagtagtagttgatattcacaggaagtcaaaaaaggacctatttcaattatgtctgcttgaatcctgtttaattgtttccctggctgagtagctagtgtgacacagcagcaagactaaaggggctctgtggtccacattgtcctcgagtctattcttgcccattatagacctgcccattggtgctcactcactgcatcccaggaggcttgactgtcctcaggaagcatgttggggtgcccttaagggtaagtatcccggggagcacagtttggagaaaaccaatacgtcttcatgtatgttgagaagcgctgggccaaagtacagactttttttttttttttttttttttttgggacaagacctcggctctgtcacccaggctggagtgcagtggtgcaatcatggttgattgcaacctcaacctccctggttcaagccatcctcccacctcagtctcctgagtagctgggactacaggtgcacatcaccatgcccggctaatttttttgtatttttttactagagatgaggttctactatgtagcccaggctgctctggaactcctgggctcaagcaatcctcccacctcggcctcccaaagtgctgggattgcaggcatgagccaccatactggcctaagtgcagaaatttgaacatgtgcctccaccccaagccaaaatttcccttgaggagcactatctatctgatgatgtctttgaaacggtatgaaattaaaataattaaaacatcctgcacataggtggtagcatctaatatgaaagatggatttatgcttagagctcagaaaaatcctcataaaattattgtgtcttatcctcggcacctaaagaactgaacagggtcttagaatgatcaaatggatggtttgtttggttggtgggagatgttgaaacgtgggtaaggaatggtgtccttagaagagaggttgccctagatgccgaaaccctggaggtccatggttgccagcagaaacttacagctgggaggagcctgcacccatctctggctcttgtgaatgagaagactcaatttgtgtttttgtttttttgagaaagggtcttgctctgtcacccagactgaagtacagtagcgtgatctcagttcactgcagccttgacctcctgggcccaagcgatcctcccacctcagcctcctgagtagttaagacttcaggtatgcattaccatgcctggctaatgtttttttattttttgtagagacaaggtctccctcgttgcccaggctggtctcaaactcttgggctcaagtgactttcctgcctcggccatccaaagtgctgggattacaggcataagccaccgcaacatgccccagttgcttttaaactgttaaatgtgggatttaaagaataatctagttctacccattttatgaatgaagaaaagaaactgggacccagagagaaaaggtgcccggtccaaggttacagagcccgttggactcagaagtgaagctggaacactggccaatgccctcccatccgccaggtgacttctctgcagtcccctttaccatctgcccgggtcctttgggatacggctgactaggggtttgaagaacagcaattggcctttgttatgaatctttttgtggagataaacccagtagaagtatcacggttctgaccatgaaagtgtgttcaactctaatccagcacaattaggattccagatcatttgattctgtgtcgtctaaatatcacagaaagttaaaaacaaattagcctcaatggaattaatggcttaatatccataatttagttttaatgctaggaggaagggctcctgtgaatgtgttcttacaaatcaaataaagaaaatcaaatagagaaaa

SEQ ID NO: 200917 - DNA, 3205 bp, Homo sapiens
  Payload ID: 19656
  Gene Name: zinc binding alcohol dehydrogenase domain containing 2
  Uniprot ID: Q8N4Q0
  ENST ID: ENST00000537114
  CDS Start-End: 482-1246
gatttggagaatgcctgcgccggtcctattcttttttcctggggtttctggattttagtcttttaagtggatcctcccgtcggattactagaatcctgcgctcactgcatgcacacagtttcaattaaagggggggtgggggtacaaggagggtctccaaatgcgcgaatccttcccagtgtgtctttcttgtctttctgtggctccctggcccttccgcccctgctccccatcccgagccccgcattcgctttgcgcctgctgcgcttgaacttgtttctggtggagcggaaggcgcgagctgcggaccctcacgcagagatttgttggtgttaacgcatctgacatcaactattcagcaggccgctatgacccctcagttaagcctccctttgacataggtttcgaaggcattggggaggtggtggccctaggcctctctgctagtgccagatacacagttggccaagctgtggcttacatggcacctggttcttttgctgagtacacagttgtgcctgccagcattgcaactccagtgccctcagtgaaacccgagtatcttaccctgctggtaagtggcaccaccgcatacatcagcctgaaagagctcggaggactgtcggaagggaaaaaagttttggtgacagcagcagctgggggaacgggccagtttgccatgcagctttcaaagaaggcaaagtgccatgtaattggaacctgctcttctgatgaaaagtctgcttttctgaaatctcttggctgtgatcgtcctatcaactataaaactgaacccgtaggtaccgtccttaagcaggagtaccctgaaggtgtcgatgtggtctatgaatctgttgggggagccatgtttgacttggctgtagacgccctggctacgaaagggcgcttgatagtaatagggtttatctctggctaccaaactcctactggcctttcgcctgtgaaagcaggaacattgccagccaaactgctcaagaaatctgccagcgtacagggcttcttcctgaaccattacctttctaagtatcaagcagccatgagccacttgctcgagatgtgtgtgagcggagacctggtttgtgaggtggaccttggagatctgtctccagagggcaggtttactggcctggagtccatattccgtgctgtcaattatatgtacatgggaaaaaacactggaaaaattgtagttgaattacctcactctgtcaacagtaagctgtaaaaacagaacaatgacataaatcaagggagaaagaaaatgggcactttatgtctcagaattactcaaatcaatttatttttagttggtaatggatataatatttcttaaaacaaaagtaaggtgttaatgaataggtctctccttctcctcctcctcctcctcttcccttgggggaaaaaaaaaaatgtgctaataaaacttccctccatggctaagagggaaaacgcttacattcaattctttagtcatggatggtctcgttccagatgttattgttccagggaactaaattcattcctgatgccagatctgatcgagtcagtatgtcttcagcttgatcagattttaaaatcagttttgaaagtggttcccgacttctttgctttgggagaatttggtcttatgctcataagcagttcatgagtgacaagtgtagcaaaagccagccatatattttcagaatctatatcctcaggaaatggtcctttttttttctataaatcaccaaccaactatctaaatggacatttgggggaattccctcccaaatttgattttgttattagaaaaatgattccgtgaacacagatgtgttttgaagaagtagcacgtaatggcttttatctaccatcaacctgataaggcacatgtgaaatggaaatgttctctttcctctgaagcagcaaattaatgttgaaaacttacatagacagaaagtaggttttggaaagggaaaccacagagattagggggacttaaaattaatataggcacaggaaagagaaaagtgtgcgctccattctcagtgggggttcaccacaaaacacgggccccaggagggaagcgctgtctaggcacacggcaaggccttagtaacagcatgctacactgctcgaggtacggtatgtcccatcgccctgtgcaccgtagagacctcagtcatctcaaggaagaatacatttgcttctccttagaggcgttcgaactagaagctatgcgttacctctgattctggaaacagaatagcagccactcattctgcattcccatttttctctccacgtgttctggtggaatgagatgctccttggcactatagcctgatgtcccacattgacccactgaccacacaggaaaagcagcgaaacctgcaccctctcttctgagtcacgcctgtggctcatcggcttccctcttaacctttagtgccctgaagactgctgccgctgtcaccgttgcgctgaaaccccatgggcccgttctgattgaaggtgaagcccaccagattatttttcaaagtcttaggtttcggtgtatctaacctgctcagtaaatatggacgcaattaaagatgctctaggaaatttggggactgtatttaatttttctttccttccatctgaggagcaaggaaatcctactgctgaatagctgttagtatctattttacaagatttactcattttcaggtacctaatgtagctgctagcatgcatgcacaacaatacaatttatatggtaaatggaaccaaataatggcttcactgaatgttatggctgcactgaagggaaatgtcacggtaaatagctgccaaattatggatcatgccgaagtgtcacaactgcactaaagacaaatagcactagaggctattgccactgtgacgcttttgagttatgaagaagggtagcggcctgatgcgaggctctttgtgtcctcattatagcaaagggttactggtgcaggggactaggaaaaacccgtccagtgtggtgcttagttattcatccatccctttcagacctaacagccacagccacacggaaagagactttgcctcacttttacattcacaaacaaacaaaggaggggggagcaggttttatgaatgtaactgtgcacaggaaatgactggtaatggaaaaaatgttgtaataaaataatctaatcaaagaata

SEQ ID NO: 200918 - DNA, 671 bp, Homo sapiens
  Payload ID: 19656
  Gene Name: zinc binding alcohol dehydrogenase domain containing 2
  ENST ID: ENST00000582437
  CDS Start-End: 208-671
ctttagggtggagcgggagcagcctggacgcaaactgcgacgtttagatttgttggtgttaacgcatctgacatcaactattcagcaggccgctatgacccctcagttaagcctccctttgacataggtttcgaaggcattggggaggtggtggccctaggcctctctgctagtgccagatacacagttggccaagctgtggcttacatggcacctggttcttttgctgagtacacagttgtgcctgccagcattgcaactccagtgccctcagtgaaacccgagtatcttaccctgctggtaagtggcaccaccgcatacatcagcctgaaagagctcggaggactgtcggaagggaaaaaagttttggtgacagcagcagctgggggaacgggccagtttgccatgcagctttcaaagaaggcaaagtgccatgtaattggaacctgctcttctgatgaaaagtctgcttttctgaaatctcttggctgtgatcgtcctatcaactataaaactgaacccgtaggtaccgtccttaagcaggagtaccctgaaggtgtcgatgtggtctatgaatctgttgggggagccatgtttgacttggctgtagacgccctggctacgaaagggcgcttgatagtaatagggtttatctctggctaccaaactcc

SEQ ID NO: 200919 - DNA, 520 bp, Homo sapiens
  Payload ID: 19656
  Gene Name: zinc binding alcohol dehydrogenase domain containing 2
  ENST ID: ENST00000581620
  CDS Start-End: 218-520
aaacgtgcttcggaggaaggaggctgggacccggctggctttccctgttccctccagatttgttggtgttaacgcatctgacatcaactattcagcaggccgctatgacccctcagttaagcctccctttgacataggtttcgaaggcattggggaggtggtggccctaggcctctctgctagtgccagatacacagttggccaagctgtggcttacatggcacctggttcttttgctgagtacacagttgtgcctgccagcattgcaactccagtgccctcagtgaaacccgagtatcttaccctgctggtaagtggcaccaccgcatacatcagcctgaaagagctcggaggactgtcggaagggaaaaaagttttggtgacagcagcagctgggggaacgggccagtttgccatgcagctttcaaagaaggcaaagtgccatgtaattggaacctgctcttctgatgaaaagtctgcttttctgaaatctcttggctgtgatcgtcctatcaactat

SEQ ID NO: 200920 - DNA, 1673 bp, Homo sapiens
  Payload ID: 19657
  Gene Name: zinc finger (CCCH type), RNA-binding motif and serine/arginine rich 1
  Uniprot ID: Q15695
  ENST ID: ENST00000391338
  CDS Start-End: 219-1658
aatttatgatatacttaattacaaaaaaagtctaactgcaatataaaggagaaacaaaatgaaagtaatttgtaatatatataagtatgcaaacaaaacaatactagaaaacataaaatattcataagtagaatcactgacagtggcagctatgaacaaaatcttccatatattcccataggttaagaatgtctgaggggtcaggcggtgctggcaagatggctgcacttgagaagatgacgtttcccaagaagatgacatttccagagaaaccaagccacaaaaagtacagggccgccctgaagaaggagaaacgaaagaaacgtcggcaggaacttgctcgactgagagactcaggactctcacaggaggaggaagaggacacttttattgaagaacaacaactagaagaagagaagctattggaaagagagagggaaagattacatgaggagtggttgctgagggagcagaaggcacaagaagaattcagaataaagaaggaaaaggaagaggcggctaaaaaatggctagaagaacaagagagaaagttaaaggaacaatggaaagaacagcagaggaaagagagagaagaggaggagcagaaacaacaggagaagaaagaaaaagaggaagctgtgcagaagatgctggatcaggctgaaaatgatttagaaaatagtaccacatggcaaaacccagaaccacccgtggatttcagagtaatggagaaggatcgagctaattgtcccttctacagtaaaacaggagcttgcagatttggagacagatgttcacgtaaacataatttcccaacatctagtcctacccttcttattaagagcatgtttacaacgtttggaatggagcagtgcaggagggatgactatgaccctgacgcaagcctggagtacagcgaggaagaaacctaccaacagttcctagatttctatgaggatgtgttgcccgagttcaagaacgtggggaaagtgattcagttcaaggtcagctgcaatttggaacctcacctgaggggcaatgtatatgttcagtaccagtcggaagaagaatgccaagcagccctttctctgtttaacggacgatggtatgcaggacgacagctgcaatgtgaattctgcccagtgacccggtggaaaatggcgatttgtggtttatttgaaatacaacaatgtccaagaggaaaacactgcaactttcttcatgtgttcagaaatcccaacaatgaattctgggaagctaatagagacatctacttgtcttcagatcagactggctcctcctttggcaagaactccgagaggagggagaagatgggccaccacgaccactactacagcaggcagcggggaaggagaaaccctagtccagaccacacctacaaaagaaatggggaatccgagagaaaaaagagtagtcatagggggaagaaatctcacaaacgcacatcaaagagtcgggagaggcacaattcaccaagcagaggaagaaataggcaccgcagctgggaccagggccgccggagccagagccgcaggagccaccgcagccggagccaaagttcctctaggtgccgaagtcgtgggaggaggaagtcgggtaatagagacagaactgttcagagtccccaatccaaataaactagttttgttctt

SEQ ID NO: 200921 - DNA, 1491 bp, Homo sapiens
  Payload ID: 19658
  Gene Name: zinc finger (CCCH type), RNA-binding motif and serine/arginine rich 2
  Uniprot ID: Q15696
  ENST ID: ENST00000307771
  CDS Start-End: 25-1473
gaggggcggggcggtgccggcaagatggctgcgcccgagaagatgacgtttcccgagaaaccaagccacaaaaagtacagggccgccctgaagaaggagaaacgaaagaaacgtcggcaggaacttgctcgactgagagactcaggactctcacagaaggaggaagaggaggacacttttattgaagaacaacaactagaagaagagaagctattggaaagagagaggcaaagattacatgaggagtggttgctaagagagcagaaggcacaagaagaattcagaataaagaaggaaaaggaagaggcggctaaaaaacggcaagaagaacaagagagaaagttaaaggaacaatgggaagaacagcagaggaaagagagagaagaggaggagcagaaacgacaggagaagaaagaaaaagaggaagctttgcagaagatgctggatcaggctgaaaatgagttggaaaatggtaccacatggcaaaacccagaaccacccgtggatttcagagtaatggagaaggatcgagctaattgtcccttctacagtaaaacaggagcttgcagatttggagatagatgttcacgtaaacataatttcccaacatccagtcctacccttcttattaagagcatgtttacgacgtttggaatggagcagtgcaggagggatgactatgaccctgacgcaagcctggagtacagcgaggaagaaacctaccaacagttcctagacttctatgaggatgtgttgcccgagttcaagaacgtggggaaagtgattcagttcaaggtcagctgcaatttggaacctcacctgaggggcaatgtatatgttcagtaccagtcggaagaagaatgccaagcagccctttctctgtttaacggacgatggtatgcaggacgacagctgcagtgtgaattctgccccgtgacccggtggaaaatggcgatttgtggtttatttgaaatacaacaatgtccaagaggaaagcactgcaactttcttcatgtgttcagaaatcccaacaatgaattctgggaagctaatagagacatctacttgtctccagatcggactggctcctcctttgggaagaactccgaaaggagggagaggatgggccaccacgacgactactacagcaggctgcggggaaggagaaaccctagtccagaccactcctacaaaagaaatggggaatccgagaggaaaagtagtcgtcacagggggaagaaatctcacaaacgcacatcaaagagtcgggagaggcacaattcacgaagcagaggaagaaatagggaccgcagcagggaccgcagccggggccggggcagccggagccggagccggagccggagccgcaggagccgccgcagccggagccaaagttcctctaggtcccgaagtcgtggcaggaggaggtcgggtaatagagacagaactgttcagagtcccaaatccaaataaactagttttgttcttaaa

SEQ ID NO: 200922 - DNA, 744 bp, Homo sapiens
  Payload ID: 19658
  Gene Name: zinc finger (CCCH type), RNA-binding motif and serine/arginine rich 2
  ENST ID: ENST00000380308
  CDS Start-End: 25-468
gaggggcggggcggtgccggcaagatggctgcgcccgagaagatgacgtttcccgagaaaccaagccacaaaaagtacagggccgccctgaagaaggagaaacgaaagaaacgtcggcaggaacttgctcgactgagagactcaggactctcacagaaggaggaagaggaggacacttttattgaagaacaacaactagaagaagagaagctattggaaagagagaggctggagtgcagtggtgtgatctccgctcaccgcaacctccacctcccaggttcacacgattctcctgcctcagcctcccgagtagccgggattacaggcacgcaccgccacacccagttaatttttttttgtacttttagtagagatggggtttcaccatgttggccaggatggtctcgatctcttgacctcatgatctgcccgcctcggcctcacaaagtgctgagattacaggtgtgagccaccgcgctcagccgaaatttcttaatgtctctaagcttctatttccttgtctgtaatatggagataaagtcaatcacagtatccacctcacagaattgtgaagattaaaggaggtgatggatgtatagtgtttaacacagtgtcagcagatgagaggtgctgtgatagctctagttcttattattatagatttctgttatgatgaagacaatagatacggtatgaaataagagagtaatttttttcctgtttatttgaaatgcttcttttaaa

SEQ ID NO: 200923 - DNA, 4597 bp, Homo sapiens
  Payload ID: 19659
  Gene Name: zinc finger and AT hook domain containing
  Uniprot ID: Q9P243
  ENST ID: ENST00000377838
  CDS Start-End: 176-3907
agactccatccgccatgttggatgccgcagattcgccataacctcgccggctcttttcttaaaaaaataaaaataaaaagcgaagcgtcagcagggcgccccgccccctcggtcggcacgggagggggcccggaagagcccgaggcttttttttcctccgcggtggggcgttgccatggagacgcgggcggcagaaaacacggccatctttatgtgtaaatgttgtaacctcttctcaccaaatcagtcggaactcctctcccacgtttcagagaagcacatggaagaaggggttaatgttgatgagattattattccccttaggcctctgagtacacctgaaccccccaactcaagcaaaaccggagatgagtttttggtcatgaagaggaagagaggcaggcctaaggggtccacgaagaagtccagcacagaagaggagctggcagaaaacatcgtgagtccgactgaggacagcccgctggctccggaggaagggaacagcctgcctccaagcagcttggagtgtagcaagtgctgtcggaagttctccaacacgcgccagctgcggaagcacatctgcattatcgtgctgaatttgggtgaggaggaaggagaagcaggtaacgagtctgaccttgaactagaaaagaagtgtaaggaagatgatcgggaaaaagcctcgaaaagaccacggtcacagaaaacagagaaagtccagaagatctcaggaaaggaggccagacagctttctggggcgaagaaacccatcataagtgtggttttaactgcacacgaagcaattccaggtgctaccaagattgtgccagtggaggctgggccccctgaaacaggagctacaaattctgagaccacttcagcagacctggtgcctcggagaggctaccaggaatacgccattcagcagacaccttatgagcaaccaatgaagtcaagcaggctaggtcccactcagctcaaaatcttcacttgtgaatactgcaacaaggtcttcaagttcaagcactcgctgcaggcccacctgaggatccacaccaatgaaaagccatacaagtgcccccagtgcagctatgccagtgccatcaaggccaacctcaatgtgcacctgcgcaagcacactggagagaagttcgcctgcgactattgctcgttcacctgcctgagcaagggccacctcaaggtgcacatcgagcgagtgcacaagaagatcaagcagcactgccgcttctgcaagaagaagtactctgacgtcaagaacctcatcaagcacatccgagacgcgcatgacccacaggacaagaaggtcaaagaggccttggacgagctctgcctgatgacgagggagggcaagcggcagctgctctatgactgccacatctgtgagcgcaagttcaagaacgagctggaccgtgaccgccatatgctggtccacggagacaagtggccttttgcctgtgagctctgtggccatggggccaccaagtaccaggcgctggaactgcatgtcaggaagcaccccttcgtgtacgtctgtgccgtctgccgcaagaagttcgtcagctccatcaggctgcgcacccacatcaaagaggtgcacggggctgcccaggaggccttggtcttcaccagttccatcaaccagagcttctgcctcctggaacctggtggggacatccagcaagaagctctgggggaccagctacagctggtggaagaggagtttgccctccagggcgtgaatgcactcaaggaagaggcctgtcctggggacactcagctggaggagggccggaaggagccggaggcccctggggaaatgcctgccccagctgtgcacctggcctccccgcaggccgaaagcacagccctgccaccctgtgagctggaaaccaccgtggtctcctcctcagacctgcattctcaagaggtggtttcagatgattttttgttgaaaaatgatacctcctccgcagaggctcatgctgctcctgagaagcccccagacatgcagcacagaagctcagtccagacgcaaggtgaagtgatcacactactgctgtccaaggcccagagtgctgggtcagatcaggaaagccatggcgcccagagccccctaggggaagggcagaacatggctgtgctttcagctggtgacccagatcccagcaggtgtctcaggtcaaacccagctgaggcctcagacctcctccctccagtagctggtggtggggacaccatcacacatcagcctgactcttgcaaagctgcccctgagcaccggtcaggcatcaccgctttcatgaaggtcctgaacagtttacagaagaagcaaatgaacaccagcttgtgtgagcggatccggaaggtttatggagacctggagtgtgaatactgtggcaaacttttttggtaccaagtgcattttgatatgcatgtccgcacccacacccgggaacatctgtattattgctctcagtgtcattattcttccatcaccaaaaactgccttaaacgccacgtaattcagaaacacagtaacatcttgctgaagtgtcccaccgatggctgtgactactcaactccagataaatataagctacaggcacatcttaaagttcacacagcactggacaaaaggagttattcttgtcctgtttgtgaaaagtctttttcagaggatcgattgataaagtcacatatcaagaccaaccatcctgaggtctccatgagcaccatttctgaggttctcgggaggagggttcagctgaaagggctaattggaaagagagccatgaaatgcccatattgtgacttttatttcatgaagaatggctcagaccttcagcgtcatatttgggctcatgaaggtgtgaagcccttcaagtgttctttgtgtgagtatgcaactcgtagcaagagtaacctcaaggctcatatgaatcgtcacagcactgagaaaacccacctatgtgacatgtgtggcaagaaattcaaatcaaaagggacactgaaaagtcacaaactccttcacactgcagatgggaagcagtttaagtgcacggtgtgtgactacacagcggcccagaagccacagctgctgcggcacatggaacagcatgtctccttcaagcctttccgctgtgcccattgccattactcctgcaacatatctggctctctgaagcggcactacaacaggaagcaccctaatgaggagtatgccaacgtgggcaccggggagctggcagcggaggtgctcatccagcaaggtggtttgaagtgtcctgtttgcagctttgtatatggcaccaaatgggagttcaataggcacttgaagaacaaacatggcttgaaggtggtggaaattgatggagaccccaagtgggagacagcaacagaagctcctgaggagccctccacccagtatctccacatcacagaggccgaagaagacgttcaagggacacaggcagcggtggccgcgctccaggacctgagatacacctctgagagtggcgaccgactggaccccacggccgtgaacatcctgcagcagatcattgagctgggcgccgagacccatgacgccactgcccttgcctcggtggttgccatggcaccagggacggtgactgtggttaagcaggtcaccgaggaggagcccagctccaaccacacggtcatgatccaggagacggtccagcaagcgtccgtggagcttgccgagcagcaccacctggtggtgtcctccgacgacgtggagggcattgagacggtgactgtctacacgcagggcggggaggcctcggagttcatcgtctacgtgcaggaggccatgcagcctgtggaggagcaggctgtggagcagccggcccaggaactctagaggacatgtggcatcggatggccacagggcggggctgccaggctctgcaggcacccagggtggggaggccacccttcctgccctacccgcagaatggtgctctcctttgccctccctgcccagcagcctgataggactctcctagtccaacttggggtgggcaaggcagtcagcatcaccagcaataccacaggaccctcaccccagcatagacacacaccccctgacccttaccatctgcttcctgaaagacttcagtgtcagctcccctacacacaccccacaccttcaccccttgcttcaagattcaaacagagactcccagtccccctcagcatcttccctgaatcacagccccagctccttgacccccatctaggtgccaaatgttcatctgcaaccgctatgcagtctggtgagagggagacagccatcacatagaaagtgaccgtacgggtttttaatcactgctgggtggggtgggggtagggggattgtcctggctttgtcgacaaagtcccacttccccgagtattaagggcccttggtatcaagtgaggtaaattcacccatcacagggtctcgccctaccatcctggaattatttcacttttaagataaatgcactatttcactgttcgcctcccattctaaggaggtgaggtggttggaataaaaacagttcctgtc

SEQ ID NO: 200924 - DNA, 4421 bp, Homo sapiens
  Payload ID: 19659
  Gene Name: zinc finger and AT hook domain containing
  ENST ID: ENST00000429442
  CDS Start-End: 146-3616
gagagtgcaggagtctgagaagaaagggtgtagatggagaggcggtggcctcacctctgcatgctccgtgggaagcggcggaggcgcccagcatccctcctactctgcccttggtggaggtttacgagaaaacacggccatctttatgtgtaaatgttgtaacctcttctcaccaaatcagtcggaactcctctcccacgtttcagagaagcacatggaagaaggggttaatgttgatgagattattattccccttaggcctctgagtacacctgaaccccccaactcaagcaaaaccggagatgagtttttggtcatgaagaggaagagaggcaggcctaaggggtccacgaagaagtccagcacagaagaggagctggcagaaaacatcgtgagtccgactgaggacagcccgctggctccggaggaagggaacagcctgcctccaagcagcttggagtgtagcaagtgctgtcggaagttctccaacacgcgccagctgcggaagcacatctgcattatcgtgctgaatttgggtgaggaggaaggagaagcaggtaacgagtctgaccttgaactagaaaagaagtgtaaggaagatgatcgggaaaaagcctcgaaaagaccacggtcacagaaaacagagaaagtccagaagatctcaggaaaggaggccagacagctttctggggcgaagaaacccatcataagtgtggttttaactgcacacgaagcaattccaggtgctaccaagattgtgccagtggaggctgggccccctgaaacaggagctacaaattctgagaccacttcagcagacctggtgcctcggagaggctaccaggaatacgccattcagcagacaccttatgagcaaccaatgaagtcaagcaggctaggtcccactcagctcaaaatcttcacttgtgaatactgcaacaaggtcttcaagttcaagcactcgctgcaggcccacctgaggatccacaccaatgaaaagccatacaagtgcccccagtgcagctatgccagtgccatcaaggccaacctcaatgtgcacctgcgcaagcacactggagagaagttcgcctgcgactattgctcgttcacctgcctgagcaagggccacctcaaggtgcacatcgagcgagtgcacaagaagatcaagcagcactgccgcttctgcaagaagaagtactctgacgtcaagaacctcatcaagcacatccgagacgcgcatgacccacaggacaagaaggtcaaagaggccttggacgagctctgcctgatgacgagggagggcaagcggcagctgctctatgactgccacatctgtgagcgcaagttcaagaacgagctggaccgtgaccgccatatgctggtccacggagacaagtggccttttgcctgtgagctctgtggccatggggccaccaagtaccaggcgctggaactgcatgtcaggaagcaccccttcgtgtacgtctgtgccgtctgccgcaagaagttcgtcagctccatcaggctgcgcacccacatcaaagaggtgcacggggctgcccaggaggccttggtcttcaccagttccatcaaccagagcttctgcctcctggaacctggtggggacatccagcaagaagctctgggggaccagctacagctggtggaagaggagtttgccctccagggcgtgaatgcactcaaggaagaggcctgtcctggggacactcagctggaggagggccggaaggagccggaggcccctggggaaatgcctgccccagctgtgcacctggcctccccgcaggccgaaagcacagccctgccaccctgtgagctggaaaccaccgtggtctcctcctcagacctgcattctcaagaggtggtttcagatgattttttgttgaaaaatgatacctcctccgcagaggctcatgctgctcctgagaagcccccagacatgcagcacagaagctcagtccagacgcaaggtgaagtgatcacactactgctgtccaaggcccagagtgctgggtcagatcaggaaagccatggcgcccagagccccctaggggaagggcagaacatggctgtgctttcagctggtgacccagatcccagcaggtgtctcaggtcaaacccagctgaggcctcagacctcctccctccagtagctggtggtggggacaccatcacacatcagcctgactcttgcaaagctgcccctgagcaccggtcaggcatcaccgctttcatgaaggtcctgaacagtttacagaagaagcaaatgaacaccagcttgtgtgagcggatccggaaggtttatggagacctggagtgtgaatactgtggcaaacttttttggtaccaagtgcattttgatatgcatgtccgcacccacacccgggaacatctgtattattgctctcagtgtcattattcttccatcaccaaaaactgccttaaacgccacgtaattcagaaacacagtaacatcttgctgaagtgtcccaccgatggctgtgactactcaactccagataaatataagctacaggcacatcttaaagttcacacagcactggacaaaaggagttattcttgtcctgtttgtgaaaagtctttttcagaggatcgattgataaagtcacatatcaagaccaaccatcctgaggtctccatgagcaccatttctgaggttctcgggaggagggttcagctgaaagggctaattggaaagagagccatgaaatgcccatattgtgacttttatttcatgaagaatggctcagaccttcagcgtcatatttgggctcatgaaggtgtgaagcccttcaagtgttctttgtgtgagtatgcaactcgtagcaagagtaacctcaaggctcatatgaatcgtcacagcactgagaaaacccacctatgtgacatgtgtggcaagaaattcaaatcaaaagggacactgaaaagtcacaaactccttcacactgcagatgggaagcagtttaagtgcacggtgtgtgactacacagcggcccagaagccacagctgctgcggcacatggaacagcatgtctccttcaagcctttccgctgtgcccattgccattactcctgcaacatatctggctctctgaagcggcactacaacaggaagcaccctaatgaggagtatgccaacgtgggcaccggggagctggcagcggaggtgctcatccagcaaggtggtttgaagtgtcctgtttgcagctttgtatatggcaccaaatgggagttcaataggcacttgaagaacaaacatggcttgaaggtggtggaaattgatggagaccccaagtgggagacagcaacagaagctcctgaggagccctccacccagtatctccacatcacagaggccgaagaagacgttcaagggacacaggcagcggtggccgcgctccaggacctgagatacacctctgagagtggcgaccgactggaccccacggccgtgaacatcctgcagcagctccaaccacacggtcatgatccaggagacggtccagcaagcgtccgtggagcttgccgagcagcaccacctggtggtgtcctccgacgacgtggagggcattgagacggtgactgtctacacgcagggcggggaggcctcggagttcatcgtctacgtgcaggaggccatgcagcctgtggaggagcaggctgtggagcagccggcccaggaactctagaggacatgtggcatcggatggccacagggcggggctgccaggctctgcaggcacccagggtggggaggccacccttcctgccctacccgcagaatggtgctctcctttgccctccctgcccagcagcctgataggactctcctagtccaacttggggtgggcaaggcagtcagcatcaccagcaataccacaggaccctcaccccagcatagacacacaccccctgacccttaccatctgcttcctgaaagacttcagtgtcagctcccctacacacaccccacaccttcaccccttgcttcaagattcaaacagagactcccagtccccctcagcatcttccctgaatcacagccccagctccttgacccccatctaggtgccaaatgttcatctgcaaccgctatgcagtctggtgagagggagacagccatcacatagaaagtgaccgtacgggtttttaatcactgctgggtggggtgggggtagggggattgtcctggctttgtcgacaaagtcccacttccccgagtattaagggcccttggtatcaagtgaggtaaattcacccatcacagggtctcgccctaccatcctggaattatttcacttttaagataaatgcactatttcactgttcgcctcccattctaaggaggtgaggtggttggaataaaaacagttcctgtc

SEQ ID NO: 200925 - DNA, 4686 bp, Homo sapiens
  Payload ID: 19659
  Gene Name: zinc finger and AT hook domain containing
  Uniprot ID: Q9P243
  ENST ID: ENST00000520727
  CDS Start-End: 301-3996
gtgcaggagtctgagaagaaagggtgtagatggagaggcggtggcctcacctctgcatgctccgtgggaagcggcggaggcgcccagcatccctcctactctgcccttggtggaggtttacgaggtctgctggagtttgctggaggtccgctccataccctgtttgcctgggtatcaccagtggaggctgcagaacaacaaagattgctgcctgttcctgcctctggaagcttcgtcccagaggggcacctgccagatgccagccagagctctcctgtatgagaaaacacggccatctttatgtgtaaatgttgtaacctcttctcaccaaatcagtcggaactcctctcccacgtttcagagaagcacatggaagaaggggttaatgttgatgagattattattccccttaggcctctgagtacacctgaaccccccaactcaagcaaaaccggagatgagtttttggtcatgaagaggaagagaggcaggcctaaggggtccacgaagaagtccagcacagaagaggagctggcagaaaacatcgtgagtccgactgaggacagcccgctggctccggaggaagggaacagcctgcctccaagcagcttggagtgtagcaagtgctgtcggaagttctccaacacgcgccagctgcggaagcacatctgcattatcgtgctgaatttgggtgaggaggaaggagaagcaggtaacgagtctgaccttgaactagaaaagaagtgtaaggaagatgatcgggaaaaagcctcgaaaagaccacggtcacagaaaacagagaaagtccagaagatctcaggaaaggaggccagacagctttctggggcgaagaaacccatcataagtgtggttttaactgcacacgaagcaattccaggtgctaccaagattgtgccagtggaggctgggccccctgaaacaggagctacaaattctgagaccacttcagcagacctggtgcctcggagaggctaccaggaatacgccattcagcagacaccttatgagcaaccaatgaagtcaagcaggctaggtcccactcagctcaaaatcttcacttgtgaatactgcaacaaggtcttcaagttcaagcactcgctgcaggcccacctgaggatccacaccaatgaaaagccatacaagtgcccccagtgcagctatgccagtgccatcaaggccaacctcaatgtgcacctgcgcaagcacactggagagaagttcgcctgcgactattgctcgttcacctgcctgagcaagggccacctcaaggtgcacatcgagcgagtgcacaagaagatcaagcagcactgccgcttctgcaagaagaagtactctgacgtcaagaacctcatcaagcacatccgagacgcgcatgacccacaggacaagaaggtcaaagaggccttggacgagctctgcctgatgacgagggagggcaagcggcagctgctctatgactgccacatctgtgagcgcaagttcaagaacgagctggaccgtgaccgccatatgctggtccacggagacaagtggccttttgcctgtgagctctgtggccatggggccaccaagtaccaggcgctggaactgcatgtcaggaagcaccccttcgtgtacgtctgtgccgtctgccgcaagaagttcgtcagctccatcaggctgcgcacccacatcaaagaggtgcacggggctgcccaggaggccttggtcttcaccagttccatcaaccagagcttctgcctcctggaacctggtggggacatccagcaagaagctctgggggaccagctacagctggtggaagaggagtttgccctccagggcgtgaatgcactcaaggaagaggcctgtcctggggacactcagctggaggagggccggaaggagccggaggcccctggggaaatgcctgccccagctgtgcacctggcctccccgcaggccgaaagcacagccctgccaccctgtgagctggaaaccaccgtggtctcctcctcagacctgcattctcaagaggtggtttcagatgattttttgttgaaaaatgatacctcctccgcagaggctcatgctgctcctgagaagcccccagacatgcagcacagaagctcagtccagacgcaaggtgaagtgatcacactactgctgtccaaggcccagagtgctgggtcagatcaggaaagccatggcgcccagagccccctaggggaagggcagaacatggctgtgctttcagctggtgacccagatcccagcaggtgtctcaggtcaaacccagctgaggcctcagacctcctccctccagtagctggtggtggggacaccatcacacatcagcctgactcttgcaaagctgcccctgagcaccggtcaggcatcaccgctttcatgaaggtcctgaacagtttacagaagaagcaaatgaacaccagcttgtgtgagcggatccggaaggtttatggagacctggagtgtgaatactgtggcaaacttttttggtaccaagtgcattttgatatgcatgtccgcacccacacccgggaacatctgtattattgctctcagtgtcattattcttccatcaccaaaaactgccttaaacgccacgtaattcagaaacacagtaacatcttgctgaagtgtcccaccgatggctgtgactactcaactccagataaatataagctacaggcacatcttaaagttcacacagcactggacaaaaggagttattcttgtcctgtttgtgaaaagtctttttcagaggatcgattgataaagtcacatatcaagaccaaccatcctgaggtctccatgagcaccatttctgaggttctcgggaggagggttcagctgaaagggctaattggaaagagagccatgaaatgcccatattgtgacttttatttcatgaagaatggctcagaccttcagcgtcatatttgggctcatgaaggtgtgaagcccttcaagtgttctttgtgtgagtatgcaactcgtagcaagagtaacctcaaggctcatatgaatcgtcacagcactgagaaaacccacctatgtgacatgtgtggcaagaaattcaaatcaaaagggacactgaaaagtcacaaactccttcacactgcagatgggaagcagtttaagtgcacggtgtgtgactacacagcggcccagaagccacagctgctgcggcacatggaacagcatgtctccttcaagcctttccgctgtgcccattgccattactcctgcaacatatctggctctctgaagcggcactacaacaggaagcaccctaatgaggagtatgccaacgtgggcaccggggagctggcagcggaggtgctcatccagcaaggtggtttgaagtgtcctgtttgcagctttgtatatggcaccaaatgggagttcaataggcacttgaagaacaaacatggcttgaaggtggtggaaattgatggagaccccaagtgggagacagcaacagaagctcctgaggagccctccacccagtatctccacatcacagaggccgaagaagacgttcaagggacacaggcagcggtggccgcgctccaggacctgagatacacctctgagagtggcgaccgactggaccccacggccgtgaacatcctgcagcagatcattgagctgggcgccgagacccatgacgccactgcccttgcctcggtggttgccatggcaccagggacggtgactgtggttaagcaggtcaccgaggaggagcccagctccaaccacacggtcatgatccaggagacggtccagcaagcgtccgtggagcttgccgagcagcaccacctggtggtgtcctccgacgacgtggagggcattgagacggtgactgtctacacgcagggcggggaggcctcggagttcatcgtctacgtgcaggaggccatgcagcctgtggaggagcaggctgtggagcagccggcccaggaactctagaggacatgtggcatcggatggccacagggcggggctgccaggctctgcaggcacccagggtggggaggccacccttcctgccctacccgcagaatggtgctctcctttgccctccctgcccagcagcctgataggactctcctagtccaacttggggtgggcaaggcagtcagcatcaccagcaataccacaggaccctcaccccagcatagacacacaccccctgacccttaccatctgcttcctgaaagacttcagtgtcagctcccctacacacaccccacaccttcaccccttgcttcaagattcaaacagagactcccagtccccctcagcatcttccctgaatcacagccccagctccttgacccccatctaggtgccaaatgttcatctgcaaccgctatgcagtctggtgagagggagacagccatcacatagaaagtgaccgtacgggtttttaatcactgctgggtggggtgggggtagggggattgtcctggctttgtcgacaaagtcccacttccccgagtattaagggcccttggtatcaagtgaggtaaattcacccatcacagggtctcgccctaccatcctggaattatttcacttttaagataaatgcactatttcactgttcgcctcccattctaaggaggtgaggtggttggaataaaaacagttcctgtc

SEQ ID NO: 200926 - DNA, 4273 bp, Homo sapiens
  Payload ID: 19659
  Gene Name: zinc finger and AT hook domain containing
  ENST ID: ENST00000520356
  CDS Start-End: 142-3579
gtgcaggagtctgagaagaaagggtgtagatggagaggcggtggcctcacctctgcatgctccgtgggaagcggcggaggcgcccagcatccctcctactctgcccttggtggaggtttacgagaaaacacggccatctttatgtgtaaatgttgtaacctcttctcaccaaatcagtcggaactcctctcccacgtttcagagaagcacatggaagaaggggttaatgttgatgagattattattccccttaggcctctgagtacacctgaaccccccaactcaagcaaaaccggagatgagtttttggtcatgaagaggaagagaggcaggcctaaggggtccacgaagaagtccagcacagaagaggagctggcagaaaacatcgtgagtccgactgaggacagcccgctggctccggaggaagggaacagcctgcctccaagcagcttggagtgtagcaagtgctgtcggaagttctccaacacgcgccagctgcggaagcacatctgcattatcgtgctgaatttgggtgaggaggaaggagaagcaggtaacgagtctgaccttgaactagaaaagaagtgtaaggaagatgatcgggaaaaagcctcgaaaagaccacggtcacagaaaacagagaaagtccagaagatctcaggaaaggaggccagacagctttctggggcgaagaaacccatcataagtgtggttttaactgcacacgaagcaattccaggtgctaccaagattgtgccagtggaggctgggccccctgaaacaggagctacaaattctgagaccacttcagcagacctggtgcctcggagaggctaccaggaatacgccattcagcagacaccttatgagcaaccaatgaagtcaagcaggctaggtcccactcagctcaaaatcttcacttgtgaatactgcaacaaggtcttcaagttcaagcactcgctgcaggcccacctgaggatccacaccaatgaaaagccatacaagtgcccccagtgcagctatgccagtgccatcaaggccaacctcaatgtgcacctgcgcaagcacactggagagaagttcgcctgcgactattgctcgttcacctgcctgagcaagggccacctcaaggtgcacatcgagcgagtgcacaagaagatcaagcagcactgccgcttctgcaagaagaagtactctgacgtcaagaacctcatcaagcacatccgagacgcgcatgacccacaggacaagaaggtcaaagaggccttggacgagctctgcctgatgacgagggagggcaagcggcagctgctctatgactgccacatctgtgagcgcaagttcaagaacgagctggaccgtgaccgccatatgctggtccacggagacaagtggccttttgcctgtgagctctgtggccatggggccaccaagtaccaggcgctggaactgcatgtcaggaagcaccccttcgtgtacgtctgtgccgtctgccgcaagaagttcgtcagctccatcaggctgcgcacccacatcaaagaggtgcacggggctgcccaggaggccttggtcttcaccagttccatcaaccagagcttctgcctcctggaacctggtggggacatccagcaagaagctctgggggaccagctacagctggtggaagaggagtttgccctccagggcgtgaatgcactcaaggaagaggcctgtcctggggacactcagctggaggagggccggaaggagccggaggcccctggggaaatgcctgccccagctgtgcacctggcctccccgcaggccgaaagcacagccctgccaccctgtgagctggaaaccaccgtggtctcctcctcagacctgcattctcaagaggtggtttcagatgattttttgttgaaaaatgatacctcctccgcagaggctcatgctgctcctgagaagcccccagacatgcagcacagaagctcagtccagacgcaaggtgaagtgatcacactactgctgtccaaggcccagagtgctgggtcagatcaggaaagccatggcgcccagagccccctaggggaagggcagaacatggctgtgctttcagctggtgacccagatcccagcaggtgtctcaggtcaaacccagctgaggcctcagacctcctccctccagtagctggtggtggggacaccatcacacatcagcctgactcttgcaaagctgcccctgagcaccggtcaggcatcaccgctttcatgaaggtcctgaacagtttacagaagaagcaaatgaacaccagcttgtgtgagcggatccggaaggtttatggagacctggagtgtgaatactgtggcaaacttttttggtaccaagtgcattttgatatgcatgtccgcacccacacccgggaacatctgtattattgctctcagtgtcattattcttccatcaccaaaaactgccttaaacgccacgtaattcagaaacacagtaacatcttgctgaagtgtcccaccgatggctgtgactactcaactccagataaatataagctacaggcacatcttaaagttcacacagcactggacaaaaggagttattcttgtcctgtttgtgaaaagtctttttcagaggatcgattgataaagtcacatatcaagaccaaccatcctgaggtctccatgagcaccatttctgaggttctcgggaggagggttcagctgaaagggctaattggaaagagagccatgaaatgcccatattgtgacttttatttcatgaagaatggctcagaccttcagcgtcatatttgggctcatgaaggtgtgaagcccttcaagtgttctttgtgtgagtatgcaactcgtagcaagagtaacctcaaggctcatatgaatcgtcacagcactgagaaaacccacctatgtgacatgtgtggcaagaaattcaaatcaaaagggacactgaaaagtcacaaactccttcacactgcagatgggaagcagtttaagtgcacggtgtgtgactacacagcggcccagaagccacagctgctgcggcacatggaacagcatgtctccttcaagcctttccgctgtgcccattgccattactcctgcaacatatctggctctctgaagcggcactacaacaggaagcaccctaatgaggagtatgccaacgtgggcaccggggagctggcagcggaggtgctcatccagcaaggtggtttgaagtgtcctgtttgcagctttgtatatggcaccaaatgggagttcaataggcacttgaagaacaaacatggcttgaaggtggtggaaattgatggagaccccaagtgggaggtcaccgaggaggagcccagctccaaccacacggtcatgatccaggagacggtccagcaagcgtccgtggagcttgccgagcagcaccacctggtggtgtcctccgacgacgtggagggcattgagacggtgactgtctacacgcagggcggggaggcctcggagttcatcgtctacgtgcaggaggccatgcagcctgtggaggagcaggctgtggagcagccggcccaggaactctagaggacatgtggcatcggatggccacagggcggggctgccaggctctgcaggcacccagggtggggaggccacccttcctgccctacccgcagaatggtgctctcctttgccctccctgcccagcagcctgataggactctcctagtccaacttggggtgggcaaggcagtcagcatcaccagcaataccacaggaccctcaccccagcatagacacacaccccctgacccttaccatctgcttcctgaaagacttcagtgtcagctcccctacacacaccccacaccttcaccccttgcttcaagattcaaacagagactcccagtccccctcagcatcttccctgaatcacagccccagctccttgacccccatctaggtgccaaatgttcatctgcaaccgctatgcagtctggtgagagggagacagccatcacatagaaagtgaccgtacgggtttttaatcactgctgggtggggtgggggtagggggattgtcctggctttgtcgacaaagtcccacttccccgagtattaagggcccttggtatcaagtgaggtaaattcacccatcacagggtctcgccctaccatcctggaattatttcacttttaagataaatgcactatttcactgttcgcctcccattctaaggaggtgaggtggttggaataaaaacagttcctgtctgaa

SEQ ID NO: 200927 - DNA, 594 bp, Homo sapiens
  Payload ID: 19659
  Gene Name: zinc finger and AT hook domain containing
  ENST ID: ENST00000518191
  CDS Start-End: 144-594
gagtgcaggagtctgagaagaaagggtgtagatggagaggcggtggcctcacctctgcatgctccgtgggaagcggcggaggcgcccagcatccctcctactctgcccttggtggaggtttacgagaaaacacggccatctttatgtgtaaatgttgtaacctcttctcaccaaatcagtcggaactcctctcccacgtttcagagaagcacatggaagaaggggttaatgttgatgagattattattccccttaggcctctgagtacacctgaaccccccaactcaagcaaaaccggagatgagtttttggtcatgaagaggaagagaggcaggcctaaggggtccacgaagaagtccagcacagaagaggagctggcagaaaacatcgtgagtccgactgaggacagcccgctggctccggaggaagggaacagcctgcctccaagcagcttggagtgtagcaagtgctgtcggaagttctccaacacgcgccagctgcggaagcacatctgcattatcgtgctgaatttgggtgaggaggaaggagaagcaggtgctaccaagattgtgccagtggaggctgggccccctg

SEQ ID NO: 200928 - DNA, 4294 bp, Homo sapiens
  Payload ID: 19659
  Gene Name: zinc finger and AT hook domain containing
  Uniprot ID: Q9P243
  ENST ID: ENST00000520214
  CDS Start-End: 142-3837
gtgcaggagtctgagaagaaagggtgtagatggagaggcggtggcctcacctctgcatgctccgtgggaagcggcggaggcgcccagcatccctcctactctgcccttggtggaggtttacgagaaaacacggccatctttatgtgtaaatgttgtaacctcttctcaccaaatcagtcggaactcctctcccacgtttcagagaagcacatggaagaaggggttaatgttgatgagattattattccccttaggcctctgagtacacctgaaccccccaactcaagcaaaaccggagatgagtttttggtcatgaagaggaagagaggcaggcctaaggggtccacgaagaagtccagcacagaagaggagctggcagaaaacatcgtgagtccgactgaggacagcccgctggctccggaggaagggaacagcctgcctccaagcagcttggagtgtagcaagtgctgtcggaagttctccaacacgcgccagctgcggaagcacatctgcattatcgtgctgaatttgggtgaggaggaaggagaagcaggtaacgagtctgaccttgaactagaaaagaagtgtaaggaagatgatcgggaaaaagcctcgaaaagaccacggtcacagaaaacagagaaagtccagaagatctcaggaaaggaggccagacagctttctggggcgaagaaacccatcataagtgtggttttaactgcacacgaagcaattccaggtgctaccaagattgtgccagtggaggctgggccccctgaaacaggagctacaaattctgagaccacttcagcagacctggtgcctcggagaggctaccaggaatacgccattcagcagacaccttatgagcaaccaatgaagtcaagcaggctaggtcccactcagctcaaaatcttcacttgtgaatactgcaacaaggtcttcaagttcaagcactcgctgcaggcccacctgaggatccacaccaatgaaaagccatacaagtgcccccagtgcagctatgccagtgccatcaaggccaacctcaatgtgcacctgcgcaagcacactggagagaagttcgcctgcgactattgctcgttcacctgcctgagcaagggccacctcaaggtgcacatcgagcgagtgcacaagaagatcaagcagcactgccgcttctgcaagaagaagtactctgacgtcaagaacctcatcaagcacatccgagacgcgcatgacccacaggacaagaaggtcaaagaggccttggacgagctctgcctgatgacgagggagggcaagcggcagctgctctatgactgccacatctgtgagcgcaagttcaagaacgagctggaccgtgaccgccatatgctggtccacggagacaagtggccttttgcctgtgagctctgtggccatggggccaccaagtaccaggcgctggaactgcatgtcaggaagcaccccttcgtgtacgtctgtgccgtctgccgcaagaagttcgtcagctccatcaggctgcgcacccacatcaaagaggtgcacggggctgcccaggaggccttggtcttcaccagttccatcaaccagagcttctgcctcctggaacctggtggggacatccagcaagaagctctgggggaccagctacagctggtggaagaggagtttgccctccagggcgtgaatgcactcaaggaagaggcctgtcctggggacactcagctggaggagggccggaaggagccggaggcccctggggaaatgcctgccccagctgtgcacctggcctccccgcaggccgaaagcacagccctgccaccctgtgagctggaaaccaccgtggtctcctcctcagacctgcattctcaagaggtggtttcagatgattttttgttgaaaaatgatacctcctccgcagaggctcatgctgctcctgagaagcccccagacatgcagcacagaagctcagtccagacgcaaggtgaagtgatcacactactgctgtccaaggcccagagtgctgggtcagatcaggaaagccatggcgcccagagccccctaggggaagggcagaacatggctgtgctttcagctggtgacccagatcccagcaggtgtctcaggtcaaacccagctgaggcctcagacctcctccctccagtagctggtggtggggacaccatcacacatcagcctgactcttgcaaagctgcccctgagcaccggtcaggcatcaccgctttcatgaaggtcctgaacagtttacagaagaagcaaatgaacaccagcttgtgtgagcggatccggaaggtttatggagacctggagtgtgaatactgtggcaaacttttttggtaccaagtgcattttgatatgcatgtccgcacccacacccgggaacatctgtattattgctctcagtgtcattattcttccatcaccaaaaactgccttaaacgccacgtaattcagaaacacagtaacatcttgctgaagtgtcccaccgatggctgtgactactcaactccagataaatataagctacaggcacatcttaaagttcacacagcactggacaaaaggagttattcttgtcctgtttgtgaaaagtctttttcagaggatcgattgataaagtcacatatcaagaccaaccatcctgaggtctccatgagcaccatttctgaggttctcgggaggagggttcagctgaaagggctaattggaaagagagccatgaaatgcccatattgtgacttttatttcatgaagaatggctcagaccttcagcgtcatatttgggctcatgaaggtgtgaagcccttcaagtgttctttgtgtgagtatgcaactcgtagcaagagtaacctcaaggctcatatgaatcgtcacagcactgagaaaacccacctatgtgacatgtgtggcaagaaattcaaatcaaaagggacactgaaaagtcacaaactccttcacactgcagatgggaagcagtttaagtgcacggtgtgtgactacacagcggcccagaagccacagctgctgcggcacatggaacagcatgtctccttcaagcctttccgctgtgcccattgccattactcctgcaacatatctggctctctgaagcggcactacaacaggaagcaccctaatgaggagtatgccaacgtgggcaccggggagctggcagcggaggtgctcatccagcaaggtggtttgaagtgtcctgtttgcagctttgtatatggcaccaaatgggagttcaataggcacttgaagaacaaacatggcttgaaggtggtggaaattgatggagaccccaagtgggagacagcaacagaagctcctgaggagccctccacccagtatctccacatcacagaggccgaagaagacgttcaagggacacaggcagcggtggccgcgctccaggacctgagatacacctctgagagtggcgaccgactggaccccacggccgtgaacatcctgcagcagatcattgagctgggcgccgagacccatgacgccactgcccttgcctcggtggttgccatggcaccagggacggtgactgtggttaagcaggtcaccgaggaggagcccagctccaaccacacggtcatgatccaggagacggtccagcaagcgtccgtggagcttgccgagcagcaccacctggtggtgtcctccgacgacgtggagggcattgagacggtgactgtctacacgcagggcggggaggcctcggagttcatcgtctacgtgcaggaggccatgcagcctgtggaggagcaggctgtggagcagccggcccaggaactctagaggacatgtggcatcggatggccacagggcggggctgccaggctctgcaggcacccagggtggggaggccacccttcctgccctacccgcagaatggtgctctcctttgccctccctgcccagcagcctgataggactctcctagtccaacttggggtgggcaaggcagtcagcatcaccagcaataccacaggaccctcaccccagcatagacacacaccccctgacccttaccatctgcttcctgaaagacttcagtgtcagctcccctacacacaccccacaccttcaccccttgcttcaagattcaaacagagactcccagtccccctcagcatcttccctgaatcacagccccagctccttgacccccatctaggtgccaaatgttcatctgcaaccgctatgcagtctggtgagagggagacagccatcacatagaaagtgaccgtacggg

SEQ ID NO: 200929 - DNA, 4756 bp, Homo sapiens
  Payload ID: 19659
  Gene Name: zinc finger and AT hook domain containing
  ENST ID: ENST00000523924
  CDS Start-End: 176-352
agactccatccgccatgttggatgccgcagattcgccataacctcgccggctcttttcttaaaaaaataaaaataaaaagcgaagcgtcagcagggcgccccgccccctcggtcggcacgggagggggcccggaagagcccgaggcttttttttcctccgcggtggggcgttgccatggagacgcgggcggcaggtctgctggagtttgctggaggtccgctccataccctgtttgcctgggtatcaccagtggaggctgcagaacaacaaagattgctgcctgttcctgcctctggaagcttcgtcccagaggggcacctgccagatgccagccagagctctcctgtatgagaaaacacggccatctttatgtgtaaatgttgtaacctcttctcaccaaatcagtcggaactcctctcccacgtttcagagaagcacatggaagaaggggttaatgttgatgagattattattccccttaggcctctgagtacacctgaaccccccaactcaagcaaaaccggagatgagtttttggtcatgaagaggaagagaggcaggcctaaggggtccacgaagaagtccagcacagaagaggagctggcagaaaacatcgtgagtccgactgaggacagcccgctggctccggaggaagggaacagcctgcctccaagcagcttggagtgtagcaagtgctgtcggaagttctccaacacgcgccagctgcggaagcacatctgcattatcgtgctgaatttgggtgaggaggaaggagaagcaggtaacgagtctgaccttgaactagaaaagaagtgtaaggaagatgatcgggaaaaagcctcgaaaagaccacggtcacagaaaacagagaaagtccagaagatctcaggaaaggaggccagacagctttctggggcgaagaaacccatcataagtgtggttttaactgcacacgaagcaattccaggtgctaccaagattgtgccagtggaggctgggccccctgaaacaggagctacaaattctgagaccacttcagcagacctggtgcctcggagaggctaccaggaatacgccattcagcagacaccttatgagcaaccaatgaagtcaagcaggctaggtcccactcagctcaaaatcttcacttgtgaatactgcaacaaggtcttcaagttcaagcactcgctgcaggcccacctgaggatccacaccaatgaaaagccatacaagtgcccccagtgcagctatgccagtgccatcaaggccaacctcaatgtgcacctgcgcaagcacactggagagaagttcgcctgcgactattgctcgttcacctgcctgagcaagggccacctcaaggtgcacatcgagcgagtgcacaagaagatcaagcagcactgccgcttctgcaagaagaagtactctgacgtcaagaacctcatcaagcacatccgagacgcgcatgacccacaggacaagaaggtcaaagaggccttggacgagctctgcctgatgacgagggagggcaagcggcagctgctctatgactgccacatctgtgagcgcaagttcaagaacgagctggaccgtgaccgccatatgctggtccacggagacaagtggccttttgcctgtgagctctgtggccatggggccaccaagtaccaggcgctggaactgcatgtcaggaagcaccccttcgtgtacgtctgtgccgtctgccgcaagaagttcgtcagctccatcaggctgcgcacccacatcaaagaggtgcacggggctgcccaggaggccttggtcttcaccagttccatcaaccagagcttctgcctcctggaacctggtggggacatccagcaagaagctctgggggaccagctacagctggtggaagaggagtttgccctccagggcgtgaatgcactcaaggaagaggcctgtcctggggacactcagctggaggagggccggaaggagccggaggcccctggggaaatgcctgccccagctgtgcacctggcctccccgcaggccgaaagcacagccctgccaccctgtgagctggaaaccaccgtggtctcctcctcagacctgcattctcaagaggtggtttcagatgattttttgttgaaaaatgatacctcctccgcagaggctcatgctgctcctgagaagcccccagacatgcagcacagaagctcagtccagacgcaaggtgaagtgatcacactactgctgtccaaggcccagagtgctgggtcagatcaggaaagccatggcgcccagagccccctaggggaagggcagaacatggctgtgctttcagctggtgacccagatcccagcaggtgtctcaggtcaaacccagctgaggcctcagacctcctccctccagtagctggtggtggggacaccatcacacatcagcctgactcttgcaaagctgcccctgagcaccggtcaggcatcaccgctttcatgaaggtcctgaacagtttacagaagaagcaaatgaacaccagcttgtgtgagcggatccggaaggtttatggagacctggagtgtgaatactgtggcaaacttttttggtaccaagtgcattttgatatgcatgtccgcacccacacccgggaacatctgtattattgctctcagtgtcattattcttccatcaccaaaaactgccttaaacgccacgtaattcagaaacacagtaacatcttgctgaagtgtcccaccgatggctgtgactactcaactccagataaatataagctacaggcacatcttaaagttcacacagcactggacaaaaggagttattcttgtcctgtttgtgaaaagtctttttcagaggatcgattgataaagtcacatatcaagaccaaccatcctgaggtctccatgagcaccatttctgaggttctcgggaggagggttcagctgaaagggctaattggaaagagagccatgaaatgcccatattgtgacttttatttcatgaagaatggctcagaccttcagcgtcatatttgggctcatgaaggtgtgaagcccttcaagtgttctttgtgtgagtatgcaactcgtagcaagagtaacctcaaggctcatatgaatcgtcacagcactgagaaaacccacctatgtgacatgtgtggcaagaaattcaaatcaaaagggacactgaaaagtcacaaactccttcacactgcagatgggaagcagtttaagtgcacggtgtgtgactacacagcggcccagaagccacagctgctgcggcacatggaacagcatgtctccttcaagcctttccgctgtgcccattgccattactcctgcaacatatctggctctctgaagcggcactacaacaggaagcaccctaatgaggagtatgccaacgtgggcaccggggagctggcagcggaggtgctcatccagcaaggtggtttgaagtgtcctgtttgcagctttgtatatggcaccaaatgggagttcaataggcacttgaagaacaaacatggcttgaaggtggtggaaattgatggagaccccaagtgggagacagcaacagaagctcctgaggagccctccacccagtatctccacatcacagaggccgaagaagacgttcaagggacacaggcagcggtggccgcgctccaggacctgagatacacctctgagagtggcgaccgactggaccccacggccgtgaacatcctgcagcagatcattgagctgggcgccgagacccatgacgccactgcccttgcctcggtggttgccatggcaccagggacggtgactgtggttaagcaggtcaccgaggaggagcccagctccaaccacacggtcatgatccaggagacggtccagcaagcgtccgtggagcttgccgagcagcaccacctggtggtgtcctccgacgacgtggagggcattgagacggtgactgtctacacgcagggcggggaggcctcggagttcatcgtctacgtgcaggaggccatgcagcctgtggaggagcaggctgtggagcagccggcccaggaactctagaggacatgtggcatcggatggccacagggcggggctgccaggctctgcaggcacccagggtggggaggccacccttcctgccctacccgcagaatggtgctctcctttgccctccctgcccagcagcctgataggactctcctagtccaacttggggtgggcaaggcagtcagcatcaccagcaataccacaggaccctcaccccagcatagacacacaccccctgacccttaccatctgcttcctgaaagacttcagtgtcagctcccctacacacaccccacaccttcaccccttgcttcaagattcaaacagagactcccagtccccctcagcatcttccctgaatcacagccccagctccttgacccccatctaggtgccaaatgttcatctgcaaccgctatgcagtctggtgagagggagacagccatcacatagaaagtgaccgtacgggtttttaatcactgctgggtggggtgggggtagggggattgtcctggctttgtcgacaaagtcccacttccccgagtattaagggcccttggtatcaagtgaggtaaattcacccatcacagggtctcgccctaccatcctggaattatttcacttttaagataaatgcactatttcactgttcgcctcccattctaaggaggtgaggtggttggaataaaaacagttcctgtc

SEQ ID NO: 200930 - DNA, 3734 bp, Homo sapiens
  Payload ID: 19659
  Gene Name: zinc finger and AT hook domain containing
  Uniprot ID: Q9P243
  ENST ID: ENST00000523399
  CDS Start-End: 100-3645
aaagcgaagcgtcagcagggcgccccgccccctcggtcggcacgggagggggcccggaagagcccgaggcttttttttcctccgcggtggggcgttgccatggagacgcgggcggcagaaaacacggccatctttatgtgtaaatgttgtaacctcttctcaccaaatcagtcggaactcctctcccacgtttcagagaagcacatggaagaaggggttaatgttgatgagattattattccccttaggcctctgagtacacctgaaccccccaactcaagcaaaaccggagatgagtttttggtcatgaagaggaagagaggcaggcctaaggggtccacgaagaagtccagcacagaagaggagctggcagaaaacatcgtgagtccgactgaggacagcccgctggctccggaggaagggaacagcctgcctccaagcagcttggagtgtagcaagtgctgtcggaagttctccaacacgcgccagctgcggaagcacatctgcattatcgtgctgaatttgggtgaggaggaaggagaagcaggtgctaccaagattgtgccagtggaggctgggccccctgaaacaggagctacaaattctgagaccacttcagcagacctggtgcctcggagaggctaccaggaatacgccattcagcagacaccttatgagcaaccaatgaagtcaagcaggctaggtcccactcagctcaaaatcttcacttgtgaatactgcaacaaggtcttcaagttcaagcactcgctgcaggcccacctgaggatccacaccaatgaaaagccatacaagtgcccccagtgcagctatgccagtgccatcaaggccaacctcaatgtgcacctgcgcaagcacactggagagaagttcgcctgcgactattgctcgttcacctgcctgagcaagggccacctcaaggtgcacatcgagcgagtgcacaagaagatcaagcagcactgccgcttctgcaagaagaagtactctgacgtcaagaacctcatcaagcacatccgagacgcgcatgacccacaggacaagaaggtcaaagaggccttggacgagctctgcctgatgacgagggagggcaagcggcagctgctctatgactgccacatctgtgagcgcaagttcaagaacgagctggaccgtgaccgccatatgctggtccacggagacaagtggccttttgcctgtgagctctgtggccatggggccaccaagtaccaggcgctggaactgcatgtcaggaagcaccccttcgtgtacgtctgtgccgtctgccgcaagaagttcgtcagctccatcaggctgcgcacccacatcaaagaggtgcacggggctgcccaggaggccttggtcttcaccagttccatcaaccagagcttctgcctcctggaacctggtggggacatccagcaagaagctctgggggaccagctacagctggtggaagaggagtttgccctccagggcgtgaatgcactcaaggaagaggcctgtcctggggacactcagctggaggagggccggaaggagccggaggcccctggggaaatgcctgccccagctgtgcacctggcctccccgcaggccgaaagcacagccctgccaccctgtgagctggaaaccaccgtggtctcctcctcagacctgcattctcaagaggtggtttcagatgattttttgttgaaaaatgatacctcctccgcagaggctcatgctgctcctgagaagcccccagacatgcagcacagaagctcagtccagacgcaaggtgaagtgatcacactactgctgtccaaggcccagagtgctgggtcagatcaggaaagccatggcgcccagagccccctaggggaagggcagaacatggctgtgctttcagctggtgacccagatcccagcaggtgtctcaggtcaaacccagctgaggcctcagacctcctccctccagtagctggtggtggggacaccatcacacatcagcctgactcttgcaaagctgcccctgagcaccggtcaggcatcaccgctttcatgaaggtcctgaacagtttacagaagaagcaaatgaacaccagcttgtgtgagcggatccggaaggtttatggagacctggagtgtgaatactgtggcaaacttttttggtaccaagtgcattttgatatgcatgtccgcacccacacccgggaacatctgtattattgctctcagtgtcattattcttccatcaccaaaaactgccttaaacgccacgtaattcagaaacacagtaacatcttgctgaagtgtcccaccgatggctgtgactactcaactccagataaatataagctacaggcacatcttaaagttcacacagcactggacaaaaggagttattcttgtcctgtttgtgaaaagtctttttcagaggatcgattgataaagtcacatatcaagaccaaccatcctgaggtctccatgagcaccatttctgaggttctcgggaggagggttcagctgaaagggctaattggaaagagagccatgaaatgcccatattgtgacttttatttcatgaagaatggctcagaccttcagcgtcatatttgggctcatgaaggtgtgaagcccttcaagtgttctttgtgtgagtatgcaactcgtagcaagagtaacctcaaggctcatatgaatcgtcacagcactgagaaaacccacctatgtgacatgtgtggcaagaaattcaaatcaaaagggacactgaaaagtcacaaactccttcacactgcagatgggaagcagtttaagtgcacggtgtgtgactacacagcggcccagaagccacagctgctgcggcacatggaacagcatgtctccttcaagcctttccgctgtgcccattgccattactcctgcaacatatctggctctctgaagcggcactacaacaggaagcaccctaatgaggagtatgccaacgtgggcaccggggagctggcagcggaggtgctcatccagcaaggtggtttgaagtgtcctgtttgcagctttgtatatggcaccaaatgggagttcaataggcacttgaagaacaaacatggcttgaaggtggtggaaattgatggagaccccaagtgggagacagcaacagaagctcctgaggagccctccacccagtatctccacatcacagaggccgaagaagacgttcaagggacacaggcagcggtggccgcgctccaggacctgagatacacctctgagagtggcgaccgactggaccccacggccgtgaacatcctgcagcagatcattgagctgggcgccgagacccatgacgccactgcccttgcctcggtggttgccatggcaccagggacggtgactgtggttaagcaggtcaccgaggaggagcccagctccaaccacacggtcatgatccaggagacggtccagcaagcgtccgtggagcttgccgagcagcaccacctggtggtgtcctccgacgacgtggagggcattgagacggtgactgtctacacgcagggcggggaggcctcggagttcatcgtctacgtgcaggaggccatgcagcctgtggaggagcaggctgtggagcagccggcccaggaactctagaggacatgtggcatcggatggccacagggcggggctgccaggctctgcaggcacccagggtggggaggccacccttcctgccctacccg

SEQ ID NO: 200931 - DNA, 752 bp, Homo sapiens
  Payload ID: 19659
  Gene Name: zinc finger and AT hook domain containing
  ENST ID: ENST00000521673
  CDS Start-End: 1-492
aacttgtggaatttcttggcacacactttcattgagtctgcggctgaacgggcttgctgggtgctcccaggagttcagcttcgagggcagccacatgtccgcatgttaggactcagagcacgcgaccgactggaccccacggccgtgaacatcctgcagcagatcattgagctgggcgccgagacccatgacgccactgcccttgcctcggtggttgccatggcaccagggacggtgactgtggttaagcaggtcaccgaggaggagcccagctccaaccacacggtcatgatccaggagacggtccagcaagcgtccgtggagcttgccgagcagcaccacctggtggtgtcctccgacgacgtggagggcattgagacggtgactgtctacacgcagggcggggaggcctcggagttcatcgtctacgtgcaggaggccatgcagcctgtggaggagcaggctgtggagcagccggcccaggaactctagaggacatgtggcatcggatggccacagggcggggctgccaggctctgcaggcacccagggtggggaggccacccttcctgccctacccgcagaatggtgctctcctttgccctccctgcccagcagcctgataggactctcctagtccaacttggggtgggcaaggcagtcagcatcaccagcaataccacaggaccctcaccccagcatagacacacaccccctgacccttaccatctgcttcctgaaagacttcagtg

SEQ ID NO: 200932 - DNA, 4774 bp, Homo sapiens
  Payload ID: 19659
  Gene Name: zinc finger and AT hook domain containing
  ENST ID: ENST00000523243
  CDS Start-End: 187-3183
gaggagggcgaagactccatccgccatgttggatgccgcagattcgccataacctcgccggctcttttcttaaaaaaataaaaataaaaagcgaagcgtcagcagggcgccccgccccctcggtcggcacgggagggggcccggaagagcccgaggcttttttttcctccgcggtggggcgttgccatggagacgcgggcggcagaaaacacggccatctttatgtgtaaatgttgtaacctcttctcaccaaatcagtcggaactcctctcccacgtttcagagaagcacatggaagaaggggttaatgttgatgagattattattccccttaggcctctgagtacacctgaaccccccaactcaagcaaaaccggagatgagtttttggtcatgaagaggaagagaggcaggcctaaggggtccacgaagaagtccagcacagaagaggagctggcagaaaacatcgtgagtccgactgaggacagcccgctggctccggaggaagggaacagcctgcctccaagcagcttggagtgtagcaagtgctgtcggaagttctccaacacgcgccagctgcggaagcacatctgcattatcgtgctgaatttgggtgaggaggaaggagaagcaggtaacgagtctgaccttgaactagaaaagaagtgtaaggaagatgatcgggaaaaagcctcgaaaagaccacggtcacagaaaacagagaaagtccagaagatctcaggaaaggaggccagacagctttctggggcgaagaaacccatcataagtgtggttttaactgcacacgaagcaattccaggtgctaccaagattgtgccagtggaggctgggccccctgaaacaggagctacaaattctgagaccacttcagcagacctggtgcctcggagaggctaccaggaatacgccattcagcagacaccttatgagcaaccaatgaagtcaagcaggctaggtcccactcagctcaaaatcttcacttgtgaatactgcaacaaggtcttcaagttcaagcactcgctgcaggcccacctgaggatccacaccaatgaaaagccatacaagtgcccccagtgcagctatgccagtgccatcaaggccaacctcaatgtgcacctgcgcaagcacactggagagaagttcgcctgcgactattgctcgttcacctgcctgagcaagggccacctcaaggtgcacatcgagcgagtgcacaagaagatcaagcagcactgccgcttctgcaagaagaagtactctgacgtcaagaacctcatcaagcacatccgagacgcgcatgacccacaggacaagaaggtcaaagaggccttggacgagctctgcctgatgacgagggagggcaagcggcagctgctctatgactgccacatctgtgagcgcaagttcaagaacgagctggaccgtgaccgccatatgctggtccacggagacaagtggccttttgcctgtgagctctgtggccatggggccaccaagtaccaggcgctggaactgcatgtcaggaagcaccccttcgtgtacgtctgtgccgtctgccgcaagaagttcgtcagctccatcaggctgcgcacccacatcaaagaggtgcacggggctgcccaggaggccttggtcttcaccagttccatcaaccagagcttctgcctcctggaacctggtggggacatccagcaagaagctctgggggaccagctacagctggtggaagaggagtttgccctccagggcgtgaatgcactcaaggaagaggcctgtcctggggacactcagctggaggagggccggaaggagccggaggcccctggggaaatgcctgccccagctgtgcacctggcctccccgcaggccgaaagcacagccctgccaccctgtgagctggaaaccaccgtggtctcctcctcagacctgcattctcaagaggtggtttcagatgattttttgttgaaaaatgatacctcctccgcagaggctcatgctgctcctgagaagcccccagacatgcagcacagaagctcagtccagacgcaaggtgaagtgatcacactactgctgtccaaggcccagagtgctgggtcagatcaggaaagccatggcgcccagagccccctaggggaagggcagaacatggctgtgctttcagctggtgacccagatcccagcaggtgtctcaggtcaaacccagctgaggcctcagacctcctccctccagtagctggtggtggggacaccatcacacatcagcctgactcttgcaaagctgcccctgagcaccggtcaggcatcaccgctttcatgaaggtcctgaacagtttacagaagaagcaaatgaacaccagcttgtgtgagcggatccggaaggtttatggagacctggagtgtgaatactgtggcaaacttttttggtaccaagtgcattttgatatgcatgtccgcacccacacccgggaacatctgtattattgctctcagtgtcattattcttccatcaccaaaaactgccttaaacgccacgtaattcagaaacacagtaacatcttgctgaagtgtcccaccgatggctgtgactactcaactccagataaatataagctacaggcacatcttaaagttcacacagcactggacaaaaggagttattcttgtcctgtttgtgaaaagtctttttcagaggatcgattgataaagtcacatatcaagaccaaccatcctgaggtctccatgagcaccatttctgaggttctcgggaggagggttcagctgaaagggctaattggaaagagagccatgaaatgcccatattgtgacttttatttcatgaagaatggctcagaccttcagcgtcatatttgggctcatgaaggtgtgaagcccttcaagtgttctttgtgtgagtatgcaactcgtagcaagagtaacctcaaggctcatatgaatcgtcacagcactgagaaaacccacctatgtgacatgtgtggcaagaaattcaaatcaaaagggacactgaaaagtcacaaactccttcacactgcagatgggaagcagtttaagtgcacggtgtgtgactacacagcggcccagaagccacagctgctgcggcacatggaacagcatgtctccttcaagaagcgtagcattgctctgtaatttggaaaccaagtcaaagatgtgtaagaggatgcagacagaagaaaaggcacgatctttgcataaaagcactggagtgatttagaggaaggcttgcaggctttagggacacgtatttttgctttcagatcctggattgctgcagcctttccgctgtgcccattgccattactcctgcaacatatctggctctctgaagcggcactacaacaggaagcaccctaatgaggagtatgccaacgtgggcaccggggagctggcagcggaggtgctcatccagcaaggtggtttgaagtgtcctgtttgcagctttgtatatggcaccaaatgggagttcaataggcacttgaagaacaaacatggcttgaaggtggtggaaattgatggagaccccaagtgggagacagcaacagaagctcctgaggagccctccacccagtatctccacatcacagaggccgaagaagacgttcaagggacacaggcagcggtggccgcgctccaggacctgagatacacctctgagagtggcgaccgactggaccccacggccgtgaacatcctgcagcagatcattgagctgggcgccgagacccatgacgccactgcccttgcctcggtggttgccatggcaccagggacggtgactgtggttaagcaggtcaccgaggaggagcccagctccaaccacacggtcatgatccaggagacggtccagcaagcgtccgtggagcttgccgagcagcaccacctggtggtgtcctccgacgacgtggagggcattgagacggtgactgtctacacgcagggcggggaggcctcggagttcatcgtctacgtgcaggaggccatgcagcctgtggaggagcaggctgtggagcagccggcccaggaactctagaggacatgtggcatcggatggccacagggcggggctgccaggctctgcaggcacccagggtggggaggccacccttcctgccctacccgcagaatggtgctctcctttgccctccctgcccagcagcctgataggactctcctagtccaacttggggtgggcaaggcagtcagcatcaccagcaataccacaggaccctcaccccagcatagacacacaccccctgacccttaccatctgcttcctgaaagacttcagtgtcagctcccctacacacaccccacaccttcaccccttgcttcaagattcaaacagagactcccagtccccctcagcatcttccctgaatcacagccccagctccttgacccccatctaggtgccaaatgttcatctgcaaccgctatgcagtctggtgagagggagacagccatcacatagaaagtgaccgtacgggtttttaatcactgctgggtggggtgggggtagggggattgtcctggctttgtcgacaaagtcccacttccccgagtattaagggcccttggtatcaagtgaggtaaattcacccatcacagggtctcgccctaccatcctggaattatttcacttttaagataaatgcactatttcactgttcgcctcccattctaaggaggtgaggtggttggaataaaaacagttcctgtc

SEQ ID NO: 200933 - DNA, 684 bp, Homo sapiens
  Payload ID: 19659
  Gene Name: zinc finger and AT hook domain containing
  ENST ID: ENST00000522257
  CDS Start-End: 97-684
tgtgtctgcgggatggcagagtctgtcactgggtttagacctgggccgcaggcttcagtaaactcttaggcaccctgtttctggaactcagctgacatgacacgagagtttttggtcatgaagaggaagagaggcaggcctaaggggtccacgaagaagtccagcacagaagaggagctggcagaaaacatcgtgagtccgactgaggacagcccgctggctccggaggaagggaacagcctgcctccaagcagcttggagtgtagcaagtgctgtcggaagttctccaacacgcgccagctgcggaagcacatctgcattatcgtgctgaatttgggtgaggaggaaggagaagcaggtaacgagtctgaccttgaactagaaaagaagtgtaaggaagatgatcgggaaaaagcctcgaaaagaccacggtcacagaaaacagagaaagtccagaagatctcaggaaaggaggccagacagctttctggggcgaagaaacccatcataagtgtggttttaactgcacacgaagcaattccaggtgctaccaagattgtgccagtggaggctgggccccctgaaacaggagctacaaattctgagaccacttcagcagacctggtgcctcggagaggctaccaggaatacgccattcagcagacaccttatgagcaaccaatg

SEQ ID NO: 200934 - DNA, 659 bp, Homo sapiens
  Payload ID: 19659
  Gene Name: zinc finger and AT hook domain containing
  ENST ID: ENST00000519827
  CDS Start-End: 1-296
gcaaacttttttggtaccaagtgcattttgatatgcatgtccgcacccacacccgggaacatctgtattattgctctcagtgtcattattcttccatcaccaaaaactgccttaaacgccacgtaattcagaaacacagtaacatcttgctgaagtgtcccaccgatggctgtgactactcaactccagataaatataagctacaggcacatcttaaagttcacacagcactggtctttggtggaggatcttgtaacacaatgaatgaatgcttatttttgcaaattctaatctaactcaagaggctgacacctgagagtgatttgagacttcttcaagttataaaggaagcacatctggccccaggacaaaaggagttattcttgtcctgtttgtgaaaagtctttttcagaggatcgattgataaagtcacatatcaagaccaaccatcctgaggtctccatgagcaccatttctgaggttctcgggaggagggttcagctgaaagggctaattggaaagagagccatgaaatgcccatattgtgacttttatttcatgaagaatggctcagaccttcagcgtcatatttgggctcatgaaggtgtgaagcccttcaagtgttctttgtgtgagtatgcaactcgtagcaagagtaa

SEQ ID NO: 200935 - DNA, 4119 bp, Homo sapiens
  Payload ID: 19660
  Gene Name: zinc finger and BTB domain containing 1
  Uniprot ID: Q9Y2K1
  ENST ID: ENST00000358738
  CDS Start-End: 392-2326
cgcagaaacttgttgcaacaaacaggcgaccgcgggtgcccctagcagccagcggcagagtgggtgggcgggcgagagggaggggaaggctggcggacgccgcagcgaactggtgggcagacccggagtcgccgcgtaagcggggccggctcagtgcggtgcggcaggcgcggctgtgcggcagcggaagtcctttgttgcagcacagtccctggcagagccagagcctctccgcgcagcccagcccgagcgccgagcgccgcgcgccgccgccactgcagctcgcggccccttcgccttcgcccgcctttcccgcggctgatttgccttaaactccctaaaatctccgcagctctggttcctgttgcggccggtctctaattaacagaagatggcaaagcccagccacagcagctatgtccttcagcagctaaacaaccaaagagaatggggttttctctgtgactgctgtattgcaattgatgacatttactttcaagcacacaaggcagttctagctgcctgtagctcctattttagaatgtttttcatgaaccatcagcatagtactgcacaactgaatctcagcaacatgaaaattagtgcagaatgttttgatctcattttgcagtttatgtatttaggaaaaattatgacagctccctccagttttgagcagtttaaagtggcaatgaactacctacagctatacaatgttcctgactgtttagaagacatccaggatgcagattgttctagttcaaaatgttcctcttctgcttccagcaaacagaacagcaaaatgatatttggggtaagaatgtatgaagatactgtggctcgaaatggcaatgaagccaacaggtggtgtgcagagccaagttcaacggtaaatacaccacataatagagaggctgatgaagagtctttacaattaggtaattttcctgagccactatttgatgtatgtaaaaaaagttccgtgtccaaattatctactccaaaagaacgtgtgtcaagacgctttgggcggagttttacctgtgatagctgtggatttggctttagctgtgaaaaattattagatgagcatgtgctaacctgtactaacagacatttataccaaaacacaagatcttaccatagaatagtagatattagagatggaaaagacagtaacatcaaagctgaatttggtgaaaaagattcttccaaaacattttctgcacagacggacaaatacagaggagacacaagccaggctgctgatgattcagcttcaaccactggaagcagaaaaagtagcacagtggagtctgaaatagcaagcgaagagaaaagcagagctgctgagaggaaaaggattattattaagatggagccagaagatattcctacagatgaactgaaagactttaacattattaaagttactgataaagactgtaatgaatccactgacaatgatgaattagaagatgaacctgaagagccattttatagatactatgttgaagaagatgtcagcataaaaaaaagtggtaggaaaactctaaaacctcgaatgtcagtaagtgctgatgaaagaggtggtttagagaatatgaggccccctaacaacagcagtccagtacaagaggatgctgaaaatgcatcttgtgagctgtgtggacttacaataaccgaggaggacctgtcatctcattacttagccaaacacattgaaaatatctgtgcatgtggtaaatgtggacaaatacttgtaaagggtaggcagcttcaggaacatgctcaacgatgtggcgagccccaagatctgaccatgaatgggttaggaaatactgaggagaaaatggacttggaagagaatcctgatgagcagtccgaaataagagatatgtttgttgaaatgctggatgattttagggacaatcattaccagataaacagtatccaaaaaaagcagttatttaaacattctgcctgcccttttcgatgtcctaattgtggccagcgttttgaaactgaaaatctagtggttgaacatatgtctagctgcttagatcaagatatgtttaagagtgccatcatggaagaaaatgaaagagatcacagacgaaagcatttttgtaatctgtgtggaaaaggattttatcagcggtgtcacttaagagaacactatactgttcatactaaggaaaaacagtttgtttgtcaaacatgtggaaagcagtttttaagagagcgtcagttgcgactgcacaatgatatgcacaaaggcatggccagtggtgaaatagggccttctaaacctgtggagaagtgagagatctgaatttggagaggacatggggaagaatcaatcttcaacagataatctttaagtacagacccaggaatatcagatctgaagtggcaccatcttttctgtcttcctgacaaacttccatcaacccaaaaagttccagttgcaaagatccaagaaaactcagtaaagatcactttggaatcactttgttgtaacaaaattgattcatggtgactctaatatttgtgtaaatctgctgaagaaaagtaactagaaaattcatacaacatcagtggttacagctatactaaaataaaactttatatgctaattatcttcaagggtctttctaaaataaaaggggttgttaggctactgcaaatataaagagacataatcacaaatctatttatatagatataaataattctaaacttaaaatcactagaattatagcttaaatattatgaaatgtacttagtcaacttaaaaacttacaccaaaaatctgtagtttagagtgtaagaagtaatgggtacagagaaaaaaaatttaagaccaatattttaacaggataatttggttattactcactatagtaaaacacttgcccttcttccttttccactgtatatgccagtcacaatcttgatcatttatatgaatgaaactcccttttaaacctgttaacttgaaggagaacagaaatggtattacttcaatagtggtagatttccacaaatcagacacattattttcttctgaacttggcaatataacctaataaggcagaataagtttctgttaaaatacttattctcaatatttatgtataaaccatgcttctcagctttcaaatttcaagataaaatttaagtattcagtaaaatgatggttaacatgttttaaaaaatctttaatggagaagttaaatatttggtgagattttagtctggctataaatgctttgtttgatatatatatgtgcacatatatatattacttaaccatatgaattttatttccttattctgaatatacttgtagttttacttctttctgtttatgtacccaattccttatgattattttgtttcttctgcaatatcaagatgttatttattttgagaaatgcttatttttatgactatttattccaatgttttaacaagaagcacagagatttatagtattcttaatagtatgtgcagaagttacatcatttaaaaaacccttgctgtaaagtaggataacttgaatattcattctaataattagactaagtgaaaatctgagaaagagttaattgcaatgtgatagtgggtagaaaggagagaaaaacccactgaagggttcaaatacatgtgaattctactgctttaagagaaataaaacaaataagcctagggaaatattagagtctaaaaaaccctagagttaatctcttttgggaacataaggaggtatacagaactgcagacctctaaacataagtaggaaaaagaaaaataaaagaatattaccaataattaaaggtgccagatcaaaatagtaataaatcaacaaataatttttgattgactggtggaattagatttactaaataaaaatggcttaaattttgactgtactaactataaatgtaatgaattataataattataaatggtataaatgcattctacaatgtgattattttctgtattttagtatatagtataaaatggaattattgggttaaagtacttttattacatttcttaatccattgtttttacctaataaaatttcctcctctatattccaaagtt

SEQ ID NO: 200936 - DNA, 509 bp, Homo sapiens
  Payload ID: 19660
  Gene Name: zinc finger and BTB domain containing 1
  ENST ID: ENST00000556965
  CDS Start-End: 119-509
acagttcgcagttgtgactctgtaggcggaagcatagggacaagcctgagcgtcacaggctccccacaaacaaccgcgtgacccggggactttccccagggtctctaattaacagaagatggcaaagcccagccacagcagctatgtccttcagcagctaaacaaccaaagagaatggggttttctctgtgactgctgtattgcaattgatgacatttactttcaagcacacaaggcagttctagctgcctgtagctcctattttagaatgtttttcatgaaccatcagcatagtactgcacaactgaatctcagcaacatgaaaattagtgcagaatgttttgatctcattttgcagtttatgtatttaggaaaaattatgacagctccctccagttttgagcagtttaaagtggcaatgaactacctacagctatacaatgttcctgactgtttagaagacatccaggatgcagattgttctagttcaaaatgttcctcttctgctt

SEQ ID NO: 200937 - DNA, 2825 bp, Homo sapiens
  Payload ID: 19660
  Gene Name: zinc finger and BTB domain containing 1
  Uniprot ID: Q9Y2K1
  ENST ID: ENST00000554015
  CDS Start-End: 432-2573
tagggacaagcctgagcgtcacaggctccccacaaacaaccgcgtgacccggggactttccccagggtgtgcaaaagcacaggcaccccctcagttctggggtgaagcacagtccctggcagagccagagcctctccgcgcagcccagcccgagcgccgagcgccgcgcgccgccgccactgcagctcgcggccccttcgccttcgcccgcctttcccgcggctgatttgccttaaactccctaaaatctccgcagctctggttcctgttgcggccgtgccctctggtggtcagaagatgctgtgctgtctcgttaggatgaatggattaaaatgtacttttcctcctctgcttctggagagggagagaggaatattccagaagccactgtgttccttctgctttctgtgtgggtctctaattaacagaagatggcaaagcccagccacagcagctatgtccttcagcagctaaacaaccaaagagaatggggttttctctgtgactgctgtattgcaattgatgacatttactttcaagcacacaaggcagttctagctgcctgtagctcctattttagaatgtttttcatgaaccatcagcatagtactgcacaactgaatctcagcaacatgaaaattagtgcagaatgttttgatctcattttgcagtttatgtatttaggaaaaattatgacagctccctccagttttgagcagtttaaagtggcaatgaactacctacagctatacaatgttcctgactgtttagaagacatccaggatgcagattgttctagttcaaaatgttcctcttctgcttccagcaaacagaacagcaaaatgatatttggggtaagaatgtatgaagatactgtggctcgaaatggcaatgaagccaacaggtggtgtgcagagccaagttcaacggtaaatacaccacataatagagaggctgatgaagagtctttacaattaggtaattttcctgagccactatttgatgtatgtaaaaaaagttccgtgtccaaattatctactccaaaagaacgtgtgtcaagacgctttgggcggagttttacctgtgatagctgtggatttggctttagctgtgaaaaattattagatgagcatgtgctaacctgtactaacagacatttataccaaaacacaagatcttaccatagaatagtagatattagagatggaaaagacagtaacatcaaagctgaatttggtgaaaaagattcttccaaaacattttctgcacagacggacaaatacagaggagacacaagccaggctgctgatgattcagcttcaaccactggaagcagaaaaagtagcacagtggagtctgaaatagcaagcgaagagaaaagcagagctgctgagaggaaaaggattattattaagatggagccagaagatattcctacagatgaactgaaagactttaacattattaaagttactgataaagactgtaatgaatccactgacaatgatgaattagaagatgaacctgaagagccattttatagatactatgttgaagaagatgtcagcataaaaaaaagtggtaggaaaactctaaaacctcgaatgtcagtaagtgctgatgaaagaggtggtttagagaatatgaggccccctaacaacagcagtccagtacaagaggatgctgaaaatgcatcttgtgagctgtgtggacttacaataaccgaggaggacctgtcatctcattacttagccaaacacattgaaaatatctgtgcatgtggtaaatgtggacaaatacttgtaaagggtaggcagcttcaggaacatgctcaacgatgtggcgagccccaagatctgaccatgaatgggttaggaaatactgaggagaaaatggacttggaagagaatcctgatgagcagtccgaaataagagatatgtttgttgaaatgctggatgattttagggacaatcattaccagataaacagtatccaaaaaaagcagttatttaaacattctgcctgcccttttcgatgtcctaattgtggccagcgttttgaaactgaaaatctagtggttgaacatatgtctagctgcttagatcaagatatgtttaagagtgccatcatggaagaaaatgaaagagatcacagacgaaagcatttttgtaatctgtgtggaaaaggattttatcagcggtgtcacttaagagaacactatactgttcatactaaggaaaaacagtttgtttgtcaaacatgtggaaagcagtttttaagagagcgtcagttgcgactgcacaatgatatgcacaaaggcatggccaggtatgtctgttccatttgtgatcaaggaaacttcagaaaacatgaccatgtacggcatatgatttctcatttatctgctggtgagactatatgccaggtctgctttcagatattcccaaataatgaacagttggagcagcacatggatgttcatctgtatacatgtggaatatgtggagcaaaatttaatttgaggaaagatatgagatcacattataatgccaagcatttgaaaagaacctgagtgattttctactgtactaatgtttagatgatagcagataaaacaccaaagcaaaggatatgagctatttaggaattgattatataagatgatttgttagaaacaaatttcaaggcccttttaactttaatatttttgtttaggattttaagtatctacatttaggtattaaatgtttatcatttttgttgtttcttaatagaattatttgtttttagtttttcttagctatgattaaaatttttaaatgta

SEQ ID NO: 200938 - DNA, 629 bp, Homo sapiens
  Payload ID: 19660
  Gene Name: zinc finger and BTB domain containing 1
  ENST ID: ENST00000555321
  CDS Start-End: 528-629
agtgcggtgcggcaggcgcggctgtgcggcagcggaagtcctttgttgcagcacagtccctggcagagccagagcctctccgcgcagcccagcccgagcgccgagcgccgcgcgccgccgccactgcagctcgcggccccttcgccttcgcccgcctttcccgcggctgatttgccttaaactccctaaaatctccgcagctctggttcctgttgcggccgtgccctctggtggtcagaagatgctgtgctgtctcgttaggatgaatggattaaaatgtacttttcctcctctgcttctggagagggagagaggaatattccagaagccactgtgttccttctgctttctgtgtggcatgatgccttcttctgtagagtgggcgctttgcagaatacgtgttgaatgaaatcactgatctaggaaaagtaaaaattcctcaaatgaatacagaatacttgtgctactgctgatgatcaacactttatacagtgcctggtataccaaaggtctctaattaacagaagatggcaaagcccagccacagcagctatgtccttcagcagctaaacaaccaaagagaatggggttttctctgtgactgctgtattgcaattgatgacatttac

SEQ ID NO: 200939 - DNA, 582 bp, Homo sapiens
  Payload ID: 19660
  Gene Name: zinc finger and BTB domain containing 1
  ENST ID: ENST00000553583
  CDS Start-End: 117-582
actgcaagcagtggcgccggctcacgcacccctcggccgcctctcgcgcggcttcccgcgccggcagcccgcgatggccccacgtgaccgcgtgtctggtctctaattaacagaagatggcaaagcccagccacagcagctatgtccttcagcagctaaacaaccaaagagaatggggttttctctgtgactgctgtattgcaattgatgacatttactttcaagcacacaaggcagttctagctgcctgtagctcctattttagaatgtttttcatgaaccatcagcatagtactgcacaactgaatctcagcaacatgaaaattagtgcagaatgttttgatctcattttgcagtttatgtatttaggaaaaattatgacagctccctccagttttgagcagtttaaagtggcaatgaactacctacagctatacaatgttcctgactgtttagaagacatccaggatgcagattgttctagttcaaaatgttcctcttctgcttccagcaaacagaacagcaaaatgatatttggggtaagaatgtatgaagatactgtggctcgaaatggcaatgaag

SEQ ID NO: 200940 - DNA, 2181 bp, Homo sapiens
  Payload ID: 19661
  Gene Name: zinc finger and BTB domain containing 10
  Uniprot ID: Q96DT7
  ENST ID: ENST00000379091
  CDS Start-End: 166-1905
gaaatgactactgtccggggcccgaggtgctgcctcgcacaatgcatcaaaggaggttgtgtccgtggtcgtaacctcttcgcgtgaaaggcaccgcctggtccagtctttgtgaaggaacaaaataagttcacttccttgggcaccgccacccaccctcagcaaatgacaaggctggagcgcagctcccaccgcacagttatttgcaaagtcccaggtgaactcgtggcgagagaaggaaaatgcgcgtcccgggcgcgggagtcagaaataccatcagaggaggggtactgtgactttaatagtaggccaaatgagaactcttattgctatcaacttctgcgacaactaaatgaacagagaaagaaaggtattctttgtgatgtcagcattgtggtaagcggaaaaatcttcaaagctcataagaacatcctggttgcaggcagccgtttctttaagactttatattgcttttcaaacaaagaaagccctaaccaaaacaatactacccacttagatattgctgcagttcaaggtttttcagtcatcttggacttcttgtattctggtaacctggtgctcacaagccaaaatgccattgaagttatgaccgtggccagctatcttcaaatgagtgaagttgttcaaacttgccgaaatttcattaaagatgccttaaatataagcattaaatcagaagctccagagtctgtagttgtggactataataatagaaaaccagttaatagagatggtctgtcttcatcacgggatcaaaaaattgccagtttttgggcaacacggaatcttaccaatttggcaagtaatgtaaagattgaaaatgatggttgtaatgtcgacgagggccaaatagaaaactaccaaatgaatgacagtagttgggtccaggatggatctcctgaaatggctgaaaatgaatctgaaggtcaaacaaaagtgtttatttggaataatatgggctcccagggaattcaagagactggcaaaacaaggaggaaaaaccaaactacaaaaagatttatttataatattccacctaataatgaaacgaatttagaagattgctcagtaatgcagccacctgttgcctatccagaagaaaatacactactcatcaaggaagaaccagatttagatggtgctctactctcggggccagatggtgataggaatgtgaatgcaaatttattggctgaagctggcactagtcaagatggaggtgatgctggtacttcacatgatttcaagtatggtttgatgcctggtccttcaaatgatttcaagtatggattgataccaggtacttcaaatgatttcaagtatggattgataccaggtgcttcaaatgatttcaagtatggattattgccagaatcttggccaaaacaagaaacctgggaaaatggtgaatcatctctaatcatgaacaagttaaaatgccctcattgtagctatgtagccaaatacagacgaacactaaaaaggcacttgctcattcacacaggagtgagatcatttagctgtgatatttgtggaaaactgtttactcgaagagaacatgtaaaaagacattccctggtgcataaaaaggataaaaaatacaaatgtatggtgtgtaagaagatcttcatgttagcagccagtgttggaataagacatggatctcgacgttatggtgtttgtgtagactgtgcagataaatcacagccaggagggcaagaaggtgtagatcagggacaggatacagaattccctcgggatgaagaatacgaggagaatgaagtaggagaagctgatgaagagctagttgatgatggagaagatcagaatgatccctctcgatgggatgaatcaggagaagtttgtatgtctctagatgattaactgacctactatactcctcaaggatgctgcatttggacctaatatgaatcgacaatttggattgttgaacttgaaggcttgcaaaatatggtacatgctggatagtagttatgttgctgtgaaaactgtagggtcaaagccttatagcaaaaaaaatttttttttatatttgcacaggactatacagcaaacaaccatgtggttggattacatggagtccccacatactcagtcagttatcaaagtaaaatattttttatttataggatatacagt

SEQ ID NO: 200941 - DNA, 10132 bp, Homo sapiens
  Payload ID: 19661
  Gene Name: zinc finger and BTB domain containing 10
  Uniprot ID: Q96DT7
  ENST ID: ENST00000430430
  CDS Start-End: 780-3395
aaaggaggttgtgtccgtggtcgtaacctcttcgcgtgaaaggcaccgcctggtccagtctttgtgaaggaacaaaataagttcacttccttgggcaccgccacccaccctcagcaaatgacaaggctggagcgcagctcccaccgcacagttatttgcaaagtcccaggtgaactcgtggcgagagaaggaaaatgcgcgtcccgggcgcgggtagggcctggtcggacggaaacgctccgccggctttattgtcgcttcgttatgtggcggagccgagcagtttagcgtgcctctcaccctcagcgcctgcgaagccggcggcggcgtcgggactcctcggcgcgcggaggaaggatatctgtgtggaggatcggtgtgtgcgcgcgcggctttaaagagggggcagcggagggtctccccgcactccgctgctcaacttcgaaggcctcgctcgctgcaggctcgctcctcacctctccgccgcccgcccccttctccgcgcgggacgctgcccggagcgcggcggggcgggggtggaggacgagagagcggtcggaggcgtcggcccggcagcggcagcggcagcggacgcgtgcagcagacccgggagcgagcgcgagccgggctgccgggcgagagggcgaggccgagccccgcgagaccggaacgccgggggcgggggcgagacagagggggagccgcggggagcgcgcgggacgcggcccgaggccgtgcgcgagccggggcaccgggcggcggcggcggcggcgcgcgccatgtcgttcagtgaaatgaaccgcaggacgctggcgttccgaggaggcgggttggtcaccgctagcggcggcggctccacgaacaataacgctggcggggaggcctcagcttggcctccgcagccccagccgagacagcccccgccgccagcgccgcccgcgcttcagccgcctaatgggcggggggccgacgaggaagtggaattggagggcctggagccccaagacctggaggcctccgccgggccggccgccggcgccgccgaggaagccaaggagttgctgctcccccaagacgcgggcggccccacctcgcttggcggtggcgcggggggccccctgctagcggaaaggaaccgtcggactctggccttccgaggcggcggcggcgggggtctcggcaacaatggcagtagccgcggccgccccgagacctcggtgtggcccttgaggcatttcaatgggcgagggccggcgactgtggatctggagctggacgcgctggaggggaaggagttgatgcaggacggcgcgtccctgagcgacagcaccgaggacgaggaggagggggcgagcctgggcgacggcagcggggcggaaggcggcagctgcagcagcagcaggcggtcgggcggcgatggcggggacgaagtggagggcagcggtgtgggagctggcgaaggagagactgtccagcacttcccgctcgcgcggcccaagtctctaatgcagaagctccaatgctccttccagacctcctggctcaaggactttccctggctgcgctattccaaggatactggtcttatgtcttgcggctggtgccaaaagacccctgcagatgggggaagcgtggaccttcccccagtggggcatgatgagctttcgcgagggacccgcaactacaagaaaaccctcctcctgaggcaccacgtctctaccgagcacaaactccacgaagccaacgcccaggagtcagaaataccatcagaggaggggtactgtgactttaatagtaggccaaatgagaactcttattgctatcaacttctgcgacaactaaatgaacagagaaagaaaggtattctttgtgatgtcagcattgtggtaagcggaaaaatcttcaaagctcataagaacatcctggttgcaggcagccgtttctttaagactttatattgcttttcaaacaaagaaagccctaaccaaaacaatactacccacttagatattgctgcagttcaaggtttttcagtcatcttggacttcttgtattctggtaacctggtgctcacaagccaaaatgccattgaagttatgaccgtggccagctatcttcaaatgagtgaagttgttcaaacttgccgaaatttcattaaagatgccttaaatataagcattaaatcagaagctccagagtctgtagttgtggactataataatagaaaaccagttaatagagatggtctgtcttcatcacgggatcaaaaaattgccagtttttgggcaacacggaatcttaccaatttggcaagtaatgtaaagattgaaaatgatggttgtaatgtcgacgagggccaaatagaaaactaccaaatgaatgacagtagttgggtccaggatggatctcctgaaatggctgaaaatgaatctgaaggtcaaacaaaagtgtttatttggaataatatgggctcccagggaattcaagagactggcaaaacaaggaggaaaaaccaaactacaaaaagatttatttataatattccacctaataatgaaacgaatttagaagattgctcagtaatgcagccacctgttgcctatccagaagaaaatacactactcatcaaggaagaaccagatttagatggtgctctactctcggggccagatggtgataggaatgtgaatgcaaatttattggctgaagctggcactagtcaagatggaggtgatgctggtacttcacatgatttcaagtatggtttgatgcctggtccttcaaatgatttcaagtatggattgataccaggtacttcaaatgatttcaagtatggattgataccaggtgcttcaaatgatttcaagtatggattattgccagaatcttggccaaaacaagaaacctgggaaaatggtgaatcatctctaatcatgaacaagttaaaatgccctcattgtagctatgtagccaaatacagacgaacactaaaaaggcacttgctcattcacacaggagtgagatcatttagctgtgatatttgtggaaaactgtttactcgaagagaacatgtaaaaagacattccctggtgcataaaaaggataaaaaatacaaatgtatggtgtgtaagaagatcttcatgttagcagccagtgttggaataagacatggatctcgacgttatggtgtttgtgtagactgtgcagataaatcacagccaggagggcaagaaggtgtagatcagggacaggatacagaattccctcgggatgaagaatacgaggagaatgaagtaggagaagctgatgaagagctagttgatgatggagaagatcagaatgatccctctcgatgggatgaatcaggagaagtttgtatgtctctagatgattaactgacctactatactcctcaaggatgctgcatttggacctaatatgaatcgacaatttggattgttgaacttgaaggcttgcaaaatatggtacatgctggatagtagttatgttgctgtgaaaactgtagggtcaaagccttatagcaaaaaaaatttttttttatatttgcacaggactatacagcaaacaaccatgtggttggattacatggagtccccacatactcagtcagttatcaaagtaaaatattttttatttataggatatacagtaactatttgggtcctatgaaaatagtccttaaagagcttacattcatgtgctactttaacatgaatggagaaaatccgtttatggaagtacagtgacaattgacccaatcactctgtccatcaaaccactcaggctagtttgtactagtagagttttgtttctatttttatttttattaattttattttttttaatacagattttcagtgaggggctttttcaaccccattggttctattttcttgtatttttccatttaatttgcttcataacttaaaccaagtctcttctagtcttaggtattatttctcgattttgtgctgatgggcatgtttataagaactggagaggtaatttattggaatgaactaactgacttcctccattcccctcttcctttttgacatgaattttactacttcacaaatgaagaatgatgttatgaagttaccgtggcgaagttgacaaataccactaaaatgattatgatttagaagtaactttcttctgctgctctaatctgataaatggttactatatgatattttctgacatggtatttggttttgggtatctgttactttggcactattcttgtttgcctctttatttttgccagtgtactatacctcagtcctatttgaaagacctaattgaaagaaaaatcatagaaataagtaaaatgatttgttttataatttatccaccatgtccagtttggttagcttgttatgcaatataagtgaaatatcaggtttttacccgtgtcccttttatcatgaaaattaacacaaaatgtgcattctcttttgtttcatacttagcgggatattgattgttttgaaattatgatcaatacttaatttatttttttctgtccttgaagtcactacaccttgatacagtctttctagtagtcaccatgattcaacagtctcaaaaatcttacaaataaaattctgagaagctttattattctataaattcttcagggtacaaagggtgacatattgaggtgaaattgtcagatttacttagcctggtgacatgaattagctgattgtggaactctcagcagcatttcacgtattgttaacatgtatggcatttattagcatattgtatattatataagattgagggatgtcatattttcagctttcttttaaataaaaattgagtatattttcctattttatatcaggtaactaaattatgctagttatgtggaaaaaattgcaaagatgctttgacagatataatccctttggtgctccatctgatcaaagttgaaaagttgatgttttttaagagacaagctttatcattgtctctgatttcagtagaataatggtttattgttagacaatgatgtttctgcttggataaatcaaagataaattacagttacatggttagatgcatcttttgtcatctatattgtagtttctacataactgtaaacctgacagataagaatagtttcggtttgatttttgtttaaaacagatgagtacttcttaatgttctagacaaatgagtaaaatgtatttctggtagaaattagttgggcaaagatactatgaatgaaaaagtattttaaacgtaaaatgttctttgtgaatatgtaagtatagtataaagatttctttcatcccatttatccccttcctttaaataaactagtttacaattggtagatctgtctatatataaatatatattaaagaacaaagatatatatctaaaaatcacctaaatctgctttattagactacagttcacttattgcatagaaactggacttggctttacattcttaatgtacttttacttttcctcaagatatgaacttactctcttgaagctgaattttcttttactacttaaatcatttatgtatatctggtaaattatgaccaaatttttgttagattgcatacagtaaattgaaatacacacttggtacactacgggattgttgtgcttttgtttggttttagttggaaataaggtttgatgtagatggcttgttactgttaatttaaaatattctataattgtccattactttatgttgtgttgtgacagatttggctatatttttagtcaattgaaatatgatactttaaaagtttgtttttaggtaatccaaaggaaaagtgtttatactcttgaatatattagcctcagcctatataaaaatttctttgaagtaaacattttaccggaaacagaattgacagatttttctacttgctgactgcctaacttattttgtttcatgatctcgagggactgccttttcccatctagatcttttaaaaaaatagttttagtactaaggtatactactggacatttctatttttttaagtgtattctttttctgacttacagtaaaatttcaggaagttgatagatactaagaacttatgattggtctcagaggtaacaatgaaatactcataattttgtctgtggaactctggcagaattatgttacacatttggcgaagttgtctcttgtaatttatattttaaatgaaaaagtattttagagcttttaatgaaggggaagagtataaactttctttcatattcactctgtagttacagaccgtctcataaatcaagattgtgcattattagagttctcagagacagatacttccatatggacccctgttcatttttcttatttactagatattttgctaaatttagcacactagcaattaagagtttaaaaaagaagaaacgttataggaaagggaaactgaacagtaatgagtagctttgaaattggggaaaacacactagctgggttaggtacagctatcctaatggagaagagtgagctaaatgcgttaattcatgtaaagtgcttagaacactggtacataataggtgcataacacatcttaaagttgtttaataatagataagaaccaagaggaaaaagaaataagaaaagatgggggaaaggaaggagaaaataggaaatgaaaggattaggacttgggcatttatattaatacaaaatggtgtaaacggcctgaatatcactgtagtagtatcatacgggggaaagtgtgatggaaaataggtttaaaaatcttaatttttaaaactttagtaagctttatttatattttttaggattttctgaacatagcatgaagggtttagattcatttttctgaaaaacgattaaaaaaactaccaattttttttttgagtgcccacacttgccgttgtgctgtatacatgattttaccttaatcctctataaggtaggtgctaattgtctccattttatagatgaggaaaggctcagagaaattcagaaacttggctaatttaacacagctgtgacagagctcgaatttgaccacgtctgattctgaagcccatactctttcagggaggctctattgctgcctcattaaacaactcttgtagaatttcagctcttaatggagtctatggattatatttttcctataagacagctgtgtttagaattttgagtgtctttcctccccccaataaatttccttactactctttcttcataaagcagttgttttgtcactttgactatattaagacacatcagtgtagcacatgctcttaactggctgtggcattttaattttataaaagaatggtttttatctgaagaactagatagaaaccccagtttttgtgccgttcagtcacccagatccttaaacttaactatggtacataatatccacacttagaactaacaggtgtttagtcactttaggacttaaaatggaaagtttttttttttttcctgctgtatctctgctttcaactgaagttaaagaattctagatagtttaaaatgtgttagggataagcacacttcaaaagatgttttctagccctaaattttatgacattgggtacttaaatttggagtacactagctattgagaacaatattttgggttgaggagagatggttgaggccattatttagtgggagcattggcattttgaacactgtaaacaaaagaacacttccgcctgctgtttgtaaaagctctttgggaagatcttttacgaagaccaactttttaaaatgtaaattacctacctaatataagtgtcctaagacatgtatgtaaacttccggaactgttttgtctgtgtatttagaaaatacacaagaatctttattcaaacctaaaaatataaacttgtgagcactaaactgcttctggctttgtgaattttattgactgacatttaattcagatttctttgcaagtgtactaatttagactaattggggtaaggggaacaccttaatgaactttgacttatgtataattcagatatctttgtacttaaggcttacaagtttgaattatggaatactataagggttttttgtttatttgtatgtttttatatgaaagtacataaatgacagactacctccaagtaatcctgctttaattaatagcagtgatttgtaatcagtgtatcttttaagattctctacaggttttagaaaatattaaaaattccctgtaatttacatttgtgcataatcttggaaatgggttgaaaagcaaaggtaaactgcttcatcccatgttgtatatttgtggactgattgactacaagtgatgtgatgttataaatttgaagtctttgaaactttattaatgtagagaaaacataactagctttttaggttatttcaaagttagtaatagagcaaaggaaatcagaactggccagatattcagacttgacttagaaaaacaggagtttgttgattttgtttggagaagggcacaataaaggggagcccacatagcattataatgcctagtatctttaaacatgtaaagagctatcatgaggcagaagaattaagaaactttatatgtttctaaggggtcatgattgggaccattggctcaagattgaaaatcggtttttaattatccaaagatgaaatggggctgcttcagaaaaaggtctaccactggagataacgctatgaaaagtgaaagagattacttaatcattttgacaaaggcagtattgaccagacatttctatttcagagttggatttgtgcttagttttttttaggtgttgggacccttgtagttgctttttattttgcttagtcaacaaacactaaaatgataaaatttggtatgtataagtactggacgaaggatgttttgacactaaaaaggacataatttaggaaattaagaatttagacaccaagtttggcttaatagaaaaagtcactatctgaacttctttctttttcaccacaaatcaccgcagaccagtgtttgggagcaggtgtaggaaattgaattattggatctatgtttaggtaagaaaactaaaggtacttcagaatttaggctatgacataactgtctttctgaagtttaaagaaagaaagtgaactatagaaatctattcagctaattaaagtgaatgaaaaatattacagattccataactgcatggcgccttacctgctattaatactgccgccttactgtcagccagatgattttttcccaccacggccagtcttaaatttggcaataagaaaaagctaatcttccaagtgtaagtaggtatgtgttagaatcttggtgaaagataaacacaagacagtcttcttggcgcaggtcctaacagttggtgagataatacataagatggtttcaggattattgtagaattatttaggttgaaagagactgtaagagactaatgaagcatacccagagaggttgctacagtgactccagtcagttttaggacccaggactcctgaacttcaatttcagtattatttttctgtaccaaactcattcaataaatacttgagattagggataagtttgaagttagaagattccagagtacactcaaatagtatttggcacatagcttgttgatcaaaagtatttactaagtgagtgacaaaaggcactagcaactttaaggattttgcctattagtatcatatggcatgtagctatcaagccagtttcgtttagttattttgtgttgccaagcatatgatacgtggtgtcacactgagcctttgggatcctttccctggatacataaccctagtagataatgttactgcaagatgtaatgaccaaatccaacctactgcaaatgttactatggaaatctcaatgcaaaagtagcctttgtgattttttttttaaaccgtctccataacagaacacttagaattattagccatttgctgcaaagtatttgttttaaaatgtctggcatatacaccactaacatttaaatgcccaacattcggtctatacgtgaaaaaactagaagaaaagccctgttggagttttgatgtagagtgcaataatacatcaataaaggtattttaaaatga

SEQ ID NO: 200942 - DNA, 5458 bp, Homo sapiens
  Payload ID: 19661
  Gene Name: zinc finger and BTB domain containing 10
  Uniprot ID: Q96DT7
  ENST ID: ENST00000455036
  CDS Start-End: 599-3214
cggtccgttgttcatttgccattcgacctccgccagggcctggtcggacggaaacgctccgccggctttattgtcgcttcgttatgtggcggagccgagcagtttagcgtgcctctcaccctcagcgcctgcgaagccggcggcggcgtcgggactcctcggcgcgcggaggaaggatatctgtgtggaggatcggtgtgtgcgcgcgcggctttaaagagggggcagcggagggtctccccgcactccgctgctcaacttcgaaggcctcgctcgctgcaggctcgctcctcacctctccgccgcccgcccccttctccgcgcgggacgctgcccggagcgcggcggggcgggggtggaggacgagagagcggtcggaggcgtcggcccggcagcggcagcggcagcggacgcgtgcagcagacccgggagcgagcgcgagccgggctgccgggcgagagggcgaggccgagccccgcgagaccggaacgccgggggcgggggcgagacagagggggagccgcggggagcgcgcgggacgcggcccgaggccgtgcgcgagccggggcaccgggcggcggcggcggcggcgcgcgccatgtcgttcagtgaaatgaaccgcaggacgctggcgttccgaggaggcgggttggtcaccgctagcggcggcggctccacgaacaataacgctggcggggaggcctcagcttggcctccgcagccccagccgagacagcccccgccgccagcgccgcccgcgcttcagccgcctaatgggcggggggccgacgaggaagtggaattggagggcctggagccccaagacctggaggcctccgccgggccggccgccggcgccgccgaggaagccaaggagttgctgctcccccaagacgcgggcggccccacctcgcttggcggtggcgcggggggccccctgctagcggaaaggaaccgtcggactctggccttccgaggcggcggcggcgggggtctcggcaacaatggcagtagccgcggccgccccgagacctcggtgtggcccttgaggcatttcaatgggcgagggccggcgactgtggatctggagctggacgcgctggaggggaaggagttgatgcaggacggcgcgtccctgagcgacagcaccgaggacgaggaggagggggcgagcctgggcgacggcagcggggcggaaggcggcagctgcagcagcagcaggcggtcgggcggcgatggcggggacgaagtggagggcagcggtgtgggagctggcgaaggagagactgtccagcacttcccgctcgcgcggcccaagtctctaatgcagaagctccaatgctccttccagacctcctggctcaaggactttccctggctgcgctattccaaggatactggtcttatgtcttgcggctggtgccaaaagacccctgcagatgggggaagcgtggaccttcccccagtggggcatgatgagctttcgcgagggacccgcaactacaagaaaaccctcctcctgaggcaccacgtctctaccgagcacaaactccacgaagccaacgcccaggagtcagaaataccatcagaggaggggtactgtgactttaatagtaggccaaatgagaactcttattgctatcaacttctgcgacaactaaatgaacagagaaagaaaggtattctttgtgatgtcagcattgtggtaagcggaaaaatcttcaaagctcataagaacatcctggttgcaggcagccgtttctttaagactttatattgcttttcaaacaaagaaagccctaaccaaaacaatactacccacttagatattgctgcagttcaaggtttttcagtcatcttggacttcttgtattctggtaacctggtgctcacaagccaaaatgccattgaagttatgaccgtggccagctatcttcaaatgagtgaagttgttcaaacttgccgaaatttcattaaagatgccttaaatataagcattaaatcagaagctccagagtctgtagttgtggactataataatagaaaaccagttaatagagatggtctgtcttcatcacgggatcaaaaaattgccagtttttgggcaacacggaatcttaccaatttggcaagtaatgtaaagattgaaaatgatggttgtaatgtcgacgagggccaaatagaaaactaccaaatgaatgacagtagttgggtccaggatggatctcctgaaatggctgaaaatgaatctgaaggtcaaacaaaagtgtttatttggaataatatgggctcccagggaattcaagagactggcaaaacaaggaggaaaaaccaaactacaaaaagatttatttataatattccacctaataatgaaacgaatttagaagattgctcagtaatgcagccacctgttgcctatccagaagaaaatacactactcatcaaggaagaaccagatttagatggtgctctactctcggggccagatggtgataggaatgtgaatgcaaatttattggctgaagctggcactagtcaagatggaggtgatgctggtacttcacatgatttcaagtatggtttgatgcctggtccttcaaatgatttcaagtatggattgataccaggtacttcaaatgatttcaagtatggattgataccaggtgcttcaaatgatttcaagtatggattattgccagaatcttggccaaaacaagaaacctgggaaaatggtgaatcatctctaatcatgaacaagttaaaatgccctcattgtagctatgtagccaaatacagacgaacactaaaaaggcacttgctcattcacacaggagtgagatcatttagctgtgatatttgtggaaaactgtttactcgaagagaacatgtaaaaagacattccctggtgcataaaaaggataaaaaatacaaatgtatggtgtgtaagaagatcttcatgttagcagccagtgttggaataagacatggatctcgacgttatggtgtttgtgtagactgtgcagataaatcacagccaggagggcaagaaggtgtagatcagggacaggatacagaattccctcgggatgaagaatacgaggagaatgaagtaggagaagctgatgaagagctagttgatgatggagaagatcagaatgatccctctcgatgggatgaatcaggagaagtttgtatgtctctagatgattaactgacctactatactcctcaaggatgctgcatttggacctaatatgaatcgacaatttggattgttgaacttgaaggcttgcaaaatatggtacatgctggatagtagttatgttgctgtgaaaactgtagggtcaaagccttatagcaaaaaaaatttttttttatatttgcacaggactatacagcaaacaaccatgtggttggattacatggagtccccacatactcagtcagttatcaaagtaaaatattttttatttataggatatacagtaactatttgggtcctatgaaaatagtccttaaagagcttacattcatgtgctactttaacatgaatggagaaaatccgtttatggaagtacagtgacaattgacccaatcactctgtccatcaaaccactcaggctagtttgtactagtagagttttgtttctatttttatttttattaattttattttttttaatacagattttcagtgaggggctttttcaaccccattggttctattttcttgtatttttccatttaatttgcttcataacttaaaccaagtctcttctagtcttaggtattatttctcgattttgtgctgatgggcatgtttataagaactggagaggtaatttattggaatgaactaactgacttcctccattcccctcttcctttttgacatgaattttactacttcacaaatgaagaatgatgttatgaagttaccgtggcgaagttgacaaataccactaaaatgattatgatttagaagtaactttcttctgctgctctaatctgataaatggttactatatgatattttctgacatggtatttggttttgggtatctgttactttggcactattcttgtttgcctctttatttttgccagtgtactatacctcagtcctatttgaaagacctaattgaaagaaaaatcatagaaataagtaaaatgatttgttttataatttatccaccatgtccagtttggttagcttgttatgcaatataagtgaaatatcaggtttttacccgtgtcccttttatcatgaaaattaacacaaaatgtgcattctcttttgtttcatacttagcgggatattgattgttttgaaattatgatcaatacttaatttatttttttctgtccttgaagtcactacaccttgatacagtctttctagtagtcaccatgattcaacagtctcaaaaatcttacaaataaaattctgagaagctttattattctataaattcttcagggtacaaagggtgacatattgaggtgaaattgtcagatttacttagcctggtgacatgaattagctgattgtggaactctcagcagcatttcacgtattgttaacatgtatggcatttattagcatattgtatattatataagattgagggatgtcatattttcagctttcttttaaataaaaattgagtatattttcctattttatatcaggtaactaaattatgctagttatgtggaaaaaattgcaaagatgctttgacagatataatccctttggtgctccatctgatcaaagttgaaaagttgatgttttttaagagacaagctttatcattgtctctgatttcagtagaataatggtttattgttagacaatgatgtttctgcttggataaatcaaagataaattacagttacatggttagatgcatcttttgtcatctatattgtagtttctacataactgtaaacctgacagataagaatagtttcggtttgatttttgtttaaaacagatgagtacttcttaatgttctagacaaatgagtaaaatgtatttctggtagaaattagttgggcaaagatactatgaatgaaaaagtattttaaacgtaaaatgttctttgtgaatatgtaagtatagtataaagatttctttcatcccatttatccccttcctttaaataaactagtttacaattggtagatctgtctatatataaatatatattaaagaacaaagatatatatctaaaaatcacctaaatctgctttattagactacagttcacttattgcatagaaactggacttggctttacattcttaatgtacttttacttttcctcaagatatgaacttactctcttgaagctgaattttcttttactacttaaatcatttatgtatatctggtaaattatgaccaaatttttgttagattgcatacagtaaattgaaatacacacttggt

SEQ ID NO: 200943 - DNA, 9878 bp, Homo sapiens
  Payload ID: 19661
  Gene Name: zinc finger and BTB domain containing 10
  Uniprot ID: Q96DT7
  ENST ID: ENST00000426744
  CDS Start-End: 599-3142
cggtccgttgttcatttgccattcgacctccgccagggcctggtcggacggaaacgctccgccggctttattgtcgcttcgttatgtggcggagccgagcagtttagcgtgcctctcaccctcagcgcctgcgaagccggcggcggcgtcgggactcctcggcgcgcggaggaaggatatctgtgtggaggatcggtgtgtgcgcgcgcggctttaaagagggggcagcggagggtctccccgcactccgctgctcaacttcgaaggcctcgctcgctgcaggctcgctcctcacctctccgccgcccgcccccttctccgcgcgggacgctgcccggagcgcggcggggcgggggtggaggacgagagagcggtcggaggcgtcggcccggcagcggcagcggcagcggacgcgtgcagcagacccgggagcgagcgcgagccgggctgccgggcgagagggcgaggccgagccccgcgagaccggaacgccgggggcgggggcgagacagagggggagccgcggggagcgcgcgggacgcggcccgaggccgtgcgcgagccggggcaccgggcggcggcggcggcggcgcgcgccatgtcgttcagtgaaatgaaccgcaggacgctggcgttccgaggaggcgggttggtcaccgctagcggcggcggctccacgaacaataacgctggcggggaggcctcagcttggcctccgcagccccagccgagacagcccccgccgccagcgccgcccgcgcttcagccgcctaatgggcggggggccgacgaggaagtggaattggagggcctggagccccaagacctggaggcctccgccgggccggccgccggcgccgccgaggaagccaaggagttgctgctcccccaagacgcgggcggccccacctcgcttggcggtggcgcggggggccccctgctagcggaaaggaaccgtcggactctggccttccgaggcggcggcggcgggggtctcggcaacaatggcagtagccgcggccgccccgagacctcggtgtggcccttgaggcatttcaatgggcgagggccggcgactgtggatctggagctggacgcgctggaggggaaggagttgatgcaggacggcgcgtccctgagcgacagcaccgaggacgaggaggagggggcgagcctgggcgacggcagcggggcggaaggcggcagctgcagcagcagcaggcggtcgggcggcgatggcggggacgaagtggagggcagcggtgtgggagctggcgaaggagagactgtccagcacttcccgctcgcgcggcccaagtctctaatgcagaagctccaatgctccttccagacctcctggctcaaggactttccctggctgcgctattccaaggatactggtcttatgtcttgcggctggtgccaaaagacccctgcagatgggggaagcgtggaccttcccccagtggggcatgatgagctttcgcgagggacccgcaactacaagaaaaccctcctcctgaggcaccacgtctctaccgagcacaaactccacgaagccaacgcccaggagtcagaaataccatcagaggaggggtactgtgactttaatagtaggccaaatgagaactcttattgctatcaacttctgcgacaactaaatgaacagagaaagaaaggtattctttgtgatgtcagcattgtggtaagcggaaaaatcttcaaagctcataagaacatcctggttgcaggcagccgtttctttaagactttatattgcttttcaaacaaagaaagccctaaccaaaacaatactacccacttagatattgctgcagttcaaggtttttcagtcatcttggacttcttgtattctggtaacctggtgctcacaagccaaaatgccattgaagttatgaccgtggccagctatcttcaaatgagtgaagttgttcaaacttgccgaaatttcattaaagatgccttaaatataagcattaaatcagaagctccagagtctgtagttgtggactataataatagaaaaccagttaatagagatggtctgtcttcatcacgggatcaaaaaattgccagtttttgggcaacacggaatcttaccaatttggcaagtaatgtaaagattgaaaatgatggttgtaatgtcgacgagggccaaatagaaaactaccaaatgaatgacagtagttgggtccaggatggatctcctgaaatggctgaaaatgaatctgaaggtcaaacaaaagtgtttatttggaataatatgggctcccagggaattcaagagactggcaaaacaaggaggaaaaaccaaactacaaaaagatttatttataatattccacctaataatgaaacgaatttagaagattgctcagtaatgcagccacctgttgcctatccagaagaaaatacactactcatcaaggaagaaccagatttagatggtgctctactctcggggccagatggtgataggaatgtgaatgcaaatttattggctgaagctggcactagtcaagatggaggtgatgctggtacttcacatgatttcaagtatggtttgatgcctggtgcttcaaatgatttcaagtatggattattgccagaatcttggccaaaacaagaaacctgggaaaatggtgaatcatctctaatcatgaacaagttaaaatgccctcattgtagctatgtagccaaatacagacgaacactaaaaaggcacttgctcattcacacaggagtgagatcatttagctgtgatatttgtggaaaactgtttactcgaagagaacatgtaaaaagacattccctggtgcataaaaaggataaaaaatacaaatgtatggtgtgtaagaagatcttcatgttagcagccagtgttggaataagacatggatctcgacgttatggtgtttgtgtagactgtgcagataaatcacagccaggagggcaagaaggtgtagatcagggacaggatacagaattccctcgggatgaagaatacgaggagaatgaagtaggagaagctgatgaagagctagttgatgatggagaagatcagaatgatccctctcgatgggatgaatcaggagaagtttgtatgtctctagatgattaactgacctactatactcctcaaggatgctgcatttggacctaatatgaatcgacaatttggattgttgaacttgaaggcttgcaaaatatggtacatgctggatagtagttatgttgctgtgaaaactgtagggtcaaagccttatagcaaaaaaaatttttttttatatttgcacaggactatacagcaaacaaccatgtggttggattacatggagtccccacatactcagtcagttatcaaagtaaaatattttttatttataggatatacagtaactatttgggtcctatgaaaatagtccttaaagagcttacattcatgtgctactttaacatgaatggagaaaatccgtttatggaagtacagtgacaattgacccaatcactctgtccatcaaaccactcaggctagtttgtactagtagagttttgtttctatttttatttttattaattttattttttttaatacagattttcagtgaggggctttttcaaccccattggttctattttcttgtatttttccatttaatttgcttcataacttaaaccaagtctcttctagtcttaggtattatttctcgattttgtgctgatgggcatgtttataagaactggagaggtaatttattggaatgaactaactgacttcctccattcccctcttcctttttgacatgaattttactacttcacaaatgaagaatgatgttatgaagttaccgtggcgaagttgacaaataccactaaaatgattatgatttagaagtaactttcttctgctgctctaatctgataaatggttactatatgatattttctgacatggtatttggttttgggtatctgttactttggcactattcttgtttgcctctttatttttgccagtgtactatacctcagtcctatttgaaagacctaattgaaagaaaaatcatagaaataagtaaaatgatttgttttataatttatccaccatgtccagtttggttagcttgttatgcaatataagtgaaatatcaggtttttacccgtgtcccttttatcatgaaaattaacacaaaatgtgcattctcttttgtttcatacttagcgggatattgattgttttgaaattatgatcaatacttaatttatttttttctgtccttgaagtcactacaccttgatacagtctttctagtagtcaccatgattcaacagtctcaaaaatcttacaaataaaattctgagaagctttattattctataaattcttcagggtacaaagggtgacatattgaggtgaaattgtcagatttacttagcctggtgacatgaattagctgattgtggaactctcagcagcatttcacgtattgttaacatgtatggcatttattagcatattgtatattatataagattgagggatgtcatattttcagctttcttttaaataaaaattgagtatattttcctattttatatcaggtaactaaattatgctagttatgtggaaaaaattgcaaagatgctttgacagatataatccctttggtgctccatctgatcaaagttgaaaagttgatgttttttaagagacaagctttatcattgtctctgatttcagtagaataatggtttattgttagacaatgatgtttctgcttggataaatcaaagataaattacagttacatggttagatgcatcttttgtcatctatattgtagtttctacataactgtaaacctgacagataagaatagtttcggtttgatttttgtttaaaacagatgagtacttcttaatgttctagacaaatgagtaaaatgtatttctggtagaaattagttgggcaaagatactatgaatgaaaaagtattttaaacgtaaaatgttctttgtgaatatgtaagtatagtataaagatttctttcatcccatttatccccttcctttaaataaactagtttacaattggtagatctgtctatatataaatatatattaaagaacaaagatatatatctaaaaatcacctaaatctgctttattagactacagttcacttattgcatagaaactggacttggctttacattcttaatgtacttttacttttcctcaagatatgaacttactctcttgaagctgaattttcttttactacttaaatcatttatgtatatctggtaaattatgaccaaatttttgttagattgcatacagtaaattgaaatacacacttggtacactacgggattgttgtgcttttgtttggttttagttggaaataaggtttgatgtagatggcttgttactgttaatttaaaatattctataattgtccattactttatgttgtgttgtgacagatttggctatatttttagtcaattgaaatatgatactttaaaagtttgtttttaggtaatccaaaggaaaagtgtttatactcttgaatatattagcctcagcctatataaaaatttctttgaagtaaacattttaccggaaacagaattgacagatttttctacttgctgactgcctaacttattttgtttcatgatctcgagggactgccttttcccatctagatcttttaaaaaaatagttttagtactaaggtatactactggacatttctatttttttaagtgtattctttttctgacttacagtaaaatttcaggaagttgatagatactaagaacttatgattggtctcagaggtaacaatgaaatactcataattttgtctgtggaactctggcagaattatgttacacatttggcgaagttgtctcttgtaatttatattttaaatgaaaaagtattttagagcttttaatgaaggggaagagtataaactttctttcatattcactctgtagttacagaccgtctcataaatcaagattgtgcattattagagttctcagagacagatacttccatatggacccctgttcatttttcttatttactagatattttgctaaatttagcacactagcaattaagagtttaaaaaagaagaaacgttataggaaagggaaactgaacagtaatgagtagctttgaaattggggaaaacacactagctgggttaggtacagctatcctaatggagaagagtgagctaaatgcgttaattcatgtaaagtgcttagaacactggtacataataggtgcataacacatcttaaagttgtttaataatagataagaaccaagaggaaaaagaaataagaaaagatgggggaaaggaaggagaaaataggaaatgaaaggattaggacttgggcatttatattaatacaaaatggtgtaaacggcctgaatatcactgtagtagtatcatacgggggaaagtgtgatggaaaataggtttaaaaatcttaatttttaaaactttagtaagctttatttatattttttaggattttctgaacatagcatgaagggtttagattcatttttctgaaaaacgattaaaaaaactaccaattttttttttgagtgcccacacttgccgttgtgctgtatacatgattttaccttaatcctctataaggtaggtgctaattgtctccattttatagatgaggaaaggctcagagaaattcagaaacttggctaatttaacacagctgtgacagagctcgaatttgaccacgtctgattctgaagcccatactctttcagggaggctctattgctgcctcattaaacaactcttgtagaatttcagctcttaatggagtctatggattatatttttcctataagacagctgtgtttagaattttgagtgtctttcctccccccaataaatttccttactactctttcttcataaagcagttgttttgtcactttgactatattaagacacatcagtgtagcacatgctcttaactggctgtggcattttaattttataaaagaatggtttttatctgaagaactagatagaaaccccagtttttgtgccgttcagtcacccagatccttaaacttaactatggtacataatatccacacttagaactaacaggtgtttagtcactttaggacttaaaatggaaagtttttttttttttcctgctgtatctctgctttcaactgaagttaaagaattctagatagtttaaaatgtgttagggataagcacacttcaaaagatgttttctagccctaaattttatgacattgggtacttaaatttggagtacactagctattgagaacaatattttgggttgaggagagatggttgaggccattatttagtgggagcattggcattttgaacactgtaaacaaaagaacacttccgcctgctgtttgtaaaagctctttgggaagatcttttacgaagaccaactttttaaaatgtaaattacctacctaatataagtgtcctaagacatgtatgtaaacttccggaactgttttgtctgtgtatttagaaaatacacaagaatctttattcaaacctaaaaatataaacttgtgagcactaaactgcttctggctttgtgaattttattgactgacatttaattcagatttctttgcaagtgtactaatttagactaattggggtaaggggaacaccttaatgaactttgacttatgtataattcagatatctttgtacttaaggcttacaagtttgaattatggaatactataagggttttttgtttatttgtatgtttttatatgaaagtacataaatgacagactacctccaagtaatcctgctttaattaatagcagtgatttgtaatcagtgtatcttttaagattctctacaggttttagaaaatattaaaaattccctgtaatttacatttgtgcataatcttggaaatgggttgaaaagcaaaggtaaactgcttcatcccatgttgtatatttgtggactgattgactacaagtgatgtgatgttataaatttgaagtctttgaaactttattaatgtagagaaaacataactagctttttaggttatttcaaagttagtaatagagcaaaggaaatcagaactggccagatattcagacttgacttagaaaaacaggagtttgttgattttgtttggagaagggcacaataaaggggagcccacatagcattataatgcctagtatctttaaacatgtaaagagctatcatgaggcagaagaattaagaaactttatatgtttctaaggggtcatgattgggaccattggctcaagattgaaaatcggtttttaattatccaaagatgaaatggggctgcttcagaaaaaggtctaccactggagataacgctatgaaaagtgaaagagattacttaatcattttgacaaaggcagtattgaccagacatttctatttcagagttggatttgtgcttagttttttttaggtgttgggacccttgtagttgctttttattttgcttagtcaacaaacactaaaatgataaaatttggtatgtataagtactggacgaaggatgttttgacactaaaaaggacataatttaggaaattaagaatttagacaccaagtttggcttaatagaaaaagtcactatctgaacttctttctttttcaccacaaatcaccgcagaccagtgtttgggagcaggtgtaggaaattgaattattggatctatgtttaggtaagaaaactaaaggtacttcagaatttaggctatgacataactgtctttctgaagtttaaagaaagaaagtgaactatagaaatctattcagctaattaaagtgaatgaaaaatattacagattccataactgcatggcgccttacctgctattaatactgccgccttactgtcagccagatgattttttcccaccacggccagtcttaaatttggcaataagaaaaagctaatcttccaagtgtaagtaggtatgtgttagaatcttggtgaaagataaacacaagacagtcttcttggcgcaggtcctaacagttggtgagataatacataagatggtttcaggattattgtagaattatttaggttgaaagagactgtaagagactaatgaagcatacccagagaggttgctacagtgactccagtcagttttaggacccaggactcctgaacttcaatttcagtattatttttctgtaccaaactcattcaataaatacttgagattagggataagtttgaagttagaagattccagagtacactcaaatagtatttggcacatagcttgttgatcaaaagtatttactaagtgagtgacaaaaggcactagcaactttaaggattttgcctattagtatcatatggcatgtagctatcaagccagtttcgtttagttattttgtgttgccaagcatatgatacgtggtgtcacactgagcctttgggatcctttccctggatacataaccctagtagataatgttactgcaagatgtaatgaccaaatccaacctactgcaaatgttactatggaaatctcaatgcaaaagtagcctttgtgattttttttttaaaccgtctccataacagaacacttagaattattagccatttgctgcaaagtatttgttttaaaatgtctggcatatacaccactaacatttaaatgcccaacattcggtctatacgtgaaaaaactagaagaaaagccctgttggagttttgatgtagagtgcaataatacatcaataaaggtattttaaaatg

SEQ ID NO: 200944 - DNA, 2833 bp, Homo sapiens
  Payload ID: 19661
  Gene Name: zinc finger and BTB domain containing 10
  Uniprot ID: Q96DT7
  ENST ID: ENST00000610895
  CDS Start-End: 130-2226
ccgagcagtttagcgtgcctctcaccctcagcgcctgcgaagccggcggcggcgtcgggactcctcggcgcgcggaggaaggatatctgtgtggatctggagctggacgcgctggaggggaaggagttgatgcaggacggcgcgtccctgagcgacagcaccgaggacgaggaggagggggcgagcctgggcgacggcagcggggcggaaggcggcagctgcagcagcagcaggcggtcgggcggcgatggcggggacgaagtggagggcagcggtgtgggagctggcgaaggagagactgtccagcacttcccgctcgcgcggcccaagtctctaatgcagaagctccaatgctccttccagacctcctggctcaaggactttccctggctgcgctattccaaggatactggtcttatgtcttgcggctggtgccaaaagacccctgcagatgggggaagcgtggaccttcccccagtggggcatgatgagctttcgcgagggacccgcaactacaagaaaaccctcctcctgaggcaccacgtctctaccgagcacaaactccacgaagccaacgcccaggagtcagaaataccatcagaggaggggtactgtgactttaatagtaggccaaatgagaactcttattgctatcaacttctgcgacaactaaatgaacagagaaagaaaggtattctttgtgatgtcagcattgtggtaagcggaaaaatcttcaaagctcataagaacatcctggttgcaggcagccgtttctttaagactttatattgcttttcaaacaaagaaagccctaaccaaaacaatactacccacttagatattgctgcagttcaaggtttttcagtcatcttggacttcttgtattctggtaacctggtgctcacaagccaaaatgccattgaagttatgaccgtggccagctatcttcaaatgagtgaagttgttcaaacttgccgaaatttcattaaagatgccttaaatataagcattaaatcagaagctccagagtctgtagttgtggactataataatagaaaaccagttaatagagatggtctgtcttcatcacgggatcaaaaaattgccagtttttgggcaacacggaatcttaccaatttggcaagtaatgtaaagattgaaaatgatggttgtaatgtcgacgagggccaaatagaaaactaccaaatgaatgacagtagttgggtccaggatggatctcctgaaatggctgaaaatgaatctgaaggtcaaacaaaagtgtttatttggaataatatgggctcccagggaattcaagagactggcaaaacaaggaggaaaaaccaaactacaaaaagatttatttataatattccacctaataatgaaacgaatttagaagattgctcagtaatgcagccacctgttgcctatccagaagaaaatacactactcatcaaggaagaaccagatttagatggtgctctactctcggggccagatggtgataggaatgtgaatgcaaatttattggctgaagctggcactagtcaagatggaggtgatgctggtacttcacatgatttcaagtatggtttgatgcctggtccttcaaatgatttcaagtatggattgataccaggtacttcaaatgatttcaagtatggattgataccaggtgcttcaaatgatttcaagtatggattattgccagaatcttggccaaaacaagaaacctgggaaaatggtgaatcatctctaatcatgaacaagttaaaatgccctcattgtagctatgtagccaaatacagacgaacactaaaaaggcacttgctcattcacacaggagtgagatcatttagctgtgatatttgtggaaaactgtttactcgaagagaacatgtaaaaagacattccctggtgcataaaaaggataaaaaatacaaatgtatggtgtgtaagaagatcttcatgttagcagccagtgttggaataagacatggatctcgacgttatggtgtttgtgtagactgtgcagataaatcacagccaggagggcaagaaggtgtagatcagggacaggatacagaattccctcgggatgaagaatacgaggagaatgaagtaggagaagctgatgaagagctagttgatgatggagaagatcagaatgatccctctcgatgggatgaatcaggagaagtttgtatgtctctagatgattaactgacctactatactcctcaaggatgctgcatttggacctaatatgaatcgacaatttggattgttgaacttgaaggcttgcaaaatatggtacatgctggatagtagttatgttgctgtgaaaactgtagggtcaaagccttatagcaaaaaaaatttttttttatatttgcacaggactatacagcaaacaaccatgtggttggattacatggagtccccacatactcagtcagttatcaaagtaaaatattttttatttataggatatacagtaactatttgggtcctatgaaaatagtccttaaagagcttacattcatgtgctactttaacatgaatggagaaaatccgtttatggaagtacagtgacaattgacccaatcactctgtccatcaaaccactcaggctagtttgtactagtagagttttgtttctatttttatttttattaattttattttttttaatacagattttcagtgaggggctttttcaaccccattggttctattttcttgtatttttccatttaatttgcttcataacttaaaccaagtctcttctagtcttaggtattatttctcgattttgtgctgatgggca

SEQ ID NO: 200945 - DNA, 6020 bp, Homo sapiens
  Payload ID: 19662
  Gene Name: zinc finger and BTB domain containing 11
  Uniprot ID: O95625
  ENST ID: ENST00000312938
  CDS Start-End: 582-3743
ttttccagaagcctgaaaatatgcttttatgatgttgggagtctcaaacgtaaaaacggactcctaaccctctggatgtttcggctgaactctcaactgtccaccagctccccctacacgtggctccttagaaagcgtggaaaagggaaaaatgaaaagagaaactgccaggacttaagatgtctgcttaaagactccctcgaactgcagtgaagggtcctacccgcttccaaaatgtccacccgcattcctgacgtcactggatcggctccatcaagccagaaaacgagagtgcgctccaatcagggctcagtccccgcccttgccttgcgtcacttccggtggtgcagcagccattttgtcagtcgccagcggatcccgcgcgctggagaagtgcagttccccctggttaccaactcgcccgcttttccttcggactaagggagccgtcgaagagcgctcgccaaaggcgcagccgtttctccctacggtgccgccgctcctcctgcagccgcccgtaggtagcgggccgttttcctcacctgtccctgacaggcgccctcagggagccgcggtccgcgatgtcaagcgaggaaagctaccgggccatcctgcgttacctgacgaacgagcgcgagccgtatgcgccgggcaccgagggcaatgtcaagcgtaaaatccgaaaagctgccgcctgctacgtggtgcgcggcgggactctgtattaccagcggcggcagcggcaccgcaagaccttcgcggagctggaggtggtgctgcagccggagcgacgccgggacctcatcgaggcggcgcacctgggtcccggcggcactcaccacacccggcatcagacctggcactacttgtccaagacgtactggtggcgaggtatattgaagcaagtcaaagattacattaaacagtgtagcaaatgccaggagaaactagatcgatcccgtccaatatcagatgtttcagaaatgttggaagaattgggactagaccttgaatctggagaagaaagtaatgaatcggaagatgacctgagcaactttacttcatctccaactacagcatccaagcctgcaaaaaagaagccagtatccaaacatgaacttgtgtttgttgacaccaaaggagtggtaaaacgttcttctccaaaacattgtcaggctgtcttaaaacagctgaacgaacagagactttccaaccagttctgtgatgttactttgttaattgaaggagaagagtacaaagctcataaatctgttttgtcagcaaatagcgagtattttcgagatctttttattgagaaaggagctgtttccagtcatgaggctgtggtggatctttctggtttttgtaaggccagcttccttcctttactggaatttgcctatacttctgtactaagttttgatttctgtagcatggctgatgtagccatcttagctcgtcatcttttcatgtcagaagtcttagagatttgtgaaagtgtacataagctaatggaagagaagcagctaacagtatataagaagggcgaagtacaaacagttgcatccacccaggacttacgagtacagaatggaggtacagcacctcctgttgctagcagtgagggaaccacaacaagtttacctactgaacttggggattgtgaaattgtactactggtaaatggagaattgccagaagctgagcagaatggagaggtaggacgacagcctgagccccaggtttcttcagaggctgaatctgccctgtcatcagtaggatgtatagctgattcccatcctgaaatggagtctgttgatttaataacaaaaaacaaccagacagaactagaaacttcaaacaacagagaaaataacacagtttctaatatacaccctaaactttcaaaagagaatgtaattagtagctcgccagaggatagtggtatgggaaatgatatatcagctgaggatatttgtgccgaagacattccaaaacataggcagaaagttgaccaacctttaaaagatcaggaaaatctagttgcatcaacagcaaagacagactttggccctgatgatgatacttatagaagcaggcttcgacaacgttctgttaatgaaggggcatatattcgactacacaagggaatggagaaaaagctgcagaaacggaaagccgttcccaagtcagcagttcaacaggtggctcagaagttagttcaaagaggaaaaaagatgaaacagccaaaaagagatgctaaagagaacacagaagaagcatctcataaatgtggggaatgtggaatggtttttcagagacgatacgcccttataatgcacaaactgaaacatgaaagagctagagattacaaatgtccattgtgtaaaaaacagtttcagtacagtgcctctttgcgagcacatcttattcgtcataccagaaaagatgcaccctcttcatcctcgtccaattccacgtctaatgaagcatcgggaacatcatctgagaagggcagaaccaagcgggaatttatatgttccatatgtggaagaacattacctaaattatattctctccgaatacatatgttaaagcacacaggtgtaaagccacatgcatgccaggtctgtggaaagacttttatctataagcatggtctaaaattacatcagagtcttcatcaatcacagaagcagttccagtgtgaactgtgtgttaagtcatttgttaccaaacggagtcttcaagaacatatgagtattcacacaggagagtccaagtacctttgctcagtttgtggaaagtcttttcataggggctctggactcagcaagcacttcaagaaacaccaaccaaagcctgaggttcgaggctatcattgtactcaatgtgaaaaaagtttctttgaagctagagatcttcgccagcacatgaacaaacatcttggtgtgaagccattccagtgccaattttgtgataagtgctatagttggaagaaagattggtattcccatgtgaagtctcattctgtcactgagccttataggtgtaatatatgtggcaaagaattttatgaaaaagctttgttcagaaggcatgtaaagaaagctacccatgggaagaaaggaagagcaaagcaaaacctggaacgggtgtgtgaaaaatgtggaagaaaattcactcagctaagagagtataggagacacatgaacaaccatgaaggagttaagccatttgagtgcttaacatgtggagtagcttgggctgatgcccgatctctaaaacgccatgtcagaacacatactggtgaacggccctatgtctgtcctgtatgtagcgaagcctacatagatgctcgaacactccgtaaacatatgactaaattccacagagactatgtgccttgcaaaattatgctggaaaaagacacccttcagtttcataaccaaggaactcaagtggcacatgctgttagcatcttaacagcaggcatgcaggaacaagaaagcagtggtcctcaagaacttgagactgtggtagtgacaggagaaactatggaagctctggaagctgttgcagctactgaagagtatccatcggtatctacactttctgaccaaagtattatgcaagtggttaattatgtattagcacaacagcaaggacagaagctatctgaagttgcagaagctattcaaactgttaaagtagaggtagcacatatttcaggaggagaatgagtatgttaatgaagataaaaagaagtgacatctcttgtacactgaactcacagaacatttgtttacaattctgtgtgactgtctgcttggagtttacatatcaaagttctgggctgtttggtaacgtaacgtttccaaacattttgtctggccaatgggttctatagaaaagtccgtttagtgtagagaaattgaaaacagatctattaggttggtgcaattgcttttgcaccaacctaatatttgatggcagtggtttatcatgatataccttttatgaattaatgtttataaatgactgtactgaatttaaaaccgtacagtttcatttgcattttgacattactttattatacattttgcatttaaaaggctgcaccagttggcttttcttctgttttattctcaaaatatagagattctgtgatttatttgccctgtttatggattaaaaagaaaattctaatataaagcatttcaataggatgcataggtatattacgttttttaaatgctttagatctgtgattcttgacttactatttattttatccccttttaagtcagggatgctttattctattttaaagcacttatgagttacatgttgtaatcaagtttgcacaatatatttatctatatgaggaacccataaatgaatagctaatttttaaaatgccattaaaatgcatgaaatgcttattaaaaccttactatactatttcttcaaggcaagtaaattgaccatgagaaaagaacacagttattaaacactgttgacaggaaaattctccttgataacataggacaattaatggaaaaaaaaattctcattatttgcaaagaatgaacaagttaatgaacaaacaaactagatttggtatgttttcagcttttgtatcatgtttaattgtttaatttggttgaaaaactgcagttgagaaatcagatagcaatatagacattcacagcagctctgtggataccatgtaattgtcaggtaatttcagaatgttgaaaattattcagtgcagccctcatagtatcatacttgaagaaattgattacagttccactaaattgttgaagataaattatttttaaaggttatgaaaactaagttatattaattcatatgtttgatttttaaatcccacctcctcaagctatccaattttctgactttgaaaataaccatgagagatgccacatttctctctgggaaactaccactcaaagaataattgttaaaaattaagcttttaggtattagaagctgttataaagtataaaattaagatataagcagatcacatgtaaatcattcctaaagcacaagaaaagaatgtgccttgatgtacatatattactaagttgcctctcccagtttactttaaaaatggctttaaggataaagaataaatgtgatagctgtgcatgcattatatatttgcatttgcaaatttcccattgttttaacagctgtgtggctgactttcaattttaagacgtgaattgacatacagcccataactttataatggctgctcatttatcttatctttcagttagtggaaaaacatttcaacctgactaaaatttggaattgtgtcttttatgttccatcctctgttgttactagatttagtttaaaaattgtgtatgaccattaatgtatgtcataaacatgtaaataaaagatgttgaatcttgttgaaaagcatgaactttggagttgagcttgttactattttcagttcataaatcagttgttacttgatgtgttattaagttaatttatttttaaagggaaaggaaataaaacactaaaaaataacgattggaggaacacaatattaaaacttcttactcttacatataattgatatggacaagaggcaaggaaataatgggtagaagagggcagttccccagcaaaagcctggaaacccatggccctaaatgggaacaggcattcctgttttcatgcccaaatgttgccttttggcccaccacgccctcctatcctgtatccatataaaccctaaaccccaggctccatgagcagaagagtgttgcggcagaggagagaagagaggagcatctaaacgtccagaggagttcagctggggacggttggagaggagatcatcttcccactccatcccctttccagctccccatccatcctgctgagagccacctttatccagcaataaaatcccctgcatttaccatccttcaatttgtccatgtgacctgattcttcctggacgc

SEQ ID NO: 200946 - DNA, 2115 bp, Homo sapiens
  Payload ID: 19662
  Gene Name: zinc finger and BTB domain containing 11
  ENST ID: ENST00000461821
  CDS Start-End: 205-852
cccgcgcgctggagaagtgcagttccccctggttaccaactcgcccgcttttccttcggactaagggagccgtcgaagagcgctcgccaaaggcgcagccgtttctccctacggtgccgccgctcctcctgcagccgcccgtaggtagcgggccgttttcctcacctgtccctgacaggcgccctcagggagccgcggtccgcgatgtcaagcgaggaaagctaccgggccatcctgcgttacctgacgaacgagcgcgagccgtatgcgccgggcaccgagggcaatgtcaagcgtaaaatccgaaaagctgccgcctgctacgtggtgcgcggcgggactctgtattaccagcggcggcagcggcaccgcaagaccttcgcggagctggaggtggtgctgcagccggagcgacgccgggacctcatcgaggcggcgcacctgggtcccggcggcactcaccacacccggcatcagacctggcactacttgtccaagacgtactggtggcgaggtatattgaagcaagtcaaagattacattaaacagtgtagcaaatgccaggagaaactagatcgatcccgtccaatatcagatgtttcagaaatgttggaagaattgggactagaccttgaatctggagaagaaagtaatgaatcggaagatgacctgagcaactttacttcatctccaactacagcatccaagcctgcaaaaaagaagccagtatccaaacatgaacttgtgtttgtaagtggtactctccagtcagctttaagatttgtaactagtgtactagtatttgcagccttggtgacttatttttctcaaaccactaagactgcttattgaataagacaaaatggcagtgtactgtgttatataagctgaactgcctcttcatttatcataaatgttcctgttattttttcagaatgaacttaataattacctgttggtttgttgttaattatcctccctcccttcttttgtgatgatatattggtacaagtagacagatttacatttctggaagcagtctctgagtttacgccccaaggtaaaattaatctggccaggtctttgtttttcacctgcatcagtttcatacatcatcatatttctgattagtaagaagaggcagccagaagtgagatacagattttcattaggtgaggtagaatgaacatggcagaaaataggataggacaacatatctttttatttaaatacataggtaacaaagaaaatatcaaattattcatacctggtaaaaggtaatatgtaatgtgtcttgttttaaagcttgttaagggtaaaaaatacaggtaatatgttactcttgctctcaaacttattttgacaggttgacaccaaaggagtggtaaaacgttcttctccaaaacattgtcaggctgtcttaaaacagctgaacgaacagagactttccaaccagttctgtgatgttactttgttaattgaaggagaagagtacaaagctcataaatctgttttgtcagcaaatagcgagtattttcgagatctttttattgagaaaggagctgtttccagtcatgaggctgtggtggatctttctggtaagggttttgtattactcttgctttttgtttgtaatgacattctagaagagggggatatgtatgtcttccacacacggactttatgccaaagtaagagaagcccactaacaacagtagactaagctgtactgaaaaggttctttttagcaagatttctgtggtagagttatggaaaagggtgtcatttcctttcactacgtcttaagtgagacaattatagcagaaaaagaatttctaggatttaaactgttaaaaacagtttgagtgaaatccataagtgcaacaaaattattacattaaatgaatatgttatttaaaaattgattgtttaagctaggtgtggtggtgcccgcctgtagtcccacctacttgggaggctgggatgtgaggatctgcttaaggtcaggagttccaggctgtggtgtgtcattgtacctgtgaatacccactgctctccagacggggcaatataacaagaccctgcctctaaaaataaaaagcaaataaaaattga

SEQ ID NO: 200947 - DNA, 1877 bp, Homo sapiens
  Payload ID: 19663
  Gene Name: zinc finger and BTB domain containing 12
  Uniprot ID: Q9Y330
  ENST ID: ENST00000375525
  CDS Start-End: 179-1558
cgcccacgcggagccggccccgcgcgcgcgcgcgtgtcccgtgcatccccgcgcctgcgcgctgcccaggccctgcccgtgtgtgggggtcgctgccggccccgggggggggtggggaaaataagggattaaaaaaacagcgcgcggaaccgggccagggttgcccacccccgccacaatggcctctggggtggaagtcctgcgcttccagctgcccggccacgaggccgcaacgctacggaacatgaaccagctccgggcagaggagcggttctgcgacgtgaccattgtggccgacagcctcaagtttcgaggccacaaggtcatcttggccgcctgctcacccttcctgcgggaccagttcctgctgaaccccagctcggagctgcaggtctccctgatgcacagtgcacgcatcgtggccgacttgctcctctcctgctacacgggcgccttggaattcgctgttagggacatcgtcaactaccttacagccgcctcctacctgcagatggagcacgtggtggagaaatgccggaatgccctcagccagttcattgagcccaaaataggcctcaaagaggatggggtcagtgaggctagccttgtgagcagcatcagcgccaccaagtccctcctccctccagccaggaccccaaagccagccccgaagcccccacccccacctcctctaccccctccactcctgcggccagtgaagctggagttcccactggatgaagacttggagctgaaagccgaggaagaggatgaggatgaggatgaggacgtgtctgacatctgcatcgtcaaggtggagtcggccctggaggtggcacaccggctcaaaccccctggaggcctgggagggggtctgggcattggaggctccgtgggtggccaccttggggagctggcccagagcagcgttccccccagcactgtagccccaccgcagggtgtggtgaaggcctgctatagcctgtcggaagatgcagaaggggagggcctgctgttgattcccggaggccgggccagcgtgggggccacctcgggcctggtggaagcagcagcggtggccatggctgcccggggggcggggggcagcctgggggcggggggcagccggggacccctgcctgggggcttctcaggtggaaaccccttaaagaacatcaagtgcacgaagtgcccggaagtgttccagggcgtggagaagctggtcttccacatgcgggcgcagcacttcatcttcatgtgccctcgctgtggcaagcagttcaaccacagcagcaacctcaaccgccacatgaacgtgcatcgtggtgtcaagtcacactcgtgcggcatctgcggcaagtgcttcacacagaagtccacccttcacgaccacctcaacctgcactcgggagcgcggccctaccgctgctcctactgcgacgtgcgcttcgcccacaagcctgccattaggcggcacctcaaggagcaacacggcaagaccacggccgagaacgtgctggaggccagtgtggccgagattaacgtcctcatccgctagccgcgcaggcgtggaggccaggaggctggggcccctgggctgcgtggaaaaagggctctttggcccaggagaattggggggtggggggtctggggcagaaaggtaagagtgggaggctgagcagatgcacacatcctgagagagggaagatgattccttggagagacttgctcttgagagtgcaagaatctggagctgggaaaagggttcttggaggccaggggaatacggggtcccagagaaagatttccttctcttagaagtgcatgtatatgtggagggagggaaaagggtcctatagaatgagggaagacaaaaa

SEQ ID NO: 200948 - DNA, 1875 bp, Homo sapiens
  Payload ID: 19663
  Gene Name: zinc finger and BTB domain containing 12
  Uniprot ID: Q9Y330
  ENST ID: ENST00000375527
  CDS Start-End: 177-1556
cgcccacgcggagccggccccgcgcgcgcgcgcgtcccgtgcatccccgcgcctgcgcgctgcccaggccctgcccgtgtgtgggggtcgctgccggccccgggggggggtggggaaaataagggattaaaaaaacagcgcgcggaaccgggccagggttgcccacccccgccacaatggcctctggggtggaagtcctgcgcttccagctgcccggccacgaggccgcaacgctacggaacatgaaccagctccgggcagaggagcggttctgcgacgtgaccattgtggccgacagcctcaagtttcgaggccacaaggtcatcttggccgcctgctcacccttcctgcgggaccagttcctgctgaaccccagctcggagctgcaggtctccctgatgcacagtgcacgcatcgtggccgacttgctcctctcctgctacacgggcgccttggaattcgctgttagggacatcgtcaactaccttacagccgcctcctacctgcagatggagcacgtggtggagaaatgccggaatgccctcagccagttcattgagcccaaaataggcctcaaagaggatggggtcagtgaggctagccttgtgagcagcatcagcgccaccaagtccctcctccctccagccaggaccccaaagccagccccgaagcccccacccccacctcctctaccccctccactcctgcggccagtgaagctggagttcccactggatgaagacttggagctgaaagccgaggaagaggatgaggatgaggatgaggacgtgtctgacatctgcatcgtcaaggtggagtcggccctggaggtggcacaccggctcaaaccccctggaggcctgggagggggtctgggcattggaggctccgtgggtggccaccttggggagctggcccagagcagcgttccccccagcactgtagccccaccgcagggtgtggtgaaggcctgctatagcctgtcggaagatgcagaaggggagggcctgctgttgattcccggaggccgggccagcgtgggggccacctcgggcctggtggaagcagcagcggtggccatggctgcccggggggcggggggcagcctgggggcggggggcagccggggacccctgcctgggggcttctcaggtggaaaccccttaaagaacatcaagtgcaccaagtgcccggaagtgttccagggcgtggagaagctggtcttccacatgcgggcgcagcacttcatcttcatgtgccctcgctgtggcaagcagttcaaccacagcagcaacctcaaccgccacatgaacgtgcatcgtggtgtcaagtcacactcgtgcggcatctgcggcaagtgcttcacacagaagtccacccttcacgaccacctcaacctgcactcgggagcgcggccctaccgctgctcctactgcgacgtgcgcttcgcccacaagcctgccattaggcggcacctcaaggagcaacacggcaagaccacggccgagaacgtgctggaggccagtgtggccgagattaacgtcctcatccgctagccgcgcaggcgtggaggccaggaggctggggcccctgggctgcgtggaaaaagggctctttggcccaggagaattggggggtggggggtctggggcagaaaggtaagagtgggaggctgagcagatgcacacatcctgagagagggaagatgattccttggagagacttgctcttgagagtgcaagaatctggagctgggaaaagggttcttggaggccaggggaatacggggtcccagagaaagatttccttctcttagaagtgcatgtatatgtggagggagggaaaagggtcctatagaatgagggaagacaaaaa

SEQ ID NO: 200949 - DNA, 1875 bp, Homo sapiens; identical to SEQ ID NO: 200948
  Payload ID: 19663
  Gene Name: zinc finger and BTB domain containing 12
  Uniprot ID: Q9Y330
  ENST ID: ENST00000458242
  CDS Start-End: 177-1556

SEQ ID NO: 200950 - DNA, 1875 bp, Homo sapiens
  Payload ID: 19663
  Gene Name: zinc finger and BTB domain containing 12
  Uniprot ID: Q9Y330
  ENST ID: ENST00000432044
  CDS Start-End: 177-1556
cgcccacgcggagccggccccgcgcgcgcgcgcgtcccgtgcatccccgcgcctgcgcgctgcccaggccctgcccgtgtgtgggggtcgctgccgaccccgggggggggtggggaaaataagggattaaaaaaacagcgcgcggaaccgggccagggttgcccacccccgccacaatggcctctggggtggaagtcctgcgcttccagctgcccggccacgaggccgcaacgctacggaacatgaaccagctccgggcagaggagcggttctgcgacgtgaccattgtggccgacagcctcaagtttcgaggccacaaggtcatcttggccgcctgctcacccttcctgcgggaccagttcctgctgaaccccagctcggagctgcaggtctccctgatgcacagtgcacgcatcgtggccgacttgctcctctcctgctacacgggcgccttggaattcgctgttagggacatcgtcaactaccttacagccgcctcctacctgcagatggagcacgtggtggagaaatgccggaatgccctcagccagttcattgagcccaaaataggcctcaaagaggatggggtcagtgaggctagccttgtgagcagcatcagcgccaccaagtccctcctccctccagccaggaccccaaagccagccccgaagcccccacccccacctcctctaccccctccactcctgcggccagtgaagctggagttcccactggatgaagacttggagctgaaagccgaggaagaggatgaggatgaggatgaggacgtgtctgacatctgcatcgtcaaggtggagtcggccctggaggtggcacaccggctcaaaccccctggaggcctgggagggggtctgggcattggaggctccgtgggtggccaccttggggagctggcccagagcagcgttccccccagcactgtagccccaccgcagggtgtggtgaaggcctgctatagcctgtcggaagatgcagaaggggagggcctgctgttgattcccggaggccgggccagcgtgggggccacctcgggcctggtggaagcagcagcggtggccatggctgcccggggggcggggggcagcctgggggcggggggcagccggggacccctgcctgggggcttctcaggtggaaaccccttaaagaacatcaagtgcaccaagtgcccggaagtgttccagggcgtggagaagctggtcttccacatgcgggcgcagcacttcatcttcatgtgccctcgctgtggcaagcagttcaaccacagcagcaacctcaaccgccacatgaacgtgcatcgtggtgtcaagtcacactcgtgcggcatctgcggcaagtgcttcacacagaagtccacccttcacgaccacctcaacctgcactcgggagcgcggccctaccgctgctcctactgcgacgtgcgcttcgcccacaagcctgccattaggcggcacctcaaggagcaacacggcaagaccacggccgagaacgtgctggaggccagtgtggccgagattaacgtcctcatccgctagccgcgcaggcgtggaggccaggaggctggggcccctgggctgcgtggaaaaagggctctttggcccaggagaattggggggtggggggtctggggcagaaaggtaagagtgggaggctgagcagatgcacacatcctgagagagggaagatgattccttggagagacttgctcttgagagtgcaagaatctggagctgggaaaagggttcttggaggccaggggaatacggggtcccagagaaagatttccttctcttagaagtgcatgtatatgtggagggagggaaaagggtcctatagaatgagggaagacaaaaa

SEQ ID NO: 200951 - DNA, 1875 bp, Homo sapiens; identical to SEQ ID NO: 200948
  Payload ID: 19663
  Gene Name: zinc finger and BTB domain containing 12
  Uniprot ID: Q9Y330
  ENST ID: ENST00000441555
  CDS Start-End: 177-1556

SEQ ID NO: 200952 - DNA, 1380 bp, Homo sapiens
  Payload ID: 19663
  Gene Name: zinc finger and BTB domain containing 12
  Uniprot ID: Q9Y330
  ENST ID: ENST00000611032
  CDS Start-End: 1-1380
atggcctctggggtggaagtcctgcgcttccagctgcccggccacgaggccgcaacgctacggaacatgaaccagctccgggcagaggagcggttctgcgacgtgaccattgtggccgacagcctcaagtttcgaggccacaaggtcatcttggccgcctgctcacccttcctgcgggaccagttcctgctgaaccccagctcggagctgcaggtctccctgatgcacagtgcacgcatcgtggccgacttgctcctctcctgctacacgggcgccttggaattcgctgttagggacatcgtcaactaccttacagccgcctcctacctgcagatggagcacgtggtggagaaatgccggaatgccctcagccagttcattgagcccaaaataggcctcaaagaggatggggtcagtgaggctagccttgtgagcagcatcagcgccaccaagtccctcctccctccagccaggaccccaaagccagccccgaagcccccacccccacctcctctaccccctccactcctgcggccagtgaagctggagttcccactggatgaagacttggagctgaaagccgaggaagaggatgaggatgaggatgaggacgtgtctgacatctgcatcgtcaaggtggagtcggccctggaggtggcacaccggctcaaaccccctggaggcctgggagggggtctgggcattggaggctccgtgggtggccaccttggggagctggcccagagcagcgttccccccagcactgtagccccaccgcagggtgtggtgaaggcctgctatagcctgtcggaagatgcagaaggggagggcctgctgttgattcccggaggccgggccagcgtgggggccacctcgggcctggtggaagcagcagcggtggccatggctgcccggggggcggggggcagcctgggggcggggggcagccggggacccctgcctgggggcttctcaggtggaaaccccttaaagaacatcaagtgcacgaagtgcccggaagtgttccagggcgtggagaagctggtcttccacatgcgggcgcagcacttcatcttcatgtgccctcgctgtggcaagcagttcaaccacagcagcaacctcaaccgccacatgaacgtgcatcgtggtgtcaagtcacactcgtgcggcatctgcggcaagtgcttcacacagaagtccacccttcacgaccacctcaacctgcactcgggagcgcggccctaccgctgctcctactgcgacgtgcgcttcgcccacaagcctgccattaggcggcacctcaaggagcaacacggcaagaccacggccgagaacgtgctggaggccagtgtggccgagattaacgtcctcatccgctag

SEQ ID NO: 200953 - DNA, 3528 bp, Homo sapiens
  Payload ID: 19664
  Gene Name: zinc finger and BTB domain containing 14
  Uniprot ID: O43829
  ENST ID: ENST00000357006
  CDS Start-End: 340-1689
gtgttcacggccggctagacattctgtgctcgtgcaggaggagggctgctaccatcagggacgtgcacgatttcccccaccccgccccctccccaaactccaaaaaaaaatccaaaacacactgccacccaccgtgcccccgcgccccgagcccctccggtcccggcctgcgtttgctagcgagcgcggggaacccacggcagtgtctgtgcctgtgccaggctgcaggatatgggtctgcaggatggagttcttccggtctggcgtgctcctgatcagagttactctgatctgaagattttggcgttcaaggcattaagataatagcctgagttgttcatggagtttttcatcagtatgtctgaaaccattaaatataatgacgatgatcataaaactctgtttctgaaaacactaaatgaacaacgcctggaaggagaattttgtgatattgctattgtggttgaggatgtgaaattcagagcacacagatgtgttcttgctgcctgcagcacttactttaaaaagcttttcaagaagcttgaggttgatagttcttcggtcatagaaatagattttcttcgttctgatatatttgaagaggtcctgaactacatgtacacagcaaagatttccgtgaaaaaagaagatgttaacttaatgatgtcatcgggtcagattcttggtatccgatttttggataaactgtgttctcagaagcgtgatgtgtccagtcccgatgaaaacaatggtcagtccaaaagtaagtattgccttaaaataaatcgccccattggagatgctgctgacacccaggatgatgatgtagaggaaatcggggatcaggatgacagtccttctgatgacacagtagaaggcacacccccgagtcaggaggacggcaagtcgcccaccacaacgctcagggttcaggaagcgatcctgaaagagctggggagtgaggaagttcggaaggtcaattgctacggccaggaagtagaatccatggagaccccagaatcaaaagacttggggtcccagacccctcaagccttaacatttaatgatgggatgagtgaagtgaaagatgaacagacaccaggctggacaacagccgccagtgacatgaagtttgagtatttgctttatggtcaccatcgggagcagattgcctgccaggcgtgtgggaagacgttttctgatgaaggcagattgaggaagcatgagaaactccacacggcggacaggccatttgtttgtgaaatgtgcacaaaaggtttcaccacacaggcccacctgaaagaacacctaaaaatccacacaggatataagccctatagctgtgaggtgtgtggaaaatcatttatccgtgccccagacttaaagaagcatgagagagttcacagtaatgaaagaccgtttgcgtgccacatgtgtgacaaagccttcaaacacaagtctcacctcaaggatcatgaaagaagacacagaggggaaaagccttttgtgtgtggctcctgcaccaaggcatttgccaaggcatctgatctgaaaaggcacgagaacaatatgcacagtgaaaggaagcaggttacccccagtgccatccagagcgagacagaacagttgcaggcggcagcgatggctgcggaagcagaacagcagctggagacgatagcctgtagctagaggcggtgggacagggacactttgcctggaaagtggagactgagatgacgtggatcataatgagtgaatgccagttacaatatttttgtggaaacgtatggaacattgtactcactggacttaaggcagtgcttggttagctatttttaagacttttcaaggaaatggtgttcctcagttctgaccaaaccgtttcactgtcttgtctggtgtctagtattaatgttgcccagtaagcacctctctcccttttttttttttattattttaatttgagaactcctgtgtccagtttagaagtgagagacttccatttttagttcctttacactcaccaccctagcaagtgccctgcacagagtaataagtaaattgatttcctaatcacaattctatgtgacttatggtcaaaagagcagttttaataactttaaaagtacttcagatagacgcagaaaattggtgagtggttgaccaagaacactgcacaaatataaaaaaagttctggaaatgcagaatggcgttagatttatatttggtttgttaattttatatcactgtttttcactgtttttgtggacaaataatggttgctttgctgaagtgttcttcctcaatcttgattgccctgtacctacccaaaagctgtagtcacacatcctaaaggccaagcaaacccaccgggatggtggggggtcttggagccaagctcttaggttcctcttatttggggcagtaccagtccataccagctgcgatttgtgagtggacctgtggtaagaagaatagaaaaggctctcagagataaggttttttacatgtgtaacaatcccaagatttcctagattaaaatcttaattgattttgaaattggatttttatttagaatcaaaattaggacaagaacagataacttcttcagatacatttgtgtaactttacagaatgtcatcaagctttggggctctgtggggcacatgatttatccataaaggagatgcagtatgcttacttaaattaataaatttaaaatcttttaagtgtgtaaatagtagtgttggtcttacgtatttcaagtaaaaagtagacagctgcactttttttgcacattggattaaaataacttccatcagcaacaaacatcagactgtttttaacaaatattaaagattgtcagaccaaatgtttatgttttcgaaatatatttcatcactggttacagttttaaatagaagttgattgccttttcatagccgtaaatgagaattataaactctattccagttttggtatactaaatgttcttttaaccatctttaggaatatattgaaatgccaacaatagtttgaattgtgttctgtaaaaaagtattagtcaattatttttcaaaatgtagaattgtagaaaatgtcaatttttcaaactcatttttcattgctaggatttcttttaaaaaaattaaagtaatttcacttcatagcttgttgcattaacacctgtaattctattgtgaaagaaatttgattttttaattggtgtgtgttatgcccaagatgttaggatgaagatgctacctttttaaaaattttagttattggtaaaatgtttaattttacttaaaattaatttcttttcttgaaagttgtttattctgttctaaaagtagtcctgtcactgtgtttttatgctacttatagaaggggaactgattgccgttcctaggctgttttaaccaaagcaaaggaaaaataattttaacatcttgtcaatagctacttcaacaaaccatattttgggacttcattttttgtatataaaagaaaatatacttctatca

SEQ ID NO: 200954 - DNA, 1814 bp, Homo sapiens
  Payload ID: 19664
  Gene Name: zinc finger and BTB domain containing 14
  Uniprot ID: O43829
  ENST ID: ENST00000400143
  CDS Start-End: 465-1814
gtagtctccaacgaaagcgtcggcaagggcccggattaaccctttctttgctcgcccacttagagacccggtcgggttccgtgcctgcgcaagccggcggcgcgccttccccccagcccgcaccgcgcatgcacgggaaggggggggcggtgggggtgttcacggccggctagacattctgtgctcgtgcaggaggagggctgctaccatcagggacgtgcacgatttcccccaccccgccccctccccaaactccaaaaaaaaatccaaaacacactgccacccaccgtgcccccgcgccccgagcccctccggtcccggcctgcgtttgctagcgagcgcggggaacccacggcagtgtctgtgcctgtgccaggctgcaggtctggcgtgctcctgatcagagttactctgatctgaagattttggcgttcaaggcattaagataatagcctgagttgttcatggagtttttcatcagtatgtctgaaaccattaaatataatgacgatgatcataaaactctgtttctgaaaacactaaatgaacaacgcctggaaggagaattttgtgatattgctattgtggttgaggatgtgaaattcagagcacacagatgtgttcttgctgcctgcagcacttactttaaaaagcttttcaagaagcttgaggttgatagttcttcggtcatagaaatagattttcttcgttctgatatatttgaagaggtcctgaactacatgtacacagcaaagatttccgtgaaaaaagaagatgttaacttaatgatgtcatcgggtcagattcttggtatccgatttttggataaactgtgttctcagaagcgtgatgtgtccagtcccgatgaaaacaatggtcagtccaaaagtaagtattgccttaaaataaatcgccccattggagatgctgctgacacccaggatgatgatgtagaggaaatcggggatcaggatgacagtccttctgatgacacagtagaaggcacacccccgagtcaggaggacggcaagtcgcccaccacaacgctcagggttcaggaagcgatcctgaaagagctggggagtgaggaagttcggaaggtcaattgctacggccaggaagtagaatccatggagaccccagaatcaaaagacttggggtcccagacccctcaagccttaacatttaatgatgggatgagtgaagtgaaagatgaacagacaccaggctggacaacagccgccagtgacatgaagtttgagtatttgctttatggtcaccatcgggagcagattgcctgccaggcgtgtgggaagacgttttctgatgaaggcagattgaggaagcatgagaaactccacacggcggacaggccatttgtttgtgaaatgtgcacaaaaggtttcaccacacaggcccacctgaaagaacacctaaaaatccacacaggatataagccctatagctgtgaggtgtgtggaaaatcatttatccgtgccccagacttaaagaagcatgagagagttcacagtaatgaaagaccgtttgcgtgccacatgtgtgacaaagccttcaaacacaagtctcacctcaaggatcatgaaagaagacacagaggggaaaagccttttgtgtgtggctcctgcaccaaggcatttgccaaggcatctgatctgaaaaggcacgagaacaatatgcacagtgaaaggaagcaggttacccccagtgccatccagagcgagacagaacagttgcaggcggcagcgatggctgcggaagcagaacagcagctggagacgatagcctgtagctag

SEQ ID NO: 200955 - DNA, 442 bp, Homo sapiens
  Payload ID: 19664
  Gene Name: zinc finger and BTB domain containing 14
  ENST ID: ENST00000578327
  CDS Start-End: 136-442
ggggaggcggctgcagctgcttatgatatgggtctgcaggatggagttcttccggtctggcgtgctcctgatcagagttactctgatctgaagattttggcgttcaaggcattaagataatagcctgagttgttcatggagtttttcatcagtatgtctgaaaccattaaatataatgacgatgatcataaaactctgtttctgaaaacactaaatgaacaacgcctggaaggagaattttgtgatattgctattgtggttgaggatgtgaaattcagagcacacagatgtgttcttgctgcctgcagcacttactttaaaaagcttttcaagaagcttgaggttgatagttcttcggtcatagaaatagattttcttcgttctgatatatttgaagaggtcctgaactacatgtacacagcaaagatttccgtgaaaaaag

SEQ ID NO: 200956 - DNA, 649 bp, Homo sapiens
  Payload ID: 19664
  Gene Name: zinc finger and BTB domain containing 14
  ENST ID: ENST00000582135
  CDS Start-End: 154-649
tctaaggcggcgcggcattgctgtccggcctcctgcatctcggatatgggtctgcaggatggagttcttccggtctggcgtgctcctgatcagagttactctgatctgaagattttggcgttcaaggcattaagataatagcctgagttgttcatggagtttttcatcagtatgtctgaaaccattaaatataatgacgatgatcataaaactctgtttctgaaaacactaaatgaacaacgcctggaaggagaattttgtgatattgctattgtggttgaggatgtgaaattcagagcacacagatgtgttcttgctgcctgcagcacttactttaaaaagcttttcaagaagcttgaggttgatagttcttcggtcatagaaatagattttcttcgttctgatatatttgaagaggtcctgaactacatgtacacagcaaagatttccgtgaaaaaagaagatgttaacttaatgatgtcatcgggtcagattcttggtatccgatttttggataaactgtgttctcagaagcgtgatgtgtccagtcccgatgaaaacaatggtcagtccaaaagtaagtattgccttaaaataaatcgccccattggagatgctgctgacacccaggatgatgatgtagaggaaa

SEQ ID NO: 200957 - DNA, 825 bp, Homo sapiens
  Payload ID: 19664
  Gene Name: zinc finger and BTB domain containing 14
  ENST ID: ENST00000582388
  CDS Start-End: 163-825
ggggcaccagccagctccaggatgtgcggcggccgccagcggcgcggcgcggatatgggtctgcaggatggagttcttccggtctggcgtgctcctgatcagagttactctgatctgaagattttggcgttcaaggcattaagataatagcctgagttgttcatggagtttttcatcagtatgtctgaaaccattaaatataatgacgatgatcataaaactctgtttctgaaaacactaaatgaacaacgcctggaaggagaattttgtgatattgctattgtggttgaggatgtgaaattcagagcacacagatgtgttcttgctgcctgcagcacttactttaaaaagcttttcaagaagcttgaggttgatagttcttcggtcatagaaatagattttcttcgttctgatatatttgaagaggtcctgaactacatgtacacagcaaagatttccgtgaaaaaagaagatgttaacttaatgatgtcatcgggtcagattcttggtatccgatttttggataaactgtgttctcagaagcgtgatgtgtccagtcccgatgaaaacaatggtcagtccaaaagtaagtattgccttaaaataaatcgccccattggagatgctgctgacacccaggatgatgatgtagaggaaatcggggatcaggatgacagtccttctgatgacacagtagaaggcacacccccgagtcaggaggacggcaagtcgcccaccacaacgctcagggttcaggaagcgatcctgaaagagctggggagtgaggaagttcggaaggtcaattgctacggccaggaagtagaa

SEQ ID NO: 200958 - DNA, 3350 bp, Homo sapiens
  Payload ID: 19664
  Gene Name: zinc finger and BTB domain containing 14
  Uniprot ID: O43829
  ENST ID: ENST00000615385
  CDS Start-End: 163-1512
ggggcaccagccagctccaggatgtgcggcggccgccagcggcgcggcgcggatatgggtctgcaggatggagttcttccggtctggcgtgctcctgatcagagttactctgatctgaagattttggcgttcaaggcattaagataatagcctgagttgttcatggagtttttcatcagtatgtctgaaaccattaaatataatgacgatgatcataaaactctgtttctgaaaacactaaatgaacaacgcctggaaggagaattttgtgatattgctattgtggttgaggatgtgaaattcagagcacacagatgtgttcttgctgcctgcagcacttactttaaaaagcttttcaagaagcttgaggttgatagttcttcggtcatagaaatagattttcttcgttctgatatatttgaagaggtcctgaactacatgtacacagcaaagatttccgtgaaaaaagaagatgttaacttaatgatgtcatcgggtcagattcttggtatccgatttttggataaactgtgttctcagaagcgtgatgtgtccagtcccgatgaaaacaatggtcagtccaaaagtaagtattgccttaaaataaatcgccccattggagatgctgctgacacccaggatgatgatgtagaggaaatcggggatcaggatgacagtccttctgatgacacagtagaaggcacacccccgagtcaggaggacggcaagtcgcccaccacaacgctcagggttcaggaagcgatcctgaaagagctggggagtgaggaagttcggaaggtcaattgctacggccaggaagtagaatccatggagaccccagaatcaaaagacttggggtcccagacccctcaagccttaacatttaatgatgggatgagtgaagtgaaagatgaacagacaccaggctggacaacagccgccagtgacatgaagtttgagtatttgctttatggtcaccatcgggagcagattgcctgccaggcgtgtgggaagacgttttctgatgaaggcagattgaggaagcatgagaaactccacacggcggacaggccatttgtttgtgaaatgtgcacaaaaggtttcaccacacaggcccacctgaaagaacacctaaaaatccacacaggatataagccctatagctgtgaggtgtgtggaaaatcatttatccgtgccccagacttaaagaagcatgagagagttcacagtaatgaaagaccgtttgcgtgccacatgtgtgacaaagccttcaaacacaagtctcacctcaaggatcatgaaagaagacacagaggggaaaagccttttgtgtgtggctcctgcaccaaggcatttgccaaggcatctgatctgaaaaggcacgagaacaatatgcacagtgaaaggaagcaggttacccccagtgccatccagagcgagacagaacagttgcaggcggcagcgatggctgcggaagcagaacagcagctggagacgatagcctgtagctagaggcggtgggacagggacactttgcctggaaagtggagactgagatgacgtggatcataatgagtgaatgccagttacaatatttttgtggaaacgtatggaacattgtactcactggacttaaggcagtgcttggttagctatttttaagacttttcaaggaaatggtgttcctcagttctgaccaaaccgtttcactgtcttgtctggtgtctagtattaatgttgcccagtaagcacctctctcccttttttttttttattattttaatttgagaactcctgtgtccagtttagaagtgagagacttccatttttagttcctttacactcaccaccctagcaagtgccctgcacagagtaataagtaaattgatttcctaatcacaattctatgtgacttatggtcaaaagagcagttttaataactttaaaagtacttcagatagacgcagaaaattggtgagtggttgaccaagaacactgcacaaatataaaaaaagttctggaaatgcagaatggcgttagatttatatttggtttgttaattttatatcactgtttttcactgtttttgtggacaaataatggttgctttgctgaagtgttcttcctcaatcttgattgccctgtacctacccaaaagctgtagtcacacatcctaaaggccaagcaaacccaccgggatggtggggggtcttggagccaagctcttaggttcctcttatttggggcagtaccagtccataccagctgcgatttgtgagtggacctgtggtaagaagaatagaaaaggctctcagagataaggttttttacatgtgtaacaatcccaagatttcctagattaaaatcttaattgattttgaaattggatttttatttagaatcaaaattaggacaagaacagataacttcttcagatacatttgtgtaactttacagaatgtcatcaagctttggggctctgtggggcacatgatttatccataaaggagatgcagtatgcttacttaaattaataaatttaaaatcttttaagtgtgtaaatagtagtgttggtcttacgtatttcaagtaaaaagtagacagctgcactttttttgcacattggattaaaataacttccatcagcaacaaacatcagactgtttttaacaaatattaaagattgtcagaccaaatgtttatgttttcgaaatatatttcatcactggttacagttttaaatagaagttgattgccttttcatagccgtaaatgagaattataaactctattccagttttggtatactaaatgttcttttaaccatctttaggaatatattgaaatgccaacaatagtttgaattgtgttctgtaaaaaagtattagtcaattatttttcaaaatgtagaattgtagaaaatgtcaatttttcaaactcatttttcattgctaggatttcttttaaaaaaattaaagtaatttcacttcatagcttgttgcattaacacctgtaattctattgtgaaagaaatttgattttttaattggtgtgtgttatgcccaagatgttaggatgaagatgctacctttttaaaaattttagttattggtaaaatgtttaattttacttaaaattaatttcttttcttgaaagttgtttattctgttctaaaagtagtcctgtcactgtgtttttatgctacttatagaaggggaactgattgccgttcctaggctgttttaaccaaagcaaaggaaaaataattttaacatcttgtcaatagctacttcaacaaaccatattttgggacttcattttttgtatataaaagaaaatatacttctatc

SEQ ID NO: 200959 - DNA, 3341 bp, Homo sapiens
  Payload ID: 19664
  Gene Name: zinc finger and BTB domain containing 14
  Uniprot ID: O43829
  ENST ID: ENST00000614697
  CDS Start-End: 154-1503
tctaaggcggcgcggcattgctgtccggcctcctgcatctcggatatgggtctgcaggatggagttcttccggtctggcgtgctcctgatcagagttactctgatctgaagattttggcgttcaaggcattaagataatagcctgagttgttcatggagtttttcatcagtatgtctgaaaccattaaatataatgacgatgatcataaaactctgtttctgaaaacactaaatgaacaacgcctggaaggagaattttgtgatattgctattgtggttgaggatgtgaaattcagagcacacagatgtgttcttgctgcctgcagcacttactttaaaaagcttttcaagaagcttgaggttgatagttcttcggtcatagaaatagattttcttcgttctgatatatttgaagaggtcctgaactacatgtacacagcaaagatttccgtgaaaaaagaagatgttaacttaatgatgtcatcgggtcagattcttggtatccgatttttggataaactgtgttctcagaagcgtgatgtgtccagtcccgatgaaaacaatggtcagtccaaaagtaagtattgccttaaaataaatcgccccattggagatgctgctgacacccaggatgatgatgtagaggaaatcggggatcaggatgacagtccttctgatgacacagtagaaggcacacccccgagtcaggaggacggcaagtcgcccaccacaacgctcagggttcaggaagcgatcctgaaagagctggggagtgaggaagttcggaaggtcaattgctacggccaggaagtagaatccatggagaccccagaatcaaaagacttggggtcccagacccctcaagccttaacatttaatgatgggatgagtgaagtgaaagatgaacagacaccaggctggacaacagccgccagtgacatgaagtttgagtatttgctttatggtcaccatcgggagcagattgcctgccaggcgtgtgggaagacgttttctgatgaaggcagattgaggaagcatgagaaactccacacggcggacaggccatttgtttgtgaaatgtgcacaaaaggtttcaccacacaggcccacctgaaagaacacctaaaaatccacacaggatataagccctatagctgtgaggtgtgtggaaaatcatttatccgtgccccagacttaaagaagcatgagagagttcacagtaatgaaagaccgtttgcgtgccacatgtgtgacaaagccttcaaacacaagtctcacctcaaggatcatgaaagaagacacagaggggaaaagccttttgtgtgtggctcctgcaccaaggcatttgccaaggcatctgatctgaaaaggcacgagaacaatatgcacagtgaaaggaagcaggttacccccagtgccatccagagcgagacagaacagttgcaggcggcagcgatggctgcggaagcagaacagcagctggagacgatagcctgtagctagaggcggtgggacagggacactttgcctggaaagtggagactgagatgacgtggatcataatgagtgaatgccagttacaatatttttgtggaaacgtatggaacattgtactcactggacttaaggcagtgcttggttagctatttttaagacttttcaaggaaatggtgttcctcagttctgaccaaaccgtttcactgtcttgtctggtgtctagtattaatgttgcccagtaagcacctctctcccttttttttttttattattttaatttgagaactcctgtgtccagtttagaagtgagagacttccatttttagttcctttacactcaccaccctagcaagtgccctgcacagagtaataagtaaattgatttcctaatcacaattctatgtgacttatggtcaaaagagcagttttaataactttaaaagtacttcagatagacgcagaaaattggtgagtggttgaccaagaacactgcacaaatataaaaaaagttctggaaatgcagaatggcgttagatttatatttggtttgttaattttatatcactgtttttcactgtttttgtggacaaataatggttgctttgctgaagtgttcttcctcaatcttgattgccctgtacctacccaaaagctgtagtcacacatcctaaaggccaagcaaacccaccgggatggtggggggtcttggagccaagctcttaggttcctcttatttggggcagtaccagtccataccagctgcgatttgtgagtggacctgtggtaagaagaatagaaaaggctctcagagataaggttttttacatgtgtaacaatcccaagatttcctagattaaaatcttaattgattttgaaattggatttttatttagaatcaaaattaggacaagaacagataacttcttcagatacatttgtgtaactttacagaatgtcatcaagctttggggctctgtggggcacatgatttatccataaaggagatgcagtatgcttacttaaattaataaatttaaaatcttttaagtgtgtaaatagtagtgttggtcttacgtatttcaagtaaaaagtagacagctgcactttttttgcacattggattaaaataacttccatcagcaacaaacatcagactgtttttaacaaatattaaagattgtcagaccaaatgtttatgttttcgaaatatatttcatcactggttacagttttaaatagaagttgattgccttttcatagccgtaaatgagaattataaactctattccagttttggtatactaaatgttcttttaaccatctttaggaatatattgaaatgccaacaatagtttgaattgtgttctgtaaaaaagtattagtcaattatttttcaaaatgtagaattgtagaaaatgtcaatttttcaaactcatttttcattgctaggatttcttttaaaaaaattaaagtaatttcacttcatagcttgttgcattaacacctgtaattctattgtgaaagaaatttgattttttaattggtgtgtgttatgcccaagatgttaggatgaagatgctacctttttaaaaattttagttattggtaaaatgtttaattttacttaaaattaatttcttttcttgaaagttgtttattctgttctaaaagtagtcctgtcactgtgtttttatgctacttatagaaggggaactgattgccgttcctaggctgttttaaccaaagcaaaggaaaaataattttaacatcttgtcaatagctacttcaacaaaccatattttgggacttcattttttgtatataaaagaaaatatacttctatc

SEQ ID NO: 200960 - DNA, 2523 bp, Homo sapiens
  Payload ID: 19665
  Gene Name: zinc finger and BTB domain containing 16
  Uniprot ID: Q05516
  ENST ID: ENST00000335953
  CDS Start-End: 381-2402
gggctcggccgccagcactaaagatggagaggcgccggggccttgcaggggagggggctcggcgttgacgtgggacgcggcggaggcgcagcagccggtggtgatttgctaacctcgcagcagagaggagttgagggcgatgagagcgggtactgcgaactgccgggcgatgctgtcgctgccgccgtgatacggagagcaacagttccccagcaacacccctccccgacacaggcacacaccccccgacaggcacgcacacccaccccacagtgcccggctcggctgcgcctcctctattggcccaggaagcccacccagccccgccacgcagagcccagaaggaaagaaagcctcatgcctgagccgaggggagcaccatggatctgacaaaaatgggcatgatccagctgcagaaccctagccaccccacggggctactgtgcaaggccaaccagatgcggctggccgggactttgtgcgatgtggtcatcatggtggacagccaggagttccacgcccaccggacggtgctggcctgcaccagcaagatgtttgagatcctcttccaccgcaatagtcaacactatactttggacttcctctcgccaaagaccttccagcagattctggagtatgcatatacagccacgctgcaagccaaggcggaggacctggatgacctgctgtatgcggccgagatcctggagatcgagtacctggaggaacagtgcctgaagatgctggagaccatccaggcctcagacgacaatgacacggaggccaccatggccgatggcggggccgaggaagaagaggaccgcaaggctcggtacctcaagaacatcttcatctcgaagcattccagcgaggagagtgggtatgccagtgtggctggacagagcctccctgggcccatggtggaccagagcccttcagtctccacttcatttggtctttcagccatgagtcccaccaaggctgcagtggacagtttgatgaccataggacagtctctcctgcagggaactcttcagccacctgcagggcccgaggagccaactctggctgggggtgggcggcaccctggggtggctgaggtgaagacggagatgatgcaggtggatgaggtgcccagccaggacagccctggggcagccgagtccagcatctcaggagggatgggggacaaggttgaggaaagaggcaaagaggggcctgggaccccgactcgaagcagcgtcatcaccagtgctagggagctacactatgggcgagaggagagtgccgagcaggtgccacccccagctgaggctggccaggcccccactggccgacctgagcacccagcacccccgcctgagaagcatctgggcatctactccgtgttgcccaaccacaaggctgacgctgtattgagcatgccgtcttccgtgacctctggcctccacgtgcagcctgccctggctgtctccatggacttcagcacctatggggggctgctgccccagggcttcatccagagggagctgttcagcaagctgggggagctggctgtgggcatgaagtcagagagccggaccatcggagagcagtgcagcgtgtgtggggtcgagcttcctgataacgaggctgtggagcagcacaggaagctgcacagtgggatgaagacgtacgggtgcgagctctgcgggaagcggttcctggatagtttgcggctgagaatgcacttactggctcattcagcgggtgccaaagcctttgtctgtgatcagtgcggtgcacagttttcgaaggaggatgccctggagacacacaggcagacccatactggcactgacatggccgtcttctgtctgctgtgtgggaagcgcttccaggcgcagagcgcactgcagcagcacatggaggtccacgcgggcgtgcgcagctacatctgcagtgagtgcaaccgcaccttccccagccacacggctctcaaacgccacctgcgctcacatacaggcgaccacccctacgagtgtgagttctgtggcagctgcttccgggatgagagcacactcaagagccacaaacgcatccacacgggtgagaaaccctacgagtgcaatggctgtggcaagaagttcagcctcaagcatcagctggagacgcactatagggtgcacacaggtgagaagccctttgagtgtaagctctgccaccagcgctcccgggactactcggccatgatcaagcacctgagaacgcacaacggcgcctcgccctaccagtgcaccatctgcacagagtactgccccagcctctcctccatgcagaagcacatgaagggccacaagcccgaggagatcccgcccgactggaggatagagaagacgtacctctacctgtgctatgtgtgaagggaggcccgcggcggtggagccgagcggggagccaggaaagaagagttggagtgagatgaaggaaggactatgacaaataaaaaaggaaaagaaaaaaaaaaacagaaggaaaaggaaa

SEQ ID NO: 200961 - DNA, 2287 bp, Homo sapiens
  Payload ID: 19665
  Gene Name: zinc finger and BTB domain containing 16
  Uniprot ID: Q05516
  ENST ID: ENST00000392996
  CDS Start-End: 169-2190
agcgctgcgggccctcctcggctctcggcgggaccggcggtgacaccggagctcgccgtgcgctcccggccgctctcgcctcctctattggcccaggaagcccacccagccccgccacgcagagcccagaaggaaagaaagcctcatgcctgagccgaggggagcaccatggatctgacaaaaatgggcatgatccagctgcagaaccctagccaccccacggggctactgtgcaaggccaaccagatgcggctggccgggactttgtgcgatgtggtcatcatggtggacagccaggagttccacgcccaccggacggtgctggcctgcaccagcaagatgtttgagatcctcttccaccgcaatagtcaacactatactttggacttcctctcgccaaagaccttccagcagattctggagtatgcatatacagccacgctgcaagccaaggcggaggacctggatgacctgctgtatgcggccgagatcctggagatcgagtacctggaggaacagtgcctgaagatgctggagaccatccaggcctcagacgacaatgacacggaggccaccatggccgatggcggggccgaggaagaagaggaccgcaaggctcggtacctcaagaacatcttcatctcgaagcattccagcgaggagagtgggtatgccagtgtggctggacagagcctccctgggcccatggtggaccagagcccttcagtctccacttcatttggtctttcagccatgagtcccaccaaggctgcagtggacagtttgatgaccataggacagtctctcctgcagggaactcttcagccacctgcagggcccgaggagccaactctggctgggggtgggcggcaccctggggtggctgaggtgaagacggagatgatgcaggtggatgaggtgcccagccaggacagccctggggcagccgagtccagcatctcaggagggatgggggacaaggttgaggaaagaggcaaagaggggcctgggaccccgactcgaagcagcgtcatcaccagtgctagggagctacactatgggcgagaggagagtgccgagcaggtgccacccccagctgaggctggccaggcccccactggccgacctgagcacccagcacccccgcctgagaagcatctgggcatctactccgtgttgcccaaccacaaggctgacgctgtattgagcatgccgtcttccgtgacctctggcctccacgtgcagcctgccctggctgtctccatggacttcagcacctatggggggctgctgccccagggcttcatccagagggagctgttcagcaagctgggggagctggctgtgggcatgaagtcagagagccggaccatcggagagcagtgcagcgtgtgtggggtcgagcttcctgataacgaggctgtggagcagcacaggaagctgcacagtgggatgaagacgtacgggtgcgagctctgcgggaagcggttcctggatagtttgcggctgagaatgcacttactggctcattcagcgggtgccaaagcctttgtctgtgatcagtgcggtgcacagttttcgaaggaggatgccctggagacacacaggcagacccatactggcactgacatggccgtcttctgtctgctgtgtgggaagcgcttccaggcgcagagcgcactgcagcagcacatggaggtccacgcgggcgtgcgcagctacatctgcagtgagtgcaaccgcaccttccccagccacacggctctcaaacgccacctgcgctcacatacaggcgaccacccctacgagtgtgagttctgtggcagctgcttccgggatgagagcacactcaagagccacaaacgcatccacacgggtgagaaaccctacgagtgcaatggctgtggcaagaagttcagcctcaagcatcagctggagacgcactatagggtgcacacaggtgagaagccctttgagtgtaagctctgccaccagcgctcccgggactactcggccatgatcaagcacctgagaacgcacaacggcgcctcgccctaccagtgcaccatctgcacagagtactgccccagcctctcctccatgcagaagcacatgaagggccacaagcccgaggagatcccgcccgactggaggatagagaagacgtacctctacctgtgctatgtgtgaagggaggcccgcggcggtggagccgagcggggagccaggaaagaagagttggagtgagatgaaggaaggactatgacaaataaaaaaggaaaagaaa

SEQ ID NO: 200962 - DNA, 773 bp, Homo sapiens
  Payload ID: 19665
  Gene Name: zinc finger and BTB domain containing 16
  ENST ID: ENST00000544220
  CDS Start-End: 428-773
agcgggtactgcgaactgccgggcgatgctgtcgctgccgccgtgatacggagagcaacagttccccagcaacacccctccccgacacaggcacacaccccccgacaggcacgcacacccaccccacagtgcccggctcggctgcgttctcagaaaccccgatgtctgcgggaaagcacgcggtggctcggctcggctgaatgctcatcccaaccttgacggcctccgtccccaccccggggcgggcagcaaaaatgtcttgaccagccgtcctgtgaatcctttctgcgtgagcttggtggctcctgaactgatagagctccttctgggggtggagcctcctctattggcccaggaagcccacccagccccgccacgcagagcccagaaggaaagaaagcctcatgcctgagccgaggggagcaccatggatctgacaaaaatgggcatgatccagctgcagaaccctagccaccccacggggctactgtgcaaggccaaccagatgcggctggccgggactttgtgcgatgtggtcatcatggtggacagccaggagttccacgcccaccggacggtgctggcctgcaccagcaagatgtttgagatcctcttccaccgcaatagtcaacactatactttggacttcctctcgccaaagaccttccagcagattctggagtatgcatatacagccacgctgcaagccaaggcggaggacctggatgacctgctgtatgcggccgagatcctggagatcgagtacctggagg

SEQ ID NO: 200963 - DNA, 572 bp, Homo sapiens
  Payload ID: 19665
  Gene Name: zinc finger and BTB domain containing 16
  ENST ID: ENST00000535700
  CDS Start-End: 129-572
tcttatgtatgcggaccggtgcgcgggcgcaagataagcctcctctattggcccaggaagcccacccagccccgccacgcagagcccagaaggaaagaaagcctcatgcctgagccgaggggagcaccatggatctgacaaaaatgggcatgatccagctgcagaaccctagccaccccacggggctactgtgcaaggccaaccagatgcggctggccgggactttgtgcgatgtggtcatcatggtggacagccaggagttccacgcccaccggacggtgctggcctgcaccagcaagatgtttgagatcctcttccaccgcaatagtcaacactatactttggacttcctctcgccaaagaccttccagcagattctggagtatgcatatacagccacgctgcaagccaaggcggaggacctggatgacctgctgtatgcggccgagatcctggagatcgagtacctggaggaacagtgcctgaagatgctggagaccatccaggcctcagacgacaatgacacggaggccaccatggccgatggcggggccgaggaagaagaggaccgc

SEQ ID NO: 200964 - DNA, 757 bp, Homo sapiens
  Payload ID: 19665
  Gene Name: zinc finger and BTB domain containing 16
  ENST ID: ENST00000539918
  CDS Start-End: 1-167
atggggggctgctgccccagggcttcatccagagggagctgttcagcaagctgggggagctggctgtgggcatgaagtcagagagccggaccatcggagagcagtgcagcgtgtgtggggtcgagcttcctgataacgaggctgtggagcagcacagggtcttctagcataacctttgttcctgttggcaacacttcattttggactgtcaagatgcatttcctgagatgtgagatgtcatgaccctgtgtttggaagctgcacagtgggatgaagacgtacgggtgcgagctctgcgggaagcggttcctggatagtttgcggctgagaatgcacttactggctcattcagcgggtgccaaagcctttgtctgtgatcagtgcggtgcacagttttcgaaggaggatgccctggagacacacaggcagacccatactggcactgacatggccgtcttctgtctgctgtgtgggaagcgcttccaggcgcagagcgcactgcagcagcacatggaggtccacgcgggcgtgcgcagctacatctgcagtgagtgcaaccgcaccttccccagccacacggctctcaaacgccacctgcgctcacatacaggcgaccacccctacgagtgtgagttctgtggcagctgcttccgggatgagagcacactcaagagccacaaacgcatccacacgggtgagaaaccctacgagtgcaatggctgtggcaagaagttcagcctcaagcatcagctggaga

SEQ ID NO: 200965 - DNA, 2770 bp, Homo sapiens
  Payload ID: 19666
  Gene Name: zinc finger and BTB domain containing 17
  Uniprot ID: Q13105
  ENST ID: ENST00000375733
  CDS Start-End: 240-2672
atgcgccggaagttgcagccgggaagcctgcgaggtcggttccgcccgactctaacatggcggcgccctttgtctgctctggagtgccgtccccggccttctcgcggccgtgatgcacctccctctgcggtggggtccgggacatggcaggtaatgagccggacgaggggagccaagctggagtttacacaggcaaactgtcagaaaagagtagcctgggctgtctggaaatctgagccatggactttccccagcacagccagcatgtcttggaacagctgaaccagcagcggcagctggggcttctctgtgactgcacctttgtggtggacggtgttcactttaaggctcataaagcagtgctggcggcctgcagcgagtacttcaagatgctcttcgtggaccagaaggacgtggtgcacctggacatcagtaacgcggcaggcctggggcaggtgctggagtttatgtacacggccaagctgagcctgagccctgagaacgtggatgatgtgctggccgtggccactttcctccaaatgcaggacatcatcacggcctgccatgccctcaagtcacttgctgagccggctaccagccctgggggaaatgcggaggccttggccacagaaggaggggacaagagagccaaagaggagaaggtggccaccagcacgctgagcaggctggagcaggcaggacgcagcacacccataggccccagcagggacctcaaggaggagcgcggcggtcaggcccagagtgcggccagcggtgcagagcagacagagaaagccgatgcgccccgggagccgccgcctgtggagctcaagccagaccccacgagtggcatggctgctgcagaagctgaggccgctttgtccgagagctcggagcaagaaatggaggtggagcccgcccggaaaggggaagaggagcaaaaggagcaagaggagcaagaggaggagggcgcagggccagctgaggtcaaggaggagggttcccagctggagaacggagaggcccccgaggagaacgagaatgaggagtcagcgggcacagactcggggcaggagctcggctccgaggcccggggcctgcgctcaggcacctacggcgaccgcacggagtccaaggcctacggctccgtcatccacaagtgcgaggactgtgggaaggagttcacgcacacggggaacttcaagcggcacatccgcatccacacgggggagaagcccttctcgtgccgggagtgcagcaaggccttttccgacccggccgcgtgcaaggcccatgagaagacgcacagccctctgaagccctacggctgcgaggagtgcgggaagagctaccgcctcatcagcctgctgaacctgcacaagaagcggcactcgggcgaggcgcgctaccgctgcgaggactgcggcaagctcttcaccacctcgggcaacctcaagcgccaccagctggtgcacagcggcgagaagccctaccagtgcgactactgcggccgctccttctccgaccccacttccaagatgcgccacctggagacccacgacacggacaaggagcacaagtgcccacactgcgacaagaagttcaaccaggtagggaacctgaaggcccacctgaagatccacatcgctgacgggcccctcaagtgccgagagtgtgggaagcagttcaccacctcagggaacctgaagcggcaccttcggatccacagcggggagaagccctacgtgtgcatccactgccagcgacagtttgcagaccccggcgctctgcagcggcacgtccgcattcacacaggtgagaagccatgccagtgtgtgatgtgcggtaaggccttcacccaggccagctccctcatcgcccacgtgcgccagcacaccggggagaagccctacgtctgcgagcgctgcggcaagagattcgtccagtccagccagttggccaatcatattcgccaccacgacaacatccgcccacacaagtgcagcgtgtgcagcaaggccttcgtgaacgtgggggacctgtccaagcacatcatcattcacactggagagaagccttacctgtgtgataagtgtgggcgtggcttcaaccgggtagacaacctgcgctcccacgtgaagaccgtgcaccagggcaaggcaggcatcaagatcctggagcccgaggagggcagtgaggtcagcgtggtcactgtggatgacatggtcacgctggctaccgaggcactggcagcgacagccgtcactcagctcacaggccctgcgactctgcccgcagtggtgccggtgggagctgcagtgacagccgatgagacggaagtcctgaaggccgagatcagcaaagctgtgaagcaagtgcaggaagaagaccccaacactcacatcctctacgcctgtgactcctgtggggacaagtttctggatgccaacagcctggctcagcatgtgcgaatccacacagcccaggcactggtcatgttccagacagacgcggacttctatcagcagtatgggccaggtggcacgtggcctgccgggcaggtgctgcaggctggggagctggtcttccgccctcgcgacggggctgagggccagcccgcactggcagagacctcccctacagctcctgaatgtcccccgcctgccgagtgagctggcggcccttctgactgtttatttaaggatggatggcaccctggaaccgggaagggtggcctgttccctagagagaataaattggattattttct

SEQ ID NO: 200966 - DNA, 2745 bp, Homo sapiens
  Payload ID: 19666
  Gene Name: zinc finger and BTB domain containing 17
  Uniprot ID: Q13105
  ENST ID: ENST00000375743
  CDS Start-End: 234-2645
cggaagttgcagccgggaagcctgcgaggtcggttccgcccgactctaacatggcggcgccctttgtctgctctggagtgccgtccccggccttctcgcggccgtgatgcacctccctctgcggtggggtccgggacatggcaggtaatgagccggacgaggggagccaagctggagtttacacaggcaaactgtcagaaaagagtagcctgggctgtctggaaatctgagccatggactttccccagcacagccagcatgtcttggaacagctgaaccagcagcggcagctggggcttctctgtgactgcacctttgtggtggacggtgttcactttaaggctcataaagcagtgctggcggcctgcagcgagtacttcaagatgctcttcgtggaccagaaggacgtggtgcacctggacatcagtaacgcggcaggcctggggcaggtgctggagtttatgtacacggccaagctgagcctgagccctgagaacgtggatgatgtgctggccgtggccactttcctccaaatgcaggacatcatcacggcctgccatgccctcaagtcacttgctgagccggctaccagccctgggggaaatgcggaggccttggccacagaaggaggggacaagagagccaaagaggagaaggtggccaccagcacgctgagcaggctggagcaggcaggacgcagcacacccataggccccagcagggacctcaaggaggagcgcggcggtcaggcccagagtgcggccagcggtgcagagcagacagagaaagccgatgcgccccgggagccgccgcctgtggagctcaagccagaccccacgagtggcatggctgctgcagaagctgaggccgctttgtccgagagctcggagcaagaaatggaggtggagcccgcccggaaaggggaagaggagcaaaaggagcaagaggagcaagaggaggagggcgcagggccagctgaggtcaaggaggagggttcccagctggagaacggagaggcccccgaggagaacgagaatgaggagtcagcgggcacagactcggggcaggagctcggctccgaggcccggggcctgcgctcaggcacctacggcgaccgcacggagtccaaggcctacggctccgtcatccacaagtgcgaggactgtgggaaggagttcacgcacacggggaacttcaagcggcacatccgcatccacacgggggagaagcccttctcgtgccgggagtgcagcaaggccttttccgacccggccgcgtgcaaggcccatgagaagacgcacagccctctgaagccctacggctgcgaggagtgcgggaagagctaccgcctcatcagcctgctgaacctgcacaagaagcggcactcgggcgaggcgcgctaccgctgcgaggactgcggcaagctcttcaccacctcgggcaacctcaagcgccaccagctggtgcacagcggcgagaagccctaccagtgcgactactgcggccgctccttctccgaccccacttccaagatgcgccacctggagacccacgacacggacaaggagcacaagtgcccacactgcgacaagaagttcaaccaggtagggaacctgaaggcccacctgaagatccacatcgctgacgggcccctcaagtgccgagagtgtgggaagcagttcaccacctcagggaacctgaagcggcaccttcggatccacagcggggagaagccctacgtgtgcatccactgccagcgacagtttgcagaccccggcgctctgcagcggcacgtccgcattcacacaggtgagaagccatgccagtgtgtgatgtgcggtaaggccttcacccaggccagctccctcatcgcccacgtgcgccagcacaccggggagaagccctacgtctgcgagcgctgcggcaagagattcgtccagtccagccagttggccaatcatattcgccaccacgacaacatccgcccacacaagtgcagcgtgtgcagcaaggccttcgtgaacgtgggggacctgtccaagcacatcatcattcacactggagagaagccttacctgtgtgataagtgtgggcgtggcttcaaccgggtagacaacctgcgctcccacgtgaagaccgtgcaccagggcaaggcaggcatcaagatcctggagcccgaggagggcagtgaggtcagcgtggtcactgtggatgacatggtcacgctggctaccgaggcactggcagcgacagccgtcactcagctcacagtggtgccggtgggagctgcagtgacagccgatgagacggaagtcctgaaggccgagatcagcaaagctgtgaagcaagtgcaggaagaagaccccaacactcacatcctctacgcctgtgactcctgtggggacaagtttctggatgccaacagcctggctcagcatgtgcgaatccacacagcccaggcactggtcatgttccagacagacgcggacttctatcagcagtatgggccaggtggcacgtggcctgccgggcaggtgctgcaggctggggagctggtcttccgccctcgcgacggggctgagggccagcccgcactggcagagacctcccctacagctcctgaatgtcccccgcctgccgagtgagctggcggcccttctgactgtttatttaaggatggatggcaccctggaaccgggaagggtggcctgttccctagagagaataaattggattattttctaa

SEQ ID NO: 200967 - DNA, 731 bp, Homo sapiens
  Payload ID: 19666
  Gene Name: zinc finger and BTB domain containing 17
  ENST ID: ENST00000440560
  CDS Start-End: 1-631
gtccaagcacatcatcattcacactggagagaagccttacctgtgtgataagtgtgggcgtggcttcaaccgggtagacaacctgcgctcccacgtgaagaccgtgcaccagggcaaggcaggcatcaagatcctggagcccgaggagggcagtgaggtcagcgtggtcactgtggatgacatggtcacgctggctaccgaggcactggcagcgacagccgtcactcagctcacaggccctgcgactctgcccgcagtggtgccggtgggagctgcagtgacagccgatgagacggaagtcctgaaggccgagatcagcaaagctgtgaagcaagtgcaggaagaagaccccaacactcacatcctctacgcctgtgactcctgtggggacaagtttctggatgccaacagcctggctcagcatgtgcgaatccacacagcccaggcactggtcatgttccagacagacgcggacttctatcagcagtatgggccaggtggcacgtggcctgccgggcaggtgctgcaggctggggagctggtcttccgccctcgcgacggggctgagggccagcccgcactggcagagacctcccctacagctcctgaatgtcccccgcctgccgagtgagctggcggcccttctgactgtttatttaaggatggatggcaccctggaaccgggaagggtggcctgttccctagagagaataaattggattattttctaa

SEQ ID NO: 200968 - DNA, 722 bp, Homo sapiens
  Payload ID: 19666
  Gene Name: zinc finger and BTB domain containing 17
  ENST ID: ENST00000444358
  CDS Start-End: 1-722
gagaagccctaccagtgcgactactgcggccgctccttctccgaccccacttccaagatgcgccacctggagacccacgacacggacaaggagcacaagtgcccacactgcgacaagaagttcaaccagggaacctgaagcggcaccttcggatccacagcggggagaagccctacgtgtgcatccactgccagcgacagtttgcagaccccggcgctctgcagcggcacgtccgcattcacacaggtgagaagccatgccagtgtgtgatgtgcggtaaggccttcacccaggccagctccctcatcgcccacgtgcgccagcacaccggggagaagccctacgtctgcgagcgctgcggcaagagattcgtccagtccagccagttggccaatcatattcgccaccacgacaacatccgcccacacaagtgcagcgtgtgcagcaaggccttcgtgaacgtgggggacctgtccaagcacatcatcattcacactggagagaagccttacctgtgtgataagtgtgggcgtggcttcaaccgggtagacaacctgcgctcccacgtgaagaccgtgcaccagggcaaggcaggcatcaagatcctggagcccgaggagggcagtgaggtcagcgtggtcactgtggatgacatggtcacgctggctaccgaggcactggcagcgacagccgtcactcagctcacagtggtgccggtggga

SEQ ID NO: 200969 - DNA, 2511 bp, Homo sapiens
  Payload ID: 19666
  Gene Name: zinc finger and BTB domain containing 17
  Uniprot ID: Q13105
  ENST ID: ENST00000537142
  CDS Start-End: 248-2413
aacatggcggcgccctttgtctgctctggagtgccgtccccggccttctcgcggccgtgatgcacctccctctgcggtggggtccgggacatggcaggtaatgagccggacgaggggagccaagctggagtttacacaggcaaactgtcagaaaagagtagcctgggctgtctggaaatctgaggcctggggcaggtgctggagtttatgtacacggccaagctgagcctgagccctgagaacgtggatgatgtgctggccgtggccactttcctccaaatgcaggacatcatcacggcctgccatgccctcaagtcacttgctgagccggctaccagccctgggggaaatgcggaggccttggccacagaaggtctgccctgttccatctccaggaggggacaagagagccaaagaggagaaggtggccaccagcacgctgagcaggctggagcaggcaggacgcagcacacccataggccccagcagggacctcaaggaggagcgcggcggtcaggcccagagtgcggccagcggtgcagagcagacagagaaagccgatgcgccccgggagccgccgcctgtggagctcaagccagaccccacgagtggcatggctgctgcagaagctgaggccgctttgtccgagagctcggagcaagaaatggaggtggagcccgcccggaaaggggaagaggagcaaaaggagcaagaggagcaagaggaggagggcgcagggccagctgaggtcaaggaggagggttcccagctggagaacggagaggcccccgaggagaacgagaatgaggagtcagcgggcacagactcggggcaggagctcggctccgaggcccggggcctgcgctcaggcacctacggcgaccgcacggagtccaaggcctacggctccgtcatccacaagtgcgaggactgtgggaaggagttcacgcacacggggaacttcaagcggcacatccgcatccacacgggggagaagcccttctcgtgccgggagtgcagcaaggccttttccgacccggccgcgtgcaaggcccatgagaagacgcacagccctctgaagccctacggctgcgaggagtgcgggaagagctaccgcctcatcagcctgctgaacctgcacaagaagcggcactcgggcgaggcgcgctaccgctgcgaggactgcggcaagctcttcaccacctcgggcaacctcaagcgccaccagctggtgcacagcggcgagaagccctaccagtgcgactactgcggccgctccttctccgaccccacttccaagatgcgccacctggagacccacgacacggacaaggagcacaagtgcccacactgcgacaagaagttcaaccaggtagggaacctgaaggcccacctgaagatccacatcgctgacgggcccctcaagtgccgagagtgtgggaagcagttcaccacctcagggaacctgaagcggcaccttcggatccacagcggggagaagccctacgtgtgcatccactgccagcgacagtttgcagaccccggcgctctgcagcggcacgtccgcattcacacaggtgagaagccatgccagtgtgtgatgtgcggtaaggccttcacccaggccagctccctcatcgcccacgtgcgccagcacaccggggagaagccctacgtctgcgagcgctgcggcaagagattcgtccagtccagccagttggccaatcatattcgccaccacgacaacatccgcccacacaagtgcagcgtgtgcagcaaggccttcgtgaacgtgggggacctgtccaagcacatcatcattcacactggagagaagccttacctgtgtgataagtgtgggcgtggcttcaaccgggtagacaacctgcgctcccacgtgaagaccgtgcaccagggcaaggcaggcatcaagatcctggagcccgaggagggcagtgaggtcagcgtggtcactgtggatgacatggtcacgctggctaccgaggcactggcagcgacagccgtcactcagctcacagtggtgccggtgggagctgcagtgacagccgatgagacggaagtcctgaaggccgagatcagcaaagctgtgaagcaagtgcaggaagaagaccccaacactcacatcctctacgcctgtgactcctgtggggacaagtttctggatgccaacagcctggctcagcatgtgcgaatccacacagcccaggcactggtcatgttccagacagacgcggacttctatcagcagtatgggccaggtggcacgtggcctgccgggcaggtgctgcaggctggggagctggtcttccgccctcgcgacggggctgagggccagcccgcactggcagagacctcccctacagctcctgaatgtcccccgcctgccgagtgagctggcggcccttctgactgtttatttaaggatggatggcaccctggaaccgggaagggtggcctgttccctagagagaataaattggattattttct

SEQ ID NO: 200970 - DNA, 3851 bp, Homo sapiens
  Payload ID: 19667
  Gene Name: zinc finger and BTB domain containing 18
  Uniprot ID: Q99592
  ENST ID: ENST00000358704
  CDS Start-End: 150-1745
agtgtgtgcggatctgtggtggagaaggtatctcattcctctctaacatcatctccactttgcatctgtctctcttagtctgctttttttccaccgatgtaacagacctggagccagcaggactcagaggaaaggacttaatcaggtttatgtgtcctaaaggttatgaagacagtatggagtttccagaccatagtagacatttgctacagtgtctgagcgagcagagacaccagggttttctttgtgactgcactgttctggtgggagatgcccagttccgagcgcaccgagctgtactggcttcatgcagcatgtatttccacctcttttacaaggaccagctggacaaaagagacattgttcatctgaacagcgacattgttacagcccccgctttcgctctcctgcttgaattcatgtatgaagggaaactccagttcaaagacttgcccattgaagacgtgctagcagctgccagttatctccacatgtatgacattgtcaaagtctgcaaaaagaagctgaaagagaaagccaccacggaggcagacagcaccaaaaaggaagaagatgcttcaagttgttcggacaaagtcgagagtctctccgatggcagcagccacatagcaggcgatttgcccagtgatgaagatgaaggagaagatgaaaaattgaacatcctgcccagcaaaagggacttggcggccgagcctgggaacatgtggatgcgattgccctcagactcagcaggcatcccccaggctggcggagaggcagagccacacgccacagcagctggaaaaacagtagccagcccctgcagctcaacagagtctttgtcccagaggtctgtcacctccgtgagggattcggcagatgttgactgtgtgctggacctgtctgtcaagtccagcctttcaggagttgaaaatctgaacagctcttatttctcttcacaggacgtgctgagaagcaacctggtgcaggtgaaggtggagaaagaggcttcctgtgatgagagtgatgttggcactaatgactatgacatggaacatagcactgtgaaagaaagtgtgagcactaataacagggtacagtatgagccggcccatctggctcccctgagggaggactcggtcttgagggagctggaccgggaggacaaagccagtgatgatgagatgatgaccccagagagcgagcgtgtccaggtggagggaggcatggagagcagtctgctcccctacgtctccaacatcctgagccccgcgggccagatcttcatgtgccccctgtgcaacaaggtcttccccagcccccacatcctgcagatccacctgagcacgcacttccgcgagcaggacggcatccgcagcaagcccgccgccgatgtcaacgtgcccacgtgctcgctgtgtgggaagactttctcttgcatgtacaccctcaagcgccacgagaggactcactcgggggagaagccctacacatgcacccagtgcggcaagagcttccagtactcgcacaacctgagccgccatgccgtggtgcacacccgcgagaagccgcacgcctgcaagtggtgcgagcgcaggttcacgcagtccggggacctgtacagacacattcgcaagttccactgtgagttggtgaactccttgtcggtcaaaagcgaagcactgagcttgcctactgtcagagactggaccttagaagatagctctcaagaactttggaaataattttatatatatataaataatatatatatatatacatatatataaatagatctctatatagttgtggtacggtctaaaagcagtcttgtttcctggaaataaaaagttgggatattaacttgtttttgcactttagaatagcatgagaatctcactaatttagcattctgataaaagaaactttagagcaagtcagaatagagaggtgtttttcctttgaggggataggggaagtaagccaataagaaccttttaaacaaatcgtcctgtcacaaaatgctttcatatggcttaattttgtcaacactgcattgtcttttgagctcttttttcccccccaacaaagtttttttgttttttgtttttttttttaagtagaaattccctccagttttattagcctctttatatgtctcaaattgcatgaattttttctggctgttggaaacctgaatgcttttagacccaaatggaaaatttctgaaatgctggattatctatttttaaacaagcagttgacttaaaactttctgtggcaacttctggttttctgacagttcccagtgagagaaatgctgaaagtacactgggatcactgggacactgtcttatgaaggtttgcttgggatgaaaaaggatattgcagcttcagcagtgttgaactgtgtgtttaaaaatgtgaattactgttattgtatactgtaattgattacatgggctgggggggtgtcaaagaacttgacaggttgtgttgatgctcttagttgagtcttgaaaagtaaatattaacgctacagaaatgcatgagtttcaatatattttttgtctttgtttgcattgtataactttaacgagtgagtttaaaattatttaatttccttagaaaaataacaccatttggaaaaaaaaactggtgttatgaagaacgtaaatgcactgtttttatttttattttatataatttaaattgactttcccactgtctttaagttgaaactgttaagctgaataaaaacttaagctgcaaattgataacttcgctacataacaaggaaaatataaatgtttacaaacagcttaaagatttgcatgtgcagtgtgcatttataacaaacttctaattgcacaaaacccatgccagctcagagtttaggtgtacacatttacccagttgagcgttcttagaataactactgcacaagttgacaataggtcgttctctctttttttttgtttgctccctttttctttttctccccttcctccttaccctccctcccttactctccccccccaccaccaccctccacccccaactcatgaaaagattctatggactgaaaaagccccaggctgaaaggactggactgccttgattgacatggggaagggggttagtagactatgtggattgcggcagcagaggctgcagcctaacgtgtggttttaatgaccagcacgcaaggcaaaagcattttgcacagtgtttgttttcctgtcttgcacttacaaataaggtctatgggagtagcatggaaaacgtttgctgtttttcccttttttttttaattgcttttgtttaaaatttgatcgccttaactactgtaaacatagcctatttttgtgcttaagatactgaatggaaaactccattgtgtgttgctggactgttttggaaatatttggttaaatgtgtgttaatttggctgtaatggcatttaaagcaaacaaacaaacaaaaaaagctgtgaaaatggccttggagcattatctttagttacttgaagagtttctagtttttttaaaatacagtttatgttaaaataatttttattaatttagagaagacaatcaatgtctgtgagaaaacggactttcttttggattttctttttgtggtcattgtgagtgattgctttttccttttcttagtttcacattcttcctttgttctaaaacttagactgacatctagctttgacaatcatagtatgttttattttcctgagggggaataacttataatgctgtttagttttgtactattggtgtgttggtgaatttttaaactgtgtgctaactgcaataaattatatgaactgagaa

SEQ ID NO: 200971 - DNA, 3740 bp, Homo sapiens
  Payload ID: 19667
  Gene Name: zinc finger and BTB domain containing 18
  Uniprot ID: Q99592
  ENST ID: ENST00000622512
  CDS Start-End: 70-1638
gaggaggcggaggacgcggcggcggcggggacgcggtgacttagggccgctccgtgttatgaagacagtatggagtttccagaccatagtagacatttgctacagtgtctgagcgagcagagacaccagggttttctttgtgactgcactgttctggtgggagatgcccagttccgagcgcaccgagctgtactggcttcatgcagcatgtatttccacctcttttacaaggaccagctggacaaaagagacattgttcatctgaacagcgacattgttacagcccccgctttcgctctcctgcttgaattcatgtatgaagggaaactccagttcaaagacttgcccattgaagacgtgctagcagctgccagttatctccacatgtatgacattgtcaaagtctgcaaaaagaagctgaaagagaaagccaccacggaggcagacagcaccaaaaaggaagaagatgcttcaagttgttcggacaaagtcgagagtctctccgatggcagcagccacatagcaggcgatttgcccagtgatgaagatgaaggagaagatgaaaaattgaacatcctgcccagcaaaagggacttggcggccgagcctgggaacatgtggatgcgattgccctcagactcagcaggcatcccccaggctggcggagaggcagagccacacgccacagcagctggaaaaacagtagccagcccctgcagctcaacagagtctttgtcccagaggtctgtcacctccgtgagggattcggcagatgttgactgtgtgctggacctgtctgtcaagtccagcctttcaggagttgaaaatctgaacagctcttatttctcttcacaggacgtgctgagaagcaacctggtgcaggtgaaggtggagaaagaggcttcctgtgatgagagtgatgttggcactaatgactatgacatggaacatagcactgtgaaagaaagtgtgagcactaataacagggtacagtatgagccggcccatctggctcccctgagggaggactcggtcttgagggagctggaccgggaggacaaagccagtgatgatgagatgatgaccccagagagcgagcgtgtccaggtggagggaggcatggagagcagtctgctcccctacgtctccaacatcctgagccccgcgggccagatcttcatgtgccccctgtgcaacaaggtcttccccagcccccacatcctgcagatccacctgagcacgcacttccgcgagcaggacggcatccgcagcaagcccgccgccgatgtcaacgtgcccacgtgctcgctgtgtgggaagactttctcttgcatgtacaccctcaagcgccacgagaggactcactcgggggagaagccctacacatgcacccagtgcggcaagagcttccagtactcgcacaacctgagccgccatgccgtggtgcacacccgcgagaagccgcacgcctgcaagtggtgcgagcgcaggttcacgcagtccggggacctgtacagacacattcgcaagttccactgtgagttggtgaactccttgtcggtcaaaagcgaagcactgagcttgcctactgtcagagactggaccttagaagatagctctcaagaactttggaaataattttatatatatataaataatatatatatatatacatatatataaatagatctctatatagttgtggtacggtctaaaagcagtcttgtttcctggaaataaaaagttgggatattaacttgtttttgcactttagaatagcatgagaatctcactaatttagcattctgataaaagaaactttagagcaagtcagaatagagaggtgtttttcctttgaggggataggggaagtaagccaataagaaccttttaaacaaatcgtcctgtcacaaaatgctttcatatggcttaattttgtcaacactgcattgtcttttgagctcttttttcccccccaacaaagtttttttgttttttgtttttttttttaagtagaaattccctccagttttattagcctctttatatgtctcaaattgcatgaattttttctggctgttggaaacctgaatgcttttagacccaaatggaaaatttctgaaatgctggattatctatttttaaacaagcagttgacttaaaactttctgtggcaacttctggttttctgacagttcccagtgagagaaatgctgaaagtacactgggatcactgggacactgtcttatgaaggtttgcttgggatgaaaaaggatattgcagcttcagcagtgttgaactgtgtgtttaaaaatgtgaattactgttattgtatactgtaattgattacatgggctgggggggtgtcaaagaacttgacaggttgtgttgatgctcttagttgagtcttgaaaagtaaatattaacgctacagaaatgcatgagtttcaatatattttttgtctttgtttgcattgtataactttaacgagtgagtttaaaattatttaatttccttagaaaaataacaccatttggaaaaaaaaactggtgttatgaagaacgtaaatgcactgtttttatttttattttatataatttaaattgactttcccactgtctttaagttgaaactgttaagctgaataaaaacttaagctgcaaattgataacttcgctacataacaaggaaaatataaatgtttacaaacagcttaaagatttgcatgtgcagtgtgcatttataacaaacttctaattgcacaaaacccatgccagctcagagtttaggtgtacacatttacccagttgagcgttcttagaataactactgcacaagttgacaataggtcgttctctctttttttttgtttgctccctttttctttttctccccttcctccttaccctccctcccttactctccccccccaccaccaccctccacccccaactcatgaaaagattctatggactgaaaaagccccaggctgaaaggactggactgccttgattgacatggggaagggggttagtagactatgtggattgcggcagcagaggctgcagcctaacgtgtggttttaatgaccagcacgcaaggcaaaagcattttgcacagtgtttgttttcctgtcttgcacttacaaataaggtctatgggagtagcatggaaaacgtttgctgtttttcccttttttttttaattgcttttgtttaaaatttgatcgccttaactactgtaaacatagcctatttttgtgcttaagatactgaatggaaaactccattgtgtgttgctggactgttttggaaatatttggttaaatgtgtgttaatttggctgtaatggcatttaaagcaaacaaacaaacaaaaaaagctgtgaaaatggccttggagcattatctttagttacttgaagagtttctagtttttttaaaatacagtttatgttaaaataatttttattaatttagagaagacaatcaatgtctgtgagaaaacggactttcttttggattttctttttgtggtcattgtgagtgattgctttttccttttcttagtttcacattcttcctttgttctaaaacttagactgacatctagctttgacaatcatagtatgttttattttcctgagggggaataacttataatgctgtttagttttgtactattggtgtgttggtgaatttttaaactgtgtgctaactgcaataaattatatgaactg

SEQ ID NO: 200972 - DNA, 3090 bp, Homo sapiens
  Payload ID: 19668
  Gene Name: zinc finger and BTB domain containing 2
  Uniprot ID: Q8N680
  ENST ID: ENST00000325144
  CDS Start-End: 142-1686
accgaccgcggcggcagcagcagcagcagcagcgagaggcagaggcggcggcggcggggaggacagcacggccgaggctgcccagaggcgcctcctccacaccccccgccgcagcagcaccggcgacagattttttaaaaaatggatttggccaaccatggacttattctactgcaacagttaaacgctcagcgagagtttggtttcctgtgtgactgcacggttgcaatcggcgatgtatacttcaaggcacacaaatcagttcttgcttcattctccaattactttaagatgttgtttgtccatcagaccagtgagtgtgtccgcttgaaaccaactgacatacagcccgacatcttcagctatctcttacacttgatgtacactgggaagatggcgcctcagctcatcgacccggttcgattagaacagggcatcaagtttctgcacgcctacccgctcattcaggaagccagcctcgccagccagggagccttttctcaccctgaccaagttttcccactggcttcttcattgtatggcattcagattgcagatcatcagttgagacaagccaccaagattgcttcagcacctgaaaaactcgggcgagatccacggccacagacctccaggataagccaggagcaggtccctgaggcctcacagctctcccagctgacttcaaatctggcccaggtgaatcggacaaatatgactccctcagaccccctgcagacctcgctgtctccagaacttgtttccactcctgttcctccccctcctcccggggaggagaccaatctggaagcatcttcctccgatgagcagcctgcgtccctcacaatagcccacgtcaagccaagcatcatgaagaggaatgggagctttccaaagtactatgcctgccacctgtgtggacggcgcttcactctccggagcagcttacgtgaacacctccagatccacacaggagtacctttcacatctagccaacagggagaaagtcgcgtccccctgactctctgtagcaatgcagctgacctcgggaaagatgccatggaagtgcctgaagccgggatgataagtgacagtgagctgcagcacatctctgattctcccatcatcgatgggcagcagcagtcggaaaccccacccccctcagacattgctgacattgacaacctggagcaggccgaccaggagagggaggtgaagaggcggaagtacgagtgcacaatatgtggacgcaaatttatccagaaaagccactggagggaacacatgtacatacacaccgggaagcctttcaagtgcagcacttgtgacaaaagcttttgcagggccaaccaggctgcccgccacgtgtgcctcaaccagagcatcgacacttacaccatggtggacaaacagactctggaactctgcacatttgaggaagggagtcagatggacaacatgctggtgcaaacaaacaaaccctacaaatgcaacttgtgtgacaaaacattctccactcccaatgaggttgttaaacattcatgccaaaaccagaactcggatgtttttgccctagacgaagggcgatccattctcctgggcagtggggactcggaagtaacggagcctgaccacccagtgttagcttccatcaaaaaggaacaagaaaccgtcttactagactgaatgtcacttatctttttaaaaaactctcatttttacaaagactatcttccctcccttccctgaattcagaactgtagttctccatggcatgatacaaacaggtccttgttctcttctcctcttccccttttccacatcccagccccacctctgtaaaggctttgtgcattataaacctggaatgtatcgactttctttcaggggatattggaaagataatggtcattatacttataaactcaaattttgagaggttttagattattcagaagcatacttggaactaatgaagggtatataataaaacaactggaatccaatttggtaagctaaaattatgactttccctgggtaaaaagtcttctcagaaaaacaatgtcagaaaataacagcgtgctgcttagaaatacggctgggctctgtactatgcaaaatctagaaagtgtggggaaactttaaacccaagaaaacgttcttagtattcatcctccaggtgtcttacttcagaatgcatcctttgagattatgtccacttaagagaaatcatcagttaagaaatctactttaacaaaacaaaaaggagaaaaagtaataatgtgatggcaatcttaatttttgggtacaacatgacaagctgtgagtttgtgtgtttgtaagagaaaaatgtgtgggtacttgctaataaacaggtgaattaatgcacatccttatctcattgctggcttctttccaagttgagcaacaacaaaatgctgtatttgagtttctgacaaatttgttttaaaaatcaaatttgaatgtactattctataaattgcctttctgaatagaacatgacatgccattttctagcagctgccagtgataatttgttttacactaacttttaaatcagtgtgtgtactgcagggaaaaggatataggaatactcatcttacaggggaatttgtgaccagaagatgtagtaacttcaatgactgaaagtcaatgctgatagtttactggcaacattaattgaagcatcaaaaataaatggcaaagagaaatcaggacaaaaaatctaattgctgtttgggaaaaaacttgattttgatgtttattctccaggtttttggttgtttttttttctttcttctttcttaatgcctgaaattttctccattggcccgaaagcagtaaaaattgttcattaatcttccgttaggccaataaaagaagggcctcacaagacaaaacaggagccagaagtaaggactgaaggagaaggggagaatagctaatagctatagtatatgtatatgttaaaaactgaatatcccatcatcctatttcatgtatagttgagttctcaaatttgtaagtttttatacatcctttcattgaataaacgtttaattaaatgag

SEQ ID NO: 200973 - DNA, 2956 bp, Homo sapiens
  Payload ID: 19669
  Gene Name: zinc finger and BTB domain containing 20
  Uniprot ID: Q9HC78
  ENST ID: ENST00000357258
  CDS Start-End: 615-2621
ggggcggggggaagtttaggagttgaggaaagaagattaaagagcgcgaggagacaaataaaaagaagtgttaagaattgcctttgggactctgaaggctgaagaattgatgaattgcaagtttgtgccccatagctgcacagactgcctgaagttacatttagagactgaaatcactgcaccttaaaaacaaaagattgagctgcactgtattcctaatgtttcatcattactaacaggatattcctcatgacattgctgtctgatctttgaccatcagtctgtgacctgccccttctctttacatgcagccgctctctgctccctgccccaatgaacatctgcactaggcccaagccttggagtaatttacctgaagagtgacaccattgattttgaaactactgaagaaacccaagacagctgaaaaccagaaggcatctgaggagaatgagattactcagccgggtggatccagcgccaagccgggccttccctgcctgaactttgaagctgttttgtctccagacccagccctcatccactcaacacattcactgacaaactctcacgctcacaccgggtcatctgattgtgacatcagttgcaaggggatgaccgagcgcattcacagcatcaaccttcacaacttcagcaattccgtgctcgagaccctcaacgagcagcgcaaccgtggccacttctgtgacgtaacggtgcgcatccacgggagcatgctgcgcgcacaccgctgcgtgctggcagccggcagccccttcttccaggacaaactgctgcttggctacagcgacatcgagatcccgtcggtggtgtcagtgcagtcagtgcaaaagctcattgacttcatgtacagcggcgtgctacgggtctcgcagtcggaagctctgcagatcctcacggccgccagcatcctgcagatcaaaacagtcatcgacgagtgcacgcgcatcgtgtcacagaacgtgggcgatgtgttcccggggatccaggactcgggccaggacacgccgcggggcactcccgagtcaggcacgtcaggccagagcagcgacacggagtcgggctacctgcagagccacccacagcacagcgtggacaggatctactcggcactctacgcgtgctccatgcagaatggcagcggcgagcgctctttttacagcggcgcagtggtcagccaccacgagactgcgctcggcctgccccgcgaccaccacatggaagaccccagctggatcacacgcatccatgagcgctcgcagcagatggagcgctacctgtccaccacccccgagaccacgcactgccgcaagcagccccggcctgtgcgcatccagaccctagtgggcaacatccacatcaagcaggagatggaggacgattacgactactacgggcagcaaagggtgcagatcctggaacgcaacgaatccgaggagtgcacggaagacacagaccaggccgagggcaccgagagtgagcccaaaggtgaaagcttcgactcgggcgtcagctcctccataggcaccgagcctgactcggtggagcagcagtttgggcctggggcggcgcgggacagccaggctgaacccacccaacccgagcaggctgcagaagcccccgctgagggtggtccgcagacaaaccagctagaaacaggtgcttcctctccggagagaagcaatgaagtggagatggacagcactgttatcactgtcagcaacagctccgacaagagcgtcctacaacagccttcggtcaacacgtccatcgggcagccattgccaagtacccagctctacttacgccagacagaaaccctcaccagcaacctgaggatgcctctgaccttgaccagcaacacgcaggtcattggcacagctggcaacacctacctgccagccctcttcactacccagcccgcgggcagtggccccaagcctttcctcttcagcctgccacagcccctggcaggccagcagacccagtttgtgacagtgtcccagcccggtctgtcgacctttactgcacagctgccagcgccacagcccctggcctcatccgcaggccacagcacagccagtgggcaaggcgaaaaaaagccttatgagtgcactctctgcaacaagactttcaccgccaaacagaactacgtcaagcacatgttcgtacacacaggtgagaagccccaccaatgcagcatctgttggcgctccttctccttaaaggattaccttatcaagcacatggtgacacacacaggagtgagggcataccagtgtagtatctgcaacaagcgcttcacccagaagagctccctcaacgtgcacatgcgcctccaccggggagagaagtcctacgagtgctacatctgcaaaaagaagttctctcacaagaccctcctggagcgacacgtggccctgcacagtgccagcaatgggaccccccctgcaggcacacccccaggtgcccgcgctggccccccaggcgtggtggcctgcacggaggggaccacttacgtctgctccgtctgcccagcaaagtttgaccaaatcgagcagttcaacgaccacatgaggatgcatgtgtctgacggataagtagtatctttctctctttcttatgaacaaaacaaaacaacaacaaaaaacaaacaaacaaaaaagctatggcactagaatttaagaaatgttttggtttcatttttactttctgtttttgtttttgtttcgtttcattttgtactacatgaagaactgttttttgcctgctggtacattacatttccggaggcttgggtgaataatagttttcccagtctccctcggatggtggccttaaggcctggtagtgcttcaagaggtccactggttggatctctagctactggcctctaaatacaacccttctttacaaaaaaatcttttaaaaaaaa

SEQ ID NO: 200974 - DNA, 3323 bp, Homo sapiens
  Payload ID: 19669
  Gene Name: zinc finger and BTB domain containing 20
  Uniprot ID: Q9HC78
  ENST ID: ENST00000393785
  CDS Start-End: 419-2425
acttgttgcttacggtacagtccagcatgagctggaaatgtaggaacctcagcctcccgagcagaaagaatctttgaccatcagtctgtgacctgccccttctctttacatgcagccgctctctgctccctgccccaatgaacatctgcactaggcccaagccttggagtaatttacctgaagagtgacaccattgattttgaaactactgaagaaacccaagacagctgaaaaccagaaggcatctgaggagaatgagattactcagccgggtggatccagcgccaagccgggccttccctgcctgaactttgaagctgttttgtctccagacccagccctcatccactcaacacattcactgacaaactctcacgctcacaccgggtcatctgattgtgacatcagttgcaaggggatgaccgagcgcattcacagcatcaaccttcacaacttcagcaattccgtgctcgagaccctcaacgagcagcgcaaccgtggccacttctgtgacgtaacggtgcgcatccacgggagcatgctgcgcgcacaccgctgcgtgctggcagccggcagccccttcttccaggacaaactgctgcttggctacagcgacatcgagatcccgtcggtggtgtcagtgcagtcagtgcaaaagctcattgacttcatgtacagcggcgtgctacgggtctcgcagtcggaagctctgcagatcctcacggccgccagcatcctgcagatcaaaacagtcatcgacgagtgcacgcgcatcgtgtcacagaacgtgggcgatgtgttcccggggatccaggactcgggccaggacacgccgcggggcactcccgagtcaggcacgtcaggccagagcagcgacacggagtcgggctacctgcagagccacccacagcacagcgtggacaggatctactcggcactctacgcgtgctccatgcagaatggcagcggcgagcgctctttttacagcggcgcagtggtcagccaccacgagactgcgctcggcctgccccgcgaccaccacatggaagaccccagctggatcacacgcatccatgagcgctcgcagcagatggagcgctacctgtccaccacccccgagaccacgcactgccgcaagcagccccggcctgtgcgcatccagaccctagtgggcaacatccacatcaagcaggagatggaggacgattacgactactacgggcagcaaagggtgcagatcctggaacgcaacgaatccgaggagtgcacggaagacacagaccaggccgagggcaccgagagtgagcccaaaggtgaaagcttcgactcgggcgtcagctcctccataggcaccgagcctgactcggtggagcagcagtttgggcctggggcggcgcgggacagccaggctgaacccacccaacccgagcaggctgcagaagcccccgctgagggtggtccgcagacaaaccagctagaaacaggtgcttcctctccggagagaagcaatgaagtggagatggacagcactgttatcactgtcagcaacagctccgacaagagcgtcctacaacagccttcggtcaacacgtccatcgggcagccattgccaagtacccagctctacttacgccagacagaaaccctcaccagcaacctgaggatgcctctgaccttgaccagcaacacgcaggtcattggcacagctggcaacacctacctgccagccctcttcactacccagcccgcgggcagtggccccaagcctttcctcttcagcctgccacagcccctggcaggccagcagacccagtttgtgacagtgtcccagcccggtctgtcgacctttactgcacagctgccagcgccacagcccctggcctcatccgcaggccacagcacagccagtgggcaaggcgaaaaaaagccttatgagtgcactctctgcaacaagactttcaccgccaaacagaactacgtcaagcacatgttcgtacacacaggtgagaagccccaccaatgcagcatctgttggcgctccttctccttaaaggattaccttatcaagcacatggtgacacacacaggagtgagggcataccagtgtagtatctgcaacaagcgcttcacccagaagagctccctcaacgtgcacatgcgcctccaccggggagagaagtcctacgagtgctacatctgcaaaaagaagttctctcacaagaccctcctggagcgacacgtggccctgcacagtgccagcaatgggaccccccctgcaggcacacccccaggtgcccgcgctggccccccaggcgtggtggcctgcacggaggggaccacttacgtctgctccgtctgcccagcaaagtttgaccaaatcgagcagttcaacgaccacatgaggatgcatgtgtctgacggataagtagtatctttctctctttcttatgaacaaaacaaaacaacaacaaaaaacaaacaaacaaaaaagctatggcactagaatttaagaaatgttttggtttcatttttactttctgtttttgtttttgtttcgtttcattttgtactacatgaagaactgttttttgcctgctggtacattacatttccggaggcttgggtgaataatagttttcccagtctccctcggatggtggccttaaggcctggtagtgcttcaagaggtccactggttggatctctagctactggcctctaaatacaacccttctttacaaaaaaatcttttaaaaaaaagtaaaaaaaaaaaaaaaatttccacttgtgaagagcactacaaaaaatatataacaaaatctaaaaggcctactgtctttaagtacaccgcttgcagtgtttcagtggacattttcacaattctggccgcttggacttcacagtaaccagttaaaactgtggaatatcacttctggttgaaaacccagaggaaaggccctgctgttttccacctaccacgttgtctgatttcataaaagggctgtgggggtgggaagggcagtgggttcggtggtgtgggaaagaaagacgaatggcaggcttcttccccagattctgcccgggtccacacaccctggcccaccttctccatatccccctcttgcagcagaagccaggaagacttggacaagcaacaagcaacagtggctatcgtatttattcagtgtcttcgctgagccacagcctcagcacaatcaagagggactttcatgaaaggcaggaatgcagataaaacaaagatatcagaaatttgcacctatgtttctaggtacaagagaaggattatttccaacaatctttgc

SEQ ID NO: 200975 - DNA, 2816 bp, Homo sapiens
  Payload ID: 19669
  Gene Name: zinc finger and BTB domain containing 20
  Uniprot ID: Q9HC78
  ENST ID: ENST00000464560
  CDS Start-End: 489-2495
acatttcaaaaaaaatacatagactgatgtttcagacttgtgcagcataagcctacagggtacgaagaatgaactctgagaatgtttggagaatgtttcatcattactaacaggatattcctcatgacattgctgtctgatctttgaccatcagtctgtgacctgccccttctctttacatgcagccgctctctgctccctgccccaatgaacatctgcactaggcccaagccttggagtaatttacctgaagagtgacaccattgattttgaaactactgaagaaacccaagacagctgaaaaccagaaggcatctgaggagaatgagattactcagccgggtggatccagcgccaagccgggccttccctgcctgaactttgaagctgttttgtctccagacccagccctcatccactcaacacattcactgacaaactctcacgctcacaccgggtcatctgattgtgacatcagttgcaaggggatgaccgagcgcattcacagcatcaaccttcacaacttcagcaattccgtgctcgagaccctcaacgagcagcgcaaccgtggccacttctgtgacgtaacggtgcgcatccacgggagcatgctgcgcgcacaccgctgcgtgctggcagccggcagccccttcttccaggacaaactgctgcttggctacagcgacatcgagatcccgtcggtggtgtcagtgcagtcagtgcaaaagctcattgacttcatgtacagcggcgtgctacgggtctcgcagtcggaagctctgcagatcctcacggccgccagcatcctgcagatcaaaacagtcatcgacgagtgcacgcgcatcgtgtcacagaacgtgggcgatgtgttcccggggatccaggactcgggccaggacacgccgcggggcactcccgagtcaggcacgtcaggccagagcagcgacacggagtcgggctacctgcagagccacccacagcacagcgtggacaggatctactcggcactctacgcgtgctccatgcagaatggcagcggcgagcgctctttttacagcggcgcagtggtcagccaccacgagactgcgctcggcctgccccgcgaccaccacatggaagaccccagctggatcacacgcatccatgagcgctcgcagcagatggagcgctacctgtccaccacccccgagaccacgcactgccgcaagcagccccggcctgtgcgcatccagaccctagtgggcaacatccacatcaagcaggagatggaggacgattacgactactacgggcagcaaagggtgcagatcctggaacgcaacgaatccgaggagtgcacggaagacacagaccaggccgagggcaccgagagtgagcccaaaggtgaaagcttcgactcgggcgtcagctcctccataggcaccgagcctgactcggtggagcagcagtttgggcctggggcggcgcgggacagccaggctgaacccacccaacccgagcaggctgcagaagcccccgctgagggtggtccgcagacaaaccagctagaaacaggtgcttcctctccggagagaagcaatgaagtggagatggacagcactgttatcactgtcagcaacagctccgacaagagcgtcctacaacagccttcggtcaacacgtccatcgggcagccattgccaagtacccagctctacttacgccagacagaaaccctcaccagcaacctgaggatgcctctgaccttgaccagcaacacgcaggtcattggcacagctggcaacacctacctgccagccctcttcactacccagcccgcgggcagtggccccaagcctttcctcttcagcctgccacagcccctggcaggccagcagacccagtttgtgacagtgtcccagcccggtctgtcgacctttactgcacagctgccagcgccacagcccctggcctcatccgcaggccacagcacagccagtgggcaaggcgaaaaaaagccttatgagtgcactctctgcaacaagactttcaccgccaaacagaactacgtcaagcacatgttcgtacacacaggtgagaagccccaccaatgcagcatctgttggcgctccttctccttaaaggattaccttatcaagcacatggtgacacacacaggagtgagggcataccagtgtagtatctgcaacaagcgcttcacccagaagagctccctcaacgtgcacatgcgcctccaccggggagagaagtcctacgagtgctacatctgcaaaaagaagttctctcacaagaccctcctggagcgacacgtggccctgcacagtgccagcaatgggaccccccctgcaggcacacccccaggtgcccgcgctggccccccaggcgtggtggcctgcacggaggggaccacttacgtctgctccgtctgcccagcaaagtttgaccaaatcgagcagttcaacgaccacatgaggatgcatgtgtctgacggataagtagtatctttctctctttcttatgaacaaaacaaaacaacaacaaaaaacaaacaaacaaaaaagctatggcactagaatttaagaaatgttttggtttcatttttactttctgtttttgtttttgtttcgtttcattttgtactacatgaagaactgttttttgcctgctggtacattacatttccggaggcttgggtgaataatagttttcccagtctccctcggatggtggccttaaggcctggtagtgcttcaagaggtccactggttggatctctagctactggcctctaaatacaacccttctttacaaaaaaa

SEQ ID NO: 200976 - DNA, 2800 bp, Homo sapiens
  Payload ID: 19669
  Gene Name: zinc finger and BTB domain containing 20
  Uniprot ID: Q9HC78
  ENST ID: ENST00000481632
  CDS Start-End: 441-2447
gcagggagcttaacagccaggcctggacaccctcaagagactgtgtgctgattctcagtcgtcactccttggatcaggaaccatagtcctgatctttgaccatcagtctgtgacctgccccttctctttacatgcagccgctctctgctccctgccccaatgaacatctgcactaggcccaagccttggagtaatttacctgaagagtgacaccattgattttgaaactactgaagaaacccaagacagctgaaaaccagaaggcatctgaggagaatgagattactcagccgggtggatccagcgccaagccgggccttccctgcctgaactttgaagctgttttgtctccagacccagccctcatccactcaacacattcactgacaaactctcacgctcacaccgggtcatctgattgtgacatcagttgcaaggggatgaccgagcgcattcacagcatcaaccttcacaacttcagcaattccgtgctcgagaccctcaacgagcagcgcaaccgtggccacttctgtgacgtaacggtgcgcatccacgggagcatgctgcgcgcacaccgctgcgtgctggcagccggcagccccttcttccaggacaaactgctgcttggctacagcgacatcgagatcccgtcggtggtgtcagtgcagtcagtgcaaaagctcattgacttcatgtacagcggcgtgctacgggtctcgcagtcggaagctctgcagatcctcacggccgccagcatcctgcagatcaaaacagtcatcgacgagtgcacgcgcatcgtgtcacagaacgtgggcgatgtgttcccggggatccaggactcgggccaggacacgccgcggggcactcccgagtcaggcacgtcaggccagagcagcgacacggagtcgggctacctgcagagccacccacagcacagcgtggacaggatctactcggcactctacgcgtgctccatgcagaatggcagcggcgagcgctctttttacagcggcgcagtggtcagccaccacgagactgcgctcggcctgccccgcgaccaccacatggaagaccccagctggatcacacgcatccatgagcgctcgcagcagatggagcgctacctgtccaccacccccgagaccacgcactgccgcaagcagccccggcctgtgcgcatccagaccctagtgggcaacatccacatcaagcaggagatggaggacgattacgactactacgggcagcaaagggtgcagatcctggaacgcaacgaatccgaggagtgcacggaagacacagaccaggccgagggcaccgagagtgagcccaaaggtgaaagcttcgactcgggcgtcagctcctccataggcaccgagcctgactcggtggagcagcagtttgggcctggggcggcgcgggacagccaggctgaacccacccaacccgagcaggctgcagaagcccccgctgagggtggtccgcagacaaaccagctagaaacaggtgcttcctctccggagagaagcaatgaagtggagatggacagcactgttatcactgtcagcaacagctccgacaagagcgtcctacaacagccttcggtcaacacgtccatcgggcagccattgccaagtacccagctctacttacgccagacagaaaccctcaccagcaacctgaggatgcctctgaccttgaccagcaacacgcaggtcattggcacagctggcaacacctacctgccagccctcttcactacccagcccgcgggcagtggccccaagcctttcctcttcagcctgccacagcccctggcaggccagcagacccagtttgtgacagtgtcccagcccggtctgtcgacctttactgcacagctgccagcgccacagcccctggcctcatccgcaggccacagcacagccagtgggcaaggcgaaaaaaagccttatgagtgcactctctgcaacaagactttcaccgccaaacagaactacgtcaagcacatgttcgtacacacaggtgagaagccccaccaatgcagcatctgttggcgctccttctccttaaaggattaccttatcaagcacatggtgacacacacaggagtgagggcataccagtgtagtatctgcaacaagcgcttcacccagaagagctccctcaacgtgcacatgcgcctccaccggggagagaagtcctacgagtgctacatctgcaaaaagaagttctctcacaagaccctcctggagcgacacgtggccctgcacagtgccagcaatgggaccccccctgcaggcacacccccaggtgcccgcgctggccccccaggcgtggtggcctgcacggaggggaccacttacgtctgctccgtctgcccagcaaagtttgaccaaatcgagcagttcaacgaccacatgaggatgcatgtgtctgacggataagtagtatctttctctctttcttatgaacaaaacaaaacaacaacaaaaaacaaacaaacaaaaaagctatggcactagaatttaagaaatgttttggtttcatttttactttctgtttttgtttttgtttcgtttcattttgtactacatgaagaactgttttttgcctgctggtacattacatttccggaggcttgggtgaataatagttttcccagtctccctcggatggtggccttaaggcctggtagtgcttcaagaggtccactggttggatctctagctactggcctctaaatacaacccttctttacaaaaaaatcttttaaaaaaaagtaaaaaaaaaaaaaaaa

SEQ ID NO: 200977 - DNA, 2757 bp, Homo sapiens
  Payload ID: 19669
  Gene Name: zinc finger and BTB domain containing 20
  Uniprot ID: Q9HC78
  ENST ID: ENST00000474710
  CDS Start-End: 180-2405
ttgggaaacagcccagtggtataaggatgaggaaactgaagcccagagaggtgaagtgaggtgcccaaggccacacagcaagttagaggcacagctagtacggtagctcaagtctcctgactcccagtccagtgctcctcccattactccacgagtcctgtctctaagcttcctgacaaatgctagaacggaagaaacccaagacagctgaaaaccagaaggcatctgaggagaatgagattactcagccgggtggatccagcgccaagccgggccttccctgcctgaactttgaagctgttttgtctccagacccagccctcatccactcaacacattcactgacaaactctcacgctcacaccgggtcatctgattgtgacatcagttgcaaggggatgaccgagcgcattcacagcatcaaccttcacaacttcagcaattccgtgctcgagaccctcaacgagcagcgcaaccgtggccacttctgtgacgtaacggtgcgcatccacgggagcatgctgcgcgcacaccgctgcgtgctggcagccggcagccccttcttccaggacaaactgctgcttggctacagcgacatcgagatcccgtcggtggtgtcagtgcagtcagtgcaaaagctcattgacttcatgtacagcggcgtgctacgggtctcgcagtcggaagctctgcagatcctcacggccgccagcatcctgcagatcaaaacagtcatcgacgagtgcacgcgcatcgtgtcacagaacgtgggcgatgtgttcccggggatccaggactcgggccaggacacgccgcggggcactcccgagtcaggcacgtcaggccagagcagcgacacggagtcgggctacctgcagagccacccacagcacagcgtggacaggatctactcggcactctacgcgtgctccatgcagaatggcagcggcgagcgctctttttacagcggcgcagtggtcagccaccacgagactgcgctcggcctgccccgcgaccaccacatggaagaccccagctggatcacacgcatccatgagcgctcgcagcagatggagcgctacctgtccaccacccccgagaccacgcactgccgcaagcagccccggcctgtgcgcatccagaccctagtgggcaacatccacatcaagcaggagatggaggacgattacgactactacgggcagcaaagggtgcagatcctggaacgcaacgaatccgaggagtgcacggaagacacagaccaggccgagggcaccgagagtgagcccaaaggtgaaagcttcgactcgggcgtcagctcctccataggcaccgagcctgactcggtggagcagcagtttgggcctggggcggcgcgggacagccaggctgaacccacccaacccgagcaggctgcagaagcccccgctgagggtggtccgcagacaaaccagctagaaacaggtgcttcctctccggagagaagcaatgaagtggagatggacagcactgttatcactgtcagcaacagctccgacaagagcgtcctacaacagccttcggtcaacacgtccatcgggcagccattgccaagtacccagctctacttacgccagacagaaaccctcaccagcaacctgaggatgcctctgaccttgaccagcaacacgcaggtcattggcacagctggcaacacctacctgccagccctcttcactacccagcccgcgggcagtggccccaagcctttcctcttcagcctgccacagcccctggcaggccagcagacccagtttgtgacagtgtcccagcccggtctgtcgacctttactgcacagctgccagcgccacagcccctggcctcatccgcaggccacagcacagccagtgggcaaggcgaaaaaaagccttatgagtgcactctctgcaacaagactttcaccgccaaacagaactacgtcaagcacatgttcgtacacacaggtgagaagccccaccaatgcagcatctgttggcgctccttctccttaaaggattaccttatcaagcacatggtgacacacacaggagtgagggcataccagtgtagtatctgcaacaagcgcttcacccagaagagctccctcaacgtgcacatgcgcctccaccggggagagaagtcctacgagtgctacatctgcaaaaagaagttctctcacaagaccctcctggagcgacacgtggccctgcacagtgccagcaatgggaccccccctgcaggcacacccccaggtgcccgcgctggccccccaggcgtggtggcctgcacggaggggaccacttacgtctgctccgtctgcccagcaaagtttgaccaaatcgagcagttcaacgaccacatgaggatgcatgtgtctgacggataagtagtatctttctctctttcttatgaacaaaacaaaacaacaacaaaaaacaaacaaacaaaaaagctatggcactagaatttaagaaatgttttggtttcatttttactttctgtttttgtttttgtttcgtttcattttgtactacatgaagaactgttttttgcctgctggtacattacatttccggaggcttgggtgaataatagttttcccagtctccctcggatggtggccttaaggcctggtagtgcttcaagaggtccactggttggatctctagctactggcctctaaatacaacccttctttacaaaaaaatcttttaaaaaaaagtaaaaaaaaaaaaaaa

SEQ ID NO: 200978 - DNA, 551 bp, Homo sapiens
  Payload ID: 19669
  Gene Name: zinc finger and BTB domain containing 20
  ENST ID: ENST00000482689
  CDS Start-End: 494-551
actcagaagagacacagacaggagagaggaggaggggtggggggagagagagagaatcaatatcaagaatagaaggagctccgaagccattttttttttaaagaagtatcgggacttgggagagggtgacaaagaaggtttttcaaagaggcagtggaggaggttctaataaatttggaaggaaacagttccctgtcttgggaaaaggagaactcctgactgattagcattcacaccagatgcagccgctctctgctccctgccccaatgaacatctgcactaggcccaagccttggagtaatttacctgaagagtgacaccattgattttgaaactactatgaggaaactgaagcccagagaggtgaagtgaggtgcccaaggccacacagcaagttagaggcacagctagtacggtagctcaagtctcctgactcccagtccagtgctcctcccattactccacgagtcctgtctctaagcttcctgacaaatgctagaacggaagaaacccaagacagctgaaaaccagaaggcatctgaggagaatg

SEQ ID NO: 200979 - DNA, 3133 bp, Homo sapiens
  Payload ID: 19669
  Gene Name: zinc finger and BTB domain containing 20
  Uniprot ID: Q9HC78
  ENST ID: ENST00000471418
  CDS Start-End: 774-2780
atctagcctcccagcctcactgcattatttgtgaaaatggccagtgtgaggaattattaattaaagctaacaaatcaccctgacaagctgtgccctggcatggctgaaggttgattggcgaaagtcttctcctttggagaaaagactttttgtgctcgtgacgcagtcagggacggattattgaatatgcaagttagaagaaaaatcacaggacaagcaaattgagtatttactggcaaataattgcactcttaagctgtggctctcttcctaaattcttaacattctcgagggttagaaagaaacacagaaaaatgcatcggtacagagtacatttcaaaaaaaatacatagactgatgtttcagacttgtgcagaatgtttcatcattactaacaggatattcctcatgacattgctgtctgatctttgaccatcagtctgtgacctgccccttctctttacatgcagccgctctctgctccctgccccaatgaacatctgcactaggcccaagccttggagtaatttacctgaagagtgacaccattgattttgaaactactgaagaaacccaagacagctgaaaaccagaaggcatctgaggagaatgagattactcagccgggtggatccagcgccaagccgggccttccctgcctgaactttgaagctgttttgtctccagacccagccctcatccactcaacacattcactgacaaactctcacgctcacaccgggtcatctgattgtgacatcagttgcaaggggatgaccgagcgcattcacagcatcaaccttcacaacttcagcaattccgtgctcgagaccctcaacgagcagcgcaaccgtggccacttctgtgacgtaacggtgcgcatccacgggagcatgctgcgcgcacaccgctgcgtgctggcagccggcagccccttcttccaggacaaactgctgcttggctacagcgacatcgagatcccgtcggtggtgtcagtgcagtcagtgcaaaagctcattgacttcatgtacagcggcgtgctacgggtctcgcagtcggaagctctgcagatcctcacggccgccagcatcctgcagatcaaaacagtcatcgacgagtgcacgcgcatcgtgtcacagaacgtgggcgatgtgttcccggggatccaggactcgggccaggacacgccgcggggcactcccgagtcaggcacgtcaggccagagcagcgacacggagtcgggctacctgcagagccacccacagcacagcgtggacaggatctactcggcactctacgcgtgctccatgcagaatggcagcggcgagcgctctttttacagcggcgcagtggtcagccaccacgagactgcgctcggcctgccccgcgaccaccacatggaagaccccagctggatcacacgcatccatgagcgctcgcagcagatggagcgctacctgtccaccacccccgagaccacgcactgccgcaagcagccccggcctgtgcgcatccagaccctagtgggcaacatccacatcaagcaggagatggaggacgattacgactactacgggcagcaaagggtgcagatcctggaacgcaacgaatccgaggagtgcacggaagacacagaccaggccgagggcaccgagagtgagcccaaaggtgaaagcttcgactcgggcgtcagctcctccataggcaccgagcctgactcggtggagcagcagtttgggcctggggcggcgcgggacagccaggctgaacccacccaacccgagcaggctgcagaagcccccgctgagggtggtccgcagacaaaccagctagaaacaggtgcttcctctccggagagaagcaatgaagtggagatggacagcactgttatcactgtcagcaacagctccgacaagagcgtcctacaacagccttcggtcaacacgtccatcgggcagccattgccaagtacccagctctacttacgccagacagaaaccctcaccagcaacctgaggatgcctctgaccttgaccagcaacacgcaggtcattggcacagctggcaacacctacctgccagccctcttcactacccagcccgcgggcagtggccccaagcctttcctcttcagcctgccacagcccctggcaggccagcagacccagtttgtgacagtgtcccagcccggtctgtcgacctttactgcacagctgccagcgccacagcccctggcctcatccgcaggccacagcacagccagtgggcaaggcgaaaaaaagccttatgagtgcactctctgcaacaagactttcaccgccaaacagaactacgtcaagcacatgttcgtacacacaggtgagaagccccaccaatgcagcatctgttggcgctccttctccttaaaggattaccttatcaagcacatggtgacacacacaggagtgagggcataccagtgtagtatctgcaacaagcgcttcacccagaagagctccctcaacgtgcacatgcgcctccaccggggagagaagtcctacgagtgctacatctgcaaaaagaagttctctcacaagaccctcctggagcgacacgtggccctgcacagtgccagcaatgggaccccccctgcaggcacacccccaggtgcccgcgctggccccccaggcgtggtggcctgcacggaggggaccacttacgtctgctccgtctgcccagcaaagtttgaccaaatcgagcagttcaacgaccacatgaggatgcatgtgtctgacggataagtagtatctttctctctttcttatgaacaaaacaaaacaacaacaaaaaacaaacaaacaaaaaagctatggcactagaatttaagaaatgttttggtttcatttttactttctgtttttgtttttgtttcgtttcattttgtactacatgaagaactgttttttgcctgctggtacattacatttccggaggcttgggtgaataatagttttcccagtctccctcggatggtggccttaaggcctggtagtgcttcaagaggtccactggttggatctctagctactggcctctaaatacaacccttctttacaaaaaaatcttttaaaaaaaagtaaaaaaaaaaaaaaaa

SEQ ID NO: 200980 - DNA, 3740 bp, Homo sapiens
  Payload ID: 19669
  Gene Name: zinc finger and BTB domain containing 20
  Uniprot ID: Q9HC78
  ENST ID: ENST00000462705
  CDS Start-End: 823-2829
ggaattttatctctgctcacagtctacattacaacattagttcattctgggcactttagcttccttgaatctccagttgatctcacacccatgcctatgatattcttctcctggttaatcaagaattctctatttctgctccgtcatccatgccactacaaataaaaagaagtgttaagaattgcctttgggactctgaaggctgaagaattgatgaattgcaagtttgtgccccatagctgcacagcctatgtctaagcacagctcatcttcacaaactgaagtggatcttgatttctggaaatgtccaaataatgacaacaaccccatggaggtggatacatcagagtcagctggaggtggtcagaattatttgcaatgtttgggaaagcacctaccaaggcttcctattacctatttcacagaatgtttcatcattactaacaggatattcctcatgacattgctgtctgatctttgaccatcagtctgtgacctgccccttctctttacatgcagccgctctctgctccctgccccaatgaacatctgcactaggcccaagccttggagtaatttacctgaagagtgacaccattgattttgaaactactgaagaaacccaagacagctgaaaaccagaaggcatctgaggagaatgagattactcagccgggtggatccagcgccaagccgggccttccctgcctgaactttgaagctgttttgtctccagacccagccctcatccactcaacacattcactgacaaactctcacgctcacaccgggtcatctgattgtgacatcagttgcaaggggatgaccgagcgcattcacagcatcaaccttcacaacttcagcaattccgtgctcgagaccctcaacgagcagcgcaaccgtggccacttctgtgacgtaacggtgcgcatccacgggagcatgctgcgcgcacaccgctgcgtgctggcagccggcagccccttcttccaggacaaactgctgcttggctacagcgacatcgagatcccgtcggtggtgtcagtgcagtcagtgcaaaagctcattgacttcatgtacagcggcgtgctacgggtctcgcagtcggaagctctgcagatcctcacggccgccagcatcctgcagatcaaaacagtcatcgacgagtgcacgcgcatcgtgtcacagaacgtgggcgatgtgttcccggggatccaggactcgggccaggacacgccgcggggcactcccgagtcaggcacgtcaggccagagcagcgacacggagtcgggctacctgcagagccacccacagcacagcgtggacaggatctactcggcactctacgcgtgctccatgcagaatggcagcggcgagcgctctttttacagcggcgcagtggtcagccaccacgagactgcgctcggcctgccccgcgaccaccacatggaagaccccagctggatcacacgcatccatgagcgctcgcagcagatggagcgctacctgtccaccacccccgagaccacgcactgccgcaagcagccccggcctgtgcgcatccagaccctagtgggcaacatccacatcaagcaggagatggaggacgattacgactactacgggcagcaaagggtgcagatcctggaacgcaacgaatccgaggagtgcacggaagacacagaccaggccgagggcaccgagagtgagcccaaaggtgaaagcttcgactcgggcgtcagctcctccataggcaccgagcctgactcggtggagcagcagtttgggcctggggcggcgcgggacagccaggctgaacccacccaacccgagcaggctgcagaagcccccgctgagggtggtccgcagacaaaccagctagaaacaggtgcttcctctccggagagaagcaatgaagtggagatggacagcactgttatcactgtcagcaacagctccgacaagagcgtcctacaacagccttcggtcaacacgtccatcgggcagccattgccaagtacccagctctacttacgccagacagaaaccctcaccagcaacctgaggatgcctctgaccttgaccagcaacacgcaggtcattggcacagctggcaacacctacctgccagccctcttcactacccagcccgcgggcagtggccccaagcctttcctcttcagcctgccacagcccctggcaggccagcagacccagtttgtgacagtgtcccagcccggtctgtcgacctttactgcacagctgccagcgccacagcccctggcctcatccgcaggccacagcacagccagtgggcaaggcgaaaaaaagccttatgagtgcactctctgcaacaagactttcaccgccaaacagaactacgtcaagcacatgttcgtacacacaggtgagaagccccaccaatgcagcatctgttggcgctccttctccttaaaggattaccttatcaagcacatggtgacacacacaggagtgagggcataccagtgtagtatctgcaacaagcgcttcacccagaagagctccctcaacgtgcacatgcgcctccaccggggagagaagtcctacgagtgctacatctgcaaaaagaagttctctcacaagaccctcctggagcgacacgtggccctgcacagtgccagcaatgggaccccccctgcaggcacacccccaggtgcccgcgctggccccccaggcgtggtggcctgcacggaggggaccacttacgtctgctccgtctgcccagcaaagtttgaccaaatcgagcagttcaacgaccacatgaggatgcatgtgtctgacggataagtagtatctttctctctttcttatgaacaaaacaaaacaacaacaaaaaacaaacaaacaaaaaagctatggcactagaatttaagaaatgttttggtttcatttttactttctgtttttgtttttgtttcgtttcattttgtactacatgaagaactgttttttgcctgctggtacattacatttccggaggcttgggtgaataatagttttcccagtctccctcggatggtggccttaaggcctggtagtgcttcaagaggtccactggttggatctctagctactggcctctaaatacaacccttctttacaaaaaaatcttttaaaaaaaagtaaaaaaaaaaaaaaaatttccacttgtgaagagcactacaaaaaatatataacaaaatctaaaaggcctactgtctttaagtacaccgcttgcagtgtttcagtggacattttcacaattctggccgcttggacttcacagtaaccagttaaaactgtggaatatcacttctggttgaaaacccagaggaaaggccctgctgttttccacctaccacgttgtctgatttcataaaagggctgtgggggtgggaagggcagtgggttcggtggtgtgggaaagaaagacgaatggcaggcttcttccccagattctgcccgggtccacacaccctggcccaccttctccatatccccctcttgcagcagaagccaggaagacttggacaagcaacaagcaacagtggctatcgtatttattcagtgtcttcgctgagccacagcctcagcacaatcaagagggactttcatgaaaggcaggaatgcagataaaacaaagatatcagaaatttgcacctatgtttctaggtacaagagaaggattatttccaacaatctttgcaaaaaaaaaaaaa

SEQ ID NO: 200981 - DNA, 587 bp, Homo sapiens
  Payload ID: 19669
  Gene Name: zinc finger and BTB domain containing 20
  ENST ID: ENST00000470311
  CDS Start-End: 415-587
aaggtttttcaaagaggcagtggaggaggttctaataaatttggaaggaaacagttccctgtcttgggaaaaggagaactcctgactgattagcattcacaccagatgcagccgctctctgctccctgccccaatgaacatctgcactaggcccaagccttggagtaatttacctgaagagtgacaccattgattttgaaactactgaagaaacccaagacagctgaaaaccagaaggcatctgaggagaatgagattactcagccgggtggatccagcgccaagccgggccttccctgcctgaactttgaagctgttttgtctccagacccagccctcatccactcaacacattcactgacaaactctcacgctcacaccgggtcatctgattgtgacatcagttgcaaggggatgaccgagcgcattcacagcatcaaccttcacaacttcagcaattccgtgctcgagaccctcaacgagcagcgcaaccgtggccacttctgtgacgtaacggtgcgcatccacgggagcatgctgcgcgcacaccgctgcgtgctggcagccggcagccccttcttccagga

SEQ ID NO: 200982 - DNA, 7449 bp, Homo sapiens
  Payload ID: 19670
  Gene Name: zinc finger and BTB domain containing 21
  Uniprot ID: Q9ULJ3
  ENST ID: ENST00000310826
  CDS Start-End: 185-3385
gtcaaattcaagatggatggaatcacagcggcagcggcggctgcggcgcgcgcgagccgagtgtgagcggaaaggggcccggcgtctgcctcgagactgaagaccgaagacatgaagtagaaacaatccaggaaggctttgggaagctatttgtgtgcgaggatcaaagtgataaactcaagccatggagggattactgcattacatcaaccctgcacacgccatttctctcctaagtgccctgaatgaggagcgtctcaaaggacagctgtgtgatgtgctgctgattgttggagaccaaaagttccgagctcataaaaacgtcttggctgccagcagcgaatactttcagagtttattcacaaataaggaaaatgagtcacaaactgtatttcagcttgacttctgtgagccagatgcttttgataatgttttaaactacatttattcttcctctctatttgttgagaagagcagccttgctgctgtgcaagaacttggctatagtcttgggatttcctttctgactaacatcgtttctaaaacacctcaagccccctttccaacgtgtcctaatagaaaaaaagtgtttgtagaagatgatgaaaacagttctcaaaagagaagtgtcattgtttgtcaaagtagaaacgaagcgcaaggaaaaactgttagtcaaaatcaacccgatgtaagccatacttcccggccctctcctagcattgcagtcaaggccaataccaataagccacatgtcccaaaaccaatagaaccacttcataatttgtcattaactgaaaagagttggccgaaagatagttctgtggtatatgcaaagtctcttgagcattctggatctttggatgatcctaatagaatcagtttggtgaaaagaaatgcagtgttgccttcaaagcctctgcaagacagagaagctatggatgataaaccaggtgtgagtggtcagcttccaaaaggaaaagctctagagctggctttgaagagaccacggccacctgttttgtctgtttgtagctcatcagagactccctatctattaaaagaaactaacaaaggaaatggtcaaggtgaagatagaaacttgttgtactattcaaagttaggcttagtgatcccatccagtggatctggttctggaaaccaaagcattgacaggagtggcccacttgttaagagtctcctcagacggtcattgtcgatggatagccaggttcctgtctattcaccttccatagatttgaaatcttcccagggatcatcttcggtgtccagtgatgcaccagggaatgtgttgtgtgctttatctcagaagtcatctttaaaagattgtagtgaaaaaacagccctagatgacaggcctcaagtgctacaaccgcatcgcctcaggtcctttagtgcttctcagtcaacagacagggagggagcttcccctgtgactgaggtgcgcataaagactgagcccagcagcccgctgtcggacccctcggacatcatccgcgtcactgtgggagatgcggcaacaacagcagctgcctcatcttcgtcggtcacaagagacctgtctctgaaaacagaagatgaccaaaaagacatgagcagactcccagcaaaaaggaggttccaagcggaccgaagattgccgtttaagaagttaaaggtgaatgagcacgggtctcctgtgtcagaagataattttgaggaaggctcaagccctactctccttgatgcagattttccagattctgatttgaataaagacgaatttggtgagttggaggggacgagaccaaacaaaaaatttaaatgcaaacattgccttaagatctttagatcaacagcaggtcttcaccgtcatgttaacatgtaccataacccagaaaagccctacgcttgtgacatctgtcacaagaggtttcacaccaacttcaaagtgtggacacactgtcagacccaacacggcatagtgaagaacccatcaccagcctctagttcacatgctgttttggatgaaaaattccaaagaaagctgattgacatagtgagagagagagaaattaagaaggccctgatcattaagttaaggcgcggcaagcctggttttcagggacagagtagctcccaagcacagcaagtcatcaagaggaacttgagatctcgagccaaaggagcttacatttgtacttactgcggaaaagcgtaccgctttctctctcaatttaagcagcatataaaaatgcatccaggagaaaaaccccttggagtaaataaagttgctaaaccaaaagagcatgctcctcttgcaagtccagtagaaaacaaggaggtttaccagtgccgcctctgtaatgctaagctctcttctctcctagagcaaggaagccacgagcggctgtgccggaacgcggccgtctgcccttactgcagcctcaggtttttctcgcccgagctgaagcaagaacacgagagcaagtgtgagtataagaagctgacctgcctcgagtgcatgcgcaccttcaagtcctctttcagcatctggcggcaccaggttgaagtccataatcagaacaacatggcacccaccgaaaacttttctttgcccgttttggaccacaatggtgatgtgactggttcttcaaggccccaatcccagcctgagcccaacaaagtaaaccacatcgtcaccacaaaagacgacaacgtgttcagtgattcttcagaacaagttaacttcgactcggaagattcctcttgtcttcccgaagaccttagtctttccaagcaactgaaaatccaagtcaaagaggagcctgtggaggaggctgaagaagaggcacccgaggccagcacagcccccaaagaagcgggtcctagcaaagaagccagcctgtggccctgcgagaagtgtgggaagatgttcacggtgcataagcagctggagcgtcaccaggagcttctgtgctctgtgaaaccatttatttgtcacgtgtgcaacaaagcttttcgcactaattttcgactctggagtcacttccaatcgcacatgtctcaggcttcagaggaatcggcacataaggaatctgaggtgtgccctgttcccacaaactctccctctccaccacctctgccaccgccaccaccactgcccaagatccagcctctggagcctgacagccccacaggcctgtccgaaaacccaactccagccacagaaaaactgtttgtgccccaagaatcagacacccttttttaccatgccccacccctttcagcaatcacatttaaaagacagtttatgtgtaaactttgccacaggacattcaagactgcatttagtctttggagtcacgaacaaacacacaattgaaagaccaacactttttacctatgggaggcagtccccagatttcaacctgaattgtgaaatgtgtcataagaaacaaaatattttttaaacaagaataataaaggttggagattgttacgcttgaaattaagttggaggcaaattgataattacttagtaatgtccttaactttagaaatacagcttttaaaatattgtggttctggaccttacaagaacaagatggtttgatttcattaatgttgaaattggattagtcttgattgtgtgcatggttcctcattccatggtgtcagtataatcatttaattgaggtttttggttttttattgattagtggaatactgtcgaagtattccttcttttaattattttagacacttgagttctagttaaatcttaaccatgttcttaagtccaaaataggaagaagtggagtagtttgcagtattgatttatatcttagactactttagcaataaaagataaatctcaactttaataagttatcctgacacttgataaaaataaatatttggtattttgtggtcatgtaaaacttctttttgtatgaaaattgtgagaaatttaaatcagcaatagtaacacttagatttttataaactaacaaaaacttgctctcagtcaatataataaatgatagttaaactctaaggaagacctgggaaatgaaaacaatttatggaagtcccctacagtcagtttataagggcttcagtagtgatagacattgttataaaaacttgtaccatgttacatgtacactgcaccacagtctaaattcagaccagcatttgaaggactgcacatatttcatttcctctgatttatgctgtcacaaattgaaaatctgagtgtagttaggacaaaaaacaaagctaaccatatggcactaattttgattttaacattagtgtaacaaataaggtcgggacatatatttacatagatcccagacactcaagaattagcacagctgatgtaaaattctaaattaccatttacttccagatagagcagaggagaaacacctcactgcagtttcaacatgctttccaagaacaatatatacgacatatacattttcctgcctctctcttgtgacaatttctgttagaatttgttgggggtctgatggttaaaatcatgggcaaggccattctctacatcattgcttaatatttcaaaaataggtattagagcactatcagtggtccaaaattagttttagctacttattttgctccatgggttttgggcttttcaaagaatactatgtataatttgtaattgaaagcctttcagtaggatatccaaagttcaatgtgtttcaaaagggaaaacttttacttgtgggggtgggagttagatgtattaaaaaaacgaaactacaaaatccttttaagaaagtaataccaatttagactctagtttgtgttacgaggtattctttcaaattttttttaaaagccaactactgtcattaagaaataattttagatttgtgctctagcagaaaataactctgtacccatcaatcttattgccaacattccataccagtggtaggaaagatattctcattttttttattgaaccagacatttttataaaatactgattgactttgtacattatggatattatatatgaaattttgccttgtattctttcacttgaaaaaactccaaaattccacaatattttagtagttaacttcctattctttcttaaatttgatggagaagggaaaataaattgcagttattgattcttgccatctttgttttcttaaagaaatctatgcattttaaggataaaactaaagcatatgggtttacatgaaacatcaggatggattattgtacattgaattcattccgcgtataatgtggtatttcttactctgtccatcttggtagctgtcacttcaaaagaagacagtttccctgagtaatcatcacctacatggccattagagtatctatcggtgataattccatgatacagagtatcttggcattataaattcagtatcccaggacctaaacctttatgctacattttcgaagattttttaaaaataatattgttaatcagtaaaaaaaaaaaatatttttgatctaaacataggttctgcatatctgttagattttaaaaatgactggtgttttgtcttcacatttttgtctaagcaaggaatataagatttcaaataaaattttgaaccaaaaacatttataatgccgttctggtttttctattactttttatactgtactttaaaagcattaggctgaaagagtttattttggtggtcaaaaaaaatatgcttccactcatgtaactattttaaatgttaagaagtaaaataatgaaagatatgttaattactttattcagtaaagttttttaagaatgtttatctcagccagtaggcaaatacttggtgtaaaacaagttggtcttaaattgttgcaactcattagctagtgaagatattcatgtaaatatattttaggattgtaattaattttgaaaatgtagaaagctctttattccatgtaagtatgcaggatgcctgcttttttatgcagttgtggaaagaatgtaaaatgttttaatatattctttgttaatctgagaacttgatactgaatcgtttatgtgggagaaggaaggagtaacataaaacatgtttttatcactcaaagtaagcaatggaggtaacaaatattgtgcattttaacagtaatatttgaagatttgtagaatattcacctttaaaactagttagtatgcatttataattttaccagaatatacaactaacaattcaacagtgatgttctttgcatttgtggggagatgtgtgatgttcttggttttctggtttggaatggaacgtttatagccttgcctgtaaaaatgtgccccagcacttaatgagtgaccgtttgaatccatatgtagtcccattggtgctaatgagagtagctgctgtgaaacaggaataaaatgtgtctgttcacggaggtgcggtgtggatgcacctacaaggccaactctctgatcagggtgagggagagatggaagaattaacagatctaaagttggcctttgttgtctcaaattgggtttgtacacacatgcatgcatgtgtgtatacaactgtaatctggaacttcaggaagtaaaattatttgaagtttcttagtaaaaagtaattaggtataattccaaatagatttctgtataaattgtatctaactggattacaagtcagtttgacaatttacgatgtctcagtgatgtttctgcaataattgtgaaatgcattattgatttaaataatgctgacacgtactctttaaaagtgttctttaacactgactactaaactttaagttttaaaaaataggttttcatttatggctttttgtggttttagcactttaagaagtttaattttttgtaatttttaatatgctctttcagtgtatctcagcgggtactccagcttgtggcattcccatgtgactggggagaagacaaaattggtgtttagattctggaggagaaaaaatgagttacaatgtcaggtgtttttaaaaattccttttagagacagtcttttgggaaccaaagtattttactgtaaatctttaaaataacagaattcagtgctctttcatttgttaatgctgtccagatttttcacacagttatactcagttaatactagttttcagaacattagtccaaggctatttcaagttttccattgaatatatgcttatggttaaaagaaaaacgaatggttttataattctgtgtattttgtcatatgccttagcagagtaagtcatttttccattttacttaggaataagctttttcgaactgaaaattcatggtaaaataggatttctatctaatgttaatccattgcttatttgtattcaattccattgtctacagtttgcttaaatgttgactaagaatgattggagtcaataaatttgtactgtattttgcttcga

SEQ ID NO: 200983 - DNA, 555 bp, Homo sapiens
  Payload ID: 19670
  Gene Name: zinc finger and BTB domain containing 21
  ENST ID: ENST00000398497
  CDS Start-End: 408-555
tgggatgacgtcaaattcaagatggatggaatcacagcggcagcggcggctgcggcgcgcgcgagccgagtgtgagcggaaaggggcccggcgtctgcctcgagactgaagaccgaagacatgaagtagaaacaatccaggaaggctttgggaagctatttgtgtgcgaggatcaaagtgatctgaaaaatacactgaggagaaagtacacccggcaacaaagctcgccttatctgacagcagaagagcagagaaatcaaaagtttttgaggattcggtgtacacagccaccagccacaaacagtcttgctggattatctcgtgatcgtcagcagttgtgattttccccctttttacttacattcttgatggatggagcattttatatttttagataaactcaagccatggagggattactgcattacatcaaccctgcacacgccatttctctcctaagtgccctgaatgaggagcgtctcaaaggacagctgtgtgatgtgctgctgattgttggagaccaaaagttccgagctcataaaaacgtcttggctg

SEQ ID NO: 200984 - DNA, 5806 bp, Homo sapiens
  Payload ID: 19670
  Gene Name: zinc finger and BTB domain containing 21
  Uniprot ID: Q9ULJ3
  ENST ID: ENST00000398499
  CDS Start-End: 348-3548
tgggatgacgtcaaattcaagatggatggaatcacagcggcagcggcggctgcggcgcgcgcgagccgagtgtgagcggaaaggggcccggcgtctgcctcgagactgaagaccgaagacatgaagtagaaacaatccaggaaggctttgggaagctatttgtgtgcgaggatcaaagtgcagaagagcagagaaatcaaaagtttttgaggattcggtgtacacagccaccagccacaaacagtcttgctggattatctcgtgatcgtcagcagttgtgattttccccctttttacttacattcttgatggatggagcattttatatttttagataaactcaagccatggagggattactgcattacatcaaccctgcacacgccatttctctcctaagtgccctgaatgaggagcgtctcaaaggacagctgtgtgatgtgctgctgattgttggagaccaaaagttccgagctcataaaaacgtcttggctgccagcagcgaatactttcagagtttattcacaaataaggaaaatgagtcacaaactgtatttcagcttgacttctgtgagccagatgcttttgataatgttttaaactacatttattcttcctctctatttgttgagaagagcagccttgctgctgtgcaagaacttggctatagtcttgggatttcctttctgactaacatcgtttctaaaacacctcaagccccctttccaacgtgtcctaatagaaaaaaagtgtttgtagaagatgatgaaaacagttctcaaaagagaagtgtcattgtttgtcaaagtagaaacgaagcgcaaggaaaaactgttagtcaaaatcaacccgatgtaagccatacttcccggccctctcctagcattgcagtcaaggccaataccaataagccacatgtcccaaaaccaatagaaccacttcataatttgtcattaactgaaaagagttggccgaaagatagttctgtggtatatgcaaagtctcttgagcattctggatctttggatgatcctaatagaatcagtttggtgaaaagaaatgcagtgttgccttcaaagcctctgcaagacagagaagctatggatgataaaccaggtgtgagtggtcagcttccaaaaggaaaagctctagagctggctttgaagagaccacggccacctgttttgtctgtttgtagctcatcagagactccctatctattaaaagaaactaacaaaggaaatggtcaaggtgaagatagaaacttgttgtactattcaaagttaggcttagtgatcccatccagtggatctggttctggaaaccaaagcattgacaggagtggcccacttgttaagagtctcctcagacggtcattgtcgatggatagccaggttcctgtctattcaccttccatagatttgaaatcttcccagggatcatcttcggtgtccagtgatgcaccagggaatgtgttgtgtgctttatctcagaagtcatctttaaaagattgtagtgaaaaaacagccctagatgacaggcctcaagtgctacaaccgcatcgcctcaggtcctttagtgcttctcagtcaacagacagggagggagcttcccctgtgactgaggtgcgcataaagactgagcccagcagcccgctgtcggacccctcggacatcatccgcgtcactgtgggagatgcggcaacaacagcagctgcctcatcttcgtcggtcacaagagacctgtctctgaaaacagaagatgaccaaaaagacatgagcagactcccagcaaaaaggaggttccaagcggaccgaagattgccgtttaagaagttaaaggtgaatgagcacgggtctcctgtgtcagaagataattttgaggaaggctcaagccctactctccttgatgcagattttccagattctgatttgaataaagacgaatttggtgagttggaggggacgagaccaaacaaaaaatttaaatgcaaacattgccttaagatctttagatcaacagcaggtcttcaccgtcatgttaacatgtaccataacccagaaaagccctacgcttgtgacatctgtcacaagaggtttcacaccaacttcaaagtgtggacacactgtcagacccaacacggcatagtgaagaacccatcaccagcctctagttcacatgctgttttggatgaaaaattccaaagaaagctgattgacatagtgagagagagagaaattaagaaggccctgatcattaagttaaggcgcggcaagcctggttttcagggacagagtagctcccaagcacagcaagtcatcaagaggaacttgagatctcgagccaaaggagcttacatttgtacttactgcggaaaagcgtaccgctttctctctcaatttaagcagcatataaaaatgcatccaggagaaaaaccccttggagtaaataaagttgctaaaccaaaagagcatgctcctcttgcaagtccagtagaaaacaaggaggtttaccagtgccgcctctgtaatgctaagctctcttctctcctagagcaaggaagccacgagcggctgtgccggaacgcggccgtctgcccttactgcagcctcaggtttttctcgcccgagctgaagcaagaacacgagagcaagtgtgagtataagaagctgacctgcctcgagtgcatgcgcaccttcaagtcctctttcagcatctggcggcaccaggttgaagtccataatcagaacaacatggcacccaccgaaaacttttctttgcccgttttggaccacaatggtgatgtgactggttcttcaaggccccaatcccagcctgagcccaacaaagtaaaccacatcgtcaccacaaaagacgacaacgtgttcagtgattcttcagaacaagttaacttcgactcggaagattcctcttgtcttcccgaagaccttagtctttccaagcaactgaaaatccaagtcaaagaggagcctgtggaggaggctgaagaagaggcacccgaggccagcacagcccccaaagaagcgggtcctagcaaagaagccagcctgtggccctgcgagaagtgtgggaagatgttcacggtgcataagcagctggagcgtcaccaggagcttctgtgctctgtgaaaccatttatttgtcacgtgtgcaacaaagcttttcgcactaattttcgactctggagtcacttccaatcgcacatgtctcaggcttcagaggaatcggcacataaggaatctgaggtgtgccctgttcccacaaactctccctctccaccacctctgccaccgccaccaccactgcccaagatccagcctctggagcctgacagccccacaggcctgtccgaaaacccaactccagccacagaaaaactgtttgtgccccaagaatcagacacccttttttaccatgccccacccctttcagcaatcacatttaaaagacagtttatgtgtaaactttgccacaggacattcaagactgcatttagtctttggagtcacgaacaaacacacaattgaaagaccaacactttttacctatgggaggcagtccccagatttcaacctgaattgtgaaatgtgtcataagaaacaaaatattttttaaacaagaataataaaggttggagattgttacgcttgaaattaagttggaggcaaattgataattacttagtaatgtccttaactttagaaatacagcttttaaaatattgtggttctggaccttacaagaacaagatggtttgatttcattaatgttgaaattggattagtcttgattgtgtgcatggttcctcattccatggtgtcagtataatcatttaattgaggtttttggttttttattgattagtggaatactgtcgaagtattccttcttttaattattttagacacttgagttctagttaaatcttaaccatgttcttaagtccaaaataggaagaagtggagtagtttgcagtattgatttatatcttagactactttagcaataaaagataaatctcaactttaataagttatcctgacacttgataaaaataaatatttggtattttgtggtcatgtaaaacttctttttgtatgaaaattgtgagaaatttaaatcagcaatagtaacacttagatttttataaactaacaaaaacttgctctcagtcaatataataaatgatagttaaactctaaggaagacctgggaaatgaaaacaatttatggaagtcccctacagtcagtttataagggcttcagtagtgatagacattgttataaaaacttgtaccatgttacatgtacactgcaccacagtctaaattcagaccagcatttgaaggactgcacatatttcatttcctctgatttatgctgtcacaaattgaaaatctgagtgtagttaggacaaaaaacaaagctaaccatatggcactaattttgattttaacattagtgtaacaaataaggtcgggacatatatttacatagatcccagacactcaagaattagcacagctgatgtaaaattctaaattaccatttacttccagatagagcagaggagaaacacctcactgcagtttcaacatgctttccaagaacaatatatacgacatatacattttcctgcctctctcttgtgacaatttctgttagaatttgttgggggtctgatggttaaaatcatgggcaaggccattctctacatcattgcttaatatttcaaaaataggtattagagcactatcagtggtccaaaattagttttagctacttattttgctccatgggttttgggcttttcaaagaatactatgtataatttgtaattgaaagcctttcagtaggatatccaaagttcaatgtgtttcaaaagggaaaacttttacttgtgggggtgggagttagatgtattaaaaaaacgaaactacaaaatccttttaagaaagtaataccaatttagactctagtttgtgttacgaggtattctttcaaattttttttaaaagccaactactgtcattaagaaataattttagatttgtgctctagcagaaaataactctgtacccatcaatcttattgccaacattccataccagtggtaggaaagatattctcattttttttattgaaccagacatttttataaaatactgattgactttgtacattatggatattatatatgaaattttgccttgtattctttcacttgaaaaaactccaaaattccacaatattttagtagttaacttcctattctttcttaaatttgatggagaagggaaaataaattgcagttattgattcttgccatctttgttttcttaaagaaatctatgcattttaaggataaaactaaagcatatgggtttacatgaaacatcaggatggattattgtacattgaattcattccgcgtataatgtggtatttcttactctgtccatcttggtagctgtcacttcaaaagaagacagtttccctgagtaatcatcacctacatggccattagagtatctatcggtgataattccatgatacagagtatcttggcattataaattcagtatcccaggacctaaacctttatgctacattttcgaagattttttaaaaataatattgttaatcagtaaaaaaaaaaaatatttttgatctaaacataggttctgcatatctgttagattttaaaaatgactggtgttttgtcttcacatttttgtctaagcaaggaatataagatttcaaataaaattttgaaccaaaaaca

SEQ ID NO: 200985 - DNA, 6846 bp, Homo sapiens
  Payload ID: 19670
  Gene Name: zinc finger and BTB domain containing 21
  Uniprot ID: Q9ULJ3
  ENST ID: ENST00000398505
  CDS Start-End: 185-2782
gtcaaattcaagatggatggaatcacagcggcagcggcggctgcggcgcgcgcgagccgagtgtgagcggaaaggggcccggcgtctgcctcgagactgaagaccgaagacatgaagtagaaacaatccaggaaggctttgggaagctatttgtgtgcgaggatcaaagtgataaactcaagccatggagggattactgcattacatcaaccctgcacacgccatttctctcctaagtgccctgaatgaggagcgtctcaaaggacagctgtgtgatgtgctgctgattgttggagaccaaaagttccgagctcataaaaacgtcttggctgccagcagcgaatactttcagagtttattcacaaataaggaaaatgagtcacaaactgtatttcagcttgacttctgtgagccagatgcttttgataatgttttaaactacatttattcttcctctctatttgttgagaagagcagccttgctgctgtgcaagaacttggctatagtcttgggatttcctttctgactaacatcgtttctaaaacacctcaagccccctttccaacgtgtcctaatagaaaaaaagtgtttgtagaagatgatgaaaacagttctcaaaagagaagtgtcattgtttgtcaaagtagaaacgaagcgcaaggaaaaactgttagtcaaaatcaacccgatgtaagccatacttcccggccctctcctagcattgcagtcaaggccaataccaataagccacatgtcccaaaaccaatagaaccacttcataatttgtcattaactgaaaagagttggccgaaagatagttctgtggtatatgcaaagtctcttgagcattctggatctttggatgatcctaatagaatcagtttggtgaaaagaaatgcagtgttgccttcaaagcctctgcaagacagagaagctatggatgataaaccaggtgtgagtggtcagcttccaaaaggaaaagctctagagctggctttgaagagaccacggccacctgttttgtctgtttgtagctcatcagagactccctatctattaaaagaaactaacaaaggaaatggtcaaggtgaagatagaaacttgttgtactattcaaagttaggcttagtgatcccatccagtggatctggttctggaaaccaaagcattgacaggagtggcccacttgttaagagtctcctcagacggtcattgtcgatggatagccaggttcctgtctattcaccttccatagatttgaaatcttcccagggatcatcttcggtgtccagtgatgcaccagggaatgtgttgtgtgctttatctcagaagtcatctttaaaagattgtagtgaaaaaacagccctagatgacaggcctcaagtgctacaaccgcatcgcctcaggtcctttagtgcttctcagtcaacagacagggagggagcttcccctgtgactgaggtgcgcataaagactgagcccagcagcccgctgtcggacccctcggacatcatccgcgtcactgtgggagatgcggcaacaacagcagctgcctcatcttcgtcggtcacaagagacctgtctctgaaaacagaagatgaccaaaaagacatgagcagactcccagcaaaaaggaggttccaagcggaccgaagattgccgtttaagaagttaaaggtgaatgagcacgggtctcctgtgtcagaagataattttgaggaaggctcaagccctactctccttgatgcagattttccagattctgatttgaataaagacgaatttgagcaaggaagccacgagcggctgtgccggaacgcggccgtctgcccttactgcagcctcaggtttttctcgcccgagctgaagcaagaacacgagagcaagtgtgagtataagaagctgacctgcctcgagtgcatgcgcaccttcaagtcctctttcagcatctggcggcaccaggttgaagtccataatcagaacaacatggcacccaccgaaaacttttctttgcccgttttggaccacaatggtgatgtgactggttcttcaaggccccaatcccagcctgagcccaacaaagtaaaccacatcgtcaccacaaaagacgacaacgtgttcagtgattcttcagaacaagttaacttcgactcggaagattcctcttgtcttcccgaagaccttagtctttccaagcaactgaaaatccaagtcaaagaggagcctgtggaggaggctgaagaagaggcacccgaggccagcacagcccccaaagaagcgggtcctagcaaagaagccagcctgtggccctgcgagaagtgtgggaagatgttcacggtgcataagcagctggagcgtcaccaggagcttctgtgctctgtgaaaccatttatttgtcacgtgtgcaacaaagcttttcgcactaattttcgactctggagtcacttccaatcgcacatgtctcaggcttcagaggaatcggcacataaggaatctgaggtgtgccctgttcccacaaactctccctctccaccacctctgccaccgccaccaccactgcccaagatccagcctctggagcctgacagccccacaggcctgtccgaaaacccaactccagccacagaaaaactgtttgtgccccaagaatcagacacccttttttaccatgccccacccctttcagcaatcacatttaaaagacagtttatgtgtaaactttgccacaggacattcaagactgcatttagtctttggagtcacgaacaaacacacaattgaaagaccaacactttttacctatgggaggcagtccccagatttcaacctgaattgtgaaatgtgtcataagaaacaaaatattttttaaacaagaataataaaggttggagattgttacgcttgaaattaagttggaggcaaattgataattacttagtaatgtccttaactttagaaatacagcttttaaaatattgtggttctggaccttacaagaacaagatggtttgatttcattaatgttgaaattggattagtcttgattgtgtgcatggttcctcattccatggtgtcagtataatcatttaattgaggtttttggttttttattgattagtggaatactgtcgaagtattccttcttttaattattttagacacttgagttctagttaaatcttaaccatgttcttaagtccaaaataggaagaagtggagtagtttgcagtattgatttatatcttagactactttagcaataaaagataaatctcaactttaataagttatcctgacacttgataaaaataaatatttggtattttgtggtcatgtaaaacttctttttgtatgaaaattgtgagaaatttaaatcagcaatagtaacacttagatttttataaactaacaaaaacttgctctcagtcaatataataaatgatagttaaactctaaggaagacctgggaaatgaaaacaatttatggaagtcccctacagtcagtttataagggcttcagtagtgatagacattgttataaaaacttgtaccatgttacatgtacactgcaccacagtctaaattcagaccagcatttgaaggactgcacatatttcatttcctctgatttatgctgtcacaaattgaaaatctgagtgtagttaggacaaaaaacaaagctaaccatatggcactaattttgattttaacattagtgtaacaaataaggtcgggacatatatttacatagatcccagacactcaagaattagcacagctgatgtaaaattctaaattaccatttacttccagatagagcagaggagaaacacctcactgcagtttcaacatgctttccaagaacaatatatacgacatatacattttcctgcctctctcttgtgacaatttctgttagaatttgttgggggtctgatggttaaaatcatgggcaaggccattctctacatcattgcttaatatttcaaaaataggtattagagcactatcagtggtccaaaattagttttagctacttattttgctccatgggttttgggcttttcaaagaatactatgtataatttgtaattgaaagcctttcagtaggatatccaaagttcaatgtgtttcaaaagggaaaacttttacttgtgggggtgggagttagatgtattaaaaaaacgaaactacaaaatccttttaagaaagtaataccaatttagactctagtttgtgttacgaggtattctttcaaattttttttaaaagccaactactgtcattaagaaataattttagatttgtgctctagcagaaaataactctgtacccatcaatcttattgccaacattccataccagtggtaggaaagatattctcattttttttattgaaccagacatttttataaaatactgattgactttgtacattatggatattatatatgaaattttgccttgtattctttcacttgaaaaaactccaaaattccacaatattttagtagttaacttcctattctttcttaaatttgatggagaagggaaaataaattgcagttattgattcttgccatctttgttttcttaaagaaatctatgcattttaaggataaaactaaagcatatgggtttacatgaaacatcaggatggattattgtacattgaattcattccgcgtataatgtggtatttcttactctgtccatcttggtagctgtcacttcaaaagaagacagtttccctgagtaatcatcacctacatggccattagagtatctatcggtgataattccatgatacagagtatcttggcattataaattcagtatcccaggacctaaacctttatgctacattttcgaagattttttaaaaataatattgttaatcagtaaaaaaaaaaaatatttttgatctaaacataggttctgcatatctgttagattttaaaaatgactggtgttttgtcttcacatttttgtctaagcaaggaatataagatttcaaataaaattttgaaccaaaaacatttataatgccgttctggtttttctattactttttatactgtactttaaaagcattaggctgaaagagtttattttggtggtcaaaaaaaatatgcttccactcatgtaactattttaaatgttaagaagtaaaataatgaaagatatgttaattactttattcagtaaagttttttaagaatgtttatctcagccagtaggcaaatacttggtgtaaaacaagttggtcttaaattgttgcaactcattagctagtgaagatattcatgtaaatatattttaggattgtaattaattttgaaaatgtagaaagctctttattccatgtaagtatgcaggatgcctgcttttttatgcagttgtggaaagaatgtaaaatgttttaatatattctttgttaatctgagaacttgatactgaatcgtttatgtgggagaaggaaggagtaacataaaacatgtttttatcactcaaagtaagcaatggaggtaacaaatattgtgcattttaacagtaatatttgaagatttgtagaatattcacctttaaaactagttagtatgcatttataattttaccagaatatacaactaacaattcaacagtgatgttctttgcatttgtggggagatgtgtgatgttcttggttttctggtttggaatggaacgtttatagccttgcctgtaaaaatgtgccccagcacttaatgagtgaccgtttgaatccatatgtagtcccattggtgctaatgagagtagctgctgtgaaacaggaataaaatgtgtctgttcacggaggtgcggtgtggatgcacctacaaggccaactctctgatcagggtgagggagagatggaagaattaacagatctaaagttggcctttgttgtctcaaattgggtttgtacacacatgcatgcatgtgtgtatacaactgtaatctggaacttcaggaagtaaaattatttgaagtttcttagtaaaaagtaattaggtataattccaaatagatttctgtataaattgtatctaactggattacaagtcagtttgacaatttacgatgtctcagtgatgtttctgcaataattgtgaaatgcattattgatttaaataatgctgacacgtactctttaaaagtgttctttaacactgactactaaactttaagttttaaaaaataggttttcatttatggctttttgtggttttagcactttaagaagtttaattttttgtaatttttaatatgctctttcagtgtatctcagcgggtactccagcttgtggcattcccatgtgactggggagaagacaaaattggtgtttagattctggaggagaaaaaatgagttacaatgtcaggtgtttttaaaaattccttttagagacagtcttttgggaaccaaagtattttactgtaaatctttaaaataacagaattcagtgctctttcatttgttaatgctgtccagatttttcacacagttatactcagttaatactagttttcagaacattagtccaaggctatttcaagttttccattgaatatatgcttatggttaaaagaaaaacgaatggttttataattctgtgtattttgtcatatgccttagcagagtaagtcatttttccattttacttaggaataagctttttcgaactgaaaattcatggtaaaataggatttctatctaatgttaatccattgcttatttgtattcaattccattgtctacagtttgcttaaatgttgactaagaatgattggagtcaataaatttgtactgtattttgcttcga

SEQ ID NO: 200986 - DNA, 5608 bp, Homo sapiens
  Payload ID: 19670
  Gene Name: zinc finger and BTB domain containing 21
  Uniprot ID: Q9ULJ3
  ENST ID: ENST00000398511
  CDS Start-End: 150-3350
gcgatgacctcatccctggtgtgggatgacgtcaaattcaagatggatggaatcacagcggcagcggcggctgcggcgcgcgcgagccgagtgtgagcggaaaggggcccggcgtctgcctcgagactgaagaccgataaactcaagccatggagggattactgcattacatcaaccctgcacacgccatttctctcctaagtgccctgaatgaggagcgtctcaaaggacagctgtgtgatgtgctgctgattgttggagaccaaaagttccgagctcataaaaacgtcttggctgccagcagcgaatactttcagagtttattcacaaataaggaaaatgagtcacaaactgtatttcagcttgacttctgtgagccagatgcttttgataatgttttaaactacatttattcttcctctctatttgttgagaagagcagccttgctgctgtgcaagaacttggctatagtcttgggatttcctttctgactaacatcgtttctaaaacacctcaagccccctttccaacgtgtcctaatagaaaaaaagtgtttgtagaagatgatgaaaacagttctcaaaagagaagtgtcattgtttgtcaaagtagaaacgaagcgcaaggaaaaactgttagtcaaaatcaacccgatgtaagccatacttcccggccctctcctagcattgcagtcaaggccaataccaataagccacatgtcccaaaaccaatagaaccacttcataatttgtcattaactgaaaagagttggccgaaagatagttctgtggtatatgcaaagtctcttgagcattctggatctttggatgatcctaatagaatcagtttggtgaaaagaaatgcagtgttgccttcaaagcctctgcaagacagagaagctatggatgataaaccaggtgtgagtggtcagcttccaaaaggaaaagctctagagctggctttgaagagaccacggccacctgttttgtctgtttgtagctcatcagagactccctatctattaaaagaaactaacaaaggaaatggtcaaggtgaagatagaaacttgttgtactattcaaagttaggcttagtgatcccatccagtggatctggttctggaaaccaaagcattgacaggagtggcccacttgttaagagtctcctcagacggtcattgtcgatggatagccaggttcctgtctattcaccttccatagatttgaaatcttcccagggatcatcttcggtgtccagtgatgcaccagggaatgtgttgtgtgctttatctcagaagtcatctttaaaagattgtagtgaaaaaacagccctagatgacaggcctcaagtgctacaaccgcatcgcctcaggtcctttagtgcttctcagtcaacagacagggagggagcttcccctgtgactgaggtgcgcataaagactgagcccagcagcccgctgtcggacccctcggacatcatccgcgtcactgtgggagatgcggcaacaacagcagctgcctcatcttcgtcggtcacaagagacctgtctctgaaaacagaagatgaccaaaaagacatgagcagactcccagcaaaaaggaggttccaagcggaccgaagattgccgtttaagaagttaaaggtgaatgagcacgggtctcctgtgtcagaagataattttgaggaaggctcaagccctactctccttgatgcagattttccagattctgatttgaataaagacgaatttggtgagttggaggggacgagaccaaacaaaaaatttaaatgcaaacattgccttaagatctttagatcaacagcaggtcttcaccgtcatgttaacatgtaccataacccagaaaagccctacgcttgtgacatctgtcacaagaggtttcacaccaacttcaaagtgtggacacactgtcagacccaacacggcatagtgaagaacccatcaccagcctctagttcacatgctgttttggatgaaaaattccaaagaaagctgattgacatagtgagagagagagaaattaagaaggccctgatcattaagttaaggcgcggcaagcctggttttcagggacagagtagctcccaagcacagcaagtcatcaagaggaacttgagatctcgagccaaaggagcttacatttgtacttactgcggaaaagcgtaccgctttctctctcaatttaagcagcatataaaaatgcatccaggagaaaaaccccttggagtaaataaagttgctaaaccaaaagagcatgctcctcttgcaagtccagtagaaaacaaggaggtttaccagtgccgcctctgtaatgctaagctctcttctctcctagagcaaggaagccacgagcggctgtgccggaacgcggccgtctgcccttactgcagcctcaggtttttctcgcccgagctgaagcaagaacacgagagcaagtgtgagtataagaagctgacctgcctcgagtgcatgcgcaccttcaagtcctctttcagcatctggcggcaccaggttgaagtccataatcagaacaacatggcacccaccgaaaacttttctttgcccgttttggaccacaatggtgatgtgactggttcttcaaggccccaatcccagcctgagcccaacaaagtaaaccacatcgtcaccacaaaagacgacaacgtgttcagtgattcttcagaacaagttaacttcgactcggaagattcctcttgtcttcccgaagaccttagtctttccaagcaactgaaaatccaagtcaaagaggagcctgtggaggaggctgaagaagaggcacccgaggccagcacagcccccaaagaagcgggtcctagcaaagaagccagcctgtggccctgcgagaagtgtgggaagatgttcacggtgcataagcagctggagcgtcaccaggagcttctgtgctctgtgaaaccatttatttgtcacgtgtgcaacaaagcttttcgcactaattttcgactctggagtcacttccaatcgcacatgtctcaggcttcagaggaatcggcacataaggaatctgaggtgtgccctgttcccacaaactctccctctccaccacctctgccaccgccaccaccactgcccaagatccagcctctggagcctgacagccccacaggcctgtccgaaaacccaactccagccacagaaaaactgtttgtgccccaagaatcagacacccttttttaccatgccccacccctttcagcaatcacatttaaaagacagtttatgtgtaaactttgccacaggacattcaagactgcatttagtctttggagtcacgaacaaacacacaattgaaagaccaacactttttacctatgggaggcagtccccagatttcaacctgaattgtgaaatgtgtcataagaaacaaaatattttttaaacaagaataataaaggttggagattgttacgcttgaaattaagttggaggcaaattgataattacttagtaatgtccttaactttagaaatacagcttttaaaatattgtggttctggaccttacaagaacaagatggtttgatttcattaatgttgaaattggattagtcttgattgtgtgcatggttcctcattccatggtgtcagtataatcatttaattgaggtttttggttttttattgattagtggaatactgtcgaagtattccttcttttaattattttagacacttgagttctagttaaatcttaaccatgttcttaagtccaaaataggaagaagtggagtagtttgcagtattgatttatatcttagactactttagcaataaaagataaatctcaactttaataagttatcctgacacttgataaaaataaatatttggtattttgtggtcatgtaaaacttctttttgtatgaaaattgtgagaaatttaaatcagcaatagtaacacttagatttttataaactaacaaaaacttgctctcagtcaatataataaatgatagttaaactctaaggaagacctgggaaatgaaaacaatttatggaagtcccctacagtcagtttataagggcttcagtagtgatagacattgttataaaaacttgtaccatgttacatgtacactgcaccacagtctaaattcagaccagcatttgaaggactgcacatatttcatttcctctgatttatgctgtcacaaattgaaaatctgagtgtagttaggacaaaaaacaaagctaaccatatggcactaattttgattttaacattagtgtaacaaataaggtcgggacatatatttacatagatcccagacactcaagaattagcacagctgatgtaaaattctaaattaccatttacttccagatagagcagaggagaaacacctcactgcagtttcaacatgctttccaagaacaatatatacgacatatacattttcctgcctctctcttgtgacaatttctgttagaatttgttgggggtctgatggttaaaatcatgggcaaggccattctctacatcattgcttaatatttcaaaaataggtattagagcactatcagtggtccaaaattagttttagctacttattttgctccatgggttttgggcttttcaaagaatactatgtataatttgtaattgaaagcctttcagtaggatatccaaagttcaatgtgtttcaaaagggaaaacttttacttgtgggggtgggagttagatgtattaaaaaaacgaaactacaaaatccttttaagaaagtaataccaatttagactctagtttgtgttacgaggtattctttcaaattttttttaaaagccaactactgtcattaagaaataattttagatttgtgctctagcagaaaataactctgtacccatcaatcttattgccaacattccataccagtggtaggaaagatattctcattttttttattgaaccagacatttttataaaatactgattgactttgtacattatggatattatatatgaaattttgccttgtattctttcacttgaaaaaactccaaaattccacaatattttagtagttaacttcctattctttcttaaatttgatggagaagggaaaataaattgcagttattgattcttgccatctttgttttcttaaagaaatctatgcattttaaggataaaactaaagcatatgggtttacatgaaacatcaggatggattattgtacattgaattcattccgcgtataatgtggtatttcttactctgtccatcttggtagctgtcacttcaaaagaagacagtttccctgagtaatcatcacctacatggccattagagtatctatcggtgataattccatgatacagagtatcttggcattataaattcagtatcccaggacctaaacctttatgctacattttcgaagattttttaaaaataatattgttaatcagtaaaaaaaaaaaatatttttgatctaaacataggttctgcatatctgttagattttaaaaatgactggtgttttgtcttcacatttttgtctaagcaaggaatataagatttcaaataaaattttgaaccaaaaaca

SEQ ID NO: 200987 - DNA, 607 bp, Homo sapiens
  Payload ID: 19670
  Gene Name: zinc finger and BTB domain containing 21
  ENST ID: ENST00000425521
  CDS Start-End: 252-607
aaacagatgtgggagcagggacgagagttgtggagtttaagtaccatgctggacctgaggatatactgtgatggaaccgttcagtaggtacctgagaggctggagcctcaagagtctaaacagagatacagatttgggaatcatcgtccagtagtgattaaagtcacaaggtctaatagaaaaagcaaagaatactgccacgttttggggctctgtaacggatgctggagaaataaagataaactcaagccatggagggattactgcattacatcaaccctgcacacgccatttctctcctaagtgccctgaatgaggagcgtctcaaaggacagctgtgtgatgtgctgctgattgttggagaccaaaagttccgagctcataaaaacgtcttggctgccagcagcgaatactttcagagtttattcacaaataaggaaaatgagtcacaaactgtatttcagcttgacttctgtgagccagatgcttttgataatgttttaaactacatttattcttcctctctatttgttgagaagagcagccttgctgctgtgcaagaacttggctatagtcttgggatttcctttctgactaacatcgtttc

SEQ ID NO: 200988 - DNA, 463 bp, Homo sapiens
  Payload ID: 19670
  Gene Name: zinc finger and BTB domain containing 21
  ENST ID: ENST00000449949
  CDS Start-End: 316-463
gtcaaattcaagatggatggaatcacagcggcagcggcggctgcggcgcgcgcgagccgagtgtgagcggaaaggggcccggcgtctgcctcgagactgaagaccgagcccccgcagaccttgtctgggacttcccggcggtcccgcagagcatagcaccctccgccggccaggagccctgctgctcggccggcgaccgtctccccgcttggaggagcccccttccccccgtccgagaagacatgaagtagaaacaatccaggaaggctttgggaagctatttgtgtgcgaggatcaaagtgataaactcaagccatggagggattactgcattacatcaaccctgcacacgccatttctctcctaagtgccctgaatgaggagcgtctcaaaggacagctgtgtgatgtgctgctgattgttggagaccaaaagttccgagctcataaaaacgtcttggctg

SEQ ID NO: 200989 - DNA, 2651 bp, Homo sapiens
  Payload ID: 19671
  Gene Name: zinc finger and BTB domain containing 22
  Uniprot ID: O15209
  ENST ID: ENST00000383196
  CDS Start-End: 153-2057
cgcaagatggcggcgggaggggcccaggttgctgctctggccgccgagtgaggggcggggggggcccgggggcgcgcggcccgagacccccccggccgccctcctcctttctttgttcctgtggctgggggggtatcccctccctccacaacatggagccatctcctctgtctcccagtggggcagcacttcccctgccgctgtcgctggctccgcccccactacccctgccagcagctgcagtggtacatgtgtccttccctgaggtgaccagtgccctcttggagtccctcaatcagcagcgtctgcagggccagctctgcgatgtatctatcagagtgcagggccgggagttccgggctcatcgggctgtcctggctgcctcctccccttacttccatgatcaggtcctactcaaaggcatgacctccatctcgctgcccagtgtcatggacccaggcgcctttgagactgtcctagcctccgcttacactggccgcctcagcatggctgctgctgacattgtcaacttccttacagtggggtctgtgctccaaatgtggcacattgtggacaagtgcactgaactactccgagaaggccgggcctcagctaccaccaccatcactactgctgcagccacctctgtcactgtccctggtgctggggtgccatccgggagtgggggcactgtggcccctgctaccatgggctctgcgcgctcccatgcctccagccgggccagtgagaatcaatctcccagcagcagcaactacttcagccccagggagtccactgatttctcatcttcctcccaagaggcatttgcagcttctgcagtgggcagtggggagcgtcgaggaggtggccctgtattcccagcccctgtcgttggcagtggaggggccacatctggaaagctgctgctggaggcagatgagctgtgcgatgatggtggggatgggaggggggcagtggttcctggggctgggctccggagacccacctacacaccccctagcatcatgccacagaaacactgggtatacgtgaagcgaggtggtaattgcccagcgccagcacccctggttccccaagacccagatctggaggaggaagaggaggaggaagatctggtgttgacctgtgaggatgatgaagatgaagaactagggggtagctccagggttccagtggggggagggcctgaggctaccctcagcataagtgatgtccgtaccctgagtgagcccccagacaagggggaggagcaggtcaacttctgtgagtcctccaatgactttggcccatatgagggtgggggtcctgtggcaggtcttgatgactcaggggggccaactccctcttcctatgccccctcccaccctcctcgaccgctccttcccttggacatgcagggcaaccagatcctggtcttcccgtcgtcgtcttcatcctcatcctcacaggctcctggccaaccaccagggaaccaagcagaacacggggcagtgaccgtggggggcacgtcggtggggagcctgggtgtgccgggtagcgttggtggggtccctggagggactggcagtggggacgggaataagatctttctgtgccattgtgggaaggccttctcccacaagagcatgcgggaccggcacgtgaacatgcacctcaatctgcggccgtttgactgccccgtgtgcaacaaaaagttcaagatgaagcaccatctgactgagcacatgaagacgcacacaggtctcaagccctacgagtgcggagtctgcgccaagaagttcatgtggcgagacagcttcatgcgccaccgaggacactgtgagcgccggcaccgcctgggcggggtcggggccgtacctgggcctgggactcccacggggccatccttgccgtccaagagagagtctcccggagtgggcgggggcagcggcgacgaagcgagtgcggccacgcccccgtccagcagacgtgtctggtccccacccagagtccacaaggtggagatgggcttcggtggaggtggaggagcaaactgaaggggcaggctactggggtggggtagctttcgggaaagggaataaggagcacgatgcaagggcgctgtggcccccgggtgatctcccaccacacttactgtcttcctttatctctgtggacttgtatatattctggaaggggaaccacagtttcaccatcacccgcccattctactactcaacccctcccccccaaggtatttccagaactaaacccttcctttccctctgatgggtacactgaagcccctgctccacagagtagattgcacatggagggagggagagggggcgtgttgaacatcctgcagtcacagggtcaggggtcaggtggttgtagtctgtgcctgaagtctgtgtttgtgttgtcgtggagacaaggcctttgagccccacccttgtcctagaacctaccccctctcaaggatgcgctctttatttctaccctgtttctccccgccacccccgacttcccgtggaaattcccaactcggttctcatggaggagtgggtggagacaaggagggagtaagtcgtaggagtacaaggtttttattttttttaacagtgattaaaatatttattggtcattta

SEQ ID NO: 200990 - DNA, 2651 bp, Homo sapiens
  Payload ID: 19671
  Gene Name: zinc finger and BTB domain containing 22
  Uniprot ID: O15209
  ENST ID: ENST00000418540
  CDS Start-End: 153-2057
cgcaagatggcggcgggaggggcccaggttgctgctctggccgccgagtgaggggcggggggggcccgggggcgcgcggcccgagacccccccggccgccctcctcctttctttgttcctgtggctgggggggtatcccctccctccacaacatggagccatctcctctgtctcccagtggggcagcacttcccctgccgctgtcgctggctccgcccccactacccctgccagcagctgcagtggtacatgtgtccttccctgaggtgaccagtgccctcttggagtccctcaatcagcagcgtctgcagggccagctctgcgatgtatctatcagagtgcagggccgggagttccgggctcatcgggctgtcctggctgcctcctccccttacttccatgatcaggtcctactcaaaggcatgacctccatctcgctgcccagtgtcatggacccaggcgcctttgagactgtcctagcctccgcttacactggccgcctcagcatggctgctgctgacattgtcaacttccttacagtggggtctgtgctccaaatgtggcacattgtggacaagtgcactgaactactccgagaaggccgggcctcagctaccaccaccatcactactgctgcagccacctctgtcactgtccctggtgctggggtgccatccgggagtgggggcactgtggcccctgctaccatgggctctgcgcgctcccatgcctccagccgggccagtgagaatcaatctcccagcagcagcaactacttcagccccagggagtccactgatttctcatcttcctcccaagaggcatttgcagcttctgcagtgggcagtggggagcgtcgaggaggtggccctgtattcccagcccctgtcgttggcagtggaggggccacatctggaaagctgctgctggaggcagatgagctgtgcgatgatggtggggatgggaggggggcagtggttcctggggctgggctccggagacccacctacacaccccctagcatcatgccacagaaacactgggtatacgtgaagcgaggtggtaattgcccagcgccagcacccctggttccccaagacccagatctggaggaggaagaggaggaggaagatctggtgttgacctgtgaggatgatgaagatgaagaactagggggtagctccagggttccagtggggggagggcctgaggctaccctcagcataagtgatgtccgtaccctgagtgagcccccagacaagggggaggagcaggtcaacttctgtgagtcctccaatgactttggcccatatgagggtgggggtcctgtggcaggtcttgatgactcaggggggccaactccctcttcctatgccccctcccaccctcctcgaccgctccttcccttggacatgcagggcaaccagatcctggtcttcccgtcgtcgtcttcatcctcatcctcacaggctcctggccaaccaccagggaaccaagcagaacacggggcagtgaccgtggggggcacgtcggtggggagcctgggtgtgccgggtagcgttggtggggtccctggagggactggcagtggggacgggaataagatctttctgtgccattgtgggaaggccttctcccacaagagcatgcgggaccggcacgtgaacatgcacctcaatctgcggccgtttgactgccccgtgtgcaacaaaaagttcaagatgaagcaccatctgactgagcacatgaagacgcacacaggtctcaagccctacgagtgcggagtctgcgccaagaagttcatgtggcgagacagcttcatgcgccaccgaggacactgtgagcgccggcaccgcctgggcggggtcggggccgtacctgggcctgggactcccacggggccatccttgccgtccaagagagagtctcccggagtgggcgggggcagcggcgacgaagcgagtgcggccacgcccccgtccagcagacgtgtctggtccccacccagagtccacaaggtggagatgggcttcggtggaggtggaggagcaaactgaaggggcaggctactggggtggggtagctttcgggaaagggaataaggagcacgatgcaagggcgctgtggcccccgggtgatctcccaccacacttactgtcttcctttatctctgtggacttgtatatattctggaaggggaaccacagtttcaccatcacccgcccattctactactcaacccctcccccccaaggtatttccagaactaaacccttcctttccctctgatgggtacactgaagcccctgctccacagagtagattgcacatggagggagggagagggggcgtgttgaacatcctgcagtcacagggtcaggggtcaggtggttgtagtctgtgcctgaagtctgtgtttgtgttgtcgtggagacaaggcctttgagccccacccttgtcctagaacctaccccctctcaaggatgcgctctttatttctaccctgtctctccccgccacccccgacttcccgtggaaattcccaactcggttctcatggaggagtgggtggagacaaggagggagtaagtcgtaggagtacaaggtttttattttttttaacagtgattaaaatatttattggtcattta

SEQ ID NO: 200991 - DNA, 581 bp, Homo sapiens
  Payload ID: 19671
  Gene Name: zinc finger and BTB domain containing 22
  ENST ID: ENST00000448500
  CDS Start-End: 134-581
aataaatgcttcggccgaaccaagtcctgagctcccagcggaggaggggacctgatcttttaagagacccccccggccgccctcctcctttctttgttcctgtggctgggggggtatcccctccctccacaacatggagccatctcctctgtctcccagtggggcagcacttcccctgccgctgtcgctggctccgcccccactacccctgccagcagctgcagtggtacatgtgtccttccctgaggtgaccagtgccctcttggagtccctcaatcagcagcgtctgcagggccagctctgcgatgtatctatcagagtgcagggccgggagttccgggctcatcgggctgtcctggctgcctcctccccttacttccatgatcaggtcctactcaaaggcatgacctccatctcgctgcccagtgtcatggacccaggcgcctttgagactgtcctagcctccgcttacactggccgcctcagcatggctgctgctgacattgtcaacttccttacagtggggtctgtgctccaaatgtggcacattgtggacaagtgcactgaactactccgagaag

SEQ ID NO: 200992 - DNA, 2651 bp, Homo sapiens; identical to SEQ ID NO: 200990
  Payload ID: 19671
  Gene Name: zinc finger and BTB domain containing 22
  Uniprot ID: O15209
  ENST ID: ENST00000416097
  CDS Start-End: 153-2057

SEQ ID NO: 200993 - DNA, 581 bp, Homo sapiens; identical to SEQ ID NO: 200991
  Payload ID: 19671
  Gene Name: zinc finger and BTB domain containing 22
  ENST ID: ENST00000454866
  CDS Start-End: 134-581

SEQ ID NO: 200994 - DNA, 2651 bp, Homo sapiens
  Payload ID: 19671
  Gene Name: zinc finger and BTB domain containing 22
  Uniprot ID: O15209
  ENST ID: ENST00000445320
  CDS Start-End: 153-2057
cgcaagatggcggcgggaggggcccaggttgctgctctggccgccgagtgaggggcggggggggcccgggggcgcgcggcccgagacccccccggccgccctcctcctttctttgttcctgtggctgggggggtatcccctccctccacaacatggagccatctcctctgtctcccagtggggcagcacttcccctgccgctgtcgctggctccgcccccactacccctgccagcagctgcagtggtacatgtgtccttccctgaggtgaccagtgccctcttggagtccctcaatcagcagcgtctgcagggccagctctgcgatgtatctatcagagtgcagggccgggagttccgggctcatcgggctgtcctggctgcctcctccccttacttccatgatcaggtcctactcaaaggcatgacctccatctcgctgcccagtgtcatggacccaggcgcctttgagactgtcctagcctccgcttacactggccgcctcagcatggctgctgctgacattgtcaacttccttacagtggggtctgtgctccaaatgtggcacattgtggacaagtgcactgaactactccgagaaggccgggcctcagctaccaccaccatcactactgctgcagccacctctgtcactgtccctggtgctggggtgccatccgggagtgggggcactgtggcccctgctaccatgggctctgcgcgctcccatgcctccagccgggccagtgagaatcaatctcccagcagcagcaactacttcagccccagggagtccactgatttctcatcttcctcccaagaggcatttgcagcttctgcagtgggcagtggggagcgtcgaggaggtggccctgtattcccagcccctgtcgttggcagtggaggggccacatctggaaagctgctgctggaggcagatgagctgtgcgatgatggtggggatgggaggggggcagtggttcctggggctgggctccggagacccacctacacaccccctagcatcatgccacagaaacactgggtatacgtgaagcgaggtggtaattgcccagcgccaacacccctggttccccaagacccagatctggaggaggaagaggaggaggaagatctggtgttgacctgtgaggatgatgaagatgaagaactagggggtagctccagggttccagtggggggagggcctgaggctaccctcagcataagtgatgtccgtaccctgagtgagcccccagacaagggggaggagcaggtcaacttctgtgagtcctccaatgactttggcccatatgagggtgggggtcctgtggcaggtcttgatgactcaggggggccaactccctcttcctatgccccctcccaccctcctcgaccgctccttcccttggacatgcagggcaaccagatcctggtcttcccgtcgtcgtcttcatcctcatcctcacaggctcctggccaaccaccagggaaccaagcagaacacggggcagtgaccgtggggggcacgtcggtggggagcctgggtgtgccgggtagcgttggtggggtccctggagggactggcagtggggacgggaataagatctttctgtgccattgtgggaaggccttctcccacaagagcatgcgggaccggcacgtgaacatgcacctcaatctgcggccgtttgactgccccgtgtgcaacaaaaagttcaagatgaagcaccatctgactgagcacatgaagacgcacacaggtctcaagccctacgagtgcggagtctgcgccaagaagttcatgtggcgagacagcttcatgcgccaccgaggacactgtgagcgccggcaccgcctgggcggggtcggggccgtacctgggcctgggactcccacggggccatccttgccgtccaagagagagtctcccggagtgggcgggggcagcggcgacgaagcgagtgcggccacgcccccgtccagcagacgtgtctggtccccacccagagtccacaaggtggagatgggcttcggtggaggtggaggagcaaactgaaggggcaggctactggggtggggtagctttcgggaaagggaataaggagcacgatgcaagggcgctgtggcccccgggtgatctcccaccacacttactgtcttcctttatctctgtggacttgtatatattctggaaggggaaccacagtttcaccatcgcccgcccattctactactcaacccctcccccccaaggtatttccagaactaaacccttcctttccctctgatgggtacactgaagcccctgctccacagagtagattgcacatggagggagggagagggggcgtgttgaacatcctgcagtcacagggtcaggggtcaggtggttgtagtctgtgcctgaagtctgtgtttgtgttgtcgtggagacaaggcctttgagccccacccttgtcctagaacctaccccctctcaaggatgcgctctttatttctaccctgtctctccccgccacccccgacttcccgtggaaattcccaactcggttctcatggaggagtgggtggagacaaggagggagtaagtcgtaggagtacaaggtttttattttttttaacagtgattaaaatatttattggtcattta

SEQ ID NO: 200995 - DNA, 581 bp, Homo sapiens; identical to SEQ ID NO: 200991
  Payload ID: 19671
  Gene Name: zinc finger and BTB domain containing 22
  ENST ID: ENST00000436352
  CDS Start-End: 134-581

SEQ ID NO: 200996 - DNA, 2645 bp, Homo sapiens
  Payload ID: 19671
  Gene Name: zinc finger and BTB domain containing 22
  Uniprot ID: O15209
  ENST ID: ENST00000418724
  CDS Start-End: 135-2039
gaataaatgcttcggccgaaccaagtcctgagctcccagcggaggaggggacctgatcttttaagagacccccccggccgccctcctcctttctttgttcctgtggctgggggggtatcccctccctccacaacatggagccatctcctctgtctcccagtggggcagcacttcccctgccgctgtcgctggctccgcccccactacccctgccagcagctgcagtggtacatgtgtccttccctgaggtgaccagtgccctcttggagtccctcaatcagcagcgtctgcagggccagctctgcgatgtatctatcagagtgcagggccgggagttccgggctcatcgggctgtcctggctgcctcctccccttacttccatgatcaggtcctactcaaaggcatgacctccatctcgctgcccagtgtcatggacccaggcgcctttgagactgtcctagcctccgcttacactggccgcctcagcatggctgctgctgacattgtcaacttccttacagtggggtctgtgctccaaatgtggcacattgtggacaagtgcactgaactactccgagaaggccgggcctcagctaccaccaccatcactactgctgcagccacctctgtcactgtccctggtgctggggtgccatccgggagtgggggcactgtggcccctgctaccatgggctctgcgcgctcccatgcctccagccgggccagtgagaatcaatctcccagcagcagcaactacttcagccccagggagtccactgatttctcatcttcctcccaagaggcatttgcagcttctgcagtgggcagtggggagcgtcgaggaggtggccctgtattcccagcccctgtcgttggcagtggaggggccacatctggaaagctgctgctggaggcagatgagctgtgcgatgatggtggggatgggaggggggcagtggttcctggggctgggctccggagacccacctacacaccccctagcatcatgccacagaaacactgggtatacgtgaagcgaggtggtaattgcccagcgccaacacccctggttccccaagacccagatctggaggaggaagaggaggaggaagatctggtgttgacctgtgaggatgatgaagatgaagaactagggggtagctccagggttccagtggggggagggcctgaggctaccctcagcataagtgatgtccgtaccctgagtgagcccccagacaagggggaggagcaggtcaacttctgtgagtcctccaatgactttggcccatatgagggtgggggtcctgtggcaggtcttgatgactcaggggggccaactccctcttcctatgccccctcccaccctcctcgaccgctccttcccttggacatgcagggcaaccagatcctggtcttcccgtcgtcgtcttcatcctcatcctcacaggctcctggccaaccaccagggaaccaagcagaacacggggcagtgaccgtggggggcacgtcggtggggagcctgggtgtgccgggtagcgttggtggggtccctggagggactggcagtggggacgggaataagatctttctgtgccattgtgggaaggccttctcccacaagagcatgcgggaccggcacgtgaacatgcacctcaatctgcggccgtttgactgccccgtgtgcaacaaaaagttcaagatgaagcaccatctgactgagcacatgaagacgcacacaggtctcaagccctacgagtgcggagtctgcgccaagaagttcatgtggcgagacagcttcatgcgccaccgaggacactgtgagcgccggcaccgcctgggcggggtcggggccgtacctgggcctgggactcccacggggccatccttgccgtccaagagagagtctcccggagtgggcgggggcagcggcgacgaagcgagtgcggccacgcccccgtccagcagacgtgtctggtccccacccagagtccacaaggtggagatgggcttcggtggaggtggaggagcaaactgaaggggcaggctactggggtggggtagctttcgggaaagggaataaggagcacgatgcaagggcgctgtggcccccgggtgatctcccaccacacttactgtcttcctttatctctgtggacttgtatatattctggaaggggaaccacagtttcaccatcgcccgcccattctactactcaacccctcccccccaaggtatttccagaactaaacccttcctttccctctgatgggtacactgaagcccctgctccacagagtagattgcacatggagggagggagagggggcgtgttgaacatcctgcagtcacagggtcaggggtcaggtggttgtagtctgtgcctgaagtctgtgtttgtgttgtcgtggagacaaggcctttgagccccacccttgtcctagaacctaccccctctcaaggatgcgctctttatttctaccctgtctctccccgccacccccgacttcccgtggaaattcccaactcggttctcatggaggagtgggtggagacaaggagggagtaagtcgtaggagtacaaggtttttattttttttaacagtgattaaaatatttattggtcatttacttggcttcccg

SEQ ID NO: 200997 - DNA, 2651 bp, Homo sapiens; identical to SEQ ID NO: 200994
  Payload ID: 19671
  Gene Name: zinc finger and BTB domain containing 22
  Uniprot ID: O15209
  ENST ID: ENST00000431845
  CDS Start-End: 153-2057

SEQ ID NO: 200998 - DNA, 581 bp, Homo sapiens; identical to SEQ ID NO: 200991
  Payload ID: 19671
  Gene Name: zinc finger and BTB domain containing 22
  ENST ID: ENST00000426244
  CDS Start-End: 134-581

SEQ ID NO: 200999 - DNA, 581 bp, Homo sapiens; identical to SEQ ID NO: 200991
  Payload ID: 19671
  Gene Name: zinc finger and BTB domain containing 22
  ENST ID: ENST00000441117
  CDS Start-End: 134-581

SEQ ID NO: 201000 - DNA, 5519 bp, Homo sapiens
  Payload ID: 19672
  Gene Name: zinc finger and BTB domain containing 24
  Uniprot ID: O43167
  ENST ID: ENST00000230122
  CDS Start-End: 169-2262
cgcgcttccgggttggctgtggctgtggctgcggcggcggcgcaggagcagaaaccggtgcggcgcagaagccccagaggcgggcggggcggagcggagggccagcgggccccggcgtgggtctcccgccaggccgccggatttaacccttagtggcttctgaagaaaatggcagaaacatcgccagagccttctgggcagcttgttgtacactcagacgctcacagtgacactgtgctggccagttttgaggatcagaggaagaaaggcttcctctgtgacattactttaatcgtggagaatgtacatttccgggcccacaaagccttacttgctgccagtagtgaatacttctcaatgatgtttgcagaagagggggaaatcggccaatccatttatatgctggaaggcatggttgcagacacctttggtatcctgctggaatttatctacacaggttatctccatgccagtgagaaaagtacagaacaaatcctggctactgctcagttcttaaaagtctatgacctggtaaaggcttacacagacttccaaaataatcatagctccccaaagccaacaactttgaacactgctggtgccccagtggttgttatctctaataagaaaaacgatcctccaaagcggaaacggggaagaccaaaaaaagtcaatacattgcaggaggagaaatcagaactggctgcagaggaagaaatacagttaagagtgaacaattcagttcagaatagacaaaactttgtggttaaaggagacagtggtgtactgaatgagcaaattgcagcaaaagaaaaggaagaatcggagcctacttgtgagccaagtagagaggaggaaatgccagttgaaaaagatgagaactatgatcccaagaccgaggatggccaggcaagccagagtcgatacagcaagcggaggatttggagatccgtcaaacttaaagattacaaacttgttggggatcaagaggaccatggttcagccaagaggatctgtggaaggagaaagcgccctggaggccctgaggcccgctgtaaagactgtggcaaggtctttaagtacaatcactttttagcaatccaccagaggagccacacaggggagcgacctttcaaatgtaatgagtgtggaaaaggctttgcccagaagcactcgctacaggtccacaccaggatgcacacaggcgagcggccgtacacctgcaccgtgtgcagcaaggctctgaccaccaagcactcactgctggagcacatgagcctgcactcaggacagaagtcttttacctgtgatcaatgcggaaaatatttcagccagaacagacagctaaagagccattaccgagttcatacaggccactcattaccggaatgcaaagactgccatcgcaaattcatggatgtgtctcagctaaagaaacatctgcgaacacacacaggtgagaagccatttacttgtgaaatctgtggcaaatctttcacagcaaagagttctcttcagacccacatcagaatccatcgaggagaaaagccatactcctgtggcatttgtggcaaatccttctctgactccagtgccaaaaggagacactgcattctacacactggcaagaagcctttctcctgccctgagtgtaacttacagtttgctcgcttagacaacttgaaggctcacttgaaaattcatagcaaggagaagcatgcttcagatgccagcagcatttctggcagtagtaatacagaagaggtcaggaatattcttcagctacagccatatcaactctctacctcgggagagcaggaaattcagcttctcgtaaccgattctgtacataacatcaatttcatgcccggtcctagccagggaatcagcattgtgactgcagagagttcccaaaacatgactgcagaccaggctgctaatcttaccctgctcacgcagcagccagagcaactgcagaatttaattctttcagctcaacaggagcaaacagaacacattcagagcctcaatatgattgaaagccagatggggccctcacaaacagagccagtgcacgtgatcactctgtccaaggaaacactggaacatcttcatgcccatcaagagcaaacagaggagctccatttagctacaagtacttcagatccagctcagcacctgcagctgacacaggagcctggtccgccaccacccactcaccacgtgccccagccaacgccacttggccaggagcagagctgacctgtaaacacgtttgactgcttgattgggctcttcttataagccagctctgactggattttgaacgcttgaaatcaggctctccacaccattgacttgcagatgcttctgtgagagctgtgatggctaactgatgtttataatgccctccatccaggtagcaagatgtgtgtatgtcttgtctaaggtactgatttgtattgagcatttcaatattattgaatggttttcattttaatctgcaatgtctcataaagactcgggtagtttttctttgggggcattgatctcagtttttctgtaaggtttaaatgttcacagccataggttatggtcttgccaacctccccagttatgtttttttgttttctaggacaaagggagtcattttggttgaactgggcagaatggtttgttctattttcttatttttcttaggcaacacagttgttaccacaagacaagtcagggctaaatatgacagatcacaatgtatggggaatttgcccttttaataatttccagtcccctaagacaaagtaaccctcaacgttttatctttatgcagtacagtgggcttattgtgttaacacttcagaaagattcaaactcataaactcagtattttaactcaaaattcatgtaacaagatagccaaaagcataggatttcttaaaattctgaattcgtcttttctgagaaacataaatttacatatttttcaacagaaggctatcaaaattttaattaagtttaaaatacaaaattggatcaagacattcaccctaaattctgaatttttgtcagaaaagagatttgattttcatgaaggtaaagctttcttcactattctggaacataaaactttattcagtgtaatttaagtcttatatatactctactgaattctaactgatctcctgaaaatgttgatctacgtgttgtgtctgataactttctggagatggaagcttataattcatttttattgcagactagttaaatcccacaaagtgaatatcttctcctaatctttccttttttagagacagggtctcactgtatcacccaggccagagtgtagtggcacaatcattgctcactgtaacctcgaattcctgggctcaagcaaccctcccaccttagcctccctagtagctgggactacagggatgtaccaccacacccagctaatcttcatctaatcttaaaactttgagcctcagagactttgtagccagcatgtgtctgtaattgtatgatttttaaatcatcatcaaaagattaaattatgtttgggttaggttttcaagctaagcttattgaattcttttaccactttcatgtaagctggtaggggatttttgagaaaagaaggtgggcactagtatatctaaattaacaatgctgatggggagtagggggtaatctactctaaaattaatagagcctttccatcaattgttttgttttagacatccttgatttctccctaaatcaaataagttatttggaggttagagtaatagagaattcttcaggtttgagagaagataaaaacattttggttgcatatttgctaagctatattttattatatgtaattcacaaaacttccaaaatgatatatatcttatatgtatcaaccaaactaatgttaaatcaggcctgactagagcaaagataacaattttttacaaacactgttaagccctaagtattatttcaggttctcgtttaaactgtttaattttattcttaaaacacaaagtttttaccaacttttcaaagcccaccaatccacattttctccaggaaattaaatatttaagtaagtgagtgtttactcactctggatagctaggtgattattcagaaaatacggttacatagctatttataagtcaagtttcactggctctataacagtctacctctacactaagagaactataacatgaacaacataggtcactttaaatgttctagtagcaacttttaaaaacataaaaagaagcaggtgaaaatgttaataaaagtttatttaatccaacatttgccaaatatttcaacatataaaaatatattagtgagacattttacattctctttttcatactaagctttcgaaatctggtgtgtattttacactttctgcacatctccatttggatgctaatgttcattggacatacttgatctgtatttagatttcatacaacttacagttgaaaacagattctcatatcaagtagctaagacaaaagtttttttcaagaattgaaataagtatcagtttaaaaatttatattaaatttattaaaattaaaatccagttccttgttgcatgggacacagtgcaaatgcttgataagcacatgtggctagtggctgctatattggacagcatgggccacctgtttctaacttgagcatcagtcctagctatgcctgaattatttgaccagctgtcaaagagaaacaaggaaatgatagctttgttaatctagcctctttctttgtcccacatatacattctacccctttgaataaaaaagttcaatgacgccgggcgtggaggctcatgcctgtaatcccagcactttgggaggccaaggtgggcggatcacgaggtcaggagttcgagggcagcctgaccaacatagtgaaaccccatctctactaaaaatacaaaaattagctgggcgtggtggtgtacccctgtaatcccagctactcgggaggctgagacaggagaatcacttgaacccaggaggcggaggctgcagtgagctgagatcacgccattgcactcaagcctggcgacagagcgagactccgtctcaaaaaaaaaagttaaatgacttgagtacccaaaagaaatgtcgtgaacatgaaagtacttctcatgtgtccttgagaaatgatgttgctagtgcagtgtttcacaattcattttctactaaatgtgtaccattttttaaattgttttaacagaaatatagagtgtgtttcttaggaaatagaatgttatgctttggggctcctgaaacacctcgttttgaaggtgaatctttggttttctcccagaagagggtctgccttgggatgattggagctcttaccatcaaaatcagttattcaagtgcttgcccagtgcttcttgaaactcacctctactctgtattttctacagttggttcttgtgttataaatgttgtgagcaacagattaaatgatgctgaggaatgaaaaaa

SEQ ID NO: 201001 - DNA, 2094 bp, Homo sapiens
  Payload ID: 19673
  Gene Name: zinc finger and BTB domain containing 25
  Uniprot ID: P24278
  ENST ID: ENST00000394715
  CDS Start-End: 703-2010
aagtttctgcgtcgagctccgaggaggctggcgcaacccgcaccgcgggggccgtcgcggcggcggcggcttgaccacccctcttgcccctctcaaggcttgacccatcttatcaccgtcttctctggcactcagtatttggagtaatcagttgttaccagttgcggaggcagcgcatagcacaacgtagtacctggaacctgacggcacctagcatgtttcaacagttagcgcccgcatcaccccaagggattaaatttggcattctttctcttgagactcaagtcctggcagagctgttgatcctctcacaagattctgtcatagaagacaccaggcctgaagagcgtgatgtagctggagctagctacacctcttgatagctaagactccaaggctccagacaccttggtgattgcactctccaccatgccaggaccgcagtgccagtttaccccactcacctgtagagaatgtatccggcggaggtcattatatatacttggcttgattcaggttatggagaagtcaggcatggccactgtgtgggtttgatggtatttctaggtgagatggagtttcactcttgttgcccagactggagtgcaatgacacaatctcagctcaccacaacctctgcctcctgggttcaagcgattctcccgcctcagcctcccgagtagccgggattatagaaccacaatggacactgccagccatagccttgttcttctccagcagctgaacatgcagcgagaatttggttttctgtgtgattgcacagttgcaattggagatgtttacttcaaagcccacagagcagtgcttgctgctttttctaactatttcaagatgatatttattcaccaaacaagtgaatgcataaaaatacaaccaactgacatccaacctgacatattcagctatttgttgcacattatgtacacggggaaagggccaaaacagattgtggatcatagtcgtttggaggaagggattcgatttcttcacgccgactacctttctcacattgcaactgaaatgaatcaagtgttctcaccagagactgtgcagtcctcaaatttatatggcattcagatctcaacaacccaaaaaacagttgtcaaacaaggactggaggtcaaagaagctccttccagtaacagtggaaacagagctgctgtccagggtgaccacccccagttgcagttgtctcttgctattggtctggatgatggcactgcagaccagcagagggcctgtcctgccacccaggccctggaggagcaccagaagcccccagtttccatcaagcaggagagatgtgacccagaatctgtgatctcccagagccacccctcaccctcatcagaggtgacaggccccacttttactgaaaacagtgtcaaaatacacttatgccattactgtggggaacgttttgattcccgtagtaacctaaggcaacatctccatacacatgtgtctggatccctgccattcggtgtccctgcttccattctggaaagtaatgaccttggtgaagtgcatccccttaatgaaaacagcgaggcccttgaatgccgcaggctcagctccttcattgttaaggagaatgaacagcagccagaccacaccaaccggggtaccacagagcctttgcagatcagtcaagtatctttgatctccaaagacacagagccagtagaattaaactgtaatttttctttttcaaggaaaagaaaaatgagctgtaccatctgtggtcataaattccctcgaaagagccaattgttggaacacatgtatacacacaaaggtaaatcttacagatataaccgatgccaaaggtttggtaatgcattggcccagagatttcagccatactgtgacagctggtctgatgtctccctgaaaagttctcgcttgtcacaagaacacttagacttgccttgtgccttagagtcagagctcacacaagaaaatgtggatactatcctagttgagtagcagcttctctttcagaatttttataccaattctgaaaaagaaaatttgcgtggcatttttaattcataaattattttcctcctc

SEQ ID NO: 201002 - DNA, 1440 bp, Homo sapiens
  Payload ID: 19673
  Gene Name: zinc finger and BTB domain containing 25
  ENST ID: ENST00000555220
  CDS Start-End: 735-995
aaagaaggtaactaatttgggaactagtctccgtaggggcttcgcctccgactcagggaggccgcacgcccgggacctgacgcgccggcaacaagcaggcggcctggcagccgcccgtcaccgggtcctcgcagcgcgtccgccgcgctccggctccccgcacggatcggcgcccctccggccccgcactccgccaggcccgcggcccgtcgccctccggcctgggccaaagttgcgcaaatagccccacaactggcaaatacttaccggccgcaacaggaaccagagctgcggagattttagggagtttaaggcaaatcagccgcgggaaaggcgggcgaaggcgaaggggccgcgagctgcagtggcggcggcgcgcggcgctcggcgctcgggctgggctgcgcggagaggctctggctctgccagggactgtgctgcaacaaaggacttccgctgccgcacagccgcgcctgccgcaccgcactgagccggccccgcttacgcggcgactccgggtctgcccaccagttcgctgcggcgtccgccagccttcccctccctctcgcccgcccacccactctgccgctggctgctaggggcacccgcggtcgcctgtttgttgcaacaagtttctgcgtcgagctccgaggaggctggcgcaacccgcaccgcgggggccgtcgcggcggcggcggcttgaccacccctcttgcccctctcaaggaaccacaatggacactgccagccatagccttgttcttctccagcagctgaacatgcagcgagaatttggttttctgtgtgattgcacagttgcaattggagatgtttacttcaaagcccacagagcagtgcttgctgctttttctaactatttcaagatgatatttattcaccaaacaagacagcaaatcacccaccttgaggtcataaaggagctggaagctgctgggtgcttgtgctgctctctggacggcctgagccagggctaaggcacccttgcccccttctgcccagtgagtgcacttcacggcatcaaaagccccatgttctctggaaaggcggctgatgaggtccagctcagactctgtatccgtcctataaaggaagcatttcatatcaaagcatggaaaatggctggagagacagaattgtcttctttttgccattaaacctcatgtgaattacccactgataaacgaacactaaccaagaaatttggcctgggtttgaatctcagctccgaaacttactagctggtgacttttggccagttacctaatctttatgtgcctcaatttccaccctggtaatacgcgaataatcacagcacttatttcattgggacgttatgagactcagatggtaaatccatgtaaaatacttggaaaattcccagcactccagaaggaatcagtaaatactagcatttaagaa

SEQ ID NO: 201003 - DNA, 565 bp, Homo sapiens
  Payload ID: 19673
  Gene Name: zinc finger and BTB domain containing 25
  ENST ID: ENST00000555424
  CDS Start-End: 1-285
atggacactgccagccatagccttgttcttctccagcagctgaacatgcagcgagaatttggttttctgtgtgattgcacagttgcaattggagatgtttacttcaaagcccacagagcagtgcttgctgctttttctaactatttcaagatgatatttattcaccaaacaaggaaaagaaaaatgagctgtaccatctgtggtcataaattccctcgaaagagccaattgttggaacacatgtatacacacaaagacagcaaatcacccaccttgaggtcataaaggagctggaagctgctgggtgcttgtgctgctctctggacggcctgagccagggctaaggcacccttgcccccttctgcccagtgagtgcacttcacggcatcaaaagccccatgttctctggaaaggcggctgatgaggtccagctcagactctgtatccgtcctataaaggaagcatttcatatcaaagcatggaaaatggctggagagacagaattgtcttctttttgccattaaacctcatgtgaattacccactgataaacgaacactaaccaa

SEQ ID NO: 201004 - DNA, 10372 bp, Homo sapiens
  Payload ID: 19673
  Gene Name: zinc finger and BTB domain containing 25
  Uniprot ID: P24278
  ENST ID: ENST00000608382
  CDS Start-End: 193-1500
ggcgcccctctttcccctgctaccagacacgcggtcacgtggggccatcgcgggctgccggcgcgggaagccgcgcgagaggcggccgaggggtgcgtgagccggcgccactgcttgcagtgcgcggcttgggagcccgcccctcctgcacggaggagtcggcctgccgccgcggcggcatctggaaccacaatggacactgccagccatagccttgttcttctccagcagctgaacatgcagcgagaatttggttttctgtgtgattgcacagttgcaattggagatgtttacttcaaagcccacagagcagtgcttgctgctttttctaactatttcaagatgatatttattcaccaaacaagtgaatgcataaaaatacaaccaactgacatccaacctgacatattcagctatttgttgcacattatgtacacggggaaagggccaaaacagattgtggatcatagtcgtttggaggaagggattcgatttcttcacgccgactacctttctcacattgcaactgaaatgaatcaagtgttctcaccagagactgtgcagtcctcaaatttatatggcattcagatctcaacaacccaaaaaacagttgtcaaacaaggactggaggtcaaagaagctccttccagtaacagtggaaacagagctgctgtccagggtgaccacccccagttgcagttgtctcttgctattggtctggatgatggcactgcagaccagcagagggcctgtcctgccacccaggccctggaggagcaccagaagcccccagtttccatcaagcaggagagatgtgacccagaatctgtgatctcccagagccacccctcaccctcatcagaggtgacaggccccacttttactgaaaacagtgtcaaaatacacttatgccattactgtggggaacgttttgattcccgtagtaacctaaggcaacatctccatacacatgtgtctggatccctgccattcggtgtccctgcttccattctggaaagtaatgaccttggtgaagtgcatccccttaatgaaaacagcgaggcccttgaatgccgcaggctcagctccttcattgttaaggagaatgaacagcagccagaccacaccaaccggggtaccacagagcctttgcagatcagtcaagtatctttgatctccaaagacacagagccagtagaattaaactgtaatttttctttttcaaggaaaagaaaaatgagctgtaccatctgtggtcataaattccctcgaaagagccaattgttggaacacatgtatacacacaaaggtaaatcttacagatataaccgatgccaaaggtttggtaatgcattggcccagagatttcagccatactgtgacagctggtctgatgtctccctgaaaagttctcgcttgtcacaagaacacttagacttgccttgtgccttagagtcagagctcacacaagaaaatgtggatactatcctagttgagtagcagcttctctttcagaatttttataccaattctgaaaaagaaaatttgcgtggcatttttaattcataaattattttcctcctcaagtttcattgactttttttcttcacagcttatccatggttttaaggttgtatatattagatcttctcataagacatattaatatgtggctattaaaatgtaacattcaattactactgtgaacttttcacaaacgaaataacaatttagaaatcagaaatcaatgtagaaatatggaaaccttaaatagttatttatagaattctaagtttttccagttatagaatcagtaaaatcaaattgaatataaagtaaatgaaatctgttttaaagcatattctaaactatcacttctgcctacatttcacatgaattcactcctaccaggattatttttaaatattttcttccatataggaaattaatagttactttaatgcataactgtatgttatacatatgttataatgtataaaaatttattttaagatataccaaatcatgagtagttttattttttaactactagctccacaacatcttacctacatggcttctctttactttttaacattgagtatacctctttttttttttgagacagagtctctctgtgtcgcccaggctggggcgcagtggcgcgatctcggctgactgcaagctccgcctcccgggttcacgccattctcctgcctcagcctcctgagcagctgggactacaggcgcccgccaccacgcccagctaatttttttgtatttttttagtagagacggggtttcaccgtgttagccaggatggtctcgatctcctgacctcgtcatctgcccgccttggcctcccaaagtgctgggattacagatgtggtatatctcatttttaataaaaaaaacagttaaagggagaagagtcagagagacattaaaaaatatttaagaaacagtaagatatacacacatagataaataagcatgcagagacagagactgagctagaactgcattgactaaaaaccccagggttgttaacttggtctagagtgttttcttagacaccttaaaaagtaatttgagattttatgaccagaggtttacatgagttgaaagagaatgatgataaaatataaatcatgtttctaccctcagcgtcaggatttttggggcttcctgggttgattttaattttctaaaaatcactgaaaaagtaatttttcagtggcacagttttcacttttttcctgatccataaaaccagcaaagtggatacattcagtgttctataactacatttaagatccatgatgttagcttttcctctataaatcaacttaactctcttttataatggtgacacttacaaagctaaaaccccaggaaaattaaagttgatgaaagaaataacagattccccggctctatatacctgggaaatagctggttaagcttcaccacaaaggatagatctaaattgtttctgaaatgtttaaatttcaaaccccgcatagtcaaggataataaaacagactcatctttttttgccctcttgttaaattctaagcttcacgggcatttgaatacatctaaaaaatttggtttgtgagccttagaatttaaccacttacaaaactcttgagctccctccacttctgaggacgtttcctgacacattcaacagcatcagcgtccaatcaggagggagctcaaagagtaatccagctaattctaaggacacaaaggttttctctaggtaaacagtttaggtaaattacaaagtggtaagtttttcttgaggattgaatgaagaaagctactggatattgtgtaaggcagttgagtttctgccttaaacaagtgagtaaaggctcctatggttaagactgatgtgtgttgagagcacatctaacttgataagatcaattgtattgggagtaattaaaacaaatgtatgttctttggggtcagaactttgtctaatcttaaacttttttctaccaattcacttaagcaactattgaaatttgtactgccctcaaaaatatcatctcattggaagaacacaagtattaacattgattttttgtattttaggctagttaagatatatttcctagccttcttcaattcaaattctattgttcttattaagataatttttctcctctatattcttccctgtttgcctactcattattattatttttttaatttaatttttttttaagatggagtttcacccttgttgcccaggctggagtgcaatggcgtgatctcggctcactgcaatctctgctgcctgggttcaagcgattctcctgccttagcctcccaagtagcttgggattacaggcatgcaccaccatacccagctaattttgtgtttttagcagagacagggtttcaccatcttggtcaggctggtctggaactcctgacctcaggtcatgcaccagcctcggcctcccatagtgctgggattacaggtgtgagccaccgtgccaggcccactcattattctttgacacaggaaatccttgtatatagctaaagggtggaggtagagttgtacatggttggttggataagacagcaagtgcctcagggcagagtttggataaatggtaagagtttgctagcagctgattggccgtgatagacaacactcatttaaagcagaaatatatctgttcgttgagagttaagaaaatagtggttaactgtatttctattcttatagttccttttaatattagaaattcaaagcaaatgctctttccttgttccttaaaacattcattctgtttaggaagtgggaaaatatcaacttcattttatagaaaaaaaatcccaaaagctgaattccagagatgcagtgaatagtggtgtgggactgacccccagtttttgttattgttgttttcatttattctgcaggcttttttttttttttttttttttttttttgagacagtcgtgctgtgtcgccaggctggagtgcagtggtgcaatctcagctcactgcaacctccgcctctcgaattcaagtgattctcctgcctcagcctcctgagcatgtgccaccatgcccagctaatttttgtatttttagtagagacagggtttcaccatgttggccaggatggtctcgagctcctgacctcatgatctgcctgcctcagattacaggcatgagccaccgcgcccgggtctgcaggcattttttaaagtaactgtcatatgcctaacactgtgccctgagtattattttttaaagacatgattgctcactgagaaaatttgctttgtattttaaaagttcttccagctaggccaggcgtggtggctcatgcttgtaatcccagcactttgggaggccgaggcgggcgggtcacgaggtcagaagatccagaccatcctggctaacacagtgaaaccgcgtctctactaaaaatacaaaaaattagccgggtgtggtggcacacacctgtaatcccagctactcgagaggctgaggcagtggaatagcttgaacccgggaggcagaggttgcagtgagcggagatcgcaccactgcactccagcctgggtgacagagcgagactccatctcaaaaaaaaaaaagttcttccagctaaaacctttattttttgactacatctccacaaaatggagctatactgttagccagtatcctaatagtatagtgcagtttgcataatgattaccaagcttgaaactggaaatgtcatatgcactttcgtgtgtatcaggcagatactaaacattttccccttgagtcagcttaaaatttttccttcttttgaaatctcacgcagttgttttctggagaaaaatagagactgttttagtatttgttcttattagcgtatcatcagaactcagcacagtctgccttataagaaaacaaaaaatttttttatttataactcttgagattgttacttcttgctctttctgatttcccatccgtaaagtgggtgtaagcaatacttacctcacaggggtgttgtgaggatttatattaaacgtgttaagttctctcagtattattgattaaaatcaaccatataaacgacatttattctgtagctagacctattaactttagtatttcagcctataaattctaaaatgttcttaaaagcagtaatgtactatctaatattcaataactaattgacagaactcattgttattttttacaaataactagaaacaatactgttgctagaattcctgttctactgtaatttaatcatcactgtttctttttagccttcagtaaggaggatactagttctttggcattattgggaataaaactttgtcaatttcagctttattgaaagttctcccaaatatattgtttttgtttacacaaaggaaaaggaacaaaaacaataaataaatacctttgtttttttttcttttttgagacggagtctcgctctgttgcccaggctggagtgcagtggtgcgatctcggctcactgcaacctccgcctcccaggttcaagcgattcttcttcctcagcctcccgagtagctggaactataggcacgcaccaccacacccagctaatttttgtatttttagtagagatggggtttcatcatgttggcaaggctggtttcgaactcctgaccttgtgatctgcctatctcagcctcccaaagtgctgggattacaggtatgggccactgggcccagcctatttttatttctttgatgtaggtgatctaaatagtagatgaggacaggaaatggggtgaaggtaataatagtattattagaaaagtcttcactgaaaattgaaggaaatacatattaatcgtggaaaaagatagtgtgaaaaatgtgtaatttcgttaacatttatttgtacaggcacattcttgatgttgtgagtcagatacttgataaatgtccattttttgtagtaattgatgtaaaaatgggccatgtgaagaattttcataatgtaatttgtgtctttgtatattttgaactacatatagatttgtggcacttaaattattaatttttgatttcttaagagtgaagtctgtaaatgatttctctctgctgtacttctgtgtttgtatggttggacattttgaaaactggtgagattgcacagtcccaaacctggatgtcttaaatacaaggaattacaaactgtgatttttgtcttgaagacctggaagaattcattgtgcttcagtatgtatttgtactgcacttgattaattagttaagtattggtctggtgcaattgacattaactgtcatcaactcctctattttgtgctaaataaagtcatttagtcagaatggatcaaatataaacttatactttaaaataaacttagattataaaaacttgttcaataaaaaagacccactgaaaaatcttcaaagtacatgtaacacatagctaatacaggagaccaaaatcaataatacattgtgtggctaaactcatccacctaatgtactgtgaatttgcttcagaaacattcttttagaaagttgtgtatctgccgggcatggtgcctcatgcctgtaatcccagcactttgggaggccaaggcccaggagtccgagaccagcctgggcaatatagtgagacctcatctctgccaaaaattttggccaggggcagtggctcacgcctgtaatcccagcactttgggaggtcgaggtgggcggatcaccagaggtcaggagttcaagatcagcctggctaacatggcgaaaccctgtctctactaaaaatacaaaaataagccaggtgtggtggtgcgcgtctgtagtcccagctacttgggaggctgagacagaatcatttgaacccgggagatggaggttgcagtgagccgagattgcgccattgcactccagcctgggcgacagagtgagactccgtctcaaaaaaaaaaaggcagggtgtggtggctcacacctgtaatcccagcactttgggaggccaaggcgggcggattatgaagttaggagatcgagaccatcctggacaacatggtgaaaccctgtctctagtaaaacacaaaaaattagctgggtgtggtggcacgtgcctgcagtcccagctactaggggggcagaggcagaggaattgcttgaacccgggaggcggaggttgcagtgagccgagattgcgccactgcactccagcctggcgacagagcaagaaacaatgaatttcatatattttatcaagacaaattaatgtgacttaatcaaaaacaagtttattagcttagcttatagaatgtgttcttattttacatcagtgtttgccaaatgttgtgttcctagtgttgaggcaagtagtctttgtactgggtaacattttggaggtgtgatgcaaaaatgcatttgtggacctaattcttaccgaccataatctgtgttaatcgaaaattgacgtcctaatcaaatgctttccaactgctgtctctggaaagaaaggtagtatttcgtcatttcccagaagtttcttgctttgcttcttcttttttttttttttttttttttttgagatggagtcttgctctgttgcccaggctggagtacagtggagtgatctcggctcactgcaaccttcacatcccaggttcaagctattctcctgcctcagcctcccgagtagctgagattacaggttcccaccactacactcggctaattttttgtatttctagtagagacggagtttcaccatgttggccaggctggtctcgaactcctgaccttgtgattcacctgcctcagcctcccaaagtgctgggattacaggcgtgagccaccgcgcccagctgcttctttcttctctatttacagtctactgtatcgccttttgcccccagtaacatgatccacaatagtagttctcaactgaggtatattagtcaggattctccagaaaaagaaagaaacaacaggtagaactgagagagagaaagagattgattgattataaggaataggttcatgtaattatggaggctgagaagtcccaagatctgcagttgggaggctgagaggctggggagtcagtgatgttccaatctgaatttgaagacctgagaaccaggagagcttatggcataagttccagtccaaaagctggcaggcttgaaactcaagaagagctgatgtttccatttgggtccaaagggaagaaaagaccgataattgcagctcaagcagtcaggccagagaaagtctctttttttattatattctggccttcaactgatggaatgagagccacccacatcagggagggtgatcttctttacgcagtctactgattcagattttgtctccctccagaacaccctcacggacacacccagaataatgtttgactaactattggggcagcccatggcccagtcatttggacacataaaattaaacattacacagggctatccccccccatagagacatttgacgatgtggagatgtttttggttgtcacagttgggtgggcgatgagggaggctgctgctggcatctagtaggtggaggccagggatgctgctaaacatctcagtgcagaggacagcctcccgcaatacagaatatgtacctcaaaatgtcattagagctgaggttgaccaacccttctgagaccttaaagtaagttttgtgatggctgtcaggaataaaagaatacaaagaaacccaatttgggggatttctattctagtcatgtttagagcaagtattggagtatgagatgtgttcagaattaaattctatttgtattatccttgatcccagcttttaaaagataaaaatgtgattattagaaataaaaggaaaaaatgtgattattaaaaatcagagatgtattaatcagcaagacagttttgaatctattcatataatgtttgaactaaataattgtctccccaaagaggtctcttcatgaaattgagattgtaggttataatttctgtgaatttttaatctggccaaaaggtggcaccagtgtacctttaaaaaaatgttcattatacttgaattcagcattactattaatagtaaatattatttagggcttagctacttttggatcatgctttatagagtcaagactaatgagaattttcttaaaatttcataaggtactgcaatatcttgacatccctctttaatcaagatgcttctgatttacatgtacatatctcagcagataactttttaaaatatcacattattgtgctacattgagcatttctgaagatttttccaagccattaactgtgaggccttggaatttgggctcttttaatcaggcatcacactcagtttttggtgttctgcctggtcaagacatagattgaaggacatttgagtaaatacgctcccttgctcctttcttgccttttgttcattttttgtacatccacaatctatgaggtatgttacctactgaaatttactttcttttccaactgtggttcaacaactgactttcttctctcatactttccaacccattccattctgaataagttaagagttttcttaccttcagctcttctcaccttccaatactaagtgaatacagcctgcctcccccttcatttctgattacaatattattctcatcatcctaggactttgtacctaatcaccagttgcttctcctaagtttattttacagctgataagccaacttggaaaatgagcccactctccctcagatacattctcttccgctgtttgaaacgtttttcattgaaacaatttggtgatattgtatcaaaataataaagtattaagctactggaa

SEQ ID NO: 201005 - DNA, 2047 bp, Homo sapiens
  Payload ID: 19674
  Gene Name: zinc finger and BTB domain containing 26
  Uniprot ID: Q9HCK0
  ENST ID: ENST00000373654
  CDS Start-End: 213-1538
ctttcccttccctgtgactggagtggggagcctgaggatgcccctgggaccgcctcataggaccccagctgagggcccagcagttggcttgggggcctgactctggcatcttataagaagtgccagaggtgaggccctaagaaaacgagcctcgggagccagcccaagaccaggcattcagtgccagtctttgagaaccactgtctgccaaaatgtctgaaagatcagatctccttcacttcaagtttgaaaattatggagattcaatgttacaaaaaatgaacaaattaagagaagagaataaattttgtgatgttacagttctcatagatgatattgaggtacagggacataaaattgtgtttgctgcaggttcccccttcttaagagaccaatttttactgaatgattccagagaggtgaaaatctccatattacagagttccgaagtggggagacaattgctcttatcctgttatagtggtgtgctggaattccctgagatggaactggtaaattacttgactgctgcaagttttcttcagatgagccacattgtagaacggtgcacacaggccctgtggaagtttataaagccaaaacaaccaatggatagtaaagagggatgtgaaccacagagtgcttctccccagtcaaaagaacagcagggagatgccagaggctccccaaagcaggactcaccttgtattcatccatctgaagacagtatggatatggaggacagtgatattcagattgttaaggtagaatctattggggatgtatcagaggttagaagtaaaaaagatcagaaccagtttatttcttctgaacccactgctttacattcatcagagccccagcactccctgataaattcaactgtggaaaacagagtaagtgaaatagaacaaaaccatctccacaattatgccctttcttatacaggcagtgataacatcatcatggcctcaaaagatgtctttggccctaatattcgaggtgtagacaaaggcctacagtggcatcaccagtgcccaaagtgtaccagggtgtttcgtcacctggagaactacgccaaccatttaaaaatgcacaaactctttatgtgtctactctgcggcaagactttcactcagaaaggcaaccttcatcgacacatgcgtgtgcatgccggaattaaacctttccagtgtaaaatctgtgggaaaaccttttctcagaagtgttccttacaggatcatcttaaccttcacagtggagataagccccataaatgtaactattgtgatatggtttttgcacataaaccagttttgaggaaacaccttaaacagctgcatggcaaaaacagctttgataatgccaatgagagaaatgtacaagacctcacagtggattttgattcttttgcatgtacaacagtcacagactctaaagggtgtcagccacaacccgatgcaacacaggtcctggatgcaggtaaactggcccaagctgtcctgaacttaagaaatgatagtacttgtgtgaattgagtaggggcttcatgctcacaactcgaactgactgacaatgtggcaatagtcttagtctttttaggagtgattttgctagtttgacttctccaaagcctctgtgtaggtggtagggagtgagtcaaagcactaatagaccaggcaacttaccacttggagtggatttgccttacttttgccctctcccattttctgttttgagttatttatcttgtaaagtctgttttcctttcccaaggaataattccttttgtctacctaacattgacttatgtcttagactgacactgttttaggcttttcactaggcacattccgaaggtaccaacaagttaataacgtcacctactctccactaatagatgctatgctaagagaagtgaataatctttctttggtagaaaataggctgagatataaggtgatattgctattgacctgaaaatgtgatagaacttctggttgcctattgattattcctccatgtctgataaatgaatctgcttcct

SEQ ID NO: 201006 - DNA, 4443 bp, Homo sapiens
  Payload ID: 19674
  Gene Name: zinc finger and BTB domain containing 26
  Uniprot ID: Q9HCK0
  ENST ID: ENST00000373656
  CDS Start-End: 75-1400
ggagccccgaggggccggagctcctggcggtgccggatcctgacggcggccttcccccgggtctgtctgccaaaatgtctgaaagatcagatctccttcacttcaagtttgaaaattatggagattcaatgttacaaaaaatgaacaaattaagagaagagaataaattttgtgatgttacagttctcatagatgatattgaggtacagggacataaaattgtgtttgctgcaggttcccccttcttaagagaccaatttttactgaatgattccagagaggtgaaaatctccatattacagagttccgaagtggggagacaattgctcttatcctgttatagtggtgtgctggaattccctgagatggaactggtaaattacttgactgctgcaagttttcttcagatgagccacattgtagaacggtgcacacaggccctgtggaagtttataaagccaaaacaaccaatggatagtaaagagggatgtgaaccacagagtgcttctccccagtcaaaagaacagcagggagatgccagaggctccccaaagcaggactcaccttgtattcatccatctgaagacagtatggatatggaggacagtgatattcagattgttaaggtagaatctattggggatgtatcagaggttagaagtaaaaaagatcagaaccagtttatttcttctgaacccactgctttacattcatcagagccccagcactccctgataaattcaactgtggaaaacagagtaagtgaaatagaacaaaaccatctccacaattatgccctttcttatacaggcagtgataacatcatcatggcctcaaaagatgtctttggccctaatattcgaggtgtagacaaaggcctacagtggcatcaccagtgcccaaagtgtaccagggtgtttcgtcacctggagaactacgccaaccatttaaaaatgcacaaactctttatgtgtctactctgcggcaagactttcactcagaaaggcaaccttcatcgacacatgcgtgtgcatgccggaattaaacctttccagtgtaaaatctgtgggaaaaccttttctcagaagtgttccttacaggatcatcttaaccttcacagtggagataagccccataaatgtaactattgtgatatggtttttgcacataaaccagttttgaggaaacaccttaaacagctgcatggcaaaaacagctttgataatgccaatgagagaaatgtacaagacctcacagtggattttgattcttttgcatgtacaacagtcacagactctaaagggtgtcagccacaacccgatgcaacacaggtcctggatgcaggtaaactggcccaagctgtcctgaacttaagaaatgatagtacttgtgtgaattgagtaggggcttcatgctcacaactcgaactgactgacaatgtggcaatagtcttagtctttttaggagtgattttgctagtttgacttctccaaagcctctgtgtaggtggtagggagtgagtcaaagcactaatagaccaggcaacttaccacttggagtggatttgccttacttttgccctctcccattttctgttttgagttatttatcttgtaaagtctgttttcctttcccaaggaataattccttttgtctacctaacattgacttatgtcttagactgacactgttttaggcttttcactaggcacattccgaaggtaccaacaagttaataacgtcacctactctccactaatagatgctatgctaagagaagtgaataatctttctttggtagaaaataggctgagatataaggtgatattgctattgacctgaaaatgtgatagaacttctggttgcctattgattattcctccatgtctgataaatgaatctgcttcctaccatttgtacttgtcttggagctggctataaagaagtatgctggtttgttatgtactcttttcaacagtatcatagcccaacttcatctcattgaattgttcacatataccagagtactctctcttgaggaacacctgcaggcagatagttagggatgaccatgaggagcataatcaacagggatagaagtacacttatacaacagcacttacatgggcggtttctctggtagcatgtcccataagaggccatatgcttataattaatgtgtaacttgttgatgcttttgagatcaggactgctccaggcacgctaaaaatgtgctaaagtatagtgggctctctaaaaagaggctatttgggagtctctgaattttgtttcagagtttagccatcagaaaggtgagtttggccatcagagttttgtcctgtgcaccataaaagtctctgaattttcgtttcctcatgtaccttaatttctaaaacggatgataaaagttaggttggacacagaaggggcaatcaaatttctgtattcagatacctcttaaaggtacactgtgccaccttgctgcctttgattgcaaatacaaagttaattttcaaaaaggaaaaacaaaacagctctttttcctaaaacacatgttgtacttcagacctaaaattctaagtcttatttgtttctcacccatgagttagatttaggtaatagtattagtagagtccttagagaatcttaagaggtcatttactccacctctttcattttaaattggggtatccaaagcctgaagaggtggcctggccaatattgaccaaggtataactaaatatgagctagcatcttcttccttcttctcgctatcccttggctttaaaagatttagtacatgaagaataatgcattagcaaaaagctcctagtttgtgtttcccctttgtgtctccctgttggctttctgagacaacctgaattttgccaacaaaatatcgcagagggatttatattaattattttttagttagatgaatattatattcttcccatccaagtgagtgatttgctaggtttgtttagggagggaaaaagcaagaataatgtgagaagaatctaaatgcgaagttgattttgtgtggaaaactgtttattagtttccatcaggattttctgtttttatttttgagctatgagagtgcatgcagatttgaaaaattaggcttgcatagtcagaggggatcttcaattgttatatttgatacgtttacatgtatcattgttatcatatgtaaattatcatcatgtgagtcagatgtgaagtatgatttttgtcttttgttcaaatatttaaaatgataatacagttgagtggtaagactaataggtaccttatgcctaacatcactcattatatggtctaatgatgcttcctagcattgtgatttttacatgatccagccaaagagtaccaattctatgcaatagtgagactctaccctgtcaaccaaacagcattttttggtattttctgtcaacatcatttcttcacagggaaatttcaagttggagtgcttcgtttgctcacattcatgtcttgtttttgttactggtttgaagactaaaaggcacgggttcaaataagattggtctctttggttggagactatttctgggttcattcagttgttcaagaaacattagttaagcacctactgttgctagacactatgctagatactgaggataatgaaggtaagattgatatagtccctgccctcatggagcttatagtctcatgtggtcttagtgaaacaaagtctcaatttgcttttatactagaaataataaagaaagctgccttgctgtattcgatcagttaaaatcagcaactttgtgcttttgtatcagtaaaacatttagttctcaccttttgaaaatgcaaaccactgaagtgatttacagtctcctccatttttggctggagaggtgttctgtttctgtgagacatttttctaatttttgtggaacttcactttcctccttctttgcttatacgtgtttgttagattatattgcaaagaagtcaagttactgatatccagtattttacagaggaagatgactttcaaaactagtcatatttctgtagaggaggaagatttttaaaacctttatcattcagcatttgtattttatggatccccaggagaactaaaaaggagatgactctctaccatagtttggtttaaaaaaaaattactctgtcagttatttatttattatttaatactaaactccaaactgaagtggctctgaggtaaatcagatatgattttaatttaagtttctttattagcagatctataaatggaaggtgaccaatgtcactgcttctaaaatactgtcctaaacaacccagaagattttatttcagctcatgaatagctgttctaaatctgttgtatgttagacatactatgaactacctcttcacttattatggggaagtttccttaataaaagtgtgacgattaaa

SEQ ID NO: 201007 - DNA, 2978 bp, Homo sapiens
  Payload ID: 19675
  Gene Name: zinc finger and BTB domain containing 3
  Uniprot ID: Q9H5J0
  ENST ID: ENST00000394807
  CDS Start-End: 127-1851
aattaaagctgagaaggtgggaaggggcggagctcgccctgtggctgctcggtggtgggtgaggtatcagctttctccgctagttcccaccctggtagtccttagcccctggaatgcgtgagggagatgcttagggagttctcgaagtggggcgtagaggcatcgcctggcaaggcctgggagcgaaaaagatctctacttcgtggagccgttggacgctaccggggagccactggtggggaccttttttgggccccctttccttcgtggggtactatggagttcccagaacacagtcagcagctgctgcagagcctccgggagcagcggtcccagggtttcctttgtgactgcaccgtgatggtgggtagtacccagttcttggcccatcgggctgtgctggcctcctgcagcccattcttccagcttttctacaaggagcgggaattggacaagagggatctggtgtgtattcacaatgaaattgtcacagccccagcctttgggctgcttctggactttatgtatgctggccagctgaccctgagaggggatacccctgtggaggatgtgctggcagctgccagctacttgcacatgaatgacatcgtcaaggtgtgtaagcggcggcttcaagcccgggccctggcagaggcagacagtaccaagaaggaggaggaaaccaactcacagcttcctagtttggagtttttgtctagtacttcccgtggcacccaaccttcgttggcatctgctgagacatcaggccactggggcaaaggggaatggaaaggctctgctgctccctcacctactgtccgtcctccagatgagccaccaatgtctagtggggctgacactacacagcctggcatggaggttgacgcaccacatctgcgggcacctcatccaccagtggctgatgtctctcttgccagccctagtagctccactgagaccattcctacaaactacttctcttctggcatctcagcagtttcattggagccactgccatctcttgatgtgggtcctgagagtctgagggtggtggaaccaaaggatcctggaggaccactgcaaggcttctatcccccagcctcagccccaacgtcagccccagcccctgtctcagctccagttccatcccaggctccagccccagctgaagctgagctggtccaggtgaaagttgaagctattgtgatctctgatgaagagactgatgtgtcagatgaacagcctcagggtcctgagagagctttcccatctggaggagcagtgtatggggcacagccctcccagccagaggcttttgaagacccaggggcagcaggactggaggaggtggggccaagtgaccacttcctgccaacagaccctcatctaccctaccatctgctgccaggtgcagggcagtatcatcgaggactggtgacctcacctctgcctgcacccgcatccctgcatgagccactttacctgtcttctgagtacgaagcagctccaggaagctttggggtttttactgaggatgttcccacctgcaagacatgtgggaagaccttctcatgctcttacacactacggcgacatgccacggtgcacacacgtgagcgaccctatgagtgccgctactgcctgcggagctacacgcagtcaggggacctctaccgccacatccgcaaggctcacaatgaggacctggccaaacgcagcaaaccagatccagaagtgggaccccttctaggggtgcagcctctccctggctccccaacagcagacagacagagcagcagtggtggagggccacctaaagattttgtattggccccaaaaactaacatctaagggagcatgagctgatgctaggctgctcttaccatccttagatggcagctcagaaggttggtggcaccttatcacccctgctgggtgacaagaataaaggctctgcccaggctgaaagttcctacccttttttttttttaatcttttatttttttgagacagagtctcactctgtcacccagactggagtgcagtggcgcgatctcggctcactgcaagctcagcctccccgattcacgccattctcctgcctcagcctcccgagtagctgggactacaggcgcctatcaccatgcctggctaattttttttgatttttagtagagacagggtttcaccgtgttagccaggatggtctcgatcttctgacagatctgacctcgtgatccgcccatctccacctcccgcagtgctgggattacaggcatgagccaccgcgcccagctgcctttttttttttgagtcttgctctgtcactgaggctggagtgcagtggcgcaatttcagctcactgcaacctctgcctcccaggttcaagcgattcctttttttttttttttttttgagacagagtctcactctgtcccccaggctggagtgcagtggcgcgatcttggcccaccacgcccgcctaattttttgtattttttagtagagacggggtttcaccgtgttagtcaggatggtctcgatctcctgacctcgtgatccacccgcctcagcctcccaaagtgctgggattacaggcttgagccaccgtgcctggcctcaagcgattctcttaactcagcctcttgagtagctgggattacaggaacgcgccaccacgcccagctaattcctgtatttttagtagagacagggtttcaccatgttggccaggctggtctcaaattcctgaccccaggtgatctgcccaccttggccttaaaaagtgctgggattaaaggcgtgagccaccatgcccagcctcctacccttttctttgcccagccagataagcaggactttatggggcaaagcctatgtcagctctctccaagggcactgggaattttcctgaggtgtaatcgcttctcactgtatgttctggaacataaagctagcaatgaaggtatttctttgaa

SEQ ID NO: 201008 - DNA, 432 bp, Homo sapiens
  Payload ID: 19675
  Gene Name: zinc finger and BTB domain containing 3
  ENST ID: ENST00000527994
  CDS Start-End: 86-432
gagctcgccctgtggctgctcggtggtgggtgagggagccactggtggggaccttttttgggccccctttccttcgtggggtactatggagttcccagaacacagtcagcagctgctgcagagcctccgggagcagcggtcccagggtttcctttgtgactgcaccgtgatggtgggtagtacccagttcttggcccatcgggctgtgctggcctcctgcagcccattcttccagcttttctacaaggagcgggaattggacaagagggatctggtgtgtattcacaatgaaattgtcacagccccagcctttgggctgcttctggactttatgtatgctggccagctgaccctgagaggggatacccctgtggaggatgtgctggcagctgccagctacttgcacatgaatgacatcgtcaaggtgtgtaa

SEQ ID NO: 201009 - DNA, 490 bp, Homo sapiens
  Payload ID: 19675
  Gene Name: zinc finger and BTB domain containing 3
  ENST ID: ENST00000530112
  CDS Start-End: 1-10
taacatctaagggagcatgagctgatgctaggctgctcttaccatccttagatggcagctcagaaggttggtggcaccttatcacccctgctgggtgacaagaataaaggctctgcccaggctgaggcaggagaattgcttgaacccgggaggcggaggttgcagtgagccgagatcacgccattgcactccaaccctgggtgacagtgcgagactccatctcaaaaaagaaaaaaagaaaagggggaaaatgacaagtaaatattcttctctctttttgagtctgtgtcatattcagcactgtgaacccttaccagcaagtgactatttttgagttacaggaaggaaaggtgagcagccatgtggctaaagaaagctccttaactaggacatatgggaagcaaaagatggttaacatttttctgctgaatgaattctacattctttcacattctttgtgttgaaataaacttctagcttatctttcaaa

SEQ ID NO: 201010 - DNA, 1960 bp, Homo sapiens
  Payload ID: 19676
  Gene Name: zinc finger and BTB domain containing 32
  Uniprot ID: Q9Y2Y4
  ENST ID: ENST00000262630
  CDS Start-End: 211-1674
gccgtcatctctaagaaacaaccataccactgaatgctactgtgtacttacaaaccacactcatattcgtcacgtcatttcatcttcacccccacctccaaatgaggcttgaaatgagatgagatgttcctccctcccctttcaaccatggacctcacactgtggacttcctcttagagcctctgagttaggtacccaagccaaggcacaatgtccctgccccccataagactgcccagcccctatggctctgatcggctggtacagctagcagccaggctccggccagcactctgtgatactctgatcaccgtagggagccaggagttccccgcccacagcctggtgctagcaggtgtcagccagcagctgggccgcaggggccagtgggctctgggagaaggcatcagcccttctacctttgcccagctcctgaactttgtgtatggggagagtgtagagctgcagcctggagagctaaggccccttcaggaggcggccagggccttgggagtgcagtccctggaagaggcatgctggagggctcgaggggacagggctaaaaagccagatccaggcctgaagaaacatcaggaggagccagagaaaccctcaaggaatcctgagagagaactgggggaccctggagagaagcagaaaccagaacaggtttctagaactggtgggagagaacaggagatgttgcacaagcactcgccaccaagaggcagacccgagatggcaggagcaacgcaggaggctcagcaggaacagaccaggtcaaaggagaaacgcctccaagcccctgttggccaaaggggagcagatgggaagcatggagtgctcacgtggttgagggaaaatccagggggctctgaggaaagtctgcgcaagctccctggcccccttcccccagcaggctccctgcaaaccagcgtcacccctaggccctcgtgggctgaggccccttggttggtggggggccagcctgccctgtggagcatcctgctgatgccgcccagatatggcattcccttctaccatagcacccccaccactggagcctggcaggaggtctggcgggaacagaggatcccactgtccctaaatgcccccaaagggctctggagccagaaccagttggcctcctccagccctaccccaggttccctcccccagggccccgcacagctcagccctggggagatggaagagtctgatcaggggcacacaggcgcacttgcaacctgtgcgggtcatgaggacaaggcaggctgcccacctcgcccgcaccctcccccggcccctcctgctcggtctcggccctatgcgtgctctgtctgtggaaagaggttttcactcaagcatcagatggagacgcactaccgagtccacacaggagagaagcccttctcctgtagcctttgtcctcagcgctcccgggacttctcggccatgaccaagcacctgcggacacacggggccgctccgtaccgctgctccctgtgcggggccggctgtcccagcctggcctccatgcaggcgcacatgcgcggtcactcgcccagccaactcccgcccggatggaccatccgctccaccttcctctactcctcctcgaggccgtctcggccctcgacctctccctgttgtccttcttcctccaccacctgacggggtgtcggtagcgtcttagccaagagtccaattaaagaacgaaaagcgggccggctcggcttctgacctggcaccgctgctacggcggcctagcaaattccgccccagaagcgccccaggaagggcgccgagtgccctctcctggacgatcgcgggtcgcagaagcccaggccagcgagccctacagagtgaggacactgaagtgtgcaggagcgaaggttaacagtaggggagattgtcgatctcatcaccataataaagagtttcctgtgccctcccttca

SEQ ID NO: 201011 - DNA, 2068 bp, Homo sapiens
  Payload ID: 19676
  Gene Name: zinc finger and BTB domain containing 32
  Uniprot ID: Q9Y2Y4
  ENST ID: ENST00000392197
  CDS Start-End: 319-1782
ggcctcgctccattccccacttttaacggtcactcggccttaagccgtcctgggtgtatgtgaggctgaaagggaaggaggaacagggtctgggccgctgtgtgctctgccgtcatctctaagaaacaaccataccactgaatgctactgtgtacttacaaaccacactcatattcgtcacgtcatttcatcttcacccccacctccaaatgaggcttgaaatgagatgagatgttcctccctcccctttcaaccatggacctcacactgtggacttcctcttagagcctctgagttaggtacccaagccaaggcacaatgtccctgccccccataagactgcccagcccctatggctctgatcggctggtacagctagcagccaggctccggccagcactctgtgatactctgatcaccgtagggagccaggagttccccgcccacagcctggtgctagcaggtgtcagccagcagctgggccgcaggggccagtgggctctgggagaaggcatcagcccttctacctttgcccagctcctgaactttgtgtatggggagagtgtagagctgcagcctggagagctaaggccccttcaggaggcggccagggccttgggagtgcagtccctggaagaggcatgctggagggctcgaggggacagggctaaaaagccagatccaggcctgaagaaacatcaggaggagccagagaaaccctcaaggaatcctgagagagaactgggggaccctggagagaagcagaaaccagaacaggtttctagaactggtgggagagaacaggagatgttgcacaagcactcgccaccaagaggcagacccgagatggcaggagcaacgcaggaggctcagcaggaacagaccaggtcaaaggagaaacgcctccaagcccctgttggccaaaggggagcagatgggaagcatggagtgctcacgtggttgagggaaaatccagggggctctgaggaaagtctgcgcaagctccctggcccccttcccccagcaggctccctgcaaaccagcgtcacccctaggccctcgtgggctgaggccccttggttggtggggggccagcctgccctgtggagcatcctgctgatgccgcccagatatggcattcccttctaccatagcacccccaccactggagcctggcaggaggtctggcgggaacagaggatcccactgtccctaaatgcccccaaagggctctggagccagaaccagttggcctcctccagccctaccccaggttccctcccccagggccccgcacagctcagccctggggagatggaagagtctgatcaggggcacacaggcgcacttgcaacctgtgcgggtcatgaggacaaggcaggctgcccacctcgcccgcaccctcccccggcccctcctgctcggtctcggccctatgcgtgctctgtctgtggaaagaggttttcactcaagcatcagatggagacgcactaccgagtccacacaggagagaagcccttctcctgtagcctttgtcctcagcgctcccgggacttctcggccatgaccaagcacctgcggacacacggggccgctccgtaccgctgctccctgtgcggggccggctgtcccagcctggcctccatgcaggcgcacatgcgcggtcactcgcccagccaactcccgcccggatggaccatccgctccaccttcctctactcctcctcgaggccgtctcggccctcgacctctccctgttgtccttcttcctccaccacctgacggggtgtcggtagcgtcttagccaagagtccaattaaagaacgaaaagcgggccggctcggcttctgacctggcaccgctgctacggcggcctagcaaattccgccccagaagcgccccaggaagggcgccgagtgccctctcctggacgatcgcgggtcgcagaagcccaggccagcgagccctacagagtgaggacactgaagtgtgcaggagcgaaggttaacagtaggggagattgtcgatctcatcaccataataaagagtttcctgtgccctcccttca

SEQ ID NO: 201012 - DNA, 1733 bp, Homo sapiens
  Payload ID: 19676
  Gene Name: zinc finger and BTB domain containing 32
  ENST ID: ENST00000481182
  CDS Start-End: 127-1035
gtcctggaagaagctacaagcggcttgaaatgagatgagatgttcctccctcccctttcaaccatggacctcacactgtggacttcctcttagagcctctgagttaggtacccaagccaaggcacaatgtccctgccccccataagactgcccagcccctatggctctgatcggctggtacagctagcagccaggctccggccagcactctgtgatactctgatcaccgtagggagccaggagttccccgcccacagcctggtgctagcaggtgtcagccagcagctgggccgcaggggccagtgggctctgggagaaggcatcagcccttctacctttgcccagctcctgaactttgtgtatggggagagtgtagagctgcagcctggagagctaaggccccttcaggaggcggccagggccttgggagtgcagtccctggaagaggcatgctggagggctcgaggggacagggctaaaaagccagatccaggcctgaagaaacatcaggaggagccagagaaaccctcaaggaatcctgagagagaactgggggaccctggagagaagcagaaaccagaacaggtttctagaactggtgggagagaacaggagatgttgcacaagcactcgccaccaagaggcagacccgagatggcaggagcaacgcaggaggctcagcaggaacagaccaggtcaaaggagaaacgcctccaagcccctgttggccaaaggggagcagatgggaagcatggagtgctcacgtggttgagggaaaatccagggggctctgaggaaagtctgcgcaagctccctggcccccttcccccagcaggctccctgcaaaccagcgtcacccctaggccctcgtgggctgaggccccttggttggtggggggccagcctgccctgtggagcatcctgctgatgccgcccagatatggcattcccttctaccatagcacccccaccactggagcctggcaggaggtctggcgggaacagaggcgcacttgcaacctgtgcgggtcatgaggacaaggcaggctgcccacctcgcccgcaccctcccccggcccctcctgctcggtctcggccctatgcgtgctctgtctgtggaaagaggttttcactcaagcatcagatggagacgcactaccgagtccacacaggagagaagcccttctcctgtagcctttgtcctcagcgctcccgggacttctcggccatgaccaagcacctgcggacacacggggccgctccgtaccgctgctccctgtgcggggccggctgtcccagcctggcctccatgcaggcgcacatgcgcggtcactcgcccagccaactcccgcccggatggaccatccgctccaccttcctctactcctcctcgaggccgtctcggccctcgacctctccctgttgtccttcttcctccaccacctgacggggtgtcggtagcgtcttagccaagagtccaattaaagaacgaaaagcgggccggctcggcttctgacctggcaccgctgctacggcggcctagcaaattccgccccagaagcgccccaggaagggcgccgagtgccctctcctggacgatcgcgggtcgcagaagcccaggccagcgagccctacagagtgaggacactgaagtgtgcaggagcgaaggttaacagtaggggagattgtcgatctcatcaccataataaagagtttcctgtgccctcccttca

SEQ ID NO: 201013 - DNA, 469 bp, Homo sapiens
  Payload ID: 19676
  Gene Name: zinc finger and BTB domain containing 32
  ENST ID: ENST00000426659
  CDS Start-End: 257-469
ccgtcctgggtgtatgtgaggctgaaagggaaggaggaacagggtctgggccgctgtgtgctctgccgtcatctctaagaaacaaccataccactgaatgctactgtgtacttacaaaccacactcatattcgtcacgtcatttcatcttcacccccacctccaaatgagcacccccaccactggagcctggcaggaggtctggcgggaacagaggttccctcccccagggccccgcacagctcagccctggggagatggaagagtctgatcaggggcacacaggcgcacttgcaacctgtgcgggtcatgaggacaaggcaggctgcccacctcgcccgcaccctcccccggcccctcctgctcggtctcggccctatgcgtgctctgtctgtggaaagaggttttcactcaagcatcagatggagacgcactaccgagtccacacaggagagaagcccttctcctgt

SEQ ID NO: 201014 - DNA, 5211 bp, Homo sapiens
  Payload ID: 19677
  Gene Name: zinc finger and BTB domain containing 33
  Uniprot ID: Q86T24
  ENST ID: ENST00000326624
  CDS Start-End: 229-2247
gcctttggcttcagcgcttcgcccccgcgctgtgccctctgtcggcggcgtggggcagctgtagcagcgttggcggcaggaggcggcggccgcgtcgacgtcgacccagactggagcgacgtttaaagaaggggcagaatcgctggggagtgcggcttcttcttgttgggggactcccagccttccgcgcgtccggaggaggagaagcggcggcgccgggaagcaggcatggagagtagaaaactgatttctgctacagacattcagtactctggcagtctgctgaactccttgaatgagcaacgtggccatggactcttctgtgatgttaccgttattgtggaagaccgaaaattccgggctcacaagaatattctttcagcttctagtacctacttccatcagctcttctctgttgctgggcaagttgttgaactgagctttataagagcagagatctttgcagaaattctcaattatatctatagttctaaaattgttcgtgttagatcagatttgcttgatgagttaattaaatcagggcagttattaggagtgaaatttatagcagagcttggtgtcccattgtcacaggttaaaagcatctcaggtacagcgcaggatggtaatactgagcctttacctcctgattctggtgacaagaaccttgtaatacagaaatcaaaagatgaagcccaagataatggggctactataatgcctattataacagagtctttttcattatctgccgaagattatgaaatgaaaaagatcattgttaccgattctgatgatgatgatgatgatgtcattttttgctccgagattctgcccacaaaggagactttgccgagtaataacacagtggcacaggtccaatctaacccaggccctgttgctatttcagatgttgcacctagtgctagcaataactcgccccctttaacaaatatcacacctactcagaaacttcctactcctgtgaatcaggcaactttgagccaaacacaaggaagtgaaaaattgttggtatcttcagctccaacacatctgactcccaatattattttgttaaatcagacaccactttctacaccaccaaatgtcagttcttcacttccaaatcatatgccctcttcaatcaatttacttgtgcagaatcagcagacaccaaacagtgctattttaacaggaaacaaggccaatgaagaggaggaggaggaaataatagatgatgatgatgacactattagctccagtcctgactcggccgtcagtaatacatctttggtcccacaggctgatacctcccaaaataccagttttgatggatcattaatacagaagatgcagattcctacacttcttcaagaaccactttccaattccttaaaaatttcagatataattactagaaatactaatgatccaggcgtaggatcaaaacatctaatggagggtcagaagatcattactttagatacagctactgaaattgaaggcttatcgactggttgcaaggtttatgcaaatatcggtgaagatacttatgatatagtgatccctgtcaaagatgaccctgatgaaggggaggccagacttgagaatgaaataccaaaaacgtctggcagcgagatggcaaacaaacgtatgaaagtaaaacatgatgatcactatgagttaatagtagatggaagggtctattatatctgtattgtatgcaaaaggtcatatgtctgtctgacaagcttgcggagacattttaacattcattcttgggagaagaagtatccgtgccgttactgtgagaaggtatttcctcttgcagaatatcgcacaaagcatgaaattcatcacacaggggagcgaaggtatcagtgtttggcctgtggcaaatctttcatcaactatcagtttatgtcttcacatataaagtcagttcatagtcaagatccttctggggactcaaagctttatcgtttacatccatgcaggtctttacaaatcagacaatatgcatatctttccgatagatcaagcactattcctgcaatgaaggatgatggtattgggtataaggttgacactggaaaagaacctccagtagggaccactacatctactcagaacaagccaatgacctgggaagatatttttattcagcaggaaaatgattcaatttttaaacaaaatgtaacagatggcagtactgagtttgaatttataataccagagtcttactaaactcctttgaaatactagaaagttttgttttggatgatggggcaggggtttcagaagatctgtaaaacaaattaaggtgcgaacaagttaatttgatctgccacattatctgaaggaagtgtagtgggatttttgttgataatttttagaagcaaattttcctgaaagttttgagtagaggtgagaccccctccccaagtatctgtttatatagttagttttcagctcatttaaaagaggcaaaaattaaaagcttggagagatagtttcctgaatagaatttgaagcagtctgaatgttctttgaaaataactggagttattagcataccctagtacatcttacagctttccccttccatgttagcactttactgctgaattctcaattttcttaacattgagacaataaatgtgtgttttgtcttgtatatggcataaagagtaaataagttttagagttgttctggaaaatgtcagaataagtcagtacttgggttgtgtaatctgctagtccaagcgaacagcaacctcctgctaccctccctctatgaaaatagccatgcagacaagtctctcatctgaagaacaaattagatttagctaattagaattaatcctggctttcattgccatagtctgtaaaagactttggtggctagaccactttataccttcgcagtgtggtctctgggggcaaaaaactaatgaaaacaatctctgtaatggcagataggaggagatgaaaagttctgttgcatggatttttaattctctggctaccacatagtagagaatggaatgaagatttccttttggcttcttaaggttaaaaatattcccatgaacatgaaaattttcaaattttgaatctgaaagccaccaaatgtatctttatgtataaatccttgtaaatgatagattccatgggtgagactttacatattttgggtgggaggctactggcatatatttttaaatgttcatattgcgtagaatctccactaggaagtctttatttgaaatagttgaatcagtgatctagtattttcctttcggcaagatttgttaggtttttaccccttctaaaataagttttattccatctgcaaattgctgcaatattatagtaatcagaaactacataaggaatgttatataggcttgtcagttcccatttttcttgacaacaataaataccacttttaaaaatgacacatatttaaacacttagaaaataaagttaacacttactgaagtgctagtactaaactgtgctagtactaaaagaaaacaggttggaacatacatatagcctagcatttataacagaattgttgaacgtctgtaaatgattttttttttttttgcaaaggaaaaaattgatactggaaaagattgttgtgcatagttattagtcatttgtaaccttgcttaagtatttcttagtccaacatagatattttctttctcctgaccatgtattttaaaatatagtctatttcttgactttgaacttaaagctttaatcataatttctcatgtatacatcgttcttctgatggtaagctggatttgaaggtagtggtttcagtgtttcttaagttggtagctgagggtatcaggcatcagttcatgcaataatacaagaaaaaaaatcctttgcttgccaagaggtagagtgatgtgcatttatctgttttctgttctgtaagtctagaccttcaaaccatttgtaaactaacccctgggaaatttgaaattacctgataacttaagactctgtgatctctggaatcaccatatgtttcttttttgtgtagatattaataacattactctttgactatagtgtgcactctgaaatgtactcagtgaaaatttgttttgagtttcattaatgctatttcaccagttagacataattacttctaccgatgtgaatgatacggatgccggcagagcttccagatctttcagactcaactgctaggtcaattagtttgtcataataaaacttggcagattctacaagtctattatgacaaaccaggaactaattctataatggaaaactatccattctgaataataggtatgtaattatttgctgctgctgctgtgctctgtaaattctgaatatgacatttaaactctgtgcctactaaaggtatcttctggagtttttgggaggagagaaactggaaaattaaattgtatttttgccagaagactcttacttgcatgtgtctcagggtcttcagtttttctataagtttccatatccaaagttcagaattcatgtgaaatacttctttggggcaaaagtccttcattcctggtatttattggattggaaatctgtagcaagatgctgtttaaaattaccatattgtttttttatcttatacttagctctctggctattgaacttccttttcttgtttgaagttagcttcaaatttgctcctatgctaaattacctgtaaatattctggataggaactacttgaaatagtaatttgttaaaagatatgacaaaatgaaaatgcttaaactacagaaatttaaaaatgccataacaatcttgcgagactaactttaaaatatactttaaatgattattatgattttggtggtaacgatcccccacacacaaccactatgaagaaataatgccgcatttttcccccattgtaccaaaaagataaaaaaatggtaaacactgatcaaggtattttgtattgtcaaggcatgcatattctaaagaattaaatgctaacttaacagcactggctttctggctggtcaactatatgaaaccttgttcattcctccgagtactgtaatgttcacacttgtacaatcttccctgtcatgactttaagttctacttttcattaaccatggcctgatattagttcttagagcttcttgtggcaaaaataaaatgatttaattctga

SEQ ID NO: 201015 - DNA, 2346 bp, Homo sapiens
  Payload ID: 19677
  Gene Name: zinc finger and BTB domain containing 33
  Uniprot ID: Q86T24
  ENST ID: ENST00000557385
  CDS Start-End: 328-2346
tttggcttcagcgcttcgcccccgcgctgtgccctctgtcggcggcgtggggcagctgtagcagcgttggcggcaggaggcggcggccgcgtcgacgtcgacccagactggagcgacgtttaaagaaggggcagaatcgctggggagtgcggcttcttcttgttgggggactcccagccttccgcgcgtccggaggaggagaagcggcggcgccgggaagcagtgtctgttgacttcacttggcactgtttaacattccacctctggaaattgtaaagatggagagatgaggggaagggacaaggggatgaagaaagaggaaagggcatggagagtagaaaactgatttctgctacagacattcagtactctggcagtctgctgaactccttgaatgagcaacgtggccatggactcttctgtgatgttaccgttattgtggaagaccgaaaattccgggctcacaagaatattctttcagcttctagtacctacttccatcagctcttctctgttgctgggcaagttgttgaactgagctttataagagcagagatctttgcagaaattctcaattatatctatagttctaaaattgttcgtgttagatcagatttgcttgatgagttaattaaatcagggcagttattaggagtgaaatttatagcagagcttggtgtcccattgtcacaggttaaaagcatctcaggtacagcgcaggatggtaatactgagcctttacctcctgattctggtgacaagaaccttgtaatacagaaatcaaaagatgaagcccaagataatggggctactataatgcctattataacagagtctttttcattatctgccgaagattatgaaatgaaaaagatcattgttaccgattctgatgatgatgatgatgatgtcattttttgctccgagattctgcccacaaaggagactttgccgagtaataacacagtggcacaggtccaatctaacccaggccctgttgctatttcagatgttgcacctagtgctagcaataactcgccccctttaacaaatatcacacctactcagaaacttcctactcctgtgaatcaggcaactttgagccaaacacaaggaagtgaaaaattgttggtatcttcagctccaacacatctgactcccaatattattttgttaaatcagacaccactttctacaccaccaaatgtcagttcttcacttccaaatcatatgccctcttcaatcaatttacttgtgcagaatcagcagacaccaaacagtgctattttaacaggaaacaaggccaatgaagaggaggaggaggaaataatagatgatgatgatgacactattagctccagtcctgactcggccgtcagtaatacatctttggtcccacaggctgatacctcccaaaataccagttttgatggatcattaatacagaagatgcagattcctacacttcttcaagaaccactttccaattccttaaaaatttcagatataattactagaaatactaatgatccaggcgtaggatcaaaacatctaatggagggtcagaagatcattactttagatacagctactgaaattgaaggcttatcgactggttgcaaggtttatgcaaatatcggtgaagatacttatgatatagtgatccctgtcaaagatgaccctgatgaaggggaggccagacttgagaatgaaataccaaaaacgtctggcagcgagatggcaaacaaacgtatgaaagtaaaacatgatgatcactatgagttaatagtagatggaagggtctattatatctgtattgtatgcaaaaggtcatatgtctgtctgacaagcttgcggagacattttaacattcattcttgggagaagaagtatccgtgccgttactgtgagaaggtatttcctcttgcagaatatcgcacaaagcatgaaattcatcacacaggggagcgaaggtatcagtgtttggcctgtggcaaatctttcatcaactatcagtttatgtcttcacatataaagtcagttcatagtcaagatccttctggggactcaaagctttatcgtttacatccatgcaggtctttacaaatcagacaatatgcatatctttccgatagatcaagcactattcctgcaatgaaggatgatggtattgggtataaggttgacactggaaaagaacctccagtagggaccactacatctactcagaacaagccaatgacctgggaagatatttttattcagcaggaaaatgattcaatttttaaacaaaatgtaacagatggcagtactgagtttgaatttataataccagagtcttactaa

SEQ ID NO: 201016 - DNA, 6564 bp, Homo sapiens
  Payload ID: 19678
  Gene Name: zinc finger and BTB domain containing 34
  ENST ID: ENST00000319119
  CDS Start-End: 86-1600
cggggactggcctggcgccggcggcggcggagggggcgccgcgggcgggcgatgtgagcgcggcgctctggacagagtacgcttcatgtcagtagaaatggacagcagcagttttattcagtttgatgtgcccgagtacagcagcaccgttctgagccagctaaacgaactccgcctgcaggggaaactatgtgacatcattgtacacattcagggtcagccattccgagcccacaaagcagtccttgctgccagctccccatatttccgggaccattcagcgttaagtaccatgagtggcttgtcaatatcagtgattaaaaatcccaatgtgtttgagcagttgctttctttttgttacactggaagaatgtccttgcagctgaaggatgttgtcagttttctgactgcagccagctttcttcagatgcagtgtgtcattgacaagtgcacgcagatcctagagagcatccattccaaaatcagcgttggagatgttgactctgttaccgtcggtgctgaagagaatcccgagagtcgaaacggagtgaaagacagcagcttctttgccaacccagtggagatctctcctccatattgctctcagggacggcagcccaccgcaagcagtgacctccggatggagacgacccccagcaaagctttgcgcagccgcttacaggaggaggggcactcagaccgcgggagcagtgggagcgtttctgaatatgagattcagatagagggagaccatgagcaaggagacctattggtgagggagagccagatcaccgaggtgaaagtgaagatggagaagtccgaccggcccagctgttccgacagctcctccctgggtgacgatgggtaccacaccgagatggttgatggggaacaagttgtggcagtgaatgtgggctcctatggttctgtgctccagcacgcatactcctattcccaagcagcctcacagccaaccaatgtatcagaagcttttggaagtttgagtaattccagcccatccaggtccatgctgagctgtttccgaggagggcgtgcccgccagaagcgggctttgtctgtccacctgcacagtgacctgcagggcctggtgcagggctctgacagtgaagccatgatgaacaaccccgggtatgagagcagtccccgggagaggagtgcgagagggcattggtacccgtacaatgagaggttgatctgtatttactgtggaaagtccttcaaccagaaaggaagccttgataggcacatgcgactccatatgggaatcaccccctttgtgtgcaagttctgtgggaagaagtacacacggaaggaccaactggagtaccacatccggggccatacagatgataaaccattccgctgtgagatctgcgggaagtgctttccattccaaggtaccctcaaccagcacttgcggaaaaaccacccaggcgttgctgaagtcaggagtcgcattgagtcccccgagagaacagatgtgtacgtggaacagaaactagaaaatgacgcatcggcctcagagatgggcctagattcccggatggaaattcacacagtgtctgatgctcccgattaagatggtaaagaagtgcacccaaacaaagcacattaatcaatgcatatttgtgatttgctttgttgtaatctttggttttcccaaccatctggaaatctcttggtctcttggcagtttttctaaagtttctggatggaacacttcgttgtgtttatcctttcccctgccctccctccccgaaggagctcaaagcatgaagggcaacgcatccagggaaaacacaggctgacagtattcctctttggctgaactcttaatccaaaatctgccagtgatttagctatgccaactggttgaccctccattctctgccaagaggcatactctttctcattgtgtgcgctggcagcagtgcacttccacggagggagattaggatgccgtcagctgatacaaatgggtaaccttttctaatttaaaattccttttagggggtagttagacaatttatatatatatataataaaactattattatatatatagtatatatacattttcaaatttgattttattctggttgaggtgaatgtaagaggaatatataatttaatacaatgtgaacagggcttctgagtctatctcatccctacctaatatgttagggttttgccccttcatttcccttacaaaagaatgttagtaggtttatattaatcattgtgtccaaaagcaagcaaagcaaatcacagtgttcacagctctgcttcataacaaatacataaaccaaatgccataaaatttcttcaactctagttggaaaccgtttggaatttttgttagttgtccagcaggtaagctggatgacctgtggtgctgacctttttacatagtgtagtgttatattagccaaccccaaaggagcagtggttttcaaggtttttactggcctacaaatctaccttcattccgtactgtagaaacatacataccaggtaactaaatcgaatcactctctatcatgagttagtactcactcgcacttaaggaaagggatttgtagttctgtctacaaaattctccaagcagtgttgtggttttttttgtttttgttttttttctttctcttttcaaacagccagttcaggtgcacagcaactttttctacatgcagttcccagggaaactgcagaacttagaatttgtactttttgtaaagctatactctatgggaattgcaagcaatatatctatcttagtattgtgtgtgctaatgagagcctcagtggctcccccactctctcagtgtttcctgcttaaagaaccaacagtttaaaagccctctaagatactctgtgtgtcaccaaatctgtgtgtcaccattttttggtcatgtggtgctatttttgttaagtgtctttttaggtcagtatagttgtagaaaatgtgaaatctgatggtaataatgaattataattgttttcctctcttgagttcatagcttgaaaagagacctcaaaagcatgtgctggcaaacacgttactgtatgaaaacatacctgagtccatttgaataatgttttattagtactttcggaaatgtcttcagttctgtattgtgttcacatacacaaacaggctttacaagattgcttcggtactgtaaactctggcagagagtaattttgtaggcagtttggtggtgagtttgtgctgcaggctgcctgtgggatgtcagcgttctggtatctgcctgagaacctgggctctgagacgcacaaccagtgcacctccataggagaacagtgcagccacctaaaagaaaaacgaacgaaggaccagcctcagaggctagaagttaaaggaatacagaattagatgtttgctggttttctgtgcttttttggctcctaaaataccaatggtggatttgtttttgtttttgttttttgttttgagaaataaaaagtcattcaagccctttgtgtgtaatagcccccaggggtggcagctgtgcagtcgcatctctttggcacacaggatctgttcacgtgtgaactgctgcgctacacatcagtgttaactccctacagattacactctaatcccgctgctcccgaggagcggctttgctaaatcgggtatatagtatatgcctttttcctcgtcaaactgcctaagtaggggttcgttctctccctgaagcacttgttcaactcctgttaaagccgcgtgcctcaaggggaggctggaccccaagtgtttacccacttaaatatgttctggggtttcaggtaaatgtttgtgggtttttttttccttacatgaataagtttggttttgatttttttttaattgaatgcaaaaaatttgtgttgtgatacaaattaagtttgtgacaagaaatgcccaaatccaaggacataagaggtcaagctcagggaaggaacctccttttcactcaggcttggggcctccagcgaggtttccagagcattccatggtatgagagacagtgaggagggagggcacctggcgcgggcacttccagcgtcctggctcttggcattgtccgtcttaaccttatttacatggagttctttgtatttgtgaatctgtttaactggtttgagtttaccaaagagtgacttatccaaaattgtctttgacaaaaatatccattgctttgattgtacagttcaggttcaaacattgtaatgggactgttaaggggcagaaaattgattgagtttctctctaagaatcatgattccacattttgcaagttccacttgctcccattcgtgttgctaacactttaccctttccactgctcgcagtgttaagaatgaattctcaagccataacacagtactgtaaagttccgcagggcttcgagggaggcagcgcctaggccagcacggagctgtgtagcctctctgagcgttcgcactgtcatgcttcccaggggtgtgactggtgagagattaactccattcagatcgggcagcagcaattaattgtgccttgccgcatgaggatgtgtcaggaggattaacatgaccacagaaccgaaacattctctccctgaagttcacttcacgtctccgcagacgaagtacgctgtgtaactccttagagcaactctttttggaaagcaaagtccctatttctgtacagttttaggttaggtgtttcatttataacagatgcagaaatcaattaagataaagtgatatgtgaagaaatcttttacagtaaaatatatcctgaattcatataggcttgttcataattgagtctcttcttgagctaccttttcaatattagacaatgtgaagacagtgacagcgtccttttctagagatatttagcctgttattacaaactgtgaagacaaagaattttatacttttactaatgtttgtggttttaaacagttattttcattctaatcagttctctaccctctaatttctactaaagctgtaaatacatttagaaattatatttgtaaatacagtatatggagacaagttaattttttggtcagtggaaaaagcctcccaaccaattggccctgccttggcagttgtgttttttgttgttgttgttgttgttttagtttagtttttttttttaaacagcagaaaggatactgtcggttcactgttgagcagaatatactgtagaacgaaaatgataatttttaaatcttccagagcatgagtaaatgtcttttctaatgatagcaaatataaccaactctttgtttttcccttagcccagaccatatagacctgcgtattttgtgtgtggttttgtttttatttttgttcttacagcctagaccctaggaaaaatttgcaggaacacgaaacaagggctggggggaaaatcatctatgtgaatgagctttactttaaagagatcaatgtattttattttatcaactttttctcttagttactgtgatttttgttgttgttgtcctcgttattgttaaattctgtaatggtttcctgtgaagcctccactgaaagggactcaaatatgcaacacctaaactattttccaagggcacatgccccttgaatggtgcttctagactggtcagggttatttattaaattttatatatgaaagtattggggaattatgtaaattctttatatgaaactatctagttcataaatcatagatttcatattactcagtgcaactgaactaaaagttcagaaaagtcattcacattgttccaaatttgtaatggttgtcacatgtcacatgcgtctttttcagtaagtgccagagtgttcccactgtttctgcccagtgcttgacttctcggcccggaagagaacctgctttctctggtttccttcctgagtctggcacagacggggctattgtagttcttgatcaagtcctggagtcagccttgcctggctctccttgtagcagattcagtccacagacctcttgctgcccctcagtgacaagtatgctgtgaattcaacctttggacttgctgcccaagcctttggttgctgccctgactattgtaagaggtaaacttacctggtttgtttgagaatgaccattttcctaatgtgaaaaccatctctctcaccacttttattagtagggctaacatttttttccgttataaatggttgagcaatttgaatgacttaacacagtgtcattatcttgcaatataaactggtaacctcacaactccacacttcatcaccatatgaagtaaatgaagctagctaagcggatgctgtatcaactagtaacttgccattaaggattattttatagcatgaatttaagactatttattcaaatgatattttactcttgtattcactttgttttagatttgtgacatgaatatttcagtgctgcttaattttgttctgaattcttgtttcttgcttgtaaatggcttttttatggtataaataaagtcaatggacattgctgtttgtaaataaaaatgctgctagagcaaa

SEQ ID NO: 201017 - DNA, 6528 bp, Homo sapiens
  Payload ID: 19678
  Gene Name: zinc finger and BTB domain containing 34
  Uniprot ID: Q8NCN2
  ENST ID: ENST00000373452
  CDS Start-End: 65-1567
gaggagtcattggtgaatgatgcaaactctctctctccgcagagtacgcttcatgtcagtagaaatggacagcagcagttttattcagtttgatgtgcccgagtacagcagcaccgttctgagccagctaaacgaactccgcctgcaggggaaactatgtgacatcattgtacacattcagggtcagccattccgagcccacaaagcagtccttgctgccagctccccatatttccgggaccattcagcgttaagtaccatgagtggcttgtcaatatcagtgattaaaaatcccaatgtgtttgagcagttgctttctttttgttacactggaagaatgtccttgcagctgaaggatgttgtcagttttctgactgcagccagctttcttcagatgcagtgtgtcattgacaagtgcacgcagatcctagagagcatccattccaaaatcagcgttggagatgttgactctgttaccgtcggtgctgaagagaatcccgagagtcgaaacggagtgaaagacagcagcttctttgccaacccagtggagatctctcctccatattgctctcagggacggcagcccaccgcaagcagtgacctccggatggagacgacccccagcaaagctttgcgcagccgcttacaggaggaggggcactcagaccgcgggagcagtgggagcgtttctgaatatgagattcagatagagggagaccatgagcaaggagacctattggtgagggagagccagatcaccgaggtgaaagtgaagatggagaagtccgaccggcccagctgttccgacagctcctccctgggtgacgatgggtaccacaccgagatggttgatggggaacaagttgtggcagtgaatgtgggctcctatggttctgtgctccagcacgcatactcctattcccaagcagcctcacagccaaccaatgtatcagaagcttttggaagtttgagtaattccagcccatccaggtccatgctgagctgtttccgaggagggcgtgcccgccagaagcgggctttgtctgtccacctgcacagtgacctgcagggcctggtgcagggctctgacagtgaagccatgatgaacaaccccgggtatgagagcagtccccgggagaggagtgcgagagggcattggtacccgtacaatgagaggttgatctgtatttactgtggaaagtccttcaaccagaaaggaagccttgataggcacatgcgactccatatgggaatcaccccctttgtgtgcaagttctgtgggaagaagtacacacggaaggaccaactggagtaccacatccggggccatacagatgataaaccattccgctgtgagatctgcgggaagtgctttccattccaaggtaccctcaaccagcacttgcggaaaaaccacccaggcgttgctgaagtcaggagtcgcattgagtcccccgagagaacagatgtgtacgtggaacagaaactagaaaatgacgcatcggcctcagagatgggcctagattcccggatggaaattcacacagtgtctgatgctcccgattaagatggtaaagaagtgcacccaaacaaagcacattaatcaatgcatatttgtgatttgctttgttgtaatctttggttttcccaaccatctggaaatctcttggtctcttggcagtttttctaaagtttctggatggaacacttcgttgtgtttatcctttcccctgccctccctccccgaaggagctcaaagcatgaagggcaacgcatccagggaaaacacaggctgacagtattcctctttggctgaactcttaatccaaaatctgccagtgatttagctatgccaactggttgaccctccattctctgccaagaggcatactctttctcattgtgtgcgctggcagcagtgcacttccacggagggagattaggatgccgtcagctgatacaaatgggtaaccttttctaatttaaaattccttttagggggtagttagacaatttatatatatatataataaaactattattatatatatagtatatatacattttcaaatttgattttattctggttgaggtgaatgtaagaggaatatataatttaatacaatgtgaacagggcttctgagtctatctcatccctacctaatatgttagggttttgccccttcatttcccttacaaaagaatgttagtaggtttatattaatcattgtgtccaaaagcaagcaaagcaaatcacagtgttcacagctctgcttcataacaaatacataaaccaaatgccataaaatttcttcaactctagttggaaaccgtttggaatttttgttagttgtccagcaggtaagctggatgacctgtggtgctgacctttttacatagtgtagtgttatattagccaaccccaaaggagcagtggttttcaaggtttttactggcctacaaatctaccttcattccgtactgtagaaacatacataccaggtaactaaatcgaatcactctctatcatgagttagtactcactcgcacttaaggaaagggatttgtagttctgtctacaaaattctccaagcagtgttgtggttttttttgtttttgttttttttctttctcttttcaaacagccagttcaggtgcacagcaactttttctacatgcagttcccagggaaactgcagaacttagaatttgtactttttgtaaagctatactctatgggaattgcaagcaatatatctatcttagtattgtgtgtgctaatgagagcctcagtggctcccccactctctcagtgtttcctgcttaaagaaccaacagtttaaaagccctctaagatactctgtgtgtcaccaaatctgtgtgtcaccattttttggtcatgtggtgctatttttgttaagtgtctttttaggtcagtatagttgtagaaaatgtgaaatctgatggtaataatgaattataattgttttcctctcttgagttcatagcttgaaaagagacctcaaaagcatgtgctggcaaacacgttactgtatgaaaacatacctgagtccatttgaataatgttttattagtactttcggaaatgtcttcagttctgtattgtgttcacatacacaaacaggctttacaagattgcttcggtactgtaaactctggcagagagtaattttgtaggcagtttggtggtgagtttgtgctgcaggctgcctgtgggatgtcagcgttctggtatctgcctgagaacctgggctctgagacgcacaaccagtgcacctccataggagaacagtgcagccacctaaaagaaaaacgaacgaaggaccagcctcagaggctagaagttaaaggaatacagaattagatgtttgctggttttctgtgcttttttggctcctaaaataccaatggtggatttgtttttgtttttgttttttgttttgagaaataaaaagtcattcaagccctttgtgtgtaatagcccccaggggtggcagctgtgcagtcgcatctctttggcacacaggatctgttcacgtgtgaactgctgcgctacacatcagtgttaactccctacagattacactctaatcccgctgctcccgaggagcggctttgctaaatcgggtatatagtatatgcctttttcctcgtcaaactgcctaagtaggggttcgttctctccctgaagcacttgttcaactcctgttaaagccgcgtgcctcaaggggaggctggaccccaagtgtttacccacttaaatatgttctggggtttcaggtaaatgtttgtgggtttttttttccttacatgaataagtttggttttgatttttttttaattgaatgcaaaaaatttgtgttgtgatacaaattaagtttgtgacaagaaatgcccaaatccaaggacataagaggtcaagctcagggaaggaacctccttttcactcaggcttggggcctccagcgaggtttccagagcattccatggtatgagagacagtgaggagggagggcacctggcgcgggcacttccagcgtcctggctcttggcattgtccgtcttaaccttatttacatggagttctttgtatttgtgaatctgtttaactggtttgagtttaccaaagagtgacttatccaaaattgtctttgacaaaaatatccattgctttgattgtacagttcaggttcaaacattgtaatgggactgttaaggggcagaaaattgattgagtttctctctaagaatcatgattccacattttgcaagttccacttgctcccattcgtgttgctaacactttaccctttccactgctcgcagtgttaagaatgaattctcaagccataacacagtactgtaaagttccgcagggcttcgagggaggcagcgcctaggccagcacggagctgtgtagcctctctgagcgttcgcactgtcatgcttcccaggggtgtgactggtgagagattaactccattcagatcgggcagcagcaattaattgtgccttgccgcatgaggatgtgtcaggaggattaacatgaccacagaaccgaaacattctctccctgaagttcacttcacgtctccgcagacgaagtacgctgtgtaactccttagagcaactctttttggaaagcaaagtccctatttctgtacagttttaggttaggtgtttcatttataacagatgcagaaatcaattaagataaagtgatatgtgaagaaatcttttacagtaaaatatatcctgaattcatataggcttgttcataattgagtctcttcttgagctaccttttcaatattagacaatgtgaagacagtgacagcgtccttttctagagatatttagcctgttattacaaactgtgaagacaaagaattttatacttttactaatgtttgtggttttaaacagttattttcattctaatcagttctctaccctctaatttctactaaagctgtaaatacatttagaaattatatttgtaaatacagtatatggagacaagttaattttttggtcagtggaaaaagcctcccaaccaattggccctgccttggcagttgtgttttttgttgttgttgttgttgttttagtttagtttttttttttaaacagcagaaaggatactgtcggttcactgttgagcagaatatactgtagaacgaaaatgataatttttaaatcttccagagcatgagtaaatgtcttttctaatgatagcaaatataaccaactctttgtttttcccttagcccagaccatatagacctgcgtattttgtgtgtggttttgtttttatttttgttcttacagcctagaccctaggaaaaatttgcaggaacacgaaacaagggctggggggaaaatcatctatgtgaatgagctttactttaaagagatcaatgtattttattttatcaactttttctcttagttactgtgatttttgttgttgttgtcctcgttattgttaaattctgtaatggtttcctgtgaagcctccactgaaagggactcaaatatgcaacacctaaactattttccaagggcacatgccccttgaatggtgcttctagactggtcagggttatttattaaattttatatatgaaagtattggggaattatgtaaattctttatatgaaactatctagttcataaatcatagatttcatattactcagtgcaactgaactaaaagttcagaaaagtcattcacattgttccaaatttgtaatggttgtcacatgtcacatgcgtctttttcagtaagtgccagagtgttcccactgtttctgcccagtgcttgacttctcggcccggaagagaacctgctttctctggtttccttcctgagtctggcacagacggggctattgtagttcttgatcaagtcctggagtcagccttgcctggctctccttgtagcagattcagtccacagacctcttgctgcccctcagtgacaagtatgctgtgaattcaacctttggacttgctgcccaagcctttggttgctgccctgactattgtaagaggtaaacttacctggtttgtttgagaatgaccattttcctaatgtgaaaaccatctctctcaccacttttattagtagggctaacatttttttccgttataaatggttgagcaatttgaatgacttaacacagtgtcattatcttgcaatataaactggtaacctcacaactccacacttcatcaccatatgaagtaaatgaagctagctaagcggatgctgtatcaactagtaacttgccattaaggattattttatagcatgaatttaagactatttattcaaatgatattttactcttgtattcactttgttttagatttgtgacatgaatatttcagtgctgcttaattttgttctgaattcttgtttcttgcttgtaaatggcttttttatggtataaataaagtcaatggacattgctgtttgtaaataaaaatgctgctagagc

SEQ ID NO: 201018 - DNA, 19128 bp, Homo sapiens
  Payload ID: 19679
  Gene Name: zinc finger and BTB domain containing 37
  Uniprot ID: Q5TC79
  ENST ID: ENST00000367701
  CDS Start-End: 192-1703
agactttcctccaggggcttcctcactggggaattgccggaaagagcaaacaaaaaaggcgctggtgtaggctccaaaataaacacatctgaattcatgatggcatcgacagaggctcttattggattaaaagtttcaaaacaaacaataacgctttggaaaaagggttgaatgcaccctcaggcacgaccatggagaaaggtgggaacatacaattggagattcctgacttcagcaactctgtcctgagccatctaaaccagttgcgcatgcagggccgtctctgtgatattgtggtcaatgtgcaaggacaagcttttcgggctcacaaagtggtgctggctgccagctccccctatttccgggatcacatgtccttgaatgagatgagtacagtctccatttcagtcatcaagaaccctactgtttttgaacagctcctttctttctgttacacagggcggatatgcctgcaactggcagatatcatcagctacctaacagctgccagttttctgcaaatgcagcatattatagacaaatgtacacagatcctggagggcattcatttcaaaattaatgtggctgaggttgaagcagaattaagtcaaacaaggacaaagcatcaagagagacctccagagtctcacagggttacaccaaatctcaaccgctcccttagcccacgacataataccccaaagggaaaccggcgaggtcaggttagtgctgtgctggatatcagagagctaagtcctcctgaggagtccaccagccctcagatcattgaaccaagttctgatgtagagagccgggagcccattcttcggatcaaccgagcaggacagtggtatgtggagacaggagtggcggaccgtgggggtcggagtgatgatgaagttagagttcttggagcagtacacatcaaaactgaaaatctggaggagtggcttgggcctgagaatcagccttctggagaagatgggagtagtgcagaggaagtaacagccatggtgattgataccacaggccatggttctgtaggacaggaaaattatactttagggtcttcaggagccaaggtggctcggccaacaagcagtgaagttgacagatttagcccctccggcagtgttgttcccttgacagagagacacagagccagaagtgagtctcctgggagaatggatgagcctaagcaacccagctcccaggtagaagagtcagcaatgatgggagtaagtggctatgtggagtatctccgagagcaggaagtatctgagcggtggttccggtacaaccctcgtctcacctgcatctattgcgccaaatctttcaaccagaagggaagcctggaccgccacatgcgcctacacatggggatcacaccattcgtctgccgcatgtgtggcaagaagtatacccggaaagatcagctggagtatcatatccgcaagcacacaggcaacaagccctttcactgtcatgtctgtggcaaaagtttccccttccaggccatcttgaatcagcactttcgcaaaaaccaccctggctgtatacccctggaggggcctcacagcatctcccctgaaacaactgtcacatctcgaggacaagctgaggaagagtcaccttcacaggaagagacagttgctcctggggaagctgtccagggctctgtgtccaccactgggccagactgaaacatccagggggagggggctgaccctcttcccctatgagccataagcagccagcatcagagccatgggctgatacttagattcacaaaatgccacatcactaggccagaagatgctcccaagatgttgccaaactggaggatcagcaacttacacaaaagcactaaaggctcctcccttcttattgcccgcctcacactttggaaaataatcaagcaaatcaactttctaattcagggatcaacagccttggtttgttaactttataagaaaaaaggttttttaacaaaacgatgatgataaatggtcatttatctatcagtcatgtttgaacactgtactttggtccatatcatcttggtggctataattgcccggatctaaaaaatgcagcaggagcctcaaccatccgaagcagccaaccgcaagagaggaggtagtcatgatggtgatgaggaggagaaatttctcctcttccttccctggcataacatgcatttttgtgtttcaagaaaaaaatgaatactggtggttcttattttgaaaggttaggctttatctttcccctgactaggcatctaatactttgcctggttatttcatataatcagccatcttgaagcagtattctagtggacaacatcacctgaagcacttggcaactgggagtgaaatgagcagcaaagtgtatgcaataggtactgctacatttggggggcttgagtgttgtgttgaggaagaggagagcagggagggaagtgtttttatgttttgcaaatatcaaacagcacagagccgttctgcaacttcctgactggtatttgtaaaccatagtgctacacatccttgggtaatggctctagttcaggtgaattaatgtgttaggctgactaccaaagtttcatctagtctctttggctcctattttcacgttcagcaatattgtaatcaaaaatgtcactttccagtgaaatgagcctggattgtatttttaaatccacaggtctccatatttgataacttttatatgaagttttaaacatgttttttctgcagtattgtggttgaagaaattcaacactatggttcttactgcaaccacaatttcatttccttatacatatgtaatagtttatattttcaggcatatagaaggacctcacttaaaactatgtctcgggtctgcaaacctagtaattcataaaccaaccatcagcaaaccatagctggtgactccaagagctttgctttttaataatatactacagggcacttatcagaaaacatcatgcagaatcatgttgcaataaatgatcaaaggatcaattttggtcaggtttggttacttagtcattcctaagatttttaaaacttcaagggacccttttagtaattctgggtatttctaagattcttaatccagcactgagagaaagaacttagcaaacatgtagagctttggataccccgtctttcatgaagtgagagaaggaggaatattaagggatgccggcaaatagatgcttataacttacagtgcaagttgaaaaatctctagcttctgttgacggagcactagttgttggggttcttttaagtatgtaatggtttaagaaattgtttcagtgcagaggcatagatgactgtaaaagagatttggcagagggacaggttgtacctgcactggtgaaccatctgtgagaatgttagtcatgtgctcctttcctgagattgctttgtggtatgtgaaaaggtgggtagaaaagaaagaaatctctttgagataagaaattagaatgcaaagggtagatcttaagcaatctgagaattgtacatgtacataaagctgcaccctctcacaagagaaaggttattttatcttctgaaaaagcatagaaatgcatcttttatgggaagataatgatgctaccatttaataagagcctacccttaaaggcagcattgaaactgtattttgtctttagaagacatagactggtgcatcctccgctttagttagacaacagcatgataaggaaaaaactgtcttctaaagccatctttagggactggctgtgctctgtggcatagaaaaggtaaagttgaattagccaaaaatccttagggaaacaactggtaataaggttttcagtggacagattttgtcattactaaataggcagtgaggtgagaagtacagattatgctgctttggatggagcctttaagcctaccaaaaaacttttaagtccatcctacttttgagaaatagtatgctagaaagttctgtttttctttttcttcttttttatattttttagagactgtgtcttcctcttgtcacccaaaccagagtgcagtggtgcaatcatagctcactgtaatcttgaactcctaggctcaagtgattgacctgcctcagcctccaggtagctaggactataggcatgcaccaccatgtctagctaatttttaaatttttttgtagagacggtgtctctacaaaatttgcctaggttggtcttgaactcctggcctcaagtaatcctaccaccttgacctcccgaagtgctaggattacaggcatgagccagtgaacttggcctggagaaagaattctttgttgctttgttagtttcttagattatatgtgagaaaatggagctttttaaactattaccaaattttaaaggtgaagtgcagtaatttctgtaaagagaaactttgcagcatttgtcaattctccttccagggttagcaacaaacaaatgaggtagggactatctcattcatgtggaaatgctatgaatgtttggtgggtttcccctcccttttcttttcattcactttaaatagccttttcctatattgatactgtgaatagggtgcttcctggtcatctaggaccactttagcacaatcatgtttgctggttctctcaattggcctagccagagccacaaaattcatgaaaatttaaggcaggctagcttttaaacaaattaaaacttctgaaaacaatttcagctttttcgttaaaagagatgttgttattctaaataactgtccaagactcttacccacatacactgtgacattgtcctagttcttagctaacaacacattggtcataggagttactgatgttctatctacattaatgaacagctattggtgtatgcacagaggatacctcttaaggatgtactaaatggactttgtttggttgatgctgaaaattaattaccaaatcttaacttgcacgtgttaccttgtgaagggaactgcattagcaatgagagctacatcatcatgaagtactttaatgccatgaaattgcaaacactgggactgttttcatttattgagtggcacttagtagcaaaggagctatccagtattctcagcaaagaagagagacggaagtatattaatctattttcatactaagatgttcctttattctgtctgaactctaataccagtataaaatatagcattggcatgaacagttaatgctgtacttaggcagaaaggctccttctaatgacttgttctctctttactcagaaccgtatttacctctgaaccaagttgaattttattttatccaagttgcaaactaccccatgccatttttattataatagagggttaaatctaatctcaaatacataaaggtaaattagttcatagaggataaagtttgggaatgaagagagcagttaaggaaaattttattttttgtcattttttaaatgtttccagttccctctacatcagtgaaacagggttttccaaagatggtttgaagatagaaaaaactttttccccccgacttcatagttgacatctggtattggttggaattggtctggtggcagagtgaagtagggaacttcatttttttcttttttttcttaaaggcagggtctcactatgttgcccaggctggtctcaaactcctgggctcaagtggtcctccttcctcagcctcctgaggagctgggactacaggcgtgtgaccacacctggctgtaaatgtcattcttaatagctgaataatctttggtcaagaagtaacttttccagagttttagctgttacttgacattaattgggtttcttttaactggtgaaaactgtatttattttgtttgaccagactgtctaacttaaatgaaagcaatggataatggaaaggaaactgaacaaagacaaaagtcttcttcatcatagtgaaaggcatttaatcaggaagagttggaatcctggaagtttttctttttttcaggtacaagaggcatgatttttttctcttcctaaaatgtccttccccttatctgtgtacttattagttcaaggaataacaaatgagtcttaattgaacttagtctttggaaattgagctctttatttaggttatatgtgaaagagtttaaaatattgaaatactttggttgctaagcagatttagaaaagcaacaagcaattgtcgggcaaatccctaggtttgagaagatgtcctcagcaaaatatacccttaggacttacggaattagatcagggttcagcaaacagtagtttccaggccaaatgctgaggctacttgcttgtgtaaagaaaattataatggaatagggccacacttacttgtttaggtattgtttatgccttctttctactacaatggcaaagttgagtacttgtgacaaagatcacgtggctacaaagcttgaaaatatttactgtctggtacttgttagaaaaaatttgccaactccaagaaagaattacctcctaaagttgttactcatgacattttgcctttataatagtttggttgaagttttaaattcatgttgtcacatatacatgttttcttgaaagagtttgccaactttttctagatcctcttatcataactctttttgtgctccttcatgatttttttgtgctccttcatgattcccattactttaaaagcatttagaattggcctgttgtttgtccttgtcttaatggtgccggtattttaaagtttagttgtaagtaagttttgccattcctctgagttaacttgaactggtttgcataatggtgacaagaatgaattttttcccaagtggattaaaaactaatttcattatgaagaagtattttgattcatatccaaagtactgtttttctggattagaacccctaccttttccctttgcaatgtatcttaattttaacttctttaaacttactctgttccatgtagagcagtaaaaagccaagtttttcttccttttttcctggatgttttgaaacataatgaaacatctgaggatttcaaattctttttagacctatcttcccatttctgttattgtctataattcttctaaatacatattggaccattaacatgtttgctttgtgaatgttcattcttagtgttcagatagcctacttatactcgatgtgggaaaaatgggaaatgttagggggttcataaacagaaatccttgcaggaagccgggtgtgacagcagacacctataatcccagctacttgggagactgagctgagaggcccacttgaggccaggaatttaaggaccagcctgggcaacatagaccttatctctaaaacaaaaaaaaatccttgcaagaagagagaataattgcttcccatttggaaatgatatagggacttttgaattagatctatcttgacaaagttttctaggccatgctgatacagtatagggagtttgaatctgttgtgagcgctgtcaacatagacaaagttcaagtgagtaactagctttctataatagggactctcttcactaggtattttaaagttgctgctttctaattggatattaggaagttttatatgatataccctctgagtaatagataatcctcatctataaagttccagaatatttgcctaggttagatctcccctggcttagagcagttatacctatagtaacagtaggtttttgagattttggagtattacttttctgattaacctaggattctgattaacctggaaggtgggacttgtgaaagaaattggattttgttagcccagtgaatcatctgcatcccactctatttgaggtcttggtaatagatgtcaatttaaatatgcatctattgaaagcaatggagttttccaagcattatgacttccttgataattttcagtcttatcttttttcgtattttctagtctctttccctgtctttagtcttcttcctcttaaatggtgcttttcccagggccagtctttctactttctaagcaagcaggcttttttgttcaggataagccagagttagatattatgaatactttgaaacatctgaatatgttacattccaaagtatgtaattattgatagtagtatcaaaacctggaagatattggtgcagattattcagttttgctgtgtaggcaggctgtctttctcctcaactgtgacacagcagtgacttgagaaggcaaatattacttgaaacccccattatctttatagagggtacgtatataaattttcttacctgacatttttaccattatcaatatatcagtagctcacatcttaacatagaagaagcccattagctcaaatactggaaacttcaaacaaggaaataaattacaaaagcaaagcagttaatgaaaaaaacttgtctattgcctgcgtctttcatgtctactcaataggtcctgttgaggaggctagaatacaccatccggttaagaaaggggttgttttgttttgtttaagacagagtcttggtctgtcttccaggctggagtgcagtggctcaatcttggctcactgcaatctccacctccttggttcaagcaattcttgtgcctcagcctcccaaatagctgagattacaggcgtgtgccaccatgcccagctaatttttgtatttttagtagagatggggtttcaccatgttggccaggctggtcgtgaactcctggcctcaattgatcctcctgcttcggcctcccaaagtgctggacttagaggcatgaaccactgcacccagccccatttaagagagttttatattcagcatctcatatggcctacaccatgattttaatatactgtgaatcttaggatttcagttaatccataatgccaggagttaaggtatttcatgggaacatgtttcctcttctatgaaatcacctgtctgcagtgataggtaatgtataagagaatgtttcattaagtaaatattaagtactttttgataccagacaacatgcttgggatttgtataataaaactggttttagacatagtttagacatgatgtgtcttcctatacttgagagtcctaagcccacttggttggcgtctgggatgtattgcttttgaaaagcctgcactttttactgtagagataaaagatcaaaaaggggacagaattagctttattaagtgctttatcgtcataactgtggttaagacaataatactatgaggtaataacagtaatgttaaaaataactaactttttttgaatgcttactatgtgccaggcacagttctatgtgcttcacattgattaactcatctaatccttatgacaatcccatgagggtagataacatcctcattttagatgggaagaaacagacacaactgactcaggctaacactagagttgcctctagtaggtgtaattatatcatattttatagatgaggaaactgatgaacccaaggttacataactggtaaattacagagccaatatttaccaatcttgattccaaagcccagactatctgcatgatgtcatattgactccatttacttatcaagagttgaagttgactggaatatacagtagccaggaacagtactgctttttgtgaatgtgtaattcaagagtaagtgattagaaggttcttcaaaagctgatgcagttgatctctgagcagagttgaatagtgaatattttcagtggatattgcccactgattcaagggagtcacccgtgtggttaggtctaatagtgagtgaggtactatcaaggcaaaaattgaaagagttccagttacctattgctgtgtaacaaacttaattaaaattaagtaattttaattacttaaaatcaaccatttcctatatcatggttttgtgaatcagaaaatccaggaagggcttgtctgggcaattctcctccctgtgacaacgactcaggtcacctggtggtattcagcaggtggttagacaagtctggaaggagtgtccaagatgatcgatcttacatacctgacactttggtggggagactagaaggatggactcagcaggtctcctctttctctccatgaagtctaaggactctccatgtgttctcttcatcaaggtagtcagatttactacgaggacagctaaggcctctgaaaggctgggcagaagaatctagtcaacttaaaggccaggcctagaattatcatacagccaccactgtactcttggtcgaagaacttaatggtaagatgacagcaagaatgaagggggaaaaaagaactcaatggtcagcccaaatttaaggagagaagaaataccctaccactttatggaaggcatgtccaggacttggggctatttttaatgtgttaatgttttttttgttttgttttgttttttgtcttgactctttggtgtttattcatcagttgtttgtgctgtagaaaccatttattatgtctaccatgggtcactaaaggagctagaaggagaatgagacaaatatctggagcatacttcatttgctgccctctccctccaagtttcatttatcttatagcaaaattttcattttgtactgtgttccaagttgtgaacatttgcctggttttgctctgaagccacggtaactgcatgcggagctagaaatactctagagggagtaaaaagcttacattttttttgtttgttttttgttttaggacagagtttcactctgtcacccaggctggagtgcagtggtgcaatcacagctcactgcagcctcaacctcctggactcaagcaatcctcctacctcatcctcccaagtagctgggactccagacgtgtgccactacacctggctaatttttgtgtatttttagagacgggatctcaccatgttgcctgggctggtcttgaactcctggactcaagagatccaccttcctcggcctcctgaagtgctgggattacaggcatgagccaacgtgcctggcccggaaagcttactattaaataatttgatttcttggagatatcagttgtattttaagtttacaaataggtgaatactcttgtggtatggaaacattgcatggctgctgaatctctttcaacaggagtttctattgggtggctacatggatcatattcttgagatagtgaaaagttttacctacttatcttaatcccattctacctctacacctccagcatgattttgtgctcgaagatgaatcaattcctttcattcttgttacctttcatacaggaaaattcatcgcccaattttatatgttgttaatcttttaaaattggcagttgttaccagcctctctcatttaaaataacagatcattgaagttttttgatttttggttagatgtgtcagatttaggatgccttatttaaactcgtgctgtcttactagactgttcctgctctgagaagaaatatggacagagaatgaatttcattgtccatattgatgaaccccaaatcaatacacttcttaagaaaggtttgagattatccagtccatgtgcaatgaatccttggagcattagctgtgtggccttcctactgataatctgcagttatcacagtaaagagatctctgttcctaggtcaggccttagcaattacaaatacaggaaataaaggggtactcaatgctgaagacttaattttgggtacctacaaagtcctgggaagggaaaaagaagaccttggcatttgtatttgcataaccagagatggaatgtttgaggcttttaggcataaagattaattagattttatcatataaagattagggcaaattatttttttttccagttcattcttaacatgttaagggacaaattttaatgaataaaaatttaaaggccttaaaactttcttttggattcacatttccactctggtataatccactctggtgtagtctgccctttatgacagagaaagcctttgaaaatattgtcccagggaatgaaaaatcttaatgatgatctatggaaatgtctctcattctctattacagccctttgggccctcctatagattctctgtgaatttaagtttgaaatcatttggtgtttgcatgaaaaataattcttactattcatttaaataattcttaaatgtggtcttaaattgcaagagagaacaaagccagaaaaaggggaaccttgtagattgaccaaatatttattctttattttcagcatcacaaatctaaaccatttcaagctaatacaacaacctgagtgagtagaaattccttaaggtttagatttctgcttttagtcacatcttgaagcagatgtttatgacatatttgaagatgatccactgagtttcctataaagtaatagaatcctaactatagtggttctttaagaaccactgaaaaaacagaattgcagtgcagggaacaaagcttaaaatgtgtttcctctggaagccaagatgctaaaaaaggggtcactaatagtgtgactgaagtccgtctctagaatggctatctgttagatagcagaaatatttagaatgtatatggcatttctaatatttttacaaaaataattttaaatcatgtaactcgaattttttttaaaaagtctgttttctttttggaaaactggcacaataaaaataacactaatataattccattgtatatgcatgtgcattgaacccagagtgggtatactaaagatagttcatgcaaataacttatgggaagtttggctattttttcatgtatgtttataaatatatttagtcatctactgtgaccttggtagcacagaagcattttgttagctgtatcattaattctaaaaatcaaattcttggcatagtaggctatgagagctttttgttacttggtattttggctaagaaaattatttcttgcactttctatttgtaaagatgttataacacaatgcacccacttaatgcagcttttctttagagaaaaaagatgtaggtgtaaaagtgaaatgtatgttttcaaacctggcaaaaggagggacctcaaaaaaataaatttggcttgccatctacctgagtagggttggggattaatataaaacttaggttgaaagtggctgttgggataggtatactgttgctgtgaattgcaatattgctgtgagttgccagctatgtatgtgtaagtttatgtgtgtatgtgagaaaaaggtatttcgtgaaggcataaaagtcagtgtagaatatcctacctcccactagagactgagcatattcaagattgctctgtagtcccttgggcaggaagctggattcctcagccactgtctaccccattcttctctatactcacttcagctcctctacctctgagcacttggctgaagaaagagtatagctttctgtagcaagcaaaggaaagccagacccaaaatagagaggctgcagtatctgaaattcttatcatgttcagatatcaatatttaattttgttgcccaaatcaaacaatgtcagaacacttgagtttagtgcttttttttctctctctgtctcctacagacttctcccggtttactgcttttatccactggcttctgtttggcaggagtagccagtggaggtcaagtctgtttttaaagactaaaacacctaattccttttaatgatgtgtaacatttgtttgaatccccaacttctttttttttggggggcaggggtagagatggagtctccctatgttgcccagtctcgtcttaaacatctaggtttggttggatgcagtggctcacacctgtaatcccagcactttgggaagctgaggtaggcggatcacctgatgtcaggagttcgagaccagcctggccaacattgtgaaaccccgtctctactaaaaatacaaaaaattagctgggtgtggtggcggcatctgtaatcccagctactcgggaggctgaggcaggagaatcgcttgaactcgggaggtggaaattgcagtgagccgagatcacacggttgcactccagcctgagcaacaagagcgagactccatctcaaaaaaaaaaaaaaaaagtctgggctcaagcgatcctaccacctcagcctccccaaagtgataggattacaggtgccagtcaccacacctggcccatgatggattttcagatgacctcttttacttctaatctctccaaagagagatattcttgtttttaaggtcaatattgtcataatagtcatgatgtcctcacctgaatgttgtaggtgtcagaaagttgtttcaatagtaatatgccaccaggcagaccacctaatctttaaatccagttgtagcactcaatttattttctgtttggggcactagtgcactgagccaagtcaacttgtccacttttctaatatttcttacagctaaggaggaactgttggtcctttgatatcctagaatgctttctacttgtggaaatgctttttaccctaatacactgattatattgtctaaatgtctaaacagggattctctggttagaagtgaaatgagagagtgacccattttcagatttttagagattggctcccgtattttaggaactagctgataagtatttagtttcctggtgactttggatacggcaagtggagatgcagagaatgtgaaattccaaataataagacaagcattactcacaaataacaactgatacagtaatttctgcccaaatgcagtaagaatcttgtagggagatgaagtggtaaaattaaattatatgaatctttttaccacgactatttttttttttctacctgtagcatagttctctgcctataagccatgctaatatcctagacccaggaattaattcctgcttaggaaaatttttccttctggcttatcttttgtttgtgcccagagttttgtcctaggcctgtcccctgatcttttgctataacacatacttaaggtgcagccttcttacctaaatcagtactttactgttgctgttgctgcctattacagccagttatttatttaaaaagtagtgaaaaaatgcctaggtagtttgattgcagcatgttaaatccataaatctggacagaagccatggagtcttaccttttctctctctagcttggatgaacaccggccttatgctttctattacaggactagttgacccagttcttcatattggttgcacattagaattgcataggaccccctctagacatttacattttattggtctgttgtgcaacctgggctttaggtgattctaatgtgcagccaaggttgagaatcactccctatgtaatccctagtggtcatggcaggataacctcaatccagtcctctttgacctgaaaatatctttattgatattccatgcatggctctcaattcaaagtgtacagtgggtcaaggcttaggtagtaaaatggatcatccatttgtcctcagaataattctggagggagatattgtcatccatccagtttcctctctataccaaatacaaagtacacataaataagcaaaacaaattttcaaagttccttctctagaatcctctttcttttgcatatgtagtttcagtggagatttctcaactagctgaaatggagcacttgaatatattaaaagagcccaaactgcttacagcaatttctatttgtaaaataaacaggtggcattgttaatggagaaaaggaaggatcctgcctgtggtgatggtaatatgtttgattatttatctcttagcctgtcttctaagtgggatttcagtgtcagttaactttcacttttcttggattgtttttttgtgaatgaaatgaactagttaaggcttaagtatttctgaataatatatgaaatgtgaaatgagtcattttaggatctttcttctgggatgtcaaagacctaaccaagtaactcccaaatgaggttccagattcatttttctcatcccaggtagtaaacgtgttttaatgggtttgtttcttgcccatggcaacctcaacacagaggggagaactgttttattaccctaaaatagtgagaaccactgttcaaactaactagctaccaagtgacttctaactcatgaagaaaatttgtatttaagagcaagttcaaatgtagcaggctctcttctgagagtattctggataccacggaaagtttcatttatatattgcttacaagtacgtggtaatttgaacttcagtaggtgatatgtgcaaggagaaaaagtaggtcaaggagaaagttggttagtgcagaggactgacttagcatcagtctgtgaaatttcattaaagtagcactaaggcctggctgtttgcttagcatgtaaatgctgcagtgtccaagaaaatgcctcctatgccttagaaaatttgctgaaggcttcctgttactggtggagtagaaaagcaatagcctttgagactccaaagagagtagcccccttagggttttcatactgaagaaccttgtggagtactgtgaaacattgttgaactttatgcaaattatactgcactggattttaagattttatggggagagagtagagcagagtggggaagtaatgataaaagataaatacgtaaacttgtactatattttaagcaaggaatgaaacaaattccctaacaggaattccctgtcagcactgtgaagtttggtcaagttctgcctaatgggttggcttgctgattcctcttaaacctctaggaaatcctttctaagacagcaaaacaaacgttagtttgagtactactatttcaccaccctgctccatccccctactctcaacgaaagaaaagcattcccaaactataggcaaaagaaatgtgttctcagtccattaatttttcatctgctatgatctctgttcacagttttagcacattgcattattttgtaatctgatagcagaacatcaggaactaatggcttccttccctttaagaaatcttaaagttagaacttttttttttttttttttttttgagacagggtcttgatctgtcacccaggctggagtacagtggtgcaattatagctcactgcagcctccacctcctggactctatcctcctgcctcagcctcccaagtagctggaactacaggcatgtgccaccacgcccagctaaattttctattttcttttagagacagagtctcactatgttgcccaggctggtctcaaactcctgggctcaagcgatcctcccacctaggactcctaaagttacaggtgtgagccactgtgcttggcctagaactctgtttttggcatttctttctaaatgagtacattggaagaacatttaggtttccaggctcctcataatttctgaatgggacccgctctgctctgcctctgaaaggaggagaaaaggctgagggttcaaagacagaaaagtcaatgtagcagaaatttgatttccttcagatggacatagtctgaaagaaatctatccagctgttctctatggtgcttatatgatgggtgacagctgtccccatctacctgtccctggcactgtgccttcacactggtcactgtgaaaagcagatcacactggactcagaggccagaatccaggacaagatcccccttctcatcttgagcccatcacatctttgtatagctgttaatgtagcatttacttctctatgggaaactcttgggtttttaacccaagaagaaattgtaaagcatttaaactagtcagaaaataagattctgatggtagcgatcaaataaaggaaaatttcacttcctctcagttgatattgattgatagcaaggatcaactatgcccacctcttcctaagtttctaaaggctaccataatatttgtaaacaacaaatttatctaatattttttacaacttgctaatcaaggaggattcatattaaaacagacaatcagtttctaaaatgttatccctgaaagggaatggaatagagtatttttagctgtaagaacctaccagtctgttttttccctttgaaaaaaactaatgtttgagatttgtgtcttttcatctgaagcagttactccattaatagtaaagatgcctcgggaaagtcagtgaaccagaatagtgctcttgcaccactgagggtgctagactggctttgtgcatcttatttcctaagaatatcagtttttattatgaccttaattataaatacctatatataggagtaggattttctctcacccaaccctactttaatcattatcacttaagtgtaaacctccacctccccctctttccctttaccgaaaaaaaatgcactttaattcctaaggagagtggctgttcctggccctgaaaccagattacttcaggaggagagttaaggagggagagctcttaccagaccctgtgaaatgaaccaaatttcttaatgtaaacacacaagtaataacatccacttttaagtggcccccactccatgccaaagggaaaaagaaccgccaaattgaaaaagggttctaaatacctgtcctgattttggaagtttcactggggaaaaactacctaagattattttcacagctaccaatttgtcagaaactttggtggtgttttgtgggaggctgagattttttaaattaaaaatcaagtgaaaacacaaagactctaagacacgatcctgatttgtgtcatttctaagtatcagatttgttctcccttcatttgacaggtgttctcagtctctcctcctgtaagattctgtccttcccctgatgacaagccaatagttcttggtggggttgcatgtctcctagagccccaggacccctgtcgtgtcggggaaggggggagggcaggagggtgggcagagactcgggttgggggagggagttcaaagaaagagtgaaaatatgggtttatataaacatatttaaagcagtttagcaaaagctttctcgttgaacagctttaagaacaatgtgaatgaaatcttagcaacttggttagtaatctgaaaagtctattaatgtatacttgaaattctgtttgtataaaaatgcattttcccctttattttaacactgtgtaaaagaacattatgcatgtgagtggtttgagaattaaatggtttaatactcaga

SEQ ID NO: 201019 - DNA, 1337 bp, Homo sapiens
  Payload ID: 19679
  Gene Name: zinc finger and BTB domain containing 37
  Uniprot ID: Q5TC79
  ENST ID: ENST00000367702
  CDS Start-End: 238-1323
ccacccccggagctctcacccctccagtgccgacggtagcgaaagactttcctccaggggcttcctcactggggaattgccggaaagagcaaacaaaaaaggcgctggtgtaggctccaaaataaacacatctgaattcatgatggcatcgacagaggctcttattggattaaaagtttcaaaacaaacaataacgctttggaaaaagcagggttgaatgcaccctcaggcacgaccatggagaaaggtgggaacatacaattggagattcctgacttcagcaactctgtcctgagccatctaaaccagttgcgcatgcagggccgtctctgtgatattgtggtcaatgtgcaaggacaagcttttcgggctcacaaagtggtgctggctgccagctccccctatttccgggatcacatgtccttgaatgagatgagtacagtctccatttcagtcatcaagaaccctactgtttttgaacagctcctttctttctgttacacagggcggatatgcctgcaactggcagatatcatcagctacctaacagctgccagttttctgcaaatgcagcatattatagacaaatgtacacagatcctggagggcattcatttcaaaattaatgtggctgaggttgaagcagaattaagtcaaacaaggacaaagcatcaagagagacctccagagtctcacagggttacaccaaatctcaaccgctcccttagcccacgacataataccccaaagggaaaccggcgaggtcaggttagtgctgtgctggatatcagagagctaagtcctcctgaggagtccaccagccctcagatcattgaaccaagttctgatgtagagagccgggagcccattcttcggatcaaccgagcaggacagtggtatgtggagacaggagtggcggaccgtgggggtcggagtgatgatgaagttagagttcttggagcagtacacatcaaaactgaaaatctggaggagtggcttgggcctgagaatcagccttctggagaagatgggagtagtgcagaggaagtaacagccatggtgattgataccacaggccatggttctgtaggacaggaaaattatactttagggtcttcaggagccaaggtggctcggccaacaagcagtgaagttgacagatttagcccctccggcagtgttgttcccttgacagagagacacagagccagaagtgagtctcctgggagaatggatgagcctaagcaacccagctcccaggtatggagttgtggatttagaactgctttggtggttggaggaattgctactgtgtatgaatagaaaataatgaaaaa

SEQ ID NO: 201020 - DNA, 2323 bp, Homo sapiens
  Payload ID: 19679
  Gene Name: zinc finger and BTB domain containing 37
  Uniprot ID: Q5TC79
  ENST ID: ENST00000367704
  CDS Start-End: 400-1326
aacctccctcaatcttcctctcatccagtatcaccttcttcccaccccttaagtccgccccttttccccgcccttcctcgccattgtgggcagagacatgaccgtccacgtgatgccgtgctcccgccctcctcccgactgaggaggaagagcagagaggggagggggcgcgagctctcacccctccagtgccgacggtagcgaaagactttcctccaggggcttcctcactggggaattgccggaaagagcaaacaaaaaaggcgctggtgtaggctccaaaataaacacatctgaattcatgatggcatcgacagaggctcttattggattaaaagtttcaaaacaaacaataacgctttggaaaaagcagggttgaatgcaccctcaggcacgaccatggagaaaggtgggaacatacaattggagattcctgacttcagcaactctgtcctgagccatctaaaccagttgcgcatgcagggccgtctctgtgatattgtggtcaatgtgcaaggacaagcttttcgggctcacaaagtggtgctggctgccagctccccctatttccgggatcacatgtccttgaatgagatgagtacagtctccatttcagtcatcaagaaccctactgtttttgaacagctcctttctttctgttacacagggcggatatgcctgcaactggcagatatcatcagctacctaacagctgccagttttctgcaaatgcagcatattatagacaaatgtacacagatcctggagggcattcatttcaaaattaatgtggctgaggttgaagcagaattaagtcaaacaaggacaaagcatcaagagagacctccagagtctcacagggttacaccaaatctcaaccgctcccttagcccacgacataataccccaaagggaaaccggcgaggtcaggttagtgctgtgctggatatcagagagctaagtcctcctgaggagtccaccagccctcagatcattgaaccaagttctgatgtagagagccgggagcccattcttcggatcaaccgagcaggacagtggtatgtggagacaggagtggcggaccgtgggggtcggagtgatgatgaagttagagttcttggagcagtacacatcaaaactgaaaatctggaggagtggcttgggcctgagaatcagccttctggagaagatgggagtagtgcagaggaagtaacagccatggtgattgataccacaggccatggttctgtaggacaggaaaattatactttagggtcttcaggagccaaggtggctcggccaacaagcagtgaagttgacaggtagaagagtcagcaatgatgggagtaagtggctatgtggagtatctccgagagcaggaagtatctgagcggtggttccggtacaaccctcgtctcacctgcatctattgcgccaaatctttcaaccagaagggaagcctggaccgccacatgcgcctacacatggggatcacaccattcgtctgccgcatgtgtggcaagaagtatacccggaaagatcagctggagtatcatatccgcaagcacacaggcaacaagccctttcactgtcatgtctgtggcaaaagtttccccttccaggccatcttgaatcagcactttcgcaaaaaccaccctggctgtatacccctggaggggcctcacagcatctcccctgaaacaactgtcacatctcgaggacaagctgaggaagagtcaccttcacaggaagagacagttgctcctggggaagctgtccagggctctgtgtccaccactgggccagactgaaacatccagggggagggggctgaccctcttcccctatgagccataagcagccagcatcagagccatgggctgatacttagattcacaaaatgccacatcactaggccagaagatgctcccaagatgttgccaaactggaggatcagcaacttacacaaaagcactaaaggctcctcccttcttattgcccgcctcacactttggaaaataatcaagcaaatcaactttctaattcagggatcaacagccttggtttgttaactttataagaaaaaaggttttttaacaaaacgatgatgataaatggtcatttatctatcagtcatgtttgaacactgtactttggtccatatcatcttggtggctataattgcccggatctaaaaaatgcagcaggagcctcaaccatccgaagcagccaaccgcaagagaggaggtagtcatgatggtgatgaggaggagaaatttctcctcttccttccctggcataacatgcatttttgtgtttcaag

SEQ ID NO: 201021 - DNA, 2022 bp, Homo sapiens
  Payload ID: 19679
  Gene Name: zinc finger and BTB domain containing 37
  ENST ID: ENST00000432989
  CDS Start-End: 467-1702
agactttcctccaggggcttcctcactggggaattgccggaaagagcaaacaaaaaaggcgctggtgtaggctccaaaataaacacatctgaattcatgatggcatcgacagaggctcttattggattaaaagtttcaaaacaaacaataacgctttggaaaaagggttgaatgcaccctcaggcacgaccatggagaaaggtgggaacatacaattggagattcctgacttcagcaactctgtcctgagccatctaaaccagttgcgcatgcagggccgtctctgtgatattgtggtcaatgtgcaaggacaagcttttcgggctcacaaagtggtgctggctgccagctccccctatttccgggatcacatgtccttgaatgagatgagtacagtctccatttcagtcatcaagaaccctactgtttttgaacagctcctttctttctgttacacagggcggatatgcctgcaactggcagatatcatcagctacctaacagctgccagttttctgcaaatgcagcatattatagacaaatgtacacagatcctggagggcattcatttcaaattaatgtggctgaggttgaagcagaattaagtcaaacaaggacaaagcatcaagagagacctccagagtctcacagggttacaccaaatctcaaccgctcccttagcccacgacataataccccaaagggaaaccggcgaggtcaggttagtgctgtgctggatatcagagagctaagtcctcctgaggagtccaccagccctcagatcattgaaccaagttctgatgtagagagccgggagcccattcttcggatcaaccgagcaggacagtggtatgtggagacaggagtggcggaccgtgggggtcggagtgatgatgaagttagagttcttggagcagtacacatcaaaactgaaaatctggaggagtggcttgggcctgagaatcagccttctggagaagatgggagtagtgcagaggaagtaacagccatggtgattgataccacaggccatggttctgtaggacaggaaaattatactttagggtcttcaggagccaaggtggctcggccaacaagcagtgaagttgacagatttagcccctccggcagtgttgttcccttgacagagagacacagagccagaagtgagtctcctgggagaatggatgagcctaagcaacccagctcccaggtagaagagtcagcaatgatgggagtaagtggctatgtggagtatctccgagagcaggaagtatctgagcggtggttccggtacaaccctcgtctcacctgcatctattgcgccaaatctttcaaccagaagggaagcctggaccgccacatgcgcctacacatggggatcacaccattcgtctgccgcatgtgtggcaagaagtatacccggaaagatcagctggagtatcatatccgcaagcacacaggcaacaagccctttcactgtcatgtctgtggcaaaagtttccccttccaggccatcttgaatcagcactttcgcaaaaaccaccctggctgtatacccctggaggggcctcacagcatctcccctgaaacaactgtcacatctcgaggacaagctgaggaagagtcaccttcacaggaagagacagttgctcctggggaagctgtccagggctctgtgtccaccactgggccagactgaaacatccagggggagggggctgaccctcttcccctatgagccataagcagccagcatcagagccatgggctgatacttagattcacaaaatgccacatcactaggccagaagatgctcccaagatgttgccaaactggaggatcagcaacttacacaaaagcactaaaggctcctcccttcttattgcccgcctcacactttggaaaataatcaagcaaatcaactttctaattcagggatcaacagccttggtttgttaactttataagaaaaaaggttttttaacaaaacgatgatgataaatggtcatttatctatc

SEQ ID NO: 201022 - DNA, 2300 bp, Homo sapiens
  Payload ID: 19679
  Gene Name: zinc finger and BTB domain containing 37
  Uniprot ID: Q5TC79
  ENST ID: ENST00000427304
  CDS Start-End: 277-1788
cacttccgggacggtgttccggcccattccggcccatttccacccccggagctctcacccctccagtgccgacggtagcgaaagactttcctccaggggcttcctcactggggaattgccggaaagagcaaacaaaaaaggcgctggtgtaggctccaaaataaacacatctgaattcatgatggcatcgacagaggctcttattggattaaaagtttcaaaacaaacaataacgctttggaaaaagcagggttgaatgcaccctcaggcacgaccatggagaaaggtgggaacatacaattggagattcctgacttcagcaactctgtcctgagccatctaaaccagttgcgcatgcagggccgtctctgtgatattgtggtcaatgtgcaaggacaagcttttcgggctcacaaagtggtgctggctgccagctccccctatttccgggatcacatgtccttgaatgagatgagtacagtctccatttcagtcatcaagaaccctactgtttttgaacagctcctttctttctgttacacagggcggatatgcctgcaactggcagatatcatcagctacctaacagctgccagttttctgcaaatgcagcatattatagacaaatgtacacagatcctggagggcattcatttcaaaattaatgtggctgaggttgaagcagaattaagtcaaacaaggacaaagcatcaagagagacctccagagtctcacagggttacaccaaatctcaaccgctcccttagcccacgacataataccccaaagggaaaccggcgaggtcaggttagtgctgtgctggatatcagagagctaagtcctcctgaggagtccaccagccctcagatcattgaaccaagttctgatgtagagagccgggagcccattcttcggatcaaccgagcaggacagtggtatgtggagacaggagtggcggaccgtgggggtcggagtgatgatgaagttagagttcttggagcagtacacatcaaaactgaaaatctggaggagtggcttgggcctgagaatcagccttctggagaagatgggagtagtgcagaggaagtaacagccatggtgattgataccacaggccatggttctgtaggacaggaaaattatactttagggtcttcaggagccaaggtggctcggccaacaagcagtgaagttgacagatttagcccctccggcagtgttgttcccttgacagagagacacagagccagaagtgagtctcctgggagaatggatgagcctaagcaacccagctcccaggtagaagagtcagcaatgatgggagtaagtggctatgtggagtatctccgagagcaggaagtatctgagcggtggttccggtacaaccctcgtctcacctgcatctattgcgccaaatctttcaaccagaagggaagcctggaccgccacatgcgcctacacatggggatcacaccattcgtctgccgcatgtgtggcaagaagtatacccggaaagatcagctggagtatcatatccgcaagcacacaggcaacaagccctttcactgtcatgtctgtggcaaaagtttccccttccaggccatcttgaatcagcactttcgcaaaaaccaccctggctgtatacccctggaggggcctcacagcatctcccctgaaacaactgtcacatctcgaggacaagctgaggaagagtcaccttcacaggaagagacagttgctcctggggaagctgtccagggctctgtgtccaccactgggccagactgaaacatccagggggagggggctgaccctcttcccctatgagccataagcagccagcatcagagccatgggctgatacttagattcacaaaatgccacatcactaggccagaagatgctcccaagatgttgccaaactggaggatcagcaacttacacaaaagcactaaaggctcctcccttcttattgcccgcctcacactttggaaaataatcaagcaaatcaactttctaattcagggatcaacagccttggtttgttaactttataagaaaaaaggttttttaacaaaacgatgatgataaatggtcatttatctatcagtcatgtttgaacactgtactttggtccatatcatcttggtggctataattgcccggatctaaaaaatgcagcaggagcctcaaccatccgaagcagccaaccgcaagagaggaggtagtcatgatggtgatgaggaggagaaatttctcctcttccttccctggcataacatgcatttttgtgtttcaag

SEQ ID NO: 201023 - DNA, 3588 bp, Homo sapiens
  Payload ID: 19680
  Gene Name: zinc finger and BTB domain containing 38
  Uniprot ID: Q8NAP3
  ENST ID: ENST00000321464
  CDS Start-End: 1-3588
atgacagtcatgtccctttccagggacctcaaggacgactttcacagtgacacggtactctccatcttaaatgagcagcgcattcggggcattttatgcgatgtcactatcattgtggaagataccaaatttaaagcccatagcaatgttctggcagcttcaagcctgtattttaaaaatatcttttggagccatacaatctgtatttccagccacgtcctggagctggacgatctcaaagctgaagtgtttactgaaatacttaattatatctacagttccacagtcgttgtcaagagacaggaaacagtcactgatctcgcagctgcaggaaaaaagctgggaatatcgttcttggaagaccttactgatcgcaacttctcaaattccccgggtccctatgtattctgtattactgaaaagggagtggttaaagaagaaaaaaatgaaaaaaggcatgaagaaccagccatcactaatgggccaaggatcacaaatgcattttccatcatcgaaacagaaaatagtaataacatgttttccccgctggacttgagggcaagtttcaaaaaggtctccgactccatgagaacagctagcctttgcctggagaggacggacgtctgccacgaggcagagcctgtccgcacacttgccgagcactcatacgctgtttcttccgtagctgaagcttacagaagtcagcctgtacgtgaacatgatggcagttcacctggtaacacagggaaagaaaattgtgaagcccttgcagcgaaaccgaaaacatgccggaagccaaagacattctccataccacaggattcggattcagccacagaaaatataccaccccctccagtatccaacttagaggttaatcaagaaagaagtccacaaccagctgctgttctcactcgttcaaaatctccaaacaatgaaggagatgtccatttttccagggaagatgaaaatcaatcttctgatgttcccgggccgccagccgcagaggttccacctctggtgtacaattgtagctgctgttccaaagcctttgacagcagcactctgctcagtgcccacatgcagcttcacaagccaacccaggagcctttagtgtgcaagtattgcaacaaacaattcaccaccctgaacaggttggatcggcatgaacagatctgcatgaggtcaagccacatgcccattcctggaggaaaccaacgctttttagaaaactatcctaccattggacaaaatggaggttcattcacaggtccagaacctttattatctgaaaataggattggtgaattttccagtaccggaagtactttgccagacacggaccacatggttaaatttgttaatgggcaaatgctctacagttgcgttgtgtgcaaacgtagttatgtgaccttatctagcctccgaagacatgcaaatgttcactcctggagaagaacatatccttgccattactgcaacaaagtatttgcattggctgagtacaggacaaggcatgaaatttggcatacgggagaaagacgatatcagtgcattttctgtcttgaaactttcatgacctactatatactcaaaaatcatcagaagtctttccatgccatcgatcatagactttccatcagtaaaaaaacagcaaatggaggcttgaagcctagtgtctatccgtataaactttataggctactgcctatgaaatgcaagagagccccttataagagctaccgaaattcttcctatgaaaatgcacgagaaaacagtcaaatgaatgagtctgcacctggtacctatgttgttcagaatccacacagctctgaattaccaacgctgaatttccaagatactgtaaacaccctgaccaacagtccagccatcccattggaaacatctgcatgtcaggacatacccacttctgccaatgtacaaaatgcagagggtaccaaatggggagaggaggcattgaaaatggatcttgacaataacttttattcaactgaggtgtcagtttcttccactgaaaatgctgtcagttctgacctccgggcaggggatgtacctgttttatctttgagtaatagcagtgagaatgccgcctctgtgatcagctacagtggctctgcaccctcggtcattgtacacagcagccagttttcatcggtgatcatgcacagcaatgccattgctgccatgaccagcagcaaccacagagccttttcagacccagctgtcagtcagtccctgaaagatgacagtaagcccgagccagataaagtgggtaggtttgcaagcagacccaaaagcattaaggagaaaaagaaaactacatcacataccaggggagaaataccggaggagtcaaactatgttgctgatcctggaggatcactgagcaaaaccacaaatattgctgaagaaaccagcaaaattgaaacctacattgcaaaacctgctctgccgggaacctccacaaatagtaatgttgcacccctttgccaaataacagtgaaaattggaaacgaagccattgtgaaaaggcacattctaggatctaaattgttttataaaagagggagaagacccaagtatcagatgcaggaggagcctttgccacaggggaatgacccagaacccagtggagacagcccactcgggctttgccaatccgagtgcatggagatgagtgaagtgttcgatgacgcaagtgaccaggattccactgacaaaccgtggcgcccttactacaactacaaacccaaaaagaaatccagacagttgaaaaaaatgaggaaagtcaactggaggaaggagcacggaaacaggagcccgagccataaatgtaaatacccagcagaactggattgcgccgtggggaaggctcctcaggataaaccctttgaggaagaagaaactaaagagatgcccaagctgcagtgtgaactctgtgatggagacaaagcagtgggggctggaaaccaaggaaggccccaccgacatcttacttctcggccatatgcctgcgagctctgcgccaagcagttccagagcccttccacactcaaaatgcacatgagatgtcacaccggggagaagccataccagtgcaagacctgcggacggtgcttttcggtgcaaggaaacttacagaaacatgaacgcatccacctgggcttgaaggagttcgtctgtcagtattgcaacaaggcattcaccttgaatgagaccctcaaaatccatgaaagaatccatactggagaaaagcgttaccactgtcagttctgctttcagagatttttgtatctctccaccaaaaggaatcacgagcagaggcatattcgggagcataatgggaagggctatgcctgcttccagtgccccaaaatttgcaaaacagctgctgcccttggaatgcaccaaaagaaacacttattcaaaagcccaagtcagcaggagaaaataggtgacgtgtgccacgaaaactcaaatcccttggagaatcaacatttcattggttcagaagacaatgaccaaaaggataacatacaaaccggtgtggaaaatgttgtcctttga

SEQ ID NO: 201024 - DNA, 3662 bp, Homo sapiens
  Payload ID: 19680
  Gene Name: zinc finger and BTB domain containing 38
  Uniprot ID: Q8NAP3
  ENST ID: ENST00000441582
  CDS Start-End: 51-3638
agttctcagacaggctgcccagaggggctccagcataagcaggagacatgatgacagtcatgtccctttccagggacctcaaggacgactttcacagtgacacggtactctccatcttaaatgagcagcgcattcggggcattttatgcgatgtcactatcattgtggaagataccaaatttaaagcccatagcaatgttctggcagcttcaagcctgtattttaaaaatatcttttggagccatacaatctgtatttccagccacgtcctggagctggacgatctcaaagctgaagtgtttactgaaatacttaattatatctacagttccacagtcgttgtcaagagacaggaaacagtcactgatctcgcagctgcaggaaaaaagctgggaatatcgttcttggaagaccttactgatcgcaacttctcaaattccccgggtccctatgtattctgtattactgaaaagggagtggttaaagaagaaaaaaatgaaaaaaggcatgaagaaccagccatcactaatgggccaaggatcacaaatgcattttccatcatcgaaacagaaaatagtaataacatgttttccccgctggacttgagggcaagtttcaaaaaggtctccgactccatgagaacagctagcctttgcctggagaggacggacgtctgccacgaggcagagcctgtccgcacacttgccgagcactcatacgctgtttcttccgtagctgaagcttacagaagtcagcctgtacgtgaacatgatggcagttcacctggtaacacagggaaagaaaattgtgaagcccttgcagcgaaaccgaaaacatgccggaagccaaagacattctccataccacaggattcggattcagccacagaaaatataccaccccctccagtatccaacttagaggttaatcaagaaagaagtccacaaccagctgctgttctcactcgttcaaaatctccaaacaatgaaggagatgtccatttttccagggaagatgaaaatcaatcttctgatgttcccgggccgccagccgcagaggttccacctctggtgtacaattgtagctgctgttccaaagcctttgacagcagcactctgctcagtgcccacatgcagcttcacaagccaacccaggagcctttagtgtgcaagtattgcaacaaacaattcaccaccctgaacaggttggatcggcatgaacagatctgcatgaggtcaagccacatgcccattcctggaggaaaccaacgctttttagaaaactatcctaccattggacaaaatggaggttcattcacaggtccagaacctttattatctgaaaataggattggtgaattttccagtaccggaagtactttgccagacacggaccacatggttaaatttgttaatgggcaaatgctctacagttgcgttgtgtgcaaacgtagttatgtgaccttatctagcctccgaagacatgcaaatgttcactcctggagaagaacatatccttgccattactgcaacaaagtatttgcattggctgagtacaggacaaggcatgaaatttggcatacgggagaaagacgatatcagtgcattttctgtcttgaaactttcatgacctactatatactcaaaaatcatcagaagtctttccatgccatcgatcatagactttccatcagtaaaaaaacagcaaatggaggcttgaagcctagtgtctatccgtataaactttataggctactgcctatgaaatgcaagagagccccttataagagctaccgaaattcttcctatgaaaatgcacgagaaaacagtcaaatgaatgagtctgcacctggtacctatgttgttcagaatccacacagctctgaattaccaacgctgaatttccaagatactgtaaacaccctgaccaacagtccagccatcccattggaaacatctgcatgtcaggacatacccacttctgccaatgtacaaaatgcagagggtaccaaatggggagaggaggcattgaaaatggatcttgacaataacttttattcaactgaggtgtcagtttcttccactgaaaatgctgtcagttctgacctccgggcaggggatgtacctgttttatctttgagtaatagcagtgagaatgccgcctctgtgatcagctacagtggctctgcaccctcggtcattgtacacagcagccagttttcatcggtgatcatgcacagcaatgccattgctgccatgaccagcagcaaccacagagccttttcagacccagctgtcagtcagtccctgaaagatgacagtaagcccgagccagataaagtgggtaggtttgcaagcagacccaaaagcattaaggagaaaaagaaaactacatcacataccaggggagaaataccggaggagtcaaactatgttgctgatcctggaggatcactgagcaaaaccacaaatattgctgaagaaaccagcaaaattgaaacctacattgcaaaacctgctctgccgggaacctccacaaatagtaatgttgcacccctttgccaaataacagtgaaaattggaaacgaagccattgtgaaaaggcacattctaggatctaaattgttttataaaagagggagaagacccaagtatcagatgcaggaggagcctttgccacaggggaatgacccagaacccagtggagacagcccactcgggctttgccaatccgagtgcatggagatgagtgaagtgttcgatgacgcaagtgaccaggattccactgacaaaccgtggcgcccttactacaactacaaacccaaaaagaaatccagacagttgaaaaaaatgaggaaagtcaactggaggaaggagcacggaaacaggagcccgagccataaatgtaaatacccagcagaactggattgcgccgtggggaaggctcctcaggataaaccctttgaggaagaagaaactaaagagatgcccaagctgcagtgtgaactctgtgatggagacaaagcagtgggggctggaaaccaaggaaggccccaccgacatcttacttctcggccatatgcctgcgagctctgcgccaagcagttccagagcccttccacactcaaaatgcacatgagatgtcacaccggggagaagccataccagtgcaagacctgcggacggtgcttttcggtgcaaggaaacttacagaaacatgaacgcatccacctgggcttgaaggagttcgtctgtcagtattgcaacaaggcattcaccttgaatgagaccctcaaaatccatgaaagaatccatactggagaaaagcgttaccactgtcagttctgctttcagagatttttgtatctctccaccaaaaggaatcacgagcagaggcatattcgggagcataatgggaagggctatgcctgcttccagtgccccaaaatttgcaaaacagctgctgcccttggaatgcaccaaaagaaacacttattcaaaagcccaagtcagcaggagaaaataggtgacgtgtgccacgaaaactcaaatcccttggagaatcaacatttcattggttcagaagacaatgaccaaaaggataacatacaaaccggtgtggaaaatgttgtcctttgagtggcaagaattagaaaaatcttc

SEQ ID NO: 201025 - DNA, 593 bp, Homo sapiens
  Payload ID: 19680
  Gene Name: zinc finger and BTB domain containing 38
  ENST ID: ENST00000507722
  CDS Start-End: 238-593
tatttctggagtagttgtgggagagagatgtactccaaagagaagaggactcttgctatggttcagttgaaccaagactctgaggctgatatgcaatgtcacttacaacattaatcagatactgcatttaagatcttgatgtggaagaaatggaggactcagaaccaaggatttccaagtgatttcttccaaagcacaggaatctcactctgttaaagctggtctgttctaactgagatgacagtcatgtccctttccagggacctcaaggacgactttcacagtgacacggtactctccatcttaaatgagcagcgcattcggggcattttatgcgatgtcactatcattgtggaagataccaaatttaaagcccatagcaatgttctggcagcttcaagcctgtattttaaaaatatcttttggagccatacaatctgtatttccagccacgtcctggagctggacgatctcaaagctgaagtgtttactgaaatacttaattatatctacagttccacagtcgttgtcaagagacaggaaacagtcactgatctcgcagctgcaggaaaaaagctgggaatatcgttctt

SEQ ID NO: 201026 - DNA, 578 bp, Homo sapiens
  Payload ID: 19680
  Gene Name: zinc finger and BTB domain containing 38
  ENST ID: ENST00000503809
  CDS Start-End: 476-578
gcatttttctacaagcctgccggcaccatttaggattttgaaaaataatctagaaatgctataccctttatcaaaattattttttactttgcaagagcttaacagttttggttttttcttagcaattctataaaattaacatctataaaatgcatcccggaccagatacatactgtattgaaagctttcttcaggaagagaatatgagagtgttctttccagcttattttcttccttagcaaaaggattgtttgattctcagaagcagaaggacacattcattgtggagcagctctgcttaagtttgaaccaagactctgaggctgatatgcaatgtcacttacaacattaatcagatactgcatttaagatcttgatgtggaagaaatggaggactcagaaccaaggatttccaagtgatttcttccaaagcacaggaatctcactctgttaaagctggtctgttctaactgagatgacagtcatgtccctttccagggacctcaaggacgactttcacagtgacacggtactctccatcttaaatgagcagcgcattcggggcattttatgcgatg

SEQ ID NO: 201027 - DNA, 859 bp, Homo sapiens
  Payload ID: 19680
  Gene Name: zinc finger and BTB domain containing 38
  ENST ID: ENST00000510726
  CDS Start-End: 228-859
aggctgcccagaggggctccagcataagcaggagacatggagactcttgcctccatcatggaggaggttcacaccagaagccagctctgcccttggagactctcttcccccagtgctcccctgaagcttcacactcaccagtctcatgctgcaccctgaccggcaggtccctagcatgagccccataatccctggggactgcattatcacagaccagtaataagaagatgacagtcatgtccctttccagggacctcaaggacgactttcacagtgacacggtactctccatcttaaatgagcagcgcattcggggcattttatgcgatgtcactatcattgtggaagataccaaatttaaagcccatagcaatgttctggcagcttcaagcctgtattttaaaaatatcttttggagccatacaatctgtatttccagccacgtcctggagctggacgatctcaaagctgaagtgtttactgaaatacttaattatatctacagttccacagtcgttgtcaagagacaggaaacagtcactgatctcgcagctgcaggaaaaaagctgggaatatcgttcttggaagaccttactgatcgcaacttctcaaattccccgggtccctatgtattctgtattactgaaaagggagtggttaaagaagaaaaaaatgaaaaaaggcatgaagaaccagccatcactaatgggccaaggatcacaaatgcattttccatcatcgaaacagaaaatagtaataacatgttttccccgctggacttgagggcaagtttcaaaaaggtctccgactccatgagaacagctagcctttgcctggagaggacggacgtctgccacga

SEQ ID NO: 201028 - DNA, 590 bp, Homo sapiens
  Payload ID: 19680
  Gene Name: zinc finger and BTB domain containing 38
  ENST ID: ENST00000504673
  CDS Start-End: 309-590
agcgctgcggccggactcacgggtccggaagcaccatggacccccggggaaacgcgccggcggcgaaggagccgagccccatcttgatgtggaagaaatggaggactcagaaccaaggatttccaagtgatttcttccaaagcacaggaatctcactctgttaaagctggtctgttctaactgagacggagtttcgctcttgttgcccaggctggagtacaatggcgcaatcttggctcaccacaacctccgcctcccgggttcaagcagttcttctctctcagcctcccgagtagctgggattacagatgacagtcatgtccctttccagggacctcaaggacgactttcacagtgacacggtactctccatcttaaatgagcagcgcattcggggcattttatgcgatgtcactatcattgtggaagataccaaatttaaagcccatagcaatgttctggcagcttcaagcctgtattttaaaaatatcttttggagccatacaatctgtatttccagccacgtcctggagctggacgatctcaaagctgaagtgtttactgaaatacttaattatatctacagttcc

SEQ ID NO: 201029 - DNA, 649 bp, Homo sapiens
  Payload ID: 19680
  Gene Name: zinc finger and BTB domain containing 38
  ENST ID: ENST00000513570
  CDS Start-End: 441-649
ctcgagtccagcgggctcgggcactgctttgacagtcacacctcccgtctcctggattgggaatcggaccctagtcctgaccctatgggaacttgatgatttccttgatgcaacaccaagcccctggaattgaaagggacgtgcaaaggcagggacctgcccccaggggtttgcagtctcagccgcctacttctgcagtagtaaggtctgctctgttggtacaacatacaacacaaccgcccgccgttagccactttttttatagggtacatcataaatcacctgagattttagtctgtccgcggttccactttataactcctgcactgcggtagatcttgatgtggaagaaatggaggactcagaaccaaggatttccaagtgatttcttccaaagcacaggaatctcactctgttaaagctggtctgttctaactgagatgacagtcatgtccctttccagggacctcaaggacgactttcacagtgacacggtactctccatcttaaatgagcagcgcattcggggcattttatgcgatgtcactatcattgtggaagataccaaatttaaagcccatagcaatgttctggcagcttcaagcctgtattttaaaaatatcttttggagccatacaatctgtatttc

SEQ ID NO: 201030 - DNA, 855 bp, Homo sapiens
  Payload ID: 19680
  Gene Name: zinc finger and BTB domain containing 38
  ENST ID: ENST00000509813
  CDS Start-End: 522-855
aggttgtccaagctggcctccctctctgctgagtgcactccagcagcttcccgatgttggcctttagaacagcctgaatttcagttaaaaaataagcttcccctgtcacacgatgccttcttgaatctgatagcttaagtgcagtaaaatctgataaatgtagcttttctgtgcccgtttcaggccacatttagaaggcaacatcaacaggattttccttttcctagacacagctcaactccataaaggacttctgttttgtaatctgttttcgagatctgatgcgtgtgtttctaacaccccgtcacgtgaggaggtctgacgtagtcacccaacatgactttgagaaaatatactgtaaagatgtgtgtgggatggtacagccagctcactgaagcaaaatatcctttgtcggaaaactttccgcagggaataacagacctgcgcagtagatttcactttgatatggcccctgtgctggcccagtatggactgcaggtttgacttttgcaggattccagatgacagtcatgtccctttccagggacctcaaggacgactttcacagtgacacggtactctccatcttaaatgagcagcgcattcggggcattttatgcgatgtcactatcattgtggaagataccaaatttaaagcccatagcaatgttctggcagcttcaagcctgtattttaaaaatatcttttggagccatacaatctgtatttccagccacgtcctggagctggacgatctcaaagctgaagtgtttactgaaatacttaattatatctacagttccacagtcgttgtcaagagacaggaaacagtcactgatctcgcagctgcaggaa

SEQ ID NO: 201031 - DNA, 2659 bp, Homo sapiens
  Payload ID: 19680
  Gene Name: zinc finger and BTB domain containing 38
  ENST ID: ENST00000509883
  CDS Start-End: 347-2659
gcagtctcagaaaaaccttggatgagaaacttcttttttcaatcctgttttcctgttgataaattcagttctgtgatcacagttcattcaagctgttctgcgtatgatttttgtgtgtatgtgacaattgcatctaaaacttgtgagcaagaagacagagaaatcagttggtctccatcgctttacataaaaatggctgagtgtcttgtcatgctagcactgcattaagtgatgcatacagatcttgatgtggaagaaatggaggactcagaaccaaggatttccaagtgatttcttccaaagcacaggaatctcactctgttaaagctggtctgttctaactgagatgacagtcatgtccctttccagggacctcaaggacgactttcacagtgacacggtactctccatcttaaatgagcagcgcattcggggcattttatgcgatgtcactatcattgtggaagataccaaatttaaagcccatagcaatgttctggcagcttcaagcctgtattttaaaaatatcttttggagccatacaatctgtatttccagccacgtcctggagctggacgatctcaaagctgaagtgtttactgaaatacttaattatatctacagttccacagtcgttgtcaagagacaggaaacagtcactgatctcgcagctgcaggaaaaaagctgggaatatcgttcttggaagaccttactgatcgcaacttctcaaattccccgggtccctatgtattctgtattactgaaaagggagtggttaaagaagaaaaaaatgaaaaaaggcatgaagaaccagccatcactaatgggccaaggatcacaaatgcattttccatcatcgaaacagaaaatagtaataacatgttttccccgctggacttgagggcaagtttcaaaaaggtctccgactccatgagaacagctagcctttgcctggagaggacggacgtctgccacgaggcagagcctgtccgcacacttgccgagcactcatacgctgtttcttccgtagctgaagcttacagaagtcagcctgtacgtgaacatgatggcagttcacctggtaacacagggaaagaaaattgtgaagcccttgcagcgaaaccgaaaacatgccggaagccaaagacattctccataccacaggattcggattcagccacagaaaatataccaccccctccagtatccaacttagaggttaatcaagaaagaagtccacaaccagctgctgttctcactcgttcaaaatctccaaacaatgaaggagatgtccatttttccagggaagatgaaaatcaatcttctgatgttcccgggccgccagccgcagaggttccacctctggtgtacaattgtagctgctgttccaaagcctttgacagcagcactctgctcagtgcccacatgcagcttcacaagccaacccaggagcctttagtgtgcaagtattgcaacaaacaattcaccaccctgaacaggttggatcggcatgaacagatctgcatgaggtcaagccacatgcccattcctggaggaaaccaacgctttttagaaaactatcctaccattggacaaaatggaggttcattcacaggtccagaacctttattatctgaaaataggattggtgaattttccagtaccggaagtactttgccagacacggaccacatggttaaatttgttaatgggcaaatgctctacagttgcgttgtgtgcaaacgtagttatgtgaccttatctagcctccgaagacatgcaaatgttcactcctggagaagaacatatccttgccattactgcaacaaagtatttgcattggctgagtacaggacaaggcatgaaatttggcatacgggagaaagacgatatcagtgcattttctgtcttgaaactttcatgacctactatatactcaaaaatcatcagaagtctttccatgccatcgatcatagactttccatcagtaaaaaaacagcaaatggaggcttgaagcctagtgtctatccgtataaactttataggctactgcctatgaaatgcaagagagccccttataagagctaccgaaattcttcctatgaaaatgcacgagaaaacagtcaaatgaatgagtctgcacctggtacctatgttgttcagaatccacacagctctgaattaccaacgctgaatttccaagatactgtaaacaccctgaccaacagtccagccatcccattggaaacatctgcatgtcaggacatacccacttctgccaatgtacaaaatgcagagggtaccaaatggggagaggaggcattgaaaatggatcttgacaataacttttattcaactgaggtgtcagtttcttccactgaaaatgctgtcagttctgacctccgggcaggggatgtacctgttttatctttgagtaatagcagtgagaatgccgcctctgtgatcagctacagtggctctgcaccctcggtcattgtacacagcagccagttttcatcggtgatcatgcacagcaatgccattgctgccatgaccagcagcaaccacagagccttttcagacccagctgtcagtcagtccctgaaagatgacagtaagcccgagccagataaagtgggtaggtttgcaagcagaccc

SEQ ID NO: 201032 - DNA, 644 bp, Homo sapiens
  Payload ID: 19680
  Gene Name: zinc finger and BTB domain containing 38
  ENST ID: ENST00000510338
  CDS Start-End: 207-644
attttctgggcggtgctgtgcagcgctgcggccggactcacgggtccggaagcaccatggacccccggggaaacgcgccggcggcgaaggagccgagccccatcttgatgtggaagaaatggaggactcagaaccaaggatttccaagtgatttcttccaaagcacaggaatctcactctgttaaagctggtctgttctaactgagatgacagtcatgtccctttccagggacctcaaggacgactttcacagtgacacggtactctccatcttaaatgagcagcgcattcggggcattttatgcgatgtcactatcattgtggaagataccaaatttaaagcccatagcaatgttctggcagcttcaagcctgtattttaaaaatatcttttggagccatacaatctgtatttccagccacgtcctggagctggacgatctcaaagctgaagtgtttactgaaatacttaattatatctacagttccacagtcgttgtcaagagacaggaaacagtcactgatctcgcagctgcaggaaaaaagctgggaatatcgttcttggaagaccttactgatcgcaacttctcaaattccccgggtccctatgtattctgtattactgaaaagggagtggttaaagaa

SEQ ID NO: 201033 - DNA, 591 bp, Homo sapiens
  Payload ID: 19680
  Gene Name: zinc finger and BTB domain containing 38
  ENST ID: ENST00000513258
  CDS Start-End: 267-591
aaccaagactctgaggctgatatgcaatgtcacttacaacattaatcagatactgcatttaagatcttgatgtggaagaaatggaggactcagaaccaaggatttccaagtgatttcttccaaagcacaggaatctcactctgttaaagctggtctgttctaactgaggctggagtacaatggcgcaatcttggctcaccacaacctccgcctcccgggttcaagcagttcttctctctcagcctcccgagtagctgggattacagatgacagtcatgtccctttccagggacctcaaggacgactttcacagtgacacggtactctccatcttaaatgagcagcgcattcggggcattttatgcgatgtcactatcattgtggaagataccaaatttaaagcccatagcaatgttctggcagcttcaagcctgtattttaaaaatatcttttggagccatacaatctgtatttccagccacgtcctggagctggacgatctcaaagctgaagtgtttactgaaatacttaattatatctacagttccacagtcgttgtcaagagacaggaaacagtcactgatctcgcag

SEQ ID NO: 201034 - DNA, 7683 bp, Homo sapiens
  Payload ID: 19680
  Gene Name: zinc finger and BTB domain containing 38
  Uniprot ID: Q8NAP3
  ENST ID: ENST00000514251
  CDS Start-End: 280-3867
agttggtctccatcgctttacataaaaatggctgagtgtcttgtcatgctagcactgcattaagtgatgcatacagatcttgatgtggaagaaatggaggactcagaaccaaggatttccaagtgatttcttccaaagcacaggaatctcactctgttaaagctggtctgttctaactgaggctggagtacaatggcgcaatcttggctcaccacaacctccgcctcccgggttcaagcagttcttctctctcagcctcccgagtagctgggattacagatgacagtcatgtccctttccagggacctcaaggacgactttcacagtgacacggtactctccatcttaaatgagcagcgcattcggggcattttatgcgatgtcactatcattgtggaagataccaaatttaaagcccatagcaatgttctggcagcttcaagcctgtattttaaaaatatcttttggagccatacaatctgtatttccagccacgtcctggagctggacgatctcaaagctgaagtgtttactgaaatacttaattatatctacagttccacagtcgttgtcaagagacaggaaacagtcactgatctcgcagctgcaggaaaaaagctgggaatatcgttcttggaagaccttactgatcgcaacttctcaaattccccgggtccctatgtattctgtattactgaaaagggagtggttaaagaagaaaaaaatgaaaaaaggcatgaagaaccagccatcactaatgggccaaggatcacaaatgcattttccatcatcgaaacagaaaatagtaataacatgttttccccgctggacttgagggcaagtttcaaaaaggtctccgactccatgagaacagctagcctttgcctggagaggacggacgtctgccacgaggcagagcctgtccgcacacttgccgagcactcatacgctgtttcttccgtagctgaagcttacagaagtcagcctgtacgtgaacatgatggcagttcacctggtaacacagggaaagaaaattgtgaagcccttgcagcgaaaccgaaaacatgccggaagccaaagacattctccataccacaggattcggattcagccacagaaaatataccaccccctccagtatccaacttagaggttaatcaagaaagaagtccacaaccagctgctgttctcactcgttcaaaatctccaaacaatgaaggagatgtccatttttccagggaagatgaaaatcaatcttctgatgttcccgggccgccagccgcagaggttccacctctggtgtacaattgtagctgctgttccaaagcctttgacagcagcactctgctcagtgcccacatgcagcttcacaagccaacccaggagcctttagtgtgcaagtattgcaacaaacaattcaccaccctgaacaggttggatcggcatgaacagatctgcatgaggtcaagccacatgcccattcctggaggaaaccaacgctttttagaaaactatcctaccattggacaaaatggaggttcattcacaggtccagaacctttattatctgaaaataggattggtgaattttccagtaccggaagtactttgccagacacggaccacatggttaaatttgttaatgggcaaatgctctacagttgcgttgtgtgcaaacgtagttatgtgaccttatctagcctccgaagacatgcaaatgttcactcctggagaagaacatatccttgccattactgcaacaaagtatttgcattggctgagtacaggacaaggcatgaaatttggcatacgggagaaagacgatatcagtgcattttctgtcttgaaactttcatgacctactatatactcaaaaatcatcagaagtctttccatgccatcgatcatagactttccatcagtaaaaaaacagcaaatggaggcttgaagcctagtgtctatccgtataaactttataggctactgcctatgaaatgcaagagagccccttataagagctaccgaaattcttcctatgaaaatgcacgagaaaacagtcaaatgaatgagtctgcacctggtacctatgttgttcagaatccacacagctctgaattaccaacgctgaatttccaagatactgtaaacaccctgaccaacagtccagccatcccattggaaacatctgcatgtcaggacatacccacttctgccaatgtacaaaatgcagagggtaccaaatggggagaggaggcattgaaaatggatcttgacaataacttttattcaactgaggtgtcagtttcttccactgaaaatgctgtcagttctgacctccgggcaggggatgtacctgttttatctttgagtaatagcagtgagaatgccgcctctgtgatcagctacagtggctctgcaccctcggtcattgtacacagcagccagttttcatcggtgatcatgcacagcaatgccattgctgccatgaccagcagcaaccacagagccttttcagacccagctgtcagtcagtccctgaaagatgacagtaagcccgagccagataaagtgggtaggtttgcaagcagacccaaaagcattaaggagaaaaagaaaactacatcacataccaggggagaaataccggaggagtcaaactatgttgctgatcctggaggatcactgagcaaaaccacaaatattgctgaagaaaccagcaaaattgaaacctacattgcaaaacctgctctgccgggaacctccacaaatagtaatgttgcacccctttgccaaataacagtgaaaattggaaacgaagccattgtgaaaaggcacattctaggatctaaattgttttataaaagagggagaagacccaagtatcagatgcaggaggagcctttgccacaggggaatgacccagaacccagtggagacagcccactcgggctttgccaatccgagtgcatggagatgagtgaagtgttcgatgacgcaagtgaccaggattccactgacaaaccgtggcgcccttactacaactacaaacccaaaaagaaatccagacagttgaaaaaaatgaggaaagtcaactggaggaaggagcacggaaacaggagcccgagccataaatgtaaatacccagcagaactggattgcgccgtggggaaggctcctcaggataaaccctttgaggaagaagaaactaaagagatgcccaagctgcagtgtgaactctgtgatggagacaaagcagtgggggctggaaaccaaggaaggccccaccgacatcttacttctcggccatatgcctgcgagctctgcgccaagcagttccagagcccttccacactcaaaatgcacatgagatgtcacaccggggagaagccataccagtgcaagacctgcggacggtgcttttcggtgcaaggaaacttacagaaacatgaacgcatccacctgggcttgaaggagttcgtctgtcagtattgcaacaaggcattcaccttgaatgagaccctcaaaatccatgaaagaatccatactggagaaaagcgttaccactgtcagttctgctttcagagatttttgtatctctccaccaaaaggaatcacgagcagaggcatattcgggagcataatgggaagggctatgcctgcttccagtgccccaaaatttgcaaaacagctgctgcccttggaatgcaccaaaagaaacacttattcaaaagcccaagtcagcaggagaaaataggtgacgtgtgccacgaaaactcaaatcccttggagaatcaacatttcattggttcagaagacaatgaccaaaaggataacatacaaaccggtgtggaaaatgttgtcctttgagtggcaagaattagaaaaatcttcaaaaatatagttggtggtttttttagttatgatttaagtttagtttcattttgtccatgtgacagtcatgaaggagtgaaattaaaaaaaaaaaaaactcatttgtgaaaattccagaaaaaggatcctaatatctactttgggttttagcattaactttatgcaaagtgcacaaaaacaaaatagctgactcctccaatatcccaagtttcttgtgaaagttaataaaattcttagctgtggtatttctaccagtgaaaaaaggagtttaattttagcctagtttaaaactttctaataattgctaataagaactggctgctgaactgtctttagtcactggagaaaataagggtcagatatcctgaagatggcatcttcgtaaatatgttacgtggtaataagctgtgtgacggtctttattcccatctggcttctgcactattaaaatttgtttaaattaatggatacacatgaaatacttaaacaatataactgaaattatgtgcataatgagtaacctaaagtaggacattcatacattatgtagaactacttttctgcaacacaaaccttgtaaaatacatatataaatcactataacttttaactgtccatatcccctgtagagaattatgaggagcaatagatctgcaaataatgaggactgatgtaaaaatcaatagaaagcattttgaatatgatttaagagcatgtgaatgcttttagatggaatgctgttcccttgaagttatggctgagctgttcttagaactggtctactcaattcacagaaaacataggtcatgccttatctatgggggaacaccctcccagaatttacctgtgattacctgtgctgcatattactttgcaatggcctcatctcagagaatgaaagagggtcacattgttctgaaactctctgcagtcttccaaccaccacaaggccatggatgtgggggtctattccagacagacttaagggctcaagtggaacctgccatctcccattccactgaaggactgtccaagagatttagtgcaaggtacactgcagtagtgaattcccaggcacttgaaagtgactgcctaatccctacaattactagccttgttggagattatgcagcccacaagtacagactagtataaagcaaaaggacaaaggaacccccaccctccaccccacccattaatgacttgagtgggcaagaagaagtgatggccttccttgcctaaaacagtagctttgtttttagggggtgggaaggtaggatgtggagtgacatggttctatcctttacttatgagactcagaaatatatctacaaagccagatgctctgtcttcatatttgcagacatctagaccccttgctaaaaacccactgaagttttttttttatgttctttgacccacaccatcaacactaccctcaaatctaattgccctacagcatattctatcatgtggactaggttcctggaaagccggaactcatgattctttttcaaactgccagaatagaagggagagagaaaacatttctaccctttgatcaccagtgtgaacagaatccggaatgcagtttcagcgtgacctgcagtcattcatgttcattggatttgacagatggaaacccaaggttatcgaagattggaaggttatcattgtgaagaagtagctcaaaggactccggtttctgtctacaagtgtgatgtctccatgaagaagacttagtatggatttgggtgggtaagaaagcatttaaacgcccaggaaaggacatgattaaagttgaccttttaatactgtagtaccttgctgttaagtaaccccactattgtatctgcatttatcttttgttcatctactttcacttacatacagtattatataagtagagaaaaatgggaaaatgcaagcaaattcaactttattttatacattgtatatatgtacaccctacactattcatttgggttttattaaagagatagtcacaaagggcttacgaaaatcatttttgaattgataattagaatattgaataagcaatcctatgatccactaatttgttttatcagttaataatattaatcaaagacatttactgtatattctagtcattttgatttgagttaaccccaaatataaaattacctgtagtgatgtctctctcccagcccttatatgtggatattttttaagtggacttgtatgctgataattctagaccaaagtaaatatggcagaatatttatacatgaaaaaataattttgcaaatattttctataattgtattcatttaaaatgttgatagcttgtgttagtttcagggaggggtgtatattttgataaaaaaatacttgactttgtaattctgtatattctatacaatttatagcagagccgttttaagacagccttgtcacatttttttgttaattgtgaaaattttattgagtgatgtttaagtatgcattgagtacatgaccaactagaattaaagtaagtgtaaacagtgaacatactgtatgctgtacaagatataatgtaacttgctgttttagcatctgtattttggttagaagatattattaaatgcagatgttaaggattggaaaagtctaattttatttttagaaataatggatataaatttgtttttgcttgattaaaatagcttattcctacattaagtctctttttaaatgttttcatgttatttcttttgtgcagctatttcatctgtgtgagtcacagctttgtttccacgtattattcagtttatttctgtttccttacttgtttacattccgtggtacctacttacatgcttaggagtcaaatggattatgacattaggaaaaaagcagaataaaagagattgaagtcttctgatgattgagtgttttggataggcctgatcttataatgataaatcagagaatgaaatgctctccaggaagcattctgctccactcatccgtgggaaacaaattacatttattgagtaccaggcactgggcaatgtctttacataggctatttcattaacacacacgcaccagaattcgacctcattatcctcgttttatagtgactttgagaaggtctcacaaccagacaaagccaggatgctaacctaggtctgcctgactccaaagcccatgtttttgttccttctcaacactgtagagaaaaatcatttatagaaactgaacagagtatgaggaaaggagatatgataaagtaatgcagctttaggatggcagttagtgactgccctggaacaggattaaaggaggctgtgtcaggttcagcttcccctgaattgggcttcccttatatctcaggagattgccctataaaatcagtaaaatttgtgcacttttttaaggatatggagtaaaattgtaatagcattataagctggtaattttcacacaaagaaaaaaatacgttccgtcgtcacagactctactcctaaacttagctaactaactatcttgcaaatgcctgcagtttgtcccagtgggcaatgtgagaggggatgtcggtggctcaggcagcacagtccatcaccaacacagagaaaattactgccaggcctaccggtggctggccagtagcatcaattttgtattggaagggcaatccaaaccagattcaccaaaaatttgataactgttatctgctaaaactaacttcattatgtacaagaacaacagatttaatattgaaagcatctgtaacaattgggaaagtaaaagcataaaacaaaa

SEQ ID NO: 201035 - DNA, 1434 bp, Homo sapiens
  Payload ID: 19680
  Gene Name: zinc finger and BTB domain containing 38
  ENST ID: ENST00000509842
  CDS Start-End: 983-1434
cacagaagccctctagccaaggcctcgggcagccctaccaaatgaatatgggcacttgagttttctaggagggctttcctgctgccctgggtctcatccaactggtatccatctaaacattcccacccagggttattcatgctagaggaagaagaatgccctttccagagccagttcttggggaaaagaggaactgttgatatagccagagcccgaaaagaagattactctgcaacagctaaagcctcacgaaagattttacttgtagatcaactttcaaaatgtaggaagtcagaatgggtgacatcatcagaaaaatatgtggagctgatcacaagaagtgaagaacccagagcacgaaagcggttgtgactcctgggcccagggagttgacagcgtctgggtttcagaggagccagcgcctccgagttgtcttgaagtgaggctctgctgtagtcctgttcttctggctctaagatctgaatgttgtgaccactaatttgctctttcctggagagtaaccccagtttggtccacaaggcttgctgcccaatctttgccaacagttgaaccaagactctgaggctgatatgcaatgtcacttacaacattaatcagatactgcatttaaggttcacagtgtcttcacctggaatagattccacctcaagaaaccagtttctttgctcatccataagaagcaactcctcatctgatcaagttttataataagattgcagaaattcagtctcatctttaggctccacttctagttcttatgctatttccaccacatctgcagttacttcctccactgaagtcttgaatctctcaaagtcatccatgagggttggaaccaacatcttccaaactcctgatcttgatgtggaagaaatggaggactcagaaccaaggatttccaagtgatttcttccaaagcacaggaatctcactctgttaaagctggtctgttctaactgagatgacagtcatgtccctttccagggacctcaaggacgactttcacagtgacacggtactctccatcttaaatgagcagcgcattcggggcattttatgcgatgtcactatcattgtggaagataccaaatttaaagcccatagcaatgttctggcagcttcaagcctgtattttaaaaatatcttttggagccatacaatctgtatttccagccacgtcctggagctggacgatctcaaagctgaagtgtttactgaaatacttaattatatctacagttccacagtcgttgtcaagagacaggaaacagtcactgatctcgcagctgcaggaaaaaagctgggaatatcgttcttggaagaccttactgatcgcaacttctcaaattccccgggtccctatgtattctgtattactgaaaagggagtggttaaagaagaaaaaaatgaaaa

SEQ ID NO: 201036 - DNA, 6170 bp, Homo sapiens
  Payload ID: 19681
  Gene Name: zinc finger and BTB domain containing 39
  Uniprot ID: O15060
  ENST ID: ENST00000300101
  CDS Start-End: 87-2225
gaagcggcggcggcgatggtgctcggggcgccgcagagccggattaactgtgctgataaggaggtaatttcataggagctgctaagatgggcatgaggatcaaactgcaaagcaccaaccaccccaacaacctgctgaaggaactcaacaagtgccggctctcagagaccatgtgcgacgtcaccattgtggtggggagccgctccttcccggcccacaaggctgtgctggcctgtgcagctggctacttccagaacctcttcctgaatactgggcttgatgctgccaggacctatgtggtggacttcatcacccctgccaactttgagaaggttctgagctttgtctacacttcagaactcttcacagacctgatcaatgttggggtcatctacgaggtagctgagcgtctgggtatggaggacctcctccaggcctgtcactctacctttcctgatctggagagcactgccagggccaagcccctgaccagcaccagtgagagccactctggtaccctgagttgtccttcggcagaacctgcccatccccttggagaactccgaggtggtggggactaccttggtgctgatagaaactatgtgttgcccagtgatgctggagggagctataaagaggaagagaagaatgttgccagtgacgctaaccatagcctgcatctgccgcaaccgcccccaccaccgccaaagacagaagaccatgacacccctgctcccttcacgtccattcctagcatgatgacccagccactcctaggcactgtcagcacgggcatccagaccagcacgagctcctgccagccatacaaagttcaaagcaatggagacttcagtaaaaacagcttcctcacccctgacaatgcagtagacattaccactgggaccaactcctgtctgagcaatagtgagcactccaaagatcctggctttgggcagatggatgagctccagctcgaggacctgggggatgatgacttgcagtttgaagaccctgctgaggatataggcacaactgaggaggtgattgagctgagtgatgacagtgaggatgagttggcttttggagagaatgacaatcgggagaataaggccatgccctgccaggtgtgcaagaaagttctagagcccaacattcaactgatccggcagcatgctcgggaccatgtggacctgctgacgggcaactgcaaggtctgcgagacccacttccaggaccgaaactcccgggtaactcatgtcctgtcccacattggtattttccttttctcctgcgacatgtgtgaaactaagttctttacccagtggcagctgacccttcaccgacgggatggaatatttgagaacaacatcattgtccaccccaacgatcccctgccagggaagctgggtctcttttcaggggcagcctccccagagctgaaatgcgctgcctgtgggaaagtattggccaaagatttccatgtggtccggggccacatccttgaccatctaaacttgaagggccaggcctgcagtgtctgcgaccagcgtcaccttaacctctgcagcctcatgtggcacacgctgtcccatctcggcatctcagtcttctcctgttctgtctgtgcgaacagctttgtggactggcatcttctagagaagcacatggctgtgcaccaaagtctggaagacgccctcttccactgccgcttgtgcagccagagcttcaagtcagaggctgcctatcgctaccacgtcagccagcacaaatgcaacagtggccttgatgcacggcctggttttgggctgcagcacccagctctccagaagcggaagctgccagcagaggagtttctgggtgaagagctggcgctgcagggccaacctgggaacagcaagtatagctgcaaggtctgtggcaaaagatttgcccacacaagcgaattcaactaccaccggcggatccacacgggggagaagccataccaatgtaaggtgtgccacaagttctttcgaggccgctcgaccatcaagtgccacctaaagacacactcgggggccctcatgtaccgctgcacagtctgtgggcactacagttccacccttaacctcatgagcaaacatgttggtgtgcacaaaggcagcctcccccctgacttcaccatcgagcagaccttcatgtacatcatccattccaaagaggcggataagaacccggacagttgactgggtcccggcagagccacggggagctcccaagcagcagccaggatgctgatatctaagaggtgttggtccctccccagctgaagttataattttgccttggtaggaattctgttctgtgttgtgtttaaagaagaaaagaagaagaaatagcacataagctgttactgttgttgagaagcaacagccctatcacatttacctccatacctgttcttgcccatgcagggctatgtttttcattcttttgaggctggttttgggatctagtcaagcagttggtgtccactagacccccttccccagcctctctagttttagtttactgataggttttatgctgctaagaatccaaccaacagcctcacttaacagaggaggtaaagggaggttttcactgtgggtgttactgcaggcctccaactgggatgaccagcaatgagaaagattttgggaatgtgatcattcagaaaagacaggtcagcagggcagtcccctcaggttccagccctcagcagggacaagacatcagggatgttggtgtctgcttatctacagccctaatctgctgattgaacagtgaaaatcttttggcagctagatccatactaggcacagagctttctatttaggtcagaaagctttgggatgaacccctgccagccagaaggggtgtcctgcagtgccaccagaagtggcagcctggatggacaggagaggtttctcttttctcctcatttccaaagaaacaggattttatggagtgatggcccgggacgtccggccttctgtggggcagagaggatagggaaccactttgatatagtcatctgttttggccacttctgttggccatgagtgtcttggtggagaggtggggatgtatctgacagcagcagccttgccttaatttatatctggtctcccgtccagaagtgtttggcccgtggtgtagatgagctgactccatgaagtggtggagtggcagaccgcgagcccttcaggattaaagggacctgagtaactggtggtgtgtagcagggtgtgcgttctgactgtctgtcctagtcgggtaacctgtttactttgtgctaacagtgccggagctttgtcagctcacctttgacctgctggaatttatcctgatctgtcgttgccatcacctccagggggcgctattggatggcagctggttcaggccctccgtgggtggctgcagagtgtgccggcacagcccacgcagctggttagctccactcttacttggttttctaaggggctttgcccaaagaagtcttgagggatagggccctcgatcttgcatacttgtgaggtgccacctcagtagctcatactacctcaccctgctcaggtgagctctgggagtccctggcctcagccctggcactgcccctggtgggattcagcaacaccccgggctgtttcacaagcaagtggttttcattaactcacaaagcctttttggacattaatatttatttatttttgtttttgtatacacattacccagcatctcttttgtataagagactttaggaaaatgagtttctccccagcaagtagccatattccagagaacagccttgaccagagatgtggagaaccaggggtataactaagggaagacatgtcaagcccttaagcaaattcttcttctccagattgtctctagcataataaacccagggaacactttaggccatgggtgtatgttctataaagttcgggacagttaaattccaggcctttcatcccccttccttcctgtgatggagtagattggggacagggttgaggggaacaagtgacatgaatgacctatttgcacagtttggaagcctcctgtctttatttatattgagatgtcagacaaaccaaagctccatccttgttggacctgctgcttctccccagccctgaactgataaagcctcagagttggagtgcctggctctctggtggggtgaccattagatgaagggacttgtacagtggccagtttaaaggtccacctttgaccatctaaacccaccttgttcagtgtcctctgaggacatcctcatcaggaaagcagtgttgagactcttcattgctgactggcttctccctttcttactcacactgaccattagaatttaagaaggaaatgtgtaacagactacagtcaagtgtctgctacattttcaagcatgagcaatccctcccagactgttggtgaggactgatttttgaaatgctggtgtgagagaggtggtaattacaggaaccagccgagtggctgagagcagataaatgtgctggagaaacctttttccttaacagagggcatcatggatgctgggtggtctgtgtacttaacctgaaactgtgaagttttccctttttgccagtaaaccaaaaagcagatccttgaaacttggcccttgaaacacgaaacagaaaactgcatcccctgatcccccgggggctgatcagattgatcagggtggctcagttggtcccagtcagatacgtcataggatcagtagctcatgagatttgttgaccaaaccctctccctgttggtgacccctgtattcacacctgaacttcccgtttccccccaccccaccaaagtcatgtctgcttcctctgcctccagctcaccctcttctgaatggttttgcttgaaacactatattgtggcagagggcaccctgggatacctggtagaaggtattcattttattttgcatttttaattgttttgactttctgttcatttgattttgttgctccctctctcctggaacctagtttactactctcttctgtgttactctgaagttctgtttaagccttgaacatcctcttctcccattttcttggtatgtactcaggaccagctacatcatttgtggagccctcttattcataaattattaaaaatttcaaggtggtggtcatagagcattaaaccaaatatgaggccattcccaacttgttttccgaggggaaaatggtaatacttgtgtggcacccggggttaaacagcagaggctccatgtggccagaggcagagattagtatcctggcactccagtgacccactgggtgactcactgatgccacagcacccgctaggaagctctgctgaaccttagtatttggtcctaaattttatgactccatggagttcccgtagtccatggctagttaggaagaaaggaggtgggataagggtcaggcccaggtgacccctaagaaccaggagatgggtaaaagtttttttttatattctgcttttctgatctgtgagtacctgtttgtctccaggccaaacctttgggcttaaatatctttttcctagacaggtttttgctagtgttgaattttcttcttcctctggcctccttctgtgcccctttccccaagcccaagactgcttaacttccaaagcaaattctagatagacactgtatttattggtatgggagtgggctctatggggtggtctgcacccatctgggactcttttccctaaatcctgcaccaaatgagtcaggaggcagggtgcacagcattagtttcaatgtggttatgcatcataagcttaacatcagaatgaaaatgaaactcgattttgatgtttctttaaaacccttcccctgtccaatccactcgccgcccccaccttgaatagctaaagtctcttatgaaacagagaagagttgttgacgtctaactccttccattaaattaataagtactgacctcctaatatttaagtgtttactatctattgctgtaaagttttgtatattttgtaaacttttttccccaaatagtagatgtctaaaatcattgtacatctgattcttttatattccattgttcagcacaaagtgtggtttttatttagaataaaaaaagaaatttgaaatg

SEQ ID NO: 201037 - DNA, 5956 bp, Homo sapiens
  Payload ID: 19682
  Gene Name: zinc finger and BTB domain containing 4
  Uniprot ID: Q9P1Z0
  ENST ID: ENST00000311403
  CDS Start-End: 341-3382
aaggggtgcgagccagagtcgtgggtaaaccccccgctcgctggttgggcgaccttttgaagtgacagggagagaagaatttttttctttaatcccaccgcctctcctcgctgctcccttttgcactgaggcttaaggtttgaagactcgagggtaaaattgggccgctttcattctagtttggacaacggtttcatcttcagcaaaagcctctcattcgtagccccccccagctggaaaatggtctgctctgcgaatcgaaggaagaggcccagcagaagggactcgctgagccaccccccgccccactccatgttggctgtgctctcaggctggcaccatgcccccccctgcagaggtgacggacccgtcccatgcccccgccgtcctgcgccagctcaatgaacagcggctccgtggcctcttctgtgacgtcaccctcatagccggagacaccaagttccctgctcaccgcagcgtcctggctgcttcaagtcccttcttcagagaggccctgctcacttcagccccactaccccttccaccagctactgggggcgccgcacccaaccctgccaccaccacagctgcctcttcctcctcctcctcttcctcgtcttcttcctcttcttcctcctctgcttcttcttcttcttcctcttcctcttcctctccccctccagcctctccccctgcttcttccccaccccgggtcctggagttgccaggagtcccagcagctgcgttttctgatgtcctcaacttcatctacagcgcccggctcgcactgcctggtggtggaggggacggggcagctgtagcagagattggagctttggggcgccgtctgggcatctcccgccttcagggcctgggggagggaggtgatgcctgggtacctcctaccccagcccccatggccacctcgcagcctgaagaggacagctttgggcccgggcccaggccagctggggagtgggagggtgacagggctgaggcccaggcccctgacttgcagtgctccctgccccggcggcccctcccctgcccccagtgtggaaaaagcttcatccatcccaaacggctgcagacccatgaggcccagtgccgacgaggggccagcacgcgggggtctacagggctgggagctgggggcgctggccctggtggtcctgcaggggtggacgcctcagccctgcctccaccagtgggcttccgagggggccccgagcacgtggtgaaggtggtgggcggccacgtgctgtatgtgtgcgcggcctgcgagcgttcctacgtgaccctgtccagtctgaagagacacagcaatgtacactcgtggcggaggaagtacccctgccgctattgtgagaaagtgtttgctctggcggagtaccgcacgaagcatgaagtgtggcacacgggggagcgcaggtaccagtgcatcttctgttgggagacctttgtcacttactataacctgaagacccaccagcgagccttccacggcattagcccgggcctccttgccagtgagaagacacccaatggaggctacaagcccaagctcaatacactcaagctctaccgcctgctccccatgcgggcagccaagcggccctacaagacctacagccagggagccccggaggctcccctttctccaaccctcaacacaccggcccctgtggcaatgccagccagcccgccgcctgggcctccacctgccccagagcctggccctccaccctctgtcatcacttttgcccacccagccccctctgtcattgtccatgggggcagtagcagtggtggaggggggagtgggacggccagcacaggagggtcccaagctgcctcggttatcacttacactgctcccccgaggccacccaagaaacgagaatacccacctcctccccctgagcctgcagccacacccaccagcccagccacagcagtcagcccagccaccgctgcagggccagccatggccaccaccacggaggaggccaagggccggaatccacgggctggaaggactctgacttacacagccaagccagtgggcgggattggtggaggtgggggtccccccacaggggctggccggggcccctctcagctgcaggctccacctccactgtgtcagatcactgtgcgaataggggaggaggccatcgtcaagcgccgcatctcagagactgacctgcgtcctggggagctgagcggagaggagatggaggagagtgaggaggacgaagaggaggaggacgaagaggaggaggaggaggatgaggaggaatcaaaggctggtggggaggaccagctctggaggccctactactcctacaagcctaagcgcaaggctggagctgctggaggtgccagtgtggggggcagtgggctgccccgaggccgccggccaccacgttggaggcagaagctggaacggaggagctgggaggaaaccccagcggccgagagcccagcgggacgtgcccgcacagagcggaggcaccgatgcggggactgtgcccagaccttcaccaccctgagaaagctgcggaagcaccaagaggcccacggtgggggctcccacagctcccgggccggacggaggccctccacccgctttacctgcccccactgcgccaaggtgtgcaagaccgcagctgccctgagccgccacgggcagaggcatgctgctgagcggcccgggggcaccccaacccctgtcattgcctattccaagggcagcgctggcaccaggcccggggatgtcaaggaggaagccccccaagagatgcaagtctcctcatccagcggtgaggcaggtggcgggagcactgctgctgaggaagcttccgagaccgcctcactccaggaccctatcatttcagggggtgaggagcccccagtagtggcaagcgggggcagctatgtatacccacctgtgcaggaatttccactggccttgattgggggcggccgggaacctggcggtggcaggggaaaatctgggagtgaagggccagtgggggctggtgagggggaccggatggaggggataggggctgccaaagtcactttctaccctgagccctacccgctcgtctatggcccccagctccttgccgcctacccttacaacttcagtaacttggccgctctcccggttgctctcaacatggtcctacctgatgagaagggtgcgggggcccttcccttcctaccaggggtctttggctacgcagtgaatcctcaagcagcaccccctgccccaccaacaccacctcccccaactcttcctccaccaattccccctaagggagaaggggaaagggcaggggttgagagaacccagaagggcgatgtggggtgaaccctggggctcaatccccctttcaccagatgccaccctccctgaaccccccaccactaccagctccctggcctccctgccccttgggagccccttcacactcttgtgcagggacttgggggcccctggagctcaggggtcaggctgctttgtgtgagatgtagttttcccatctcctgggaagggatctttcgaggttcccctctcagtcttcctccagggaatggcctccatgaggggcagggccagcttccatcccttctccagcccttggggcaactgagcaatatacttaacctgaatctctactcacagcccccaccagctctgaatgtctaacctgctcccctgattcgtaaacctaggggaaaccatctctctcacctaatgacccgccttgttctgaagctttctctaagcccttcccagttgcttcctagcacattccattctttgtggcccagggcctggaccagaccattgtgatacctgaccccgcccacctgggagtgtggctttgggtttcatccttccccagcgtgggtctctacgtccctgtttcccttgtatcaagacaccttcctcagcttccatgcctttggatcttccatgttcctccccatattcctggacttcggagatggcctctcccaagccaggtcaaggaggtttgggggagggttgcccctctgcccctctgttctgtggctgagcactttcccagtccagggcagggaaatattggccctatcttgacccccaaatccagtgagctccagattcttccaaggcaaaagaggtaagcagatcacacctctttctgcctctacatatggcctattctgggctagaccagatttgggggccaggagggaagaactccatatgggatggagaagggaatctactttctccctgtttttttttcctgatggtttctcccagactagaccaaatagccagaaaaatgataggggtcggatgggtgggtaagcccaggatttgcacatgaccttccatccttacctgtattcccatctccccagtgtcactcccctcaccaatcactccagatggttttgggggaaccattctactcttctggtgggctttggggtatccccaccaactttcccttcaaaatagcaccttacaccccatctttgactcagttccccacacccaaagatcccagcctagggatggggtacagggactttaaatagtccctaatccctaatttgcactagttaaccctggtcagggtccctgtatttccttccagtgggggagataaatgtttgctcctaattctctttgaaaactgggcctccctgctctgtgattggataaatatttcccatcccacccacctccccccaaaaaatagctcacaaggggagagccagtatgggggagcaaatttgacaaatgggaattagaggagtgcagttttaaaaggaaaagttgctgtcatcaaaatggcagccttttccccagctactgtttttggggccaagatggctgccctagcagcaatcactgccaagggcaagatcatggcttttggagggaggtgagtttagggagggccaggaccatcctcctacccctcataccctcccagcatatacaaaaggggaggttttagacaggctccctgaatgttaaccacagaggagtcactccttcattcctcctctgtctctttgcacttttcttggtcttggccacagcctgagtgacgaatttcctactgaatgtaccaagttccaatttttaagggggggaaaggtttcaaatggggaaaaacacacaaaaaaaaaaatcactaaaaattcccacaaatcttgtttctggcactttagaaaaactgcaaaaaaatacgtaataaagaatacatatatatatatctacacacaaattatatatctatctatctatacagcggaaccacaagagagactgaggaaggcctggaggcaggggcagaggtgacgacagtgcccctatatccttaacccatactcctctgaggcaaacaggcatgggaaaatggaagggttgaggatggaccggagaattggaacttcagaataggtcaaaattccaaaaccatggacatttttttttgggagaattgagattgtagacattttttttttcttaaatatgatcaaggaaaatagcttccagaatgtggtggttctgggcaacaaatgagattgtggcgacgtggagattaaaatatatgtatttgagctggggaatttgaatattgtgagtttcagatgttggaaatttgggattttgcagttttgtcttttgaaaatgatcaagtcttgtcagttcgtgccctctttccccatgttccctgggaagacgggtggtggcagagtgagaaggccactggttctgtgccgcagcacgcaaaatttagaattctacagactagctctatacgtagtgaggacccagatttagagaaactgaccaatatttatctccgcatttgtgtgtgtgtccaactctgtaggccaataaaccaacaagacaaatgaactgtgctccaca

SEQ ID NO: 201038 - DNA, 5866 bp, Homo sapiens
  Payload ID: 19682
  Gene Name: zinc finger and BTB domain containing 4
  Uniprot ID: Q9P1Z0
  ENST ID: ENST00000380599
  CDS Start-End: 251-3292
gtcagcggcggcggcggcggcggcagcggggccgggccggggccaggcgctgggggggccagggccggagctggagccggagccggagctggaggcgggcaaaaccggagcggccgggggcggccacggtgatgagccgggcctggcggacgcggcgccatcgcagtcagaaggaagaggcccagcagaagggactcgctgagccaccccccgccccactccatgttggctgtgctctcaggctggcaccatgcccccccctgcagaggtgacggacccgtcccatgcccccgccgtcctgcgccagctcaatgaacagcggctccgtggcctcttctgtgacgtcaccctcatagccggagacaccaagttccctgctcaccgcagcgtcctggctgcttcaagtcccttcttcagagaggccctgctcacttcagccccactaccccttccaccagctactgggggcgccgcacccaaccctgccaccaccacagctgcctcttcctcctcctcctcttcctcgtcttcttcctcttcttcctcctctgcttcttcttcttcttcctcttcctcttcctctccccctccagcctctccccctgcttcttccccaccccgggtcctggagttgccaggagtcccagcagctgcgttttctgatgtcctcaacttcatctacagcgcccggctcgcactgcctggtggtggaggggacggggcagctgtagcagagattggagctttggggcgccgtctgggcatctcccgccttcagggcctgggggagggaggtgatgcctgggtacctcctaccccagcccccatggccacctcgcagcctgaagaggacagctttgggcccgggcccaggccagctggggagtgggagggtgacagggctgaggcccaggcccctgacttgcagtgctccctgccccggcggcccctcccctgcccccagtgtggaaaaagcttcatccatcccaaacggctgcagacccatgaggcccagtgccgacgaggggccagcacgcgggggtctacagggctgggagctgggggcgctggccctggtggtcctgcaggggtggacgcctcagccctgcctccaccagtgggcttccgagggggccccgagcacgtggtgaaggtggtgggcggccacgtgctgtatgtgtgcgcggcctgcgagcgttcctacgtgaccctgtccagtctgaagagacacagcaatgtacactcgtggcggaggaagtacccctgccgctattgtgagaaagtgtttgctctggcggagtaccgcacgaagcatgaagtgtggcacacgggggagcgcaggtaccagtgcatcttctgttgggagacctttgtcacttactataacctgaagacccaccagcgagccttccacggcattagcccgggcctccttgccagtgagaagacacccaatggaggctacaagcccaagctcaatacactcaagctctaccgcctgctccccatgcgggcagccaagcggccctacaagacctacagccagggagccccggaggctcccctttctccaaccctcaacacaccggcccctgtggcaatgccagccagcccgccgcctgggcctccacctgccccagagcctggccctccaccctctgtcatcacttttgcccacccagccccctctgtcattgtccatgggggcagtagcagtggtggaggggggagtgggacggccagcacaggagggtcccaagctgcctcggttatcacttacactgctcccccgaggccacccaagaaacgagaatacccacctcctccccctgagcctgcagccacacccaccagcccagccacagcagtcagcccagccaccgctgcagggccagccatggccaccaccacggaggaggccaagggccggaatccacgggctggaaggactctgacttacacagccaagccagtgggcgggattggtggaggtgggggtccccccacaggggctggccggggcccctctcagctgcaggctccacctccactgtgtcagatcactgtgcgaataggggaggaggccatcgtcaagcgccgcatctcagagactgacctgcgtcctggggagctgagcggagaggagatggaggagagtgaggaggacgaagaggaggaggacgaagaggaggaggaggaggatgaggaggaatcaaaggctggtggggaggaccagctctggaggccctactactcctacaagcctaagcgcaaggctggagctgctggaggtgccagtgtggggggcagtgggctgccccgaggccgccggccaccacgttggaggcagaagctggaacggaggagctgggaggaaaccccagcggccgagagcccagcgggacgtgcccgcacagagcggaggcaccgatgcggggactgtgcccagaccttcaccaccctgagaaagctgcggaagcaccaagaggcccacggtgggggctcccacagctcccgggccggacggaggccctccacccgctttacctgcccccactgcgccaaggtgtgcaagaccgcagctgccctgagccgccacgggcagaggcatgctgctgagcggcccgggggcaccccaacccctgtcattgcctattccaagggcagcgctggcaccaggcccggggatgtcaaggaggaagccccccaagagatgcaagtctcctcatccagcggtgaggcaggtggcgggagcactgctgctgaggaagcttccgagaccgcctcactccaggaccctatcatttcagggggtgaggagcccccagtagtggcaagcgggggcagctatgtatacccacctgtgcaggaatttccactggccttgattgggggcggccgggaacctggcggtggcaggggaaaatctgggagtgaagggccagtgggggctggtgagggggaccggatggaggggataggggctgccaaagtcactttctaccctgagccctacccgctcgtctatggcccccagctccttgccgcctacccttacaacttcagtaacttggccgctctcccggttgctctcaacatggtcctacctgatgagaagggtgcgggggcccttcccttcctaccaggggtctttggctacgcagtgaatcctcaagcagcaccccctgccccaccaacaccacctcccccaactcttcctccaccaattccccctaagggagaaggggaaagggcaggggttgagagaacccagaagggcgatgtggggtgaaccctggggctcaatccccctttcaccagatgccaccctccctgaaccccccaccactaccagctccctggcctccctgccccttgggagccccttcacactcttgtgcagggacttgggggcccctggagctcaggggtcaggctgctttgtgtgagatgtagttttcccatctcctgggaagggatctttcgaggttcccctctcagtcttcctccagggaatggcctccatgaggggcagggccagcttccatcccttctccagcccttggggcaactgagcaatatacttaacctgaatctctactcacagcccccaccagctctgaatgtctaacctgctcccctgattcgtaaacctaggggaaaccatctctctcacctaatgacccgccttgttctgaagctttctctaagcccttcccagttgcttcctagcacattccattctttgtggcccagggcctggaccagaccattgtgatacctgaccccgcccacctgggagtgtggctttgggtttcatccttccccagcgtgggtctctacgtccctgtttcccttgtatcaagacaccttcctcagcttccatgcctttggatcttccatgttcctccccatattcctggacttcggagatggcctctcccaagccaggtcaaggaggtttgggggagggttgcccctctgcccctctgttctgtggctgagcactttcccagtccagggcagggaaatattggccctatcttgacccccaaatccagtgagctccagattcttccaaggcaaaagaggtaagcagatcacacctctttctgcctctacatatggcctattctgggctagaccagatttgggggccaggagggaagaactccatatgggatggagaagggaatctactttctccctgtttttttttcctgatggtttctcccagactagaccaaatagccagaaaaatgataggggtcggatgggtgggtaagcccaggatttgcacatgaccttccatccttacctgtattcccatctccccagtgtcactcccctcaccaatcactccagatggttttgggggaaccattctactcttctggtgggctttggggtatccccaccaactttcccttcaaaatagcaccttacaccccatctttgactcagttccccacacccaaagatcccagcctagggatggggtacagggactttaaatagtccctaatccctaatttgcactagttaaccctggtcagggtccctgtatttccttccagtgggggagataaatgtttgctcctaattctctttgaaaactgggcctccctgctctgtgattggataaatatttcccatcccacccacctccccccaaaaaatagctcacaaggggagagccagtatgggggagcaaatttgacaaatgggaattagaggagtgcagttttaaaaggaaaagttgctgtcatcaaaatggcagccttttccccagctactgtttttggggccaagatggctgccctagcagcaatcactgccaagggcaagatcatggcttttggagggaggtgagtttagggagggccaggaccatcctcctacccctcataccctcccagcatatacaaaaggggaggttttagacaggctccctgaatgttaaccacagaggagtcactccttcattcctcctctgtctctttgcacttttcttggtcttggccacagcctgagtgacgaatttcctactgaatgtaccaagttccaatttttaagggggggaaaggtttcaaatggggaaaaacacacaaaaaaaaaaatcactaaaaattcccacaaatcttgtttctggcactttagaaaaactgcaaaaaaatacgtaataaagaatacatatatatatatctacacacaaattatatatctatctatctatacagcggaaccacaagagagactgaggaaggcctggaggcaggggcagaggtgacgacagtgcccctatatccttaacccatactcctctgaggcaaacaggcatgggaaaatggaagggttgaggatggaccggagaattggaacttcagaataggtcaaaattccaaaaccatggacatttttttttgggagaattgagattgtagacattttttttttcttaaatatgatcaaggaaaatagcttccagaatgtggtggttctgggcaacaaatgagattgtggcgacgtggagattaaaatatatgtatttgagctggggaatttgaatattgtgagtttcagatgttggaaatttgggattttgcagttttgtcttttgaaaatgatcaagtcttgtcagttcgtgccctctttccccatgttccctgggaagacgggtggtggcagagtgagaaggccactggttctgtgccgcagcacgcaaaatttagaattctacagactagctctatacgtagtgaggacccagatttagagaaactgaccaatatttatctccgcatttgtgtgtgtgtccaactctgtaggccaataaaccaacaagacaaatgaactgtgctccaca

SEQ ID NO: 201039 - DNA, 8368 bp, Homo sapiens
  Payload ID: 19683
  Gene Name: zinc finger and BTB domain containing 40
  ENST ID: ENST00000374651
  CDS Start-End: 224-3607
gatacccattgcgcgccggcctcaagatggccgccttctggcgtctccggcgctgttgaatggcgaaagctttattgttcccttcgggcaggagtgttcgtgtcctctatggcgctgtcaataaagaacggcagtttgaatcggtgctgaacagggcctgtcctcccaaagccaactctaaggagaggagaggaagagcagttcttggggcagagttgacgcaatggagctccccaactacagccggcagctgctgcagcagctgtacactctgtgcaaggagcagcagttctgtgattgcaccatctccattggtaccatttacttcagggctcacaagcttgtcctggctgctgccagcctcctgttcaaaaccctgctggataacacagataccatctccatcgatgcatctgtggtgagccccgaggagtttgcgctcttgttggaaatgatgtacacgggcaaactacctgtgggcaagcacaacttctccaaaatcatctccttagcagacagtctacagatgtttgatgtagctgttagctgcaaaaatcttctgaccagccttgtaaactgctcggttcagggtcaggtggtaagggatgtctctgcgccatcctcagagacattcagaaaggaaccagagaagcctcaagtagaaatcctttcatctgaaggtgctggagagcctcattcttccccagagcttgctgccactccagggggccctgtgaaagctgagactgaggaagcagcccattcagtttcacaagagatgagtgtgaattctcccacagcccaggagagccagaggaatgcagaaaccccagcggagactcctactacagctgaagcttgttccccctcccctgctgtgcaaacctttagtgaggcaaagaagacaagcacagaaccaggatgtgaaaggaaacactaccagctgaattttcttctagaaaatgaaggtgtcttctcagatgcactcatggttacccaggatgttttaaaaaaactagaaatgtgttcagaaattaaaggtccacagaaggaggtgattctgaattgctgtgagggcagaacacccaaggagacaatagaaaatttgttgcacagaatgactgaagagaagacgctgactgctgagggtttggtaaaactcctccaggctgtgaagacgactttcccaaacctgggccttctgctagagaagttgcagaaatcagccactttgccaagcaccacagtccaaccaagccctgatgattatgggactgagctattgagacgctatcatgaaaacctctctgagattttcacagacaaccagattttattaaagatgatctcacacatgacaagtttagcccctggagaaagagaggtcatggagaagcttgtgaaacgtgactctggttcaggtggtttcaattctctgatatcagcagttctagaaaagcagactctctctgccacagccatttggcaactgctgctggtggttcaggagacaaagacctgtccattggacctgctcatggaggaaatacgaagggagcctggtgccgatgctttcttccgggcagtgaccaccccagaacatgccactttagaaacaatcctgaggcataaccagttgatcttggaggccatccaacagaagattgagtacaagctctttacctcggaggaggagcacctggcagagactgtgaaagagattctgagcattccctctgagacagccagccctgaagcttccctgagagcagtgctgagcagagccatggaaaaatcagtcccggccattgaaatatgccacctcctgtgcagtgtccacaaatcttttccaggcctgcagcctgtcatgcaggagttggcatacattggtgtccttactaaggaagatggagagaaggaaacgtggaaggtgagtaataaatttcaccttgaagccaacaacaaagaagatgaaaaggcagccaaagaagacagccagcctggggaacagaatgatcaaggagagactggttccttgccaggacagcaagagaaagaggcttcagcctccccagaccctgccaagaagagcttcatctgtaaggcctgcgacaaaagcttccatttctactgccgcctaaaggtgcacatgaagcgctgccgggtggctaagagcaaacaggtgcagtgtaaggagtgcagtgagaccaaggattcaaagaaagagctggacaaacatcagctggaggcccatggtgcaggtggagagcccgatgcccccaagaagaagaagaagaggcttccagtgacatgtgacctctgtggcagagaatttgcccatgcctcaggcatgcagtaccataagctgacagagcacttcgatgagaagcctttctcctgtgaagagtgtggggcgaagtttgcagccaattccaccctgaagaaccaccttcgccttcacaccggggaccgcccgttcatgtgcaagcactgcctcatgaccttcacccaggcctccgccctggcctatcacaccaagaagaagcactcagaagggaaaatgtatgcatgccagtactgtgatgctgtgtttgcccagtctattgagctgtcccgccacgtgaggacccacaccggggacaagccctatgtctgcagagactgtggcaagggcttccggcaagccaatggcctctccatccatctgcacacctttcacaacatagaagatccttatgactgcaagaagtgcaggatgagtttccccactcttcaggatcaccggaagcacatccatgaggtgcactccaaagagtaccacccctgccccacgtgtgggaagatcttcagtgccccgtccatgctggagcggcacgtggtgacccacgttggagggaagcccttcagctgcgggatctgcaacaaggcctaccagcaattgtctggtttgtggtaccacaatcgaacccaccaccctgacgtatttgctgctcagaaccaccgatcttccaagttctcatcactccagtgcagctcctgtgacaaaaccttccccaacaccattgagcacaagaagcacatcaaagcagaacatgcagatatgaagttccatgaatgtgaccagtgtaaggagctcttccccacgccagccttgctgcaggttcatgtcaagtgccagcattcagggtcccagccattccggtgcttgtactgtgctgctactttccgttttcctggagcattgcagcaccatgtcaccacggagcacttcaagcagtcagagaccaccttcccctgtgagctctgtggggaactcttcacctcccaggcccagcttgacagtcacctggaatctgagcacccaaaggtgatgagcacggaaacccaggccgcagcctcacagatggcgcaggtgatccaaaccccagagccggtggccccgacagagcaggtgatcactttggaggagacccagcttgccgggtcgcaggtgtttgtgacgttgccagattctcaggcatctcaggccagctctgagctcgtggcggtgactgtggaggacttgctggatggcacagtgacgctgatctgtggtgaggccaaatgagcagcctttcatccggcagagccttcctgcgtttgcagcagagaggaggccccacagcttgccctttgccctccatccctggctgtcctgagtggtgagcatcttagcttagcaccaaccaacacagtctcacctagaaaacagatggaagcttcgttgttctcatagaaccaacagcatctgagccctcaacaccaacagcaccatcctctgtagcagacaggcctccctccccacaggcccgctgctgcggcctctatgacactgtccatccccaagtgacatgtggcttcagaagtagagtctgaaagagcagtgggatgggagctggtgaccagggtaccccaggaggcatgatgtgccgacagcgctcagtgggcagaatggcagttagatatgggacttggcccacagtgggggctgcaaatgctgccactgcctctggccatttaaagtgagaggggcaccaacagacaattcggggaccttaggccccttcctgaggcacacttggccccttcctcggtcctatcatcctaccctctgctggggttccccctccacccagtggccacgcccagcaccctattgatggctataggacaggtagccctcatttccatgcctgataaccccttgtcagttgtcagctcttcccaaaacaaagctctggagtttctgctggaagtgtttaatgtgaggcatcagctgctagacagtgtctgcctttccaggacattcttcttggtattccttacctgaagcctggttcccacagctcttccgtgtcatcttcatccccttcctttaatcaaaggctgaaatctctgcctgacctggcagcctggctccctctgggtcatatggtgcagactgtgaccagcaccaggcaggcagtcctgtctgcgtgtggaggagcagccgtgactgcccgtggctctgctgccgcccactccctgccttgtgagtggcctgctgcctcacctcccgcaggccgccacacttattgcaggtcagtgatcctttggagtttgaatttcacaaagctttttttatcttcagttcctaaaatataatctgataattaatggtttgtggaatccattatgaagtgcaattagatagatgtaggttcctgccgtttggagagaatgactagcatttatcttcttttccttccatgccaaaggttggagtctgctggtgcggtgtttacacaccaggcagggctgtctgccaccttgtgtggcttgaccccctgtggaggggagtgcctggttggatcccacactggcagagatggggccaccccttccttccaggcacatctcacattgccatgtacagaggcaggagtcacgtttggtcaccatggaagcttttattgctcccacatggtcaggtctcaccctgcttgaagcgcagaaggcacagccttactgaccagcacgcccactgactggcatctgccggctttgtgcaggcagccccgacggtttccacagcgagcgccagctccggccagcctgggacagctcatcccagccgactacacctgcttctggtcctgtccacattttgatacgcagatcacttgagcttgtcaattagggttctgccattctgaaataaatgaagtttctaaagcagagtcggcctcagaagccaaaaactgaccagaagatggtgctcaaacctttaagacttcatctccatgtgaagggctcactgtttctaccaaggctgtgcctgtattaaggcttttccgtcctgggaactgtcagtctgggagagctcttgatctgcaggtggcaaaatggcactgaatatccccttggcagcagagaaaacccactgaaagatcgtagagtggcacatgcttacagggcattggtgccaagtccagtggatgagaatccagcccctcacaagctgtgggatggggcttgggagttgcagtgaatgtcattaaaatttcttccaaaacaaaactagaaataattgctgagggcttatagggaagtgatttaaaaagaaaaaacaaacaacaacaaaaaaaactcttcggaataaagagggctgtaaattttgaattccagtgtcagatcctttcaagcactgagaaattctttctcaggtttctttttttgggggagacagggtcttgctctgtcacccagactggaacacagtggcacgatcttggctcactgcaacctctgcgggctcacgcaatcctcctgccacagcttcccaagtagctgggaccacaggcgtgagccaccactgctggccagtttttgtatttttttttttttttgtagagacagggtctcgccatgttgcccaggctggtttaaaactcctgagctcaagcagttctcccacctgggcctcccaaagtgctaggattacagacatgagccactacgcctggccaggtttctgttggagacccagattgtgacaagacatttgttttcttcggaatcaccagatttgcagcttactgtgccgagagtggactggctgccggggcccatcagatgccctctggcccatggcacactcagcagaaggcacaaacccagtgctggttctcatcaagaaagaggggaaggcccttcccgagtttactgtctgctctgagtgggctccgcactggctgactgattttatagtcttgctctctagagaagcccaggcatggatcttataggaaaactttctgactctgcttggccattttatccttttctcctacttctgcccaagagacctgaattgctgccatagaggacagtgtttgtgtggtctcctgagtccacatcgctcgcttccatggggtcccggtgttgtttttgcctcgttccccataggctgctgcccttatggcctctggactgaactctggggcctttggggtggtgtgaaggagtctgtgggcttcttggaacacatggatctgttcggtgggtccccagacctctgctcccagagctcatggcccaggtggtgaggagggaaaggcagtcagattccaggctggagtgtgattctgtgggaatactggggtcagttatggaacaggacttgcccatcataggtaagtgagacagcaaatagatgattcaagagcaaggattactgcgggaaggtgagactcctactgtccacgcgcatgagcagaacctggaaccagaggggcagggaccaggggtctttactcatttattttatgggtaaagagacatgaagagacagcctctctcttctgtctcagaagctctgtgtttgggaaactttgagcccagtgagtagcagggtctgcagtgtgagtaccaggtttccctggcaatccaggtctcctctgaggaagcattctgacttcccactgaccacggaaggcatgtcagcttcatgcctcgggctagagttctgataatcggggctgaggggtgaaaagaaatccagtcagacagacagtggggagacaggtccctgccctttatttgcgggatcaatcagggactcccagaaaggaaggagaatggtgagaagggccctaagagttcgtctctcacctgggggctggtgacgtggtcaccacaagctgaagacaggctaatggggtggcgggtgtgtgtttaaacctcacgtgcctggaagctgcacattgaccaaaggagggagggaagtgctaaccatgtatagagtgggcaggcggttccagggagacaagcagcatgttattaaattgggcctaggcagttggacgataatggagaaaaagcagggatgctataatgagtcctccccaagggtgagttcagcaccccagccctgttctgcttgtatcccagtgatacttgggaggtaggaagaaaatgggagtaagagaacaatttggggctgaagggagtgtcagaggcacgttgatccttgttttgttgtcatggaaacttcggggctggtgggacttaggccaaaagctcagaggcacagccaaaatttagaagcttgctactcctacgactcggcctataaggaagagagaagctgtctgtactttggggactacattgctgaaggaaaaaaatcactccctggctaattaagattgcttccaaattgggggaatgtgtgtcatttcctttaccaaggccagtcatccctgcttccacccatggtcaggacagtcagccactacgtgatgctgtataaattggattacaaaccatattcttgttcagcttgcactaatctatataaataaaatatgtactttgaaaaaaattaggctacatgagtttcaaatggactgtgatgttatagacctgctttctctttggttctgggccagtgtcagacggggacaggggtgataggcctggtgtcctaggggccatttgtgtaccttgaggccgtgttaacatggcctgggggaaagaaagctctcctgtcacttggagtctcattcctaaaccctccttcccagggagcaagtgtggggcagggtttcagagcacaggctttggtgtccagcctgggtacatccagctgtcccgctgtctaactgacattgtgtgagatgcttactctctctgagctccctcctcctggctcccaactttattataaaatggggaaaatgattgtgcttgccctacagaattgtagtatgaattaaaagtctggatttaatgtatttaatatagaaaattttagcttttattaataaaagtttttggcatacaagtc

SEQ ID NO: 201040 - DNA, 8685 bp, Homo sapiens
  Payload ID: 19683
  Gene Name: zinc finger and BTB domain containing 40
  Uniprot ID: Q9NUA8
  ENST ID: ENST00000375647
  CDS Start-End: 208-3927
cggcctcaagatggccgccttctggcgtctccggcgctgttgaatggcgaaagctttattgttcccttcgggcaggagtgttcgtgtcctctatggcgctgtcaataaagaacggcagtttgaatcggtgctgaacagggcctgtcctcccaaagccaactctaaggagaggagaggaagagcagttcttggggcagagttgacgcaatggagctccccaactacagccggcagctgctgcagcagctgtacactctgtgcaaggagcagcagttctgtgattgcaccatctccattggtaccatttacttcagggctcacaagcttgtcctggctgctgccagcctcctgttcaaaaccctgctggataacacagataccatctccatcgatgcatctgtggtgagccccgaggagtttgcgctcttgttggaaatgatgtacacgggcaaactacctgtgggcaagcacaacttctccaaaatcatctccttagcagacagtctacagatgtttgatgtagctgttagctgcaaaaatcttctgaccagccttgtaaactgctcggttcagggtcaggtggtaagggatgtctctgcgccatcctcagagacattcagaaaggaaccagagaagcctcaagtagaaatcctttcatctgaaggtgctggagagcctcattcttccccagagcttgctgccactccagggggccctgtgaaagctgagactgaggaagcagcccattcagtttcacaagagatgagtgtgaattctcccacagcccaggagagccagaggaatgcagaaaccccagcggagactcctactacagctgaagcttgttccccctcccctgctgtgcaaacctttagtgaggcaaagaagacaagcacagaaccaggatgtgaaaggaaacactaccagctgaattttcttctagaaaatgaaggtgtcttctcagatgcactcatggttacccaggatgttttaaaaaaactagaaatgtgttcagaaattaaaggtccacagaaggagatgatagtgaaatgtttcgagggtgaaggaggacattcagcattccagagaatcctgggtaaagtaagagaggaaagcctggatgttcaaactgttgtgtccctgttgaggctgtaccaatattctaatcctgcagtaaaaacagcactattagacaggaagccagaagatgtagacacagtgcagccaaaagggagcacagaggagggaaagaccttgtctgttctgttactagaacacaaagaggacctgatacagtgtgtaacacagctgagacctattatggagtccctggaaacagccaaggaggaattcctgactggcactgaaaaaagggtgattctgaattgctgtgagggcagaacacccaaggagacaatagaaaatttgttgcacagaatgactgaagagaagacgctgactgctgagggtttggtaaaactcctccaggctgtgaagacgactttcccaaacctgggccttctgctagagaagttgcagaaatcagccactttgccaagcaccacagtccaaccaagccctgatgattatgggactgagctattgagacgctatcatgaaaacctctctgagattttcacagacaaccagattttattaaagatgatctcacacatgacaagtttagcccctggagaaagagaggtcatggagaagcttgtgaaacgtgactctggttcaggtggtttcaattctctgatatcagcagttctagaaaagcagactctctctgccacagccatttggcaactgctgctggtggttcaggagacaaagacctgtccattggacctgctcatggaggaaatacgaagggagcctggtgccgatgctttcttccgggcagtgaccaccccagaacatgccactttagaaacaatcctgaggcataaccagttgatcttggaggccatccaacagaagattgagtacaagctctttacctcggaggaggagcacctggcagagactgtgaaagagattctgagcattccctctgagacagccagccctgaagcttccctgagagcagtgctgagcagagccatggaaaaatcagtcccggccattgaaatatgccacctcctgtgcagtgtccacaaatcttttccaggcctgcagcctgtcatgcaggagttggcatacattggtgtccttactaaggaagatggagagaaggaaacgtggaaggtgagtaataaatttcaccttgaagccaacaacaaagaagatgaaaaggcagccaaagaagacagccagcctggggaacagaatgatcaaggagagactggttccttgccaggacagcaagagaaagaggcttcagcctccccagaccctgccaagaagagcttcatctgtaaggcctgcgacaaaagcttccatttctactgccgcctaaaggtgcacatgaagcgctgccgggtggctaagagcaaacaggtgcagtgtaaggagtgcagtgagaccaaggattcaaagaaagagctggacaaacatcagctggaggcccatggtgcaggtggagagcccgatgcccccaagaagaagaagaagaggcttccagtgacatgtgacctctgtggcagagaatttgcccatgcctcaggcatgcagtaccataagctgacagagcacttcgatgagaagcctttctcctgtgaagagtgtggggcgaagtttgcagccaattccaccctgaagaaccaccttcgccttcacaccggggaccgcccgttcatgtgcaagcactgcctcatgaccttcacccaggcctccgccctggcctatcacaccaagaagaagcactcagaagggaaaatgtatgcatgccagtactgtgatgctgtgtttgcccagtctattgagctgtcccgccacgtgaggacccacaccggggacaagccctatgtctgcagagactgtggcaagggcttccggcaagccaatggcctctccatccatctgcacacctttcacaacatagaagatccttatgactgcaagaagtgcaggatgagtttccccactcttcaggatcaccggaagcacatccatgaggtgcactccaaagagtaccacccctgccccacgtgtgggaagatcttcagtgccccgtccatgctggagcggcacgtggtgacccacgttggagggaagcccttcagctgcgggatctgcaacaaggcctaccagcaattgtctggtttgtggtaccacaatcgaacccaccaccctgacgtatttgctgctcagaaccaccgatcttccaagttctcatcactccagtgcagctcctgtgacaaaaccttccccaacaccattgagcacaagaagcacatcaaagcagaacatgcagatatgaagttccatgaatgtgaccagtgtaaggagctcttccccacgccagccttgctgcaggttcatgtcaagtgccagcattcagggtcccagccattccggtgcttgtactgtgctgctactttccgttttcctggagcattgcagcaccatgtcaccacggagcacttcaagcagtcagagaccaccttcccctgtgagctctgtggggaactcttcacctcccaggcccagcttgacagtcacctggaatctgagcacccaaaggtgatgagcacggaaacccaggccgcagcctcacagatggcgcaggtgatccaaaccccagagccggtggccccgacagagcaggtgatcactttggaggagacccagcttgccgggtcgcaggtgtttgtgacgttgccagattctcaggcatctcaggccagctctgagctcgtggcggtgactgtggaggacttgctggatggcacagtgacgctgatctgtggtgaggccaaatgagcagcctttcatccggcagagccttcctgcgtttgcagcagagaggaggccccacagcttgccctttgccctccatccctggctgtcctgagtggtgagcatcttagcttagcaccaaccaacacagtctcacctagaaaacagatggaagcttcgttgttctcatagaaccaacagcatctgagccctcaacaccaacagcaccatcctctgtagcagacaggcctccctccccacaggcccgctgctgcggcctctatgacactgtccatccccaagtgacatgtggcttcagaagtagagtctgaaagagcagtgggatgggagctggtgaccagggtaccccaggaggcatgatgtgccgacagcgctcagtgggcagaatggcagttagatatgggacttggcccacagtgggggctgcaaatgctgccactgcctctggccatttaaagtgagaggggcaccaacagacaattcggggaccttaggccccttcctgaggcacacttggccccttcctcggtcctatcatcctaccctctgctggggttccccctccacccagtggccacgcccagcaccctattgatggctataggacaggtagccctcatttccatgcctgataaccccttgtcagttgtcagctcttcccaaaacaaagctctggagtttctgctggaagtgtttaatgtgaggcatcagctgctagacagtgtctgcctttccaggacattcttcttggtattccttacctgaagcctggttcccacagctcttccgtgtcatcttcatccccttcctttaatcaaaggctgaaatctctgcctgacctggcagcctggctccctctgggtcatatggtgcagactgtgaccagcaccaggcaggcagtcctgtctgcgtgtggaggagcagccgtgactgcccgtggctctgctgccgcccactccctgccttgtgagtggcctgctgcctcacctcccgcaggccgccacacttattgcaggtcagtgatcctttggagtttgaatttcacaaagctttttttatcttcagttcctaaaatataatctgataattaatggtttgtggaatccattatgaagtgcaattagatagatgtaggttcctgccgtttggagagaatgactagcatttatcttcttttccttccatgccaaaggttggagtctgctggtgcggtgtttacacaccaggcagggctgtctgccaccttgtgtggcttgaccccctgtggaggggagtgcctggttggatcccacactggcagagatggggccaccccttccttccaggcacatctcacattgccatgtacagaggcaggagtcacgtttggtcaccatggaagcttttattgctcccacatggtcaggtctcaccctgcttgaagcgcagaaggcacagccttactgaccagcacgcccactgactggcatctgccggctttgtgcaggcagccccgacggtttccacagcgagcgccagctccggccagcctgggacagctcatcccagccgactacacctgcttctggtcctgtccacattttgatacgcagatcacttgagcttgtcaattagggttctgccattctgaaataaatgaagtttctaaagcagagtcggcctcagaagccaaaaactgaccagaagatggtgctcaaacctttaagacttcatctccatgtgaagggctcactgtttctaccaaggctgtgcctgtattaaggcttttccgtcctgggaactgtcagtctgggagagctcttgatctgcaggtggcaaaatggcactgaatatccccttggcagcagagaaaacccactgaaagatcgtagagtggcacatgcttacagggcattggtgccaagtccagtggatgagaatccagcccctcacaagctgtgggatggggcttgggagttgcagtgaatgtcattaaaatttcttccaaaacaaaactagaaataattgctgagggcttatagggaagtgatttaaaaagaaaaaacaaacaacaacaaaaaaaactcttcggaataaagagggctgtaaattttgaattccagtgtcagatcctttcaagcactgagaaattctttctcaggtttctttttttgggggagacagggtcttgctctgtcacccagactggaacacagtggcacgatcttggctcactgcaacctctgcgggctcacgcaatcctcctgccacagcttcccaagtagctgggaccacaggcgtgagccaccactgctggccagtttttgtatttttttttttttttgtagagacagggtctcgccatgttgcccaggctggtttaaaactcctgagctcaagcagttctcccacctgggcctcccaaagtgctaggattacagacatgagccactacgcctggccaggtttctgttggagacccagattgtgacaagacatttgttttcttcggaatcaccagatttgcagcttactgtgccgagagtggactggctgccggggcccatcagatgccctctggcccatggcacactcagcagaaggcacaaacccagtgctggttctcatcaagaaagaggggaaggcccttcccgagtttactgtctgctctgagtgggctccgcactggctgactgattttatagtcttgctctctagagaagcccaggcatggatcttataggaaaactttctgactctgcttggccattttatccttttctcctacttctgcccaagagacctgaattgctgccatagaggacagtgtttgtgtggtctcctgagtccacatcgctcgcttccatggggtcccggtgttgtttttgcctcgttccccataggctgctgcccttatggcctctggactgaactctggggcctttggggtggtgtgaaggagtctgtgggcttcttggaacacatggatctgttcggtgggtccccagacctctgctcccagagctcatggcccaggtggtgaggagggaaaggcagtcagattccaggctggagtgtgattctgtgggaatactggggtcagttatggaacaggacttgcccatcataggtaagtgagacagcaaatagatgattcaagagcaaggattactgcgggaaggtgagactcctactgtccacgcgcatgagcagaacctggaaccagaggggcagggaccaggggtctttactcatttattttatgggtaaagagacatgaagagacagcctctctcttctgtctcagaagctctgtgtttgggaaactttgagcccagtgagtagcagggtctgcagtgtgagtaccaggtttccctggcaatccaggtctcctctgaggaagcattctgacttcccactgaccacggaaggcatgtcagcttcatgcctcgggctagagttctgataatcggggctgaggggtgaaaagaaatccagtcagacagacagtggggagacaggtccctgccctttatttgcgggatcaatcagggactcccagaaaggaaggagaatggtgagaagggccctaagagttcgtctctcacctgggggctggtgacgtggtcaccacaagctgaagacaggctaatggggtggcgggtgtgtgtttaaacctcacgtgcctggaagctgcacattgaccaaaggagggagggaagtgctaaccatgtatagagtgggcaggcggttccagggagacaagcagcatgttattaaattgggcctaggcagttggacgataatggagaaaaagcagggatgctataatgagtcctccccaagggtgagttcagcaccccagccctgttctgcttgtatcccagtgatacttgggaggtaggaagaaaatgggagtaagagaacaatttggggctgaagggagtgtcagaggcacgttgatccttgttttgttgtcatggaaacttcggggctggtgggacttaggccaaaagctcagaggcacagccaaaatttagaagcttgctactcctacgactcggcctataaggaagagagaagctgtctgtactttggggactacattgctgaaggaaaaaaatcactccctggctaattaagattgcttccaaattgggggaatgtgtgtcatttcctttaccaaggccagtcatccctgcttccacccatggtcaggacagtcagccactacgtgatgctgtataaattggattacaaaccatattcttgttcagcttgcactaatctatataaataaaatatgtactttgaaaaaaattaggctacatgagtttcaaatggactgtgatgttatagacctgctttctctttggttctgggccagtgtcagacggggacaggggtgataggcctggtgtcctaggggccatttgtgtaccttgaggccgtgttaacatggcctgggggaaagaaagctctcctgtcacttggagtctcattcctaaaccctccttcccagggagcaagtgtggggcagggtttcagagcacaggctttggtgtccagcctgggtacatccagctgtcccgctgtctaactgacattgtgtgagatgcttactctctctgagctccctcctcctggctcccaactttattataaaatggggaaaatgattgtgcttgccctacagaattgtagtatgaattaaaagtctggatttaatgtatttaatatagaaaattttagcttttattaataaaagtttttggcatacaa

SEQ ID NO: 201041 - DNA, 1855 bp, Homo sapiens
  Payload ID: 19683
  Gene Name: zinc finger and BTB domain containing 40
  ENST ID: ENST00000400239
  CDS Start-End: 496-1855
cggcctcaagatggccgccttctggcgtctccggcgctgttgaatggcgaaagctttattgttcccttcgggcaggagtgttcgtgtcctctatggcgctgtcaataaagaacggcagtttgaatcggtgctgaacagcaaaagtttactgacccctgccctaaacacaaggagattggatcagtgttgtcattcagctattcctctcgtcggttcttctggagtgggaaaagagttaaaactgcgcgatgcaccgagagcactttagttgacagaacactctggcttcccttctggtcttactgactattcagagtttctcctgctttgaatagcgttggtaccatgcagccagtgctgcaatgaaccaggtgctttatttatattcatacaagtgttgttctactttatgacgacgctttataaggcctgtcctcccaaagccaactctaaggagaggagaggaagagcagttcttggggcagagttgacgcaatggagctccccaactacagccggcagctgctgcagcagctgtacactctgtgcaaggagcagcagttctgtgattgcaccatctccattggtaccatttacttcagggctcacaagcttgtcctggctgctgccagcctcctgttcaaaaccctgctggataacacagataccatctccatcgatgcatctgtggtgagccccgaggagtttgcgctcttgttggaaatgatgtacacgggcaaactacctgtgggcaagcacaacttctccaaaatcatctccttagcagacagtctacagatgtttgatgtagctgttagctgcaaaaatcttctgaccagccttgtaaactgctcggttcagggtcaggtggtaagggatgtctctgcgccatcctcagagacattcagaaaggaaccagagaagcctcaagtagaaatcctttcatctgaaggtgctggagagcctcattcttccccagagcttgctgccactccagggggccctgtgaaagctgagactgaggaagcagcccattcagtttcacaagagatgagtgtgaattctcccacagcccaggagagccagaggaatgcagaaaccccagcggagactcctactacagctgaagcttgttccccctcccctgctgtgcaaacctttagtgaggcaaagaagacaagcacagaaccaggatgtgaaaggaaacactaccagctgaattttcttctagaaaatgaaggtgtcttctcagatgcactcatggttacccaggatgttttaaaaaaactagaaatgtgttcagaaattaaaggtccacagaaggagatgatagtgaaatgtttcgagggtgaaggaggacattcagcattccagagaatcctgggtaaagtaagagaggaaagcctggatgttcaaactgttgtgtccctgttgaggctgtaccaatattctaatcctgcagtaaaaacagcactattagacaggaagccagaagatgtagacacagtgcagccaaaagggagcacagaggagggaaagaccttgtctgttctgttactagaacacaaagaggacctgatacagtgtgtaacacagctgagacctattatggagtccctggaaacagccaaggaggaattcctgactggcactgaaaaaagggtgattctgaattgctgtgagggcagaacacccaaggagacaatagaaaatttgttgcacagaatgactgaagagaagacgctgactgctgagggtttggtaaaactcctccaggctgtgaagacgactttcccaaacctgggccttctgctagagaagttgcagaaatcagccactttgccaagcaccacag

SEQ ID NO: 201042 - DNA, 8992 bp, Homo sapiens
  Payload ID: 19683
  Gene Name: zinc finger and BTB domain containing 40
  Uniprot ID: Q9NUA8
  ENST ID: ENST00000404138
  CDS Start-End: 512-4231
gatacccattgcgcgccggcctcaagatggccgccttctggcgtctccggcgctgttgaatggcgaaagctttattgttcccttcgggcaggagtgttcgtgtcctctatggcgctgtcaataaagaacggcagtttgaatcggtgctgaacagcaaaagtttactgacccctgccctaaacacaaggagattggatcagtgttgtcattcagctattcctctcgtcggttcttctggagtgggaaaagagttaaaactgcgcgatgcaccgagagcactttagttgacagaacactctggcttcccttctggtcttactgactattcagagtttctcctgctttgaatagcgttggtaccatgcagccagtgctgcaatgaaccaggtgctttatttatattcatacaagtgttgttctactttatgacgacgctttataaggcctgtcctcccaaagccaactctaaggagaggagaggaagagcagttcttggggcagagttgacgcaatggagctccccaactacagccggcagctgctgcagcagctgtacactctgtgcaaggagcagcagttctgtgattgcaccatctccattggtaccatttacttcagggctcacaagcttgtcctggctgctgccagcctcctgttcaaaaccctgctggataacacagataccatctccatcgatgcatctgtggtgagccccgaggagtttgcgctcttgttggaaatgatgtacacgggcaaactacctgtgggcaagcacaacttctccaaaatcatctccttagcagacagtctacagatgtttgatgtagctgttagctgcaaaaatcttctgaccagccttgtaaactgctcggttcagggtcaggtggtaagggatgtctctgcgccatcctcagagacattcagaaaggaaccagagaagcctcaagtagaaatcctttcatctgaaggtgctggagagcctcattcttccccagagcttgctgccactccagggggccctgtgaaagctgagactgaggaagcagcccattcagtttcacaagagatgagtgtgaattctcccacagcccaggagagccagaggaatgcagaaaccccagcggagactcctactacagctgaagcttgttccccctcccctgctgtgcaaacctttagtgaggcaaagaagacaagcacagaaccaggatgtgaaaggaaacactaccagctgaattttcttctagaaaatgaaggtgtcttctcagatgcactcatggttacccaggatgttttaaaaaaactagaaatgtgttcagaaattaaaggtccacagaaggagatgatagtgaaatgtttcgagggtgaaggaggacattcagcattccagagaatcctgggtaaagtaagagaggaaagcctggatgttcaaactgttgtgtccctgttgaggctgtaccaatattctaatcctgcagtaaaaacagcactattagacaggaagccagaagatgtagacacagtgcagccaaaagggagcacagaggagggaaagaccttgtctgttctgttactagaacacaaagaggacctgatacagtgtgtaacacagctgagacctattatggagtccctggaaacagccaaggaggaattcctgactggcactgaaaaaagggtgattctgaattgctgtgagggcagaacacccaaggagacaatagaaaatttgttgcacagaatgactgaagagaagacgctgactgctgagggtttggtaaaactcctccaggctgtgaagacgactttcccaaacctgggccttctgctagagaagttgcagaaatcagccactttgccaagcaccacagtccaaccaagccctgatgattatgggactgagctattgagacgctatcatgaaaacctctctgagattttcacagacaaccagattttattaaagatgatctcacacatgacaagtttagcccctggagaaagagaggtcatggagaagcttgtgaaacgtgactctggttcaggtggtttcaattctctgatatcagcagttctagaaaagcagactctctctgccacagccatttggcaactgctgctggtggttcaggagacaaagacctgtccattggacctgctcatggaggaaatacgaagggagcctggtgccgatgctttcttccgggcagtgaccaccccagaacatgccactttagaaacaatcctgaggcataaccagttgatcttggaggccatccaacagaagattgagtacaagctctttacctcggaggaggagcacctggcagagactgtgaaagagattctgagcattccctctgagacagccagccctgaagcttccctgagagcagtgctgagcagagccatggaaaaatcagtcccggccattgaaatatgccacctcctgtgcagtgtccacaaatcttttccaggcctgcagcctgtcatgcaggagttggcatacattggtgtccttactaaggaagatggagagaaggaaacgtggaaggtgagtaataaatttcaccttgaagccaacaacaaagaagatgaaaaggcagccaaagaagacagccagcctggggaacagaatgatcaaggagagactggttccttgccaggacagcaagagaaagaggcttcagcctccccagaccctgccaagaagagcttcatctgtaaggcctgcgacaaaagcttccatttctactgccgcctaaaggtgcacatgaagcgctgccgggtggctaagagcaaacaggtgcagtgtaaggagtgcagtgagaccaaggattcaaagaaagagctggacaaacatcagctggaggcccatggtgcaggtggagagcccgatgcccccaagaagaagaagaagaggcttccagtgacatgtgacctctgtggcagagaatttgcccatgcctcaggcatgcagtaccataagctgacagagcacttcgatgagaagcctttctcctgtgaagagtgtggggcgaagtttgcagccaattccaccctgaagaaccaccttcgccttcacaccggggaccgcccgttcatgtgcaagcactgcctcatgaccttcacccaggcctccgccctggcctatcacaccaagaagaagcactcagaagggaaaatgtatgcatgccagtactgtgatgctgtgtttgcccagtctattgagctgtcccgccacgtgaggacccacaccggggacaagccctatgtctgcagagactgtggcaagggcttccggcaagccaatggcctctccatccatctgcacacctttcacaacatagaagatccttatgactgcaagaagtgcaggatgagtttccccactcttcaggatcaccggaagcacatccatgaggtgcactccaaagagtaccacccctgccccacgtgtgggaagatcttcagtgccccgtccatgctggagcggcacgtggtgacccacgttggagggaagcccttcagctgcgggatctgcaacaaggcctaccagcaattgtctggtttgtggtaccacaatcgaacccaccaccctgacgtatttgctgctcagaaccaccgatcttccaagttctcatcactccagtgcagctcctgtgacaaaaccttccccaacaccattgagcacaagaagcacatcaaagcagaacatgcagatatgaagttccatgaatgtgaccagtgtaaggagctcttccccacgccagccttgctgcaggttcatgtcaagtgccagcattcagggtcccagccattccggtgcttgtactgtgctgctactttccgttttcctggagcattgcagcaccatgtcaccacggagcacttcaagcagtcagagaccaccttcccctgtgagctctgtggggaactcttcacctcccaggcccagcttgacagtcacctggaatctgagcacccaaaggtgatgagcacggaaacccaggccgcagcctcacagatggcgcaggtgatccaaaccccagagccggtggccccgacagagcaggtgatcactttggaggagacccagcttgccgggtcgcaggtgtttgtgacgttgccagattctcaggcatctcaggccagctctgagctcgtggcggtgactgtggaggacttgctggatggcacagtgacgctgatctgtggtgaggccaaatgagcagcctttcatccggcagagccttcctgcgtttgcagcagagaggaggccccacagcttgccctttgccctccatccctggctgtcctgagtggtgagcatcttagcttagcaccaaccaacacagtctcacctagaaaacagatggaagcttcgttgttctcatagaaccaacagcatctgagccctcaacaccaacagcaccatcctctgtagcagacaggcctccctccccacaggcccgctgctgcggcctctatgacactgtccatccccaagtgacatgtggcttcagaagtagagtctgaaagagcagtgggatgggagctggtgaccagggtaccccaggaggcatgatgtgccgacagcgctcagtgggcagaatggcagttagatatgggacttggcccacagtgggggctgcaaatgctgccactgcctctggccatttaaagtgagaggggcaccaacagacaattcggggaccttaggccccttcctgaggcacacttggccccttcctcggtcctatcatcctaccctctgctggggttccccctccacccagtggccacgcccagcaccctattgatggctataggacaggtagccctcatttccatgcctgataaccccttgtcagttgtcagctcttcccaaaacaaagctctggagtttctgctggaagtgtttaatgtgaggcatcagctgctagacagtgtctgcctttccaggacattcttcttggtattccttacctgaagcctggttcccacagctcttccgtgtcatcttcatccccttcctttaatcaaaggctgaaatctctgcctgacctggcagcctggctccctctgggtcatatggtgcagactgtgaccagcaccaggcaggcagtcctgtctgcgtgtggaggagcagccgtgactgcccgtggctctgctgccgcccactccctgccttgtgagtggcctgctgcctcacctcccgcaggccgccacacttattgcaggtcagtgatcctttggagtttgaatttcacaaagctttttttatcttcagttcctaaaatataatctgataattaatggtttgtggaatccattatgaagtgcaattagatagatgtaggttcctgccgtttggagagaatgactagcatttatcttcttttccttccatgccaaaggttggagtctgctggtgcggtgtttacacaccaggcagggctgtctgccaccttgtgtggcttgaccccctgtggaggggagtgcctggttggatcccacactggcagagatggggccaccccttccttccaggcacatctcacattgccatgtacagaggcaggagtcacgtttggtcaccatggaagcttttattgctcccacatggtcaggtctcaccctgcttgaagcgcagaaggcacagccttactgaccagcacgcccactgactggcatctgccggctttgtgcaggcagccccgacggtttccacagcgagcgccagctccggccagcctgggacagctcatcccagccgactacacctgcttctggtcctgtccacattttgatacgcagatcacttgagcttgtcaattagggttctgccattctgaaataaatgaagtttctaaagcagagtcggcctcagaagccaaaaactgaccagaagatggtgctcaaacctttaagacttcatctccatgtgaagggctcactgtttctaccaaggctgtgcctgtattaaggcttttccgtcctgggaactgtcagtctgggagagctcttgatctgcaggtggcaaaatggcactgaatatccccttggcagcagagaaaacccactgaaagatcgtagagtggcacatgcttacagggcattggtgccaagtccagtggatgagaatccagcccctcacaagctgtgggatggggcttgggagttgcagtgaatgtcattaaaatttcttccaaaacaaaactagaaataattgctgagggcttatagggaagtgatttaaaaagaaaaaacaaacaacaacaaaaaaaactcttcggaataaagagggctgtaaattttgaattccagtgtcagatcctttcaagcactgagaaattctttctcaggtttctttttttgggggagacagggtcttgctctgtcacccagactggaacacagtggcacgatcttggctcactgcaacctctgcgggctcacgcaatcctcctgccacagcttcccaagtagctgggaccacaggcgtgagccaccactgctggccagtttttgtatttttttttttttttgtagagacagggtctcgccatgttgcccaggctggtttaaaactcctgagctcaagcagttctcccacctgggcctcccaaagtgctaggattacagacatgagccactacgcctggccaggtttctgttggagacccagattgtgacaagacatttgttttcttcggaatcaccagatttgcagcttactgtgccgagagtggactggctgccggggcccatcagatgccctctggcccatggcacactcagcagaaggcacaaacccagtgctggttctcatcaagaaagaggggaaggcccttcccgagtttactgtctgctctgagtgggctccgcactggctgactgattttatagtcttgctctctagagaagcccaggcatggatcttataggaaaactttctgactctgcttggccattttatccttttctcctacttctgcccaagagacctgaattgctgccatagaggacagtgtttgtgtggtctcctgagtccacatcgctcgcttccatggggtcccggtgttgtttttgcctcgttccccataggctgctgcccttatggcctctggactgaactctggggcctttggggtggtgtgaaggagtctgtgggcttcttggaacacatggatctgttcggtgggtccccagacctctgctcccagagctcatggcccaggtggtgaggagggaaaggcagtcagattccaggctggagtgtgattctgtgggaatactggggtcagttatggaacaggacttgcccatcataggtaagtgagacagcaaatagatgattcaagagcaaggattactgcgggaaggtgagactcctactgtccacgcgcatgagcagaacctggaaccagaggggcagggaccaggggtctttactcatttattttatgggtaaagagacatgaagagacagcctctctcttctgtctcagaagctctgtgtttgggaaactttgagcccagtgagtagcagggtctgcagtgtgagtaccaggtttccctggcaatccaggtctcctctgaggaagcattctgacttcccactgaccacggaaggcatgtcagcttcatgcctcgggctagagttctgataatcggggctgaggggtgaaaagaaatccagtcagacagacagtggggagacaggtccctgccctttatttgcgggatcaatcagggactcccagaaaggaaggagaatggtgagaagggccctaagagttcgtctctcacctgggggctggtgacgtggtcaccacaagctgaagacaggctaatggggtggcgggtgtgtgtttaaacctcacgtgcctggaagctgcacattgaccaaaggagggagggaagtgctaaccatgtatagagtgggcaggcggttccagggagacaagcagcatgttattaaattgggcctaggcagttggacgataatggagaaaaagcagggatgctataatgagtcctccccaagggtgagttcagcaccccagccctgttctgcttgtatcccagtgatacttgggaggtaggaagaaaatgggagtaagagaacaatttggggctgaagggagtgtcagaggcacgttgatccttgttttgttgtcatggaaacttcggggctggtgggacttaggccaaaagctcagaggcacagccaaaatttagaagcttgctactcctacgactcggcctataaggaagagagaagctgtctgtactttggggactacattgctgaaggaaaaaaatcactccctggctaattaagattgcttccaaattgggggaatgtgtgtcatttcctttaccaaggccagtcatccctgcttccacccatggtcaggacagtcagccactacgtgatgctgtataaattggattacaaaccatattcttgttcagcttgcactaatctatataaataaaatatgtactttgaaaaaaattaggctacatgagtttcaaatggactgtgatgttatagacctgctttctctttggttctgggccagtgtcagacggggacaggggtgataggcctggtgtcctaggggccatttgtgtaccttgaggccgtgttaacatggcctgggggaaagaaagctctcctgtcacttggagtctcattcctaaaccctccttcccagggagcaagtgtggggcagggtttcagagcacaggctttggtgtccagcctgggtacatccagctgtcccgctgtctaactgacattgtgtgagatgcttactctctctgagctccctcctcctggctcccaactttattataaaatggggaaaatgattgtgcttgccctacagaattgtagtatgaattaaaagtctggatttaatgtatttaatatagaaaattttagcttttattaataaaagtttttggcatacaagtc

SEQ ID NO: 201043 - DNA, 8478 bp, Homo sapiens
  Payload ID: 19684
  Gene Name: zinc finger and BTB domain containing 41
  Uniprot ID: Q5SVQ8
  ENST ID: ENST00000367405
  CDS Start-End: 70-2799
atctagttttcctttataaatcacttaagacacttatgaagtttcttgttctgaaattgctgtactgcaatgaagaagaggagaaaggttacttcaaatcttgagaagatccatctaggctatcataaagattcttcagaaggaaatgttgcagtggagtgtgaccaagtgacctatactcattctgcaggaagaccaactcctgaagctcttcactgttaccaggaacttcctccctctccagatcagagaaagcttttaagttctttgcagtataataagaatttgctaaaatatttaaatgatgataggcagaagcaaccatctttttgtgatttacttatcatagtggaaggaaaagaatttagtgcacataaagtagtcgttgctgtcggcagtagttattttcatgcgtgtttgagcaaaaatccaagcactgatgttgtcaccctggatcacgtaacacattcagtttttcagcatttgcttgaatttctttacacatcagaattttttgtgtacaaatatgaaatacctcttgttttagaggctgcaaaatttttggacattatagatgcagtgaagttgttaaataacgaaaatgttgccccttttcattcagagctaactgaaaagtcatcaccagaagaaacactaaatgaattaactggaagactatcaaataatcatcagtgcaaattctgtagtagacatttttgttataaaaagtctttagagaatcatttggctaaaacccataggtcccttttattagggaaaaaacatgggttaaaaatgctggagagaagtttctccgcaagaagatcaaaaaggaatcggaagtgccctgttaagtttgatgacaccagcgatgatgaacaggaaagtggtgatgggtcagacaatttgaatcaagaaaattttgataaggaaaagtcagatagaaatgattctgaggaccctggaagtgaatataatgctgaagaagatgagctagaggaggagatgtcagatgagtactctgacattgaagaacaaagtgaaaaggatcataatgatgcagaagaagaacctgaggctggtgattctgtaggaaatgttcatgaggggttaactccagtggtcattcagaacagcaacaaaaaaatattgcagtgtcctaaatgtgataaaacatttgaccgaataggaaaatatgagagccacacccgtgttcacacaggtgagaagccctttgagtgtgatatttgtcaccagcgctattcaacaaagtctaacctaactgttcacagaaagaagcacagtaatgaaacagaatttcataagaaggagcacaagtgcccttattgtaataaacttcatgcaagcaagaagactttagccaagcatgttaagagatttcatcctgaaaatgcacaagaatttatttccattaagaagactaagagtgaaagttggaaatgtgatatttgtaagaaatcttttactcgaagaccacacttggaggaacatatgattctacattctcaagataaaccttttaagtgtacctattgtgaagaacattttaaatcacggtttgctcggttaaagcatcaagaaaagttccatctgggtccttttccatgtgatatatgtggtcgccagtttaacgacactggaaatttgaaacgtcatatagaatgtactcatggtggaaagagaaaatggacttgctttatctgtggaaaatcagtacgagaaagaactactttgaaagaacatttgagaatccacagtggagaaaagcctcacctttgtagtatttgtgggcaaagttttcgtcatggaagttcgtatagacttcacttacgagtacatcatgatgataaaagatatgagtgcgatgaatgtggaaaaacatttatccgtcatgatcaccttacaaagcacaaaaaaatacattcaggtgaaaaagctcatcagtgtgaagaatgtggaaaatgttttggtcgtagggatcatctcactgttcattacaaaagcgtacaccttggagagaaagtgtggcaaaaatataaagcaacatttcatcaatgtgatgtttgtaagaaaatttttaaaggcaaatcaagtctggaaatgcattttcgaacgcattcaggtgaaaaaccatacaagtgtcaaatttgcaatcagtcttttagaattaagaaaacattaacaaaacacctggttattcattctgatgcccgacctttcaactgtcagcactgtaatgcaacatttaagcggaaagacaagctgaaataccacattgaccatgttcatgaaataaaatctcctgatgatcctctcagtacttctgaggaaaaacttgtatccttgccagttgagtactcatctgatgacaaaatctttcaaacagaaacaaaacaatatatggaccagcccaaagtttatcagtcggaagccaagacgatgttacagaatgtatctgctgaagtatgtgttccagtaactctggttccagttcagatgcctgacactccgagtgacctagtgcgtcatactaccacactcccaccatcttctcatgagattctgtcaccacagccacagtcaactgattatccacgagcagcggatttagcttttctggaaaaatatactcttactcctcaacctgcaaatatagttcacccagttcgacctgaacaaatgctagatcctagagaacaatcttatcttggaacattactgggccttgatagcactactggtgttcaaaatatttctacgaatgagcatcattcatgagtaaatctaaacattccacagatttttggatggttatatgctaatggtagagatgatagcttttaaatttgtggggctgctattttcttgttttctctagtttctcaagtcctcagaacagtttcaaatcaagaaaactatgtgtctctgtttactgaacatgaatatttggacaaaatttctggcataatatttgaagtgcacatttttgtgatttttaaagattatttagtgctaacttttaatggtttcttaaattttttgcaattattagctgctgatattatggaagtattttttttaatcatcagtggaaatttttattcttctttagtctcattcctctccttcttcttcctagcccttcttacaaacaagtttgaggaccatgtagcctttaagaaggaattaagagtacactgataattgcaactgtttcttatcctaagattcaatattacgttatacaaatttttaaaattgaaattaggaatttgaatttacaagaatgccttggatatttctgtgttgtctttccattcatacataattttaggttatcattatcctttggacttttgatatactcaaagccagaaagcttaactaatgtaagattagctattatttgtaggactgaaataataatccagataattggtttttgcctatacttcaattgttatgaataagaaaggcaaacataggtctgggcattaaattatacaaactgaaaatgtgttacaagaaaaatatgagagttttaactagatgtttttcaaggtaagttcaccttttgtactttactatttatttcagaaatgttgacaatacaacatagcatatgtcttcatctcactaagaaaagagcagttgtaactcaatgaaatttaattaaacatgctacttttgatttcatttacttggctgatagaaactctgggaaacagaacctagatattttgtgttcaattgttagaaaaggtgccaaacagattatgaaatttgtgcctaatttaacttaacattgtttaattaaatggaaccactacttatatacagatttacatgcaatccagatctttaattttgccttcacaaaagcctaatgtctgtaattaacctttaatttttatttctgtatgagacaaaagttgaggacttggtgaaaggaaatagcagttacagcaaaacctcagtgattacaattgaggaaaaagtcaaaattataaaatacctttaaagacatgcactttccatattttcaagtcaattttaactaaaaactaagataatgtttcctagtagagttgcttgaagattagactagacagggttgatttattattagcatgtcatttgtacataaactagtagaaaatagcagttttaaaagttttctatttcagttttgtttacactcctaattgctttaagcactttttttgtgtgtgtaaactgtaaagtctagcccagcccttgtgaaaaaaaaaatcacaaataaaacagtgaagttttaatgaataaagtttaatcaattagtaatggcggaaactgtcgctgaagcacttaagaaataaaggtactttacagcaacattcgccatactagcggaggtaaaacaaaagaaatattgaaaactgaggcagttaaccaaagtagctcatataaataataaaaccaatctgagtttagcctcatttgtcaaggtttggttgtaattgtcttaagactagtggacatacttactatgttctcctttttaaagtattcttatttctttgtgtggaaatgttatatctggggtacttacatgattgaggttgactatatgaggtactgttagtctgttagtctttcaaattgacttttaaaaatacatatctttatgattttcatcataaagactggcaatattataactaaaaatcttactataatgaaagaaatcatacataaaaatgtagcctgccttacatataagctaatgtagaaaagtttagacttataaaaaggcagatagtatatatatatttatatacatgtatgtatatggtatattatacatttggtggcagaaaaagaagatactgcattttcacattgaaaagaatactttgatttttgaaggtatttactttagggttcttttaataataatgtccgtcctaatgctttaaatatatgatttaattgtaggaattggtttacacagaacttttttggaatacatctcttagtaaagtgaaatataataatataattgtatttagttactattgtagataacttaaacttgagtagtgatttactgttttataaaatgctttcatatatgttatctcatttgaacctcataaccagccctgaaatagtaaaaacaagctatattcccactttataaagaatttgaggttaagataaaaggactcatttaagctcacatggtcagtaggtggcagagctactagtagggaaagaagaaagctagcattaatgaatgcttactatgtgccaggtactacatcctgtcatttaatcttaacctagtctgggagatgcgtaatataattctggtgaagtaatagtttcagtggatgattgaaaacaacaacaacaaaaacaaaatgaaactaatctgctgcctctaatttccaaaaatgtaagaaattttacaattgtgaaaacctcatggatttgggcaaactgaatgtatataggcttttgacaaaagttggcacaaaaagtataaaaggaggcctattcttttcagttgaccttttgtaatatttgatttagagtattttggacaaatgctctataactctaatccatttattttgtaactgtacttaaaattttgaatcttgcaactaagtttagcctcattcagaatttttttattttgtgagcataatttattgttttaaattaattttttagcagatagcagttagcacttaatctgtaaattgaataatttatcaagtgcaggaatgtgttaatctaatgggttttgacttaaatgcaccaaagatttttagtaggtattaaatagtttaaaagactttaaattctttcttgcttgaataactatttgtccaaagaagcacagttgaagtcctagaataatggatttttttaaaaaaaaaaagttgttagtttgaatactgagattgattattgtgtttatatgtataaaaataggagcaaaagaaaatactctgggaatagtcatactgacaaaccaattataagtgagaatactgttttccttagtttaattaatacaatgttatgttttttagagaacactactaaatgctaaataagcctattttttacactacactatcaaaataatttttgccttcgaatttttttaagtcaagttgaggttatttttgtaagaaacccaacctattttttttgcagcctaaaatcccatttaaggttaggggttggtccttatgccagcaagatttaaccaactgtaaagatagtagtctttgcatacatttaagtaattaaggcatttattgctgggagaataggagtagcaaaaatatggttttaaattggtgctttattaggtgacttccttttaggcgatggcaggtcatgaaataggtacactaataattttctatcaaccttaaaaagtgtcaaagcatctttgtagggtgactctaaactgctaattaagggttaataagtaattatcattggttgcttttcaatataattgcaaacaaattaaaaacacagttaaactaatatgtttataagcttgagttttcttcctaccatatcactctcatatatcagtgatgaaatgtcagattttgagcagtagctctttgacagtgtccttttatacccagtcttttctgcattgaatgctttgtgccttttcgatgtgttgtagttgcttagagttgattctgctggctagattgtactgattaatagatttttatttttatttttttttggttatgggtgttatgattgtgttgcctgctggttgggcaactttttttttttaggttgctttatgtttatataggcaaattggcactaagtgttagtgtgaatatttgtttttatgatttatatatcattttaaaaatctctgttgtggcctttatagttactgtgaagccactcttgggcctgtctctatatgcttattagaggaatctgacaagtaaaataaaatgagtagtgtgtctgcatctgtgtctctgtttctctgtcttttaaataaccagtaaccataactacacagccctgcactgaatgaccttatttcagtttgcctaaaactgaacaagaggtgatggtttgagatgagtttctcattaggagcagcaacatcccaaccaatatataatgagttgatcaactcaggaaaaattaggactttaaagaaggttgtatttggatattctaagattcagtgccaaatttaaaatgcctagaaatgtattctacaagtagcatttctaaaactttaagtagtgttatagtaaatgctacttgctgttagagtgaataatggataatgtgagaataattttctaaacgacttctagaaactagacagttcttccttatatcctacccttttccacatttctctaatgtggggttttttgtttgtttgtttgttttgagggtagagggaatcccctccttatttcctctaaaattgtttttacttaagataccttttccctataatcttagcatgctttctgctctttctctttggaagtagcattaataagatagatgtaataggattaagatgtgtggaagatgagaaaaagaaggtttttgtagagagagtgcttatgttttgtttactcatgtttcaacttgctgtgtatgatcataaatctatgatcttgagaaaaatcctaaaacaatttaaatttagcctatgcagccaattacataaagagaaattaaggattatattcagaggagaaattaaggattatatttagagcacagaggttatacaaagaatataaccttgtttggtcaaattcttaggtaaagaaaagtaatcaatgcttgcattgctgttggagattctaaaagatgtattgaatgaagaggatgtacacatctcattgttactgcgtatttttttgcttggtattcctgcttgcattaaagctggacaatgtactgtgatgtaattacaaaatttttattccttctaacgattgaactcttcttatccctattgataaaactgtattacaattgatgagtgtggctgccagaaaataatacaaaactgggcatttagctgttccacattgtgtagtaaatgttttgattatggggatttacagtgtatattaaagtagaaatgcttttgcacttgttttcagtctcaaataataatttttgtttttaattaaggatactttaaaagcaatgacagaaaaatctaaaatatcagaattaattattgtgaactgtgtgtaaaatatcttgtgagttttatacatactttggttgtctgatgtttcctaagtataaatgtctttatagaaaatttcagttctctgtgaagagtaggaagtgtactgtatattgaactagttctttgtgttactttgatatttaaaataaatataaagttctttggtcctaata

SEQ ID NO: 201044 - DNA, 3800 bp, Homo sapiens
  Payload ID: 19685
  Gene Name: zinc finger and BTB domain containing 42
  Uniprot ID: B2RXF5
  ENST ID: ENST00000342537
  CDS Start-End: 286-1554
tgaagttcaggagcgcccgggcggggacgcgcgcaggtttgcgcggctccggctcctgcgcctgagtcccgggacccgcccccgcggcggagctgctactgtttactttcgatcgagtttttcctgctcggggcaggtgcccgcggcggctctggacgggaggttgcgcgcgtcactcccgcgccgctctttccgcgctgcctgcagccgggaagggcgcttcgtgggcgcctccaggcgcgctgacgggcgtcccgtttgtgcccaggtgatgacggcggcggcatggagttccctgagcacggcggacggctgctgggccgcctgagacagcagcgcgagctgggcttcctatgcgactgcaccgtgctggtgggcgacgcgcgcttcccggcccaccgtgccgtgctggccgcgtgcagcgtctacttccatctcttctacagggaccggcccgcgggcagtcgcgacacggtgcggctcaacggcgacatcgtcacggcgcccgccttcggccgcctactggacttcatgtacgagggccgcctggacctgcgcagcctgcctgtggaggacgtcctggcagccgccagctacctgcacatgtatgacatcgtcaaggtctgcaagggcaggctccaggagaaggatcgaagtctggacccggggaaccctgcccctggggcagaacctgctcagccaccgtgcccctggcctgtctggaccgcggacctctgcccagctgcccgaaaggccaagctccccccgtttggggtcaaggctgccctccctcctcgagcatctgggcctcctccctgccaggtcccagaagagtcagaccaggccctggacctgtcgttgaagtctggcccaaggcaggagcgggtccacccaccgtgcgtcctccagacacccctctgcagccagaggcagccaggggcccagccactggtgaaggacgaacgggactcactgtccgaacaggaggagagcagcagctctaggagcccccacagtcccccgaagccacctcctgttcctgcagccaagggcctggtggtgggcttgcagccgctgcccctcagcggagagggcagccgggagctggagcttggtgcagggcgactggcgagtgaggacgagctggggcctggtgggcccctctgcatctgcccgttgtgcagcaagctgtttcccagctcccacgtgctgcagctgcacctcagtgcccacttccgtgagcgagacagcacccgggcccggctctcacccgacggcgtggcacccacctgcccgctctgtgggaagaccttctcgtgcacatacacactgaagaggcacgagcggacacactcgggtgagaagccctatacgtgtgtgcagtgtggcaaaagttttcagtactcccacaacctgagccggcacaccgtagtgcacactcgagagaagccgcatgcctgccggtggtgtgagcgccgtttcacgcagtccggggacctctaccgccacgtccgcaagtttcactgtggcctcgtcaagtcccttctggtgtgatgcatccctgtgggtcctgagggtggggtggaagggaagggatgggccctcccaggtgggacacagcatggggtgtgaagcctgaccaggtggaggtccctgcttgggccagatggctccaccctcctggcagagagaatgctgcctcttcctggaacttggcctcagactcggtaacttgggcagccttcctcccaccttgcctctcctttcccctcactctccaactcattccggcccccaggctgtgccctgcctaggctgtgacactatcttcctctcccgtcccctccagccaagttctgaggggtgtccaaccagcacctggctctgcccccgtttctccgtgtgagatggcacatccatctcccggcccgggactttcctgaccacctctctggcaggcttggggaggtcttcatgagcctggccccacgctaggtgaattattcacatgtcagaaaagttgttggtgtgcgtcccaatggggcgctgggagggaacaggacactcctggggagcggcagcaggaacccctgccaggaaggcctggggcacagtgagtgccagcaggggccatctgggcacagctggtgtctcggggtgggggggggggtgcagccccagcagggatcctaaggcagcaggagtagagccagctagaagctgagtggctgtggcatcattgtcactcgggtgggacgtgggtccatgagagcgtgcaattatgaccacactgtaactttgagcagagaaagtgggaatttggaactggattctctttagagccaggaagagcctcctgaggcggccagatgtctgctggtggccgcccagccacatgcttgtctgcctgagtgcaggtctaggaagcctctgggcatcccccagggtggggtctgggccgctgagctgtgtgctgctgctgggccaccgtgggccttaccttgacggtcactctgcctgctagggggtttccctggagctgtgggcatttccgtgcactgactgagcagaggcaagggctgccctgtccgccaggggcagggtttgcgggccttcctttccccacggcgaggcatgggtgaaagtggccatggcggcagggttaggggcaggtgaggagtgggagtcgcagcaccctaggggcctccatccgcagccttgggagactgacgctcctcgaacatgaatagaatgtggagaccacaacccccacacatgtcgttggttcaggtcgccctgctttgcctgcctaatggagcacatcttgctgccagaacctcactggcctctgggggtcggcaggtgcagagccacctggacgcctggagaccacctgggatgtttcctctgtgactgggaatggccttgacaacagagtccagccaagtctacgttattttctcatctcctgacaacactggatgtcatatttattagtcagcctggtctggagtgaaagaccgtccctagcgcatctcccacgcgccctgggctcctggtgtgctgggtgccagcctgggagcccagcgcttctgggtgatgccccagggctcagaggccctggatggctttggtctcgagacagctgggggaggggccctgcttctgattgtcctgggccccagcccccacctctgcaagggatcggtgtgatgtgctccataatcgggtggggggtgtgtgtgtgtgtgtgtgtgtgtgtatgtatgcatgcgtctggcacatggcaaggcccaagccaacccggcaccccgtagatgggcagctacactgccacccaagcacggagatgtggccgcggcactgggtcccccagtgggtcccatgggggaagaacttccctttgctggggtgggcagcctgccctgagctatcaacactggatttgttgtcttctgcacagctactgtgaagataacgtaaggagaagtggtcagttttcattttataactgacacagttgggacaaaatatatacgtgtacatatatttaagacactaattgtgtgggagagtttagtagaggcctgtgcagacacaaggcaaacagcgtcagcagcgtgggggtctcctgggccagctcggcacctgtgggtgctctgaccctgggggtggggacagctccgtgctaaccccagcagacagttgttggtgcacagtgtctaggaggcgtgggaatgggtgctgtcttcctcttttcacatcatggcgacagtaataaagcccacctccagtggaaa

SEQ ID NO: 201045 - DNA, 1411 bp, Homo sapiens
  Payload ID: 19685
  Gene Name: zinc finger and BTB domain containing 42
  Uniprot ID: B2RXF5
  ENST ID: ENST00000555360
  CDS Start-End: 123-1391
ccctccccgccggggcgcgctgcccgcagctccacgcgcgccagggccgccctggggagggcgcgcgcgcgagcggcgaccggagaggagctcggggcggcggaggtgatgacggcggcggcatggagttccctgagcacggcggacggctgctgggccgcctgagacagcagcgcgagctgggcttcctatgcgactgcaccgtgctggtgggcgacgcgcgcttcccggcccaccgtgccgtgctggccgcgtgcagcgtctacttccatctcttctacagggaccggcccgcgggcagtcgcgacacggtgcggctcaacggcgacatcgtcacggcgcccgccttcggccgcctactggacttcatgtacgagggccgcctggacctgcgcagcctgcctgtggaggacgtcctggcagccgccagctacctgcacatgtatgacatcgtcaaggtctgcaagggcaggctccaggagaaggatcgaagtctggacccggggaaccctgcccctggggcagaacctgctcagccaccgtgcccctggcctgtctggaccgcggacctctgcccagctgcccgaaaggccaagctccccccgtttggggtcaaggctgccctccctcctcgagcatctgggcctcctccctgccaggtcccagaagagtcagaccaggccctggacctgtcgttgaagtctggcccaaggcaggagcgggtccacccaccgtgcgtcctccagacacccctctgcagccagaggcagccaggggcccagccactggtgaaggacgaacgggactcactgtccgaacaggaggagagcagcagctctaggagcccccacagtcccccgaagccacctcctgttcctgcagccaagggcctggtggtgggcttgcagccgctgcccctcagcggagagggcagccgggagctggagcttggtgcagggcgactggcgagtgaggacgagctggggcctggtgggcccctctgcatctgcccgttgtgcagcaagctgtttcccagctcccacgtgctgcagctgcacctcagtgcccacttccgtgagcgagacagcacccgggcccggctctcacccgacggcgtggcacccacctgcccgctctgtgggaagaccttctcgtgcacatacacactgaagaggcacgagcggacacactcgggtgagaagccctatacgtgtgtgcagtgtggcaaaagttttcagtactcccacaacctgagccggcacaccgtagtgcacactcgagagaagccgcatgcctgccggtggtgtgagcgccgtttcacgcagtccggggacctctaccgccacgtccgcaagtttcactgtggcctcgtcaagtcccttctggtgtgatgcatccctgtgggtcctga

SEQ ID NO: 201046 - DNA, 5695 bp, Homo sapiens
  Payload ID: 19686
  Gene Name: zinc finger and BTB domain containing 43
  Uniprot ID: O43298
  ENST ID: ENST00000373457
  CDS Start-End: 1102-2505
tgagaggatcacctgagcccaggagtttgagactacagtagctatgatggtgccactacactccagcctgggtaaaagagtgagacctcatctctttaaaaaaaaattctgccaggagcggtggttcatgcctataatcccaacactttaggaggctgaggctggtggatcacttgaagccaggaattcaagacgaacctgggcaaaaagtgagacccctgtctctacaaaaaaaattaattttttaaaaaaactagctgggcagctggcgtggtggctcacacctgtaatcccagcactttgggaggctgaggtgggtggatcatgcggtcaggagttcgagaccagcctggccaacatagtgaaaccccatctctactaaaaatacaaaaaaaaaaaattaaccaggtgtagtggcgggcgcctataatcccagctacttgggaggccaaggcaggagaatcgctcgaaaccagaaggtggaggtggcagtgagccgagatcacaccattgcactccagcctgggcaacaagagcaaaactctatctcaaaaaaaaaaaaaaaaactagctggacatggtggcatgtacatacagtcccagctactcaggaggctgaagcaggatgatagcttgattacccaagagttcaaggctgcagtgaactatgattgtgccactgcactccagcctgggcaacagagcaagaccccatctcgtttaaaaaaaaattatattatttgaatgggtatcttgtttgttttaactgtaaatatttacagtacttggttttacttgggagatttgtatagcttacaaatcttgtccctatggattcagttctcttacccacagacacagaaccaaaatcaggagttccacaaggagtggtggtgagtcctgcctttggcaaacacgcacctgcaagctttgctctagggattgaatcccttacccagtggggcccataggctagaggactttgtggaactttggaacttgtcttaacaatggaggaggggataaaataagtttatctttgggctggaatttgtactaatttttctttctcttgtagcaccgaacaagatttgtgatgaaatggagcctggaacaaactcttttcgggtagaatttcctgatttttccagcaccattctacagaaactgaaccagcagcgccagcaaggacaattatgtgacgtctccattgttgtccaaggccacattttccgggcacacaaagccgttcttgctgccagttcaccctacttttgtgaccaggtactcctgaaaaacagcaggagaattgttttgcctgatgtgatgaacccaagagtgtttgagaacattctcctatctagttatacaggacgtctagtaatgcccgctccagaaattgttagttacttgacagcggcaagcttcctccagatgtggcatgtggtagacaaatgcactgaagttttagagggaaaccctacagtcctttgtcagaagctaaatcatggcagtgaccaccagtcaccaagcagcagtagttataatggcctggtagagagctttgagctgggctctgggggtcatactgattttcccaaagcccaagaactgagagatggtgaaaatgaagaggagagcaccaaagacgagctgtcatcccagctcaccgagcacgaatacctgcccagcaactcgtccacagagcatgaccgcctgagcacggaaatggcaagccaggatggggaggagggcgccagcgacagcgccgagttccactacacccggcccatgtacagcaagcccagcatcatggctcacaaacgctggatccacgtgaagcccgagcgcttagaacaggcttgcgagggcatggatgtgcacgcgacctacgacgagcaccaggtcacagagtccatcaacaccgtgcagacagagcacacggtgcagccttcgggagtggaggaggacttccacatcggggagaagaaagtggaagctgagtttgatgaacaggctgatgaaagcaattatgatgagcaggtggatttctatggctcttccatggaagagttttccggagagaggtcagatgggaatctaattgggcacagacaggaggctgccctcgcagcaggttacagtgagaatattgaaatggtaacagggattaaagaagaagcttcccacttaggattctcagccactgacaagctgtatccttgtcagtgtgggaaaagtttcactcacaagagtcagagagatcggcacatgagcatgcacctcggtcttcggccttacggctgtggggtctgcggtaagaaattcaaaatgaagcaccatctcgtgggccacatgaaaattcacacaggcataaagccgtatgagtgtaatatctgtgcaaagaggtttatgtggagggacagtttccaccggcatgtgacttcttgtactaagtcctacgaagctgcaaaggctgagcagaatacaactgaggctaactaaaaataggatctggcccttgagtggcatgcacaaaaataaactatggtaattaatgcaaatctgggcacagatgatgcgtgctacttgctattatgagagaagcttaaaaaaaaaaaggaagatatttctgaaagaccagctctaagtaggccaattaaaaaaatctaattcctcaaatttgtgtgttccagtcctggcctggaatgggtaatggggtgagttaacccaccgcccagctggcaagggaaaccttctgactggttgtgatcgaaacaggtggacagagacacctgcacttggaactggactccacccaccagttccattttgggtggcagcagctttggatcactcattattacaaggtcatgctgaaattttattttgctcttgctatagatacttaggtaatgtggatttgttttggtagctatttcactgaaggaagtgctacttatataaaagctagaaataatgtgattcctaggatgagaaattggttaacagagctctgttgtctggttttagtctttctaaaggatattttaactaaaactatggagatgctaagagagtgactttctaaatatgaaacagataatttacggtacaaggctgacatagtgcccttgtcagtttctgtaagatgccactactgtcacaaggtgtttcagactcttgataaggcagtgttttgtattttagttctaacattgagtttggacaattttatctaattgtaattctctagggtgccagagataggtatttctcattggtttgctttcccaaatcctgtttggttaattgtagcctccatacagtggggtcttctctgtggctggtagacaccaagctgctgtgactgaccacggtaccacgggctgccacagcccctgctctgtcttagattatggtgctttacaaagagagtggtccatgaccacacttagtgagaaggagccacaagttgtggctgagagttccctgtgaacttgagtagttcatagagtgctaaggtgacactccaccaaccagagtgagagggcagataggcaggattctatgagtggttatacttaagggggacaaaactgcccaagaagaatcttgagaatacactctttcaaggtgggggagatactctttagagggtacactgagctaatactaccagttctttatgagcactggaatgtgtttgtaaaaggagtcctaagtttagcaaggtagtctacagaaccatgctcccacattatagataaagctgcttaaacttaaaagtccacaaagctacgccgaccagaaaaaaaaaattaaaaaaacaaacaagaaaagcaactattctgagaccttttctgcccatcagttagatgatttaggttaaaaagaaaggtaatattgcacatgcttttaagctgtgtaacatacctgaggttatcaccagggtaggacagggtgctactaccatgtcatcttttccacaatcgtactgggttatttacttctaaatagaaacttttttttcttaaaataaaaataatttttcttggatttggggtgaaattttatttgaaaagtttggctttgctgtaatgtaatagacattgctggcaatggcctctgattctcaagctcctaacaccagggtgtttacttgttgaacattgtctggaaagaggaaagaaaatacttatttaccagttaactcttgtaagcaagattacaaacagggatttattcacaacactgtatcattctcgatatataaaaagcactttgtatttaaaactttattataaatatatatatatattgtttttttttaaacctagaaactagatattacctcttggttgtttgccacattaatagcttctcttagtattgaaacgttactggttagcagtcttttctctgtgtacctgacacacgtatactgaggggattgtacaatcaagcctattgtctccttttctttcactcatggtagaggccagtgggttttaggtatgatcctagccattatatttgaggagaaattgttctattactcctactaatttcagtactaaggtggtgatgccattttgttctgccaaaaactgatcaccctctcccatggtattagcagagcattttctgcctgtttggaaggtttgatgtcctgtttctcattgaagactatttacatgatcattaggacattgcaggagaagtctgagaggtaaaaatacagatattctgggagagtcgtggtccttcagttctgctgaaatcagcatagtgcccttgtcatgaggaagagtttctgttcagccaagagtggtggcacgcttgggtggtagttttggaagcagtcagttgtgctaggacttatttaatatgttgtgaagagaagagtgtcttcttgaaagccttatgtgtccatcagctactaaatgtagaacttaaataagttgctcacatctgttcttttagtgttttgtggtatttgaggttttggcaaaaattgggatttttttatcaggcagccagagcctgggaggtggtagggtgtctgaaatgctggccatgttcagagaggcaggagaagggggttgctttcatttgaatattaaaagtgaatttttgtaaactctggtttttacctttttttcatccccacgttgagttggaggaatagtctcttctcttcacctcaatatagctttagaaaatctttatccttcctaataagtttggatggttgtgggtaacattgttcaaacaatctttcagggatcacgtcaatggcctacaaccaagctatttgtcccctactttgagtcttaactgtggtttttcttcaatccccatgggaaagggcttcaaggcaccaccagtggtatttaatattcatacttggggccaggcatggtggctcacgcctgtaatcccagcactttgggaggccgagatgggtggatcacctgaggtcaggagtttgtgaccagcctgaccaacatagtgaaaccccatctctactaaaaatacaaaaattagccaggcgtggtggcgcacacctgtaatcccagctactcgggaggcggaggcaggagaatcacttgaacctgggaggcggaggttgcagtgagccgcgattgcaccaccacactccagcctgcgcgacagatcgagactctgtctc

SEQ ID NO: 201047 - DNA, 5965 bp, Homo sapiens
  Payload ID: 19686
  Gene Name: zinc finger and BTB domain containing 43
  Uniprot ID: O43298
  ENST ID: ENST00000373464
  CDS Start-End: 265-1668
tttccgggggctgaaggcacaggctgaatctgttgcggcagctgaggctacaacaggcctgcgccggcggcagagaggatatcttgggcgggggatgtgagcgctgagcccttggcagaagtcaatgtgattttaatttgaagcaaaactgaaatgggttcttcttcctcattctattcatgttgctttttgatggccatggcataaggaactctatcccaggaatacagctttgcattagcaccgaacaagatttgtgatgaaatggagcctggaacaaactcttttcgggtagaatttcctgatttttccagcaccattctacagaaactgaaccagcagcgccagcaaggacaattatgtgacgtctccattgttgtccaaggccacattttccgggcacacaaagccgttcttgctgccagttcaccctacttttgtgaccaggtactcctgaaaaacagcaggagaattgttttgcctgatgtgatgaacccaagagtgtttgagaacattctcctatctagttatacaggacgtctagtaatgcccgctccagaaattgttagttacttgacagcggcaagcttcctccagatgtggcatgtggtagacaaatgcactgaagttttagagggaaaccctacagtcctttgtcagaagctaaatcatggcagtgaccaccagtcaccaagcagcagtagttataatggcctggtagagagctttgagctgggctctgggggtcatactgattttcccaaagcccaagaactgagagatggtgaaaatgaagaggagagcaccaaagacgagctgtcatcccagctcaccgagcacgaatacctgcccagcaactcgtccacagagcatgaccgcctgagcacggaaatggcaagccaggatggggaggagggcgccagcgacagcgccgagttccactacacccggcccatgtacagcaagcccagcatcatggctcacaaacgctggatccacgtgaagcccgagcgcttagaacaggcttgcgagggcatggatgtgcacgcgacctacgacgagcaccaggtcacagagtccatcaacaccgtgcagacagagcacacggtgcagccttcgggagtggaggaggacttccacatcggggagaagaaagtggaagctgagtttgatgaacaggctgatgaaagcaattatgatgagcaggtggatttctatggctcttccatggaagagttttccggagagaggtcagatgggaatctaattgggcacagacaggaggctgccctcgcagcaggttacagtgagaatattgaaatggtaacagggattaaagaagaagcttcccacttaggattctcagccactgacaagctgtatccttgtcagtgtgggaaaagtttcactcacaagagtcagagagatcggcacatgagcatgcacctcggtcttcggccttacggctgtggggtctgcggtaagaaattcaaaatgaagcaccatctcgtgggccacatgaaaattcacacaggcataaagccgtatgagtgtaatatctgtgcaaagaggtttatgtggagggacagtttccaccggcatgtgacttcttgtactaagtcctacgaagctgcaaaggctgagcagaatacaactgaggctaactaaaaataggatctggcccttgagtggcatgcacaaaaataaactatggtaattaatgcaaatctgggcacagatgatgcgtgctacttgctattatgagagaagcttaaaaaaaaaaaggaagatatttctgaaagaccagctctaagtaggccaattaaaaaaatctaattcctcaaatttgtgtgttccagtcctggcctggaatgggtaatggggtgagttaacccaccgcccagctggcaagggaaaccttctgactggttgtgatcgaaacaggtggacagagacacctgcacttggaactggactccacccaccagttccattttgggtggcagcagctttggatcactcattattacaaggtcatgctgaaattttattttgctcttgctatagatacttaggtaatgtggatttgttttggtagctatttcactgaaggaagtgctacttatataaaagctagaaataatgtgattcctaggatgagaaattggttaacagagctctgttgtctggttttagtctttctaaaggatattttaactaaaactatggagatgctaagagagtgactttctaaatatgaaacagataatttacggtacaaggctgacatagtgcccttgtcagtttctgtaagatgccactactgtcacaaggtgtttcagactcttgataaggcagtgttttgtattttagttctaacattgagtttggacaattttatctaattgtaattctctagggtgccagagataggtatttctcattggtttgctttcccaaatcctgtttggttaattgtagcctccatacagtggggtcttctctgtggctggtagacaccaagctgctgtgactgaccacggtaccacgggctgccacagcccctgctctgtcttagattatggtgctttacaaagagagtggtccatgaccacacttagtgagaaggagccacaagttgtggctgagagttccctgtgaacttgagtagttcatagagtgctaaggtgacactccaccaaccagagtgagagggcagataggcaggattctatgagtggttatacttaagggggacaaaactgcccaagaagaatcttgagaatacactctttcaaggtgggggagatactctttagagggtacactgagctaatactaccagttctttatgagcactggaatgtgtttgtaaaaggagtcctaagtttagcaaggtagtctacagaaccatgctcccacattatagataaagctgcttaaacttaaaagtccacaaagctacgccgaccagaaaaaaaaaattaaaaaaacaaacaagaaaagcaactattctgagaccttttctgcccatcagttagatgatttaggttaaaaagaaaggtaatattgcacatgcttttaagctgtgtaacatacctgaggttatcaccagggtaggacagggtgctactaccatgtcatcttttccacaatcgtactgggttatttacttctaaatagaaacttttttttcttaaaataaaaataatttttcttggatttggggtgaaattttatttgaaaagtttggctttgctgtaatgtaatagacattgctggcaatggcctctgattctcaagctcctaacaccagggtgtttacttgttgaacattgtctggaaagaggaaagaaaatacttatttaccagttaactcttgtaagcaagattacaaacagggatttattcacaacactgtatcattctcgatatataaaaagcactttgtatttaaaactttattataaatatatatatatattgtttttttttaaacctagaaactagatattacctcttggttgtttgccacattaatagcttctcttagtattgaaacgttactggttagcagtcttttctctgtgtacctgacacacgtatactgaggggattgtacaatcaagcctattgtctccttttctttcactcatggtagaggccagtgggttttaggtatgatcctagccattatatttgaggagaaattgttctattactcctactaatttcagtactaaggtggtgatgccattttgttctgccaaaaactgatcaccctctcccatggtattagcagagcattttctgcctgtttggaaggtttgatgtcctgtttctcattgaagactatttacatgatcattaggacattgcaggagaagtctgagaggtaaaaatacagatattctgggagagtcgtggtccttcagttctgctgaaatcagcatagtgcccttgtcatgaggaagagtttctgttcagccaagagtggtggcacgcttgggtggtagttttggaagcagtcagttgtgctaggacttatttaatatgttgtgaagagaagagtgtcttcttgaaagccttatgtgtccatcagctactaaatgtagaacttaaataagttgctcacatctgttcttttagtgttttgtggtatttgaggttttggcaaaaattgggatttttttatcaggcagccagagcctgggaggtggtagggtgtctgaaatgctggccatgttcagagaggcaggagaagggggttgctttcatttgaatattaaaagtgaatttttgtaaactctggtttttacctttttttcatccccacgttgagttggaggaatagtctcttctcttcacctcaatatagctttagaaaatctttatccttcctaataagtttggatggttgtgggtaacattgttcaaacaatctttcagggatcacgtcaatggcctacaaccaagctatttgtcccctactttgagtcttaactgtggtttttcttcaatccccatgggaaagggcttcaaggcaccaccagtggtatttaatattcatacttggggccaggcatggtggctcacgcctgtaatcccagcactttgggaggccgagatgggtggatcacctgaggtcaggagtttgtgaccagcctgaccaacatagtgaaaccccatctctactaaaaatacaaaaattagccaggcgtggtggcgcacacctgtaatcccagctactcgggaggcggaggcaggagaatcacttgaacctgggaggcggaggttgcagtgagccgcgattgcaccaccacactccagcctgcgcgacagatcgagactctgtctcaaaaaaaaaaaaaaaattcatacttatgccatgcttttacctttagatacacacgttacagtaatccacgtggtgaagtgcatgtcaccgttaactaaggaaggactgcggtaacttaccctgcagggctgtaggttgcctgcaggcgctccaggcccccagcctgttgattccgatttctaggtctcatcttcctctggtcccttttggccactactttaaaagcttgcccaaagggatcccctccattctagtgggcatttgctgaactaacctgcccctaaggctggcttctaaccaccggggaaagctgcttagcctccagggctccctccttgagaggctcacacacccccaagctgctgtggagtgaatttgagacggagcagaagctgcaaagctgtgctttccctggggaaggggatgtgctgcggcctcctgggtgggcgtggagagggcgccatcacaacgagtccaggtttttgcttttggaaggtctctgataatttaggggtgctggaaaccagcactgtgttatccccaatccctcctgtgccaccagttttgtgatttaggttgctttagtgggtgactaacttttgttcagtgaaaccagggtttgtttggggtttttttctttgctacttacatatttaaaggtacaagtttcttatttcaaatctctactgatagtgccctatggggagatgctggaacacattttgcaaatgtgacttttttttttttttttaatttttgcttgaagcctgtgtcatgttagttgctgctgccttctttccttttgtgaggttcccaatgtttcgtccagaaaagtactttatttatgcaagtcaggtgactcttaggccacaaaaccatttgatgataaacagattatcattaggtgcatatcttattgatattttgtgaaatgttatgcctatgttgcaaaagttgaatagttttgtctttatatattgctgtcttcagtgtacagcatggttttacttaattgaatgttaatgtttaatattttcttcttatagaagagatcatgcccttttgtatgacatgttttaataaatgttatctgtcaactttgtaaaa

SEQ ID NO: 201048 - DNA, 5851 bp, Homo sapiens
  Payload ID: 19686
  Gene Name: zinc finger and BTB domain containing 43
  Uniprot ID: O43298
  ENST ID: ENST00000449886
  CDS Start-End: 151-1554
cgggaagcgtttccgggggctgaaggcacaggctgaatctgttgcggcagctgaggctacaacaggcctgcgccggcggcagagaggatatcttgggcgggggatgtgagcgctgagcccttggcagcaccgaacaagatttgtgatgaaatggagcctggaacaaactcttttcgggtagaatttcctgatttttccagcaccattctacagaaactgaaccagcagcgccagcaaggacaattatgtgacgtctccattgttgtccaaggccacattttccgggcacacaaagccgttcttgctgccagttcaccctacttttgtgaccaggtactcctgaaaaacagcaggagaattgttttgcctgatgtgatgaacccaagagtgtttgagaacattctcctatctagttatacaggacgtctagtaatgcccgctccagaaattgttagttacttgacagcggcaagcttcctccagatgtggcatgtggtagacaaatgcactgaagttttagagggaaaccctacagtcctttgtcagaagctaaatcatggcagtgaccaccagtcaccaagcagcagtagttataatggcctggtagagagctttgagctgggctctgggggtcatactgattttcccaaagcccaagaactgagagatggtgaaaatgaagaggagagcaccaaagacgagctgtcatcccagctcaccgagcacgaatacctgcccagcaactcgtccacagagcatgaccgcctgagcacggaaatggcaagccaggatggggaggagggcgccagcgacagcgccgagttccactacacccggcccatgtacagcaagcccagcatcatggctcacaaacgctggatccacgtgaagcccgagcgcttagaacaggcttgcgagggcatggatgtgcacgcgacctacgacgagcaccaggtcacagagtccatcaacaccgtgcagacagagcacacggtgcagccttcgggagtggaggaggacttccacatcggggagaagaaagtggaagctgagtttgatgaacaggctgatgaaagcaattatgatgagcaggtggatttctatggctcttccatggaagagttttccggagagaggtcagatgggaatctaattgggcacagacaggaggctgccctcgcagcaggttacagtgagaatattgaaatggtaacagggattaaagaagaagcttcccacttaggattctcagccactgacaagctgtatccttgtcagtgtgggaaaagtttcactcacaagagtcagagagatcggcacatgagcatgcacctcggtcttcggccttacggctgtggggtctgcggtaagaaattcaaaatgaagcaccatctcgtgggccacatgaaaattcacacaggcataaagccgtatgagtgtaatatctgtgcaaagaggtttatgtggagggacagtttccaccggcatgtgacttcttgtactaagtcctacgaagctgcaaaggctgagcagaatacaactgaggctaactaaaaataggatctggcccttgagtggcatgcacaaaaataaactatggtaattaatgcaaatctgggcacagatgatgcgtgctacttgctattatgagagaagcttaaaaaaaaaaaggaagatatttctgaaagaccagctctaagtaggccaattaaaaaaatctaattcctcaaatttgtgtgttccagtcctggcctggaatgggtaatggggtgagttaacccaccgcccagctggcaagggaaaccttctgactggttgtgatcgaaacaggtggacagagacacctgcacttggaactggactccacccaccagttccattttgggtggcagcagctttggatcactcattattacaaggtcatgctgaaattttattttgctcttgctatagatacttaggtaatgtggatttgttttggtagctatttcactgaaggaagtgctacttatataaaagctagaaataatgtgattcctaggatgagaaattggttaacagagctctgttgtctggttttagtctttctaaaggatattttaactaaaactatggagatgctaagagagtgactttctaaatatgaaacagataatttacggtacaaggctgacatagtgcccttgtcagtttctgtaagatgccactactgtcacaaggtgtttcagactcttgataaggcagtgttttgtattttagttctaacattgagtttggacaattttatctaattgtaattctctagggtgccagagataggtatttctcattggtttgctttcccaaatcctgtttggttaattgtagcctccatacagtggggtcttctctgtggctggtagacaccaagctgctgtgactgaccacggtaccacgggctgccacagcccctgctctgtcttagattatggtgctttacaaagagagtggtccatgaccacacttagtgagaaggagccacaagttgtggctgagagttccctgtgaacttgagtagttcatagagtgctaaggtgacactccaccaaccagagtgagagggcagataggcaggattctatgagtggttatacttaagggggacaaaactgcccaagaagaatcttgagaatacactctttcaaggtgggggagatactctttagagggtacactgagctaatactaccagttctttatgagcactggaatgtgtttgtaaaaggagtcctaagtttagcaaggtagtctacagaaccatgctcccacattatagataaagctgcttaaacttaaaagtccacaaagctacgccgaccagaaaaaaaaaattaaaaaaacaaacaagaaaagcaactattctgagaccttttctgcccatcagttagatgatttaggttaaaaagaaaggtaatattgcacatgcttttaagctgtgtaacatacctgaggttatcaccagggtaggacagggtgctactaccatgtcatcttttccacaatcgtactgggttatttacttctaaatagaaacttttttttcttaaaataaaaataatttttcttggatttggggtgaaattttatttgaaaagtttggctttgctgtaatgtaatagacattgctggcaatggcctctgattctcaagctcctaacaccagggtgtttacttgttgaacattgtctggaaagaggaaagaaaatacttatttaccagttaactcttgtaagcaagattacaaacagggatttattcacaacactgtatcattctcgatatataaaaagcactttgtatttaaaactttattataaatatatatatatattgtttttttttaaacctagaaactagatattacctcttggttgtttgccacattaatagcttctcttagtattgaaacgttactggttagcagtcttttctctgtgtacctgacacacgtatactgaggggattgtacaatcaagcctattgtctccttttctttcactcatggtagaggccagtgggttttaggtatgatcctagccattatatttgaggagaaattgttctattactcctactaatttcagtactaaggtggtgatgccattttgttctgccaaaaactgatcaccctctcccatggtattagcagagcattttctgcctgtttggaaggtttgatgtcctgtttctcattgaagactatttacatgatcattaggacattgcaggagaagtctgagaggtaaaaatacagatattctgggagagtcgtggtccttcagttctgctgaaatcagcatagtgcccttgtcatgaggaagagtttctgttcagccaagagtggtggcacgcttgggtggtagttttggaagcagtcagttgtgctaggacttatttaatatgttgtgaagagaagagtgtcttcttgaaagccttatgtgtccatcagctactaaatgtagaacttaaataagttgctcacatctgttcttttagtgttttgtggtatttgaggttttggcaaaaattgggatttttttatcaggcagccagagcctgggaggtggtagggtgtctgaaatgctggccatgttcagagaggcaggagaagggggttgctttcatttgaatattaaaagtgaatttttgtaaactctggtttttacctttttttcatccccacgttgagttggaggaatagtctcttctcttcacctcaatatagctttagaaaatctttatccttcctaataagtttggatggttgtgggtaacattgttcaaacaatctttcagggatcacgtcaatggcctacaaccaagctatttgtcccctactttgagtcttaactgtggtttttcttcaatccccatgggaaagggcttcaaggcaccaccagtggtatttaatattcatacttggggccaggcatggtggctcacgcctgtaatcccagcactttgggaggccgagatgggtggatcacctgaggtcaggagtttgtgaccagcctgaccaacatagtgaaaccccatctctactaaaaatacaaaaattagccaggcgtggtggcgcacacctgtaatcccagctactcgggaggcggaggcaggagaatcacttgaacctgggaggcggaggttgcagtgagccgcgattgcaccaccacactccagcctgcgcgacagatcgagactctgtctcaaaaaaaaaaaaaaaattcatacttatgccatgcttttacctttagatacacacgttacagtaatccacgtggtgaagtgcatgtcaccgttaactaaggaaggactgcggtaacttaccctgcagggctgtaggttgcctgcaggcgctccaggcccccagcctgttgattccgatttctaggtctcatcttcctctggtcccttttggccactactttaaaagcttgcccaaagggatcccctccattctagtgggcatttgctgaactaacctgcccctaaggctggcttctaaccaccggggaaagctgcttagcctccagggctccctccttgagaggctcacacacccccaagctgctgtggagtgaatttgagacggagcagaagctgcaaagctgtgctttccctggggaaggggatgtgctgcggcctcctgggtgggcgtggagagggcgccatcacaacgagtccaggtttttgcttttggaaggtctctgataatttaggggtgctggaaaccagcactgtgttatccccaatccctcctgtgccaccagttttgtgatttaggttgctttagtgggtgactaacttttgttcagtgaaaccagggtttgtttggggtttttttctttgctacttacatatttaaaggtacaagtttcttatttcaaatctctactgatagtgccctatggggagatgctggaacacattttgcaaatgtgacttttttttttttttttaatttttgcttgaagcctgtgtcatgttagttgctgctgccttctttccttttgtgaggttcccaatgtttcgtccagaaaagtactttatttatgcaagtcaggtgactcttaggccacaaaaccatttgatgataaacagattatcattaggtgcatatcttattgatattttgtgaaatgttatgcctatgttgcaaaagttgaatagttttgtctttatatattgctgtcttcagtgtacagcatggttttacttaattgaatgttaatgtttaatattttcttcttatagaagagatcatgcccttttgtatgacatgttttaataaatgttatctgtcaactttgtaaaa

SEQ ID NO: 201049 - DNA, 710 bp, Homo sapiens
  Payload ID: 19686
  Gene Name: zinc finger and BTB domain containing 43
  ENST ID: ENST00000450858
  CDS Start-End: 124-710
acaggctgaatctgttgcggcagctgaggctacaacaggcctgcgccggcggcagagaggatatcttgggcgggggatgtgagcgctgagcccttggcagcaccgaacaagatttgtgatgaaatggagcctggaacaaactcttttcgggtagaatttcctgatttttccagcaccattctacagaaactgaaccagcagcgccagcaaggacaattatgtgacgtctccattgttgtccaaggccacattttccgggcacacaaagccgttcttgctgccagttcaccctacttttgtgaccaggtactcctgaaaaacagcaggagaattgttttgcctgatgtgatgaacccaagagtgtttgagaacattctcctatctagttatacaggacgtctagtaatgcccgctccagaaattgttagttacttgacagcggcaagcttcctccagatgtggcatgtggtagacaaatgcactgaagttttagagggaaaccctacagtcctttgtcagaagctaaatcatggcagtgaccaccagtcaccaagcagcagtagttataatggcctggtagagagctttgagctgggctctgggggtcatactgattttcccaaagcccaagaactgagagatggtgaaaatgaagaggagagcaccaaagacgagctgtcatcccagctcaccgagcacgaatacctgcc

SEQ ID NO: 201050 - DNA, 2781 bp, Homo sapiens
  Payload ID: 19687
  Gene Name: zinc finger and BTB domain containing 44
  ENST ID: ENST00000357899
  CDS Start-End: 274-1986
cggtggctgtgccgccatgccccaccacaggctgctcacgggcctaggcgcggcggcccgagataggggcccctgagcctcccgggggaggagagaggcagcgagccgcgctccgccccctccccccgggccgccgccgccgccgcctcgccgccccagcctggcgggagaaggaggaggagcagcaggcctccgggcccggcgccgccgcccgcaggacatttctgatttatttgcatccttgaagagcatctgtagaagaggaagtaaaagatgggtgtgaaaacatttactcatagctcctcttcccacagccaggaaatgcttggaaagctaaatatgctgcgaaatgatggacatttttgtgatatcactattcgtgtccaggacaaaatcttccgggcacataaggtggtactagcagcttgcagtgatttctttcgcaccaaacttgtaggccaagccgaggatgagaacaagaatgtgttggatctgcatcatgttacagtgactggctttatacctcttttagaatatgcttacacagccactctatcaattaacacagaaaatattattgatgttctagcagcagccagctatatgcaaatgttcagtgttgccagcacctgctcagagttcatgaaatcaagcattttatggaatacacccaacagccaacctgaaaagggtctagatgctggacaagaaaataattctaactgcaattttacttctcgagatgggagcatttctcccgtgtcctcagagtgcagtgtggtagaaagaaccattcctgtctgccgagaatcccggagaaagcgcaaaagctacattgttatgtctcctgaaagtcctgtaaagtgtggcacacaaacaagctcaccccaggtattgaattcttcagcttcctactcagaaaatagaaaccaaccagttgactcttccttagcttttccttggacttttccttttggaattgatcgaaggattcagcctgagaaagttaagcaagcagaaaatacccggactttagaattacctggcccatctgagaccggtagaagaatggctgattatgtgacttgtgagagcacaaaaactaccttgcctttaggtaccgaagaagatgtccgggtcaaagtagaaagattaagtgatgaggaggtccatgaggaagtgtcccagcctgtcagtgcatctcagagttcgctgagtgatcagcagacagttccaggaagtgaacaagtccaagaggaccttctgattagtccacagtcttcctctataggctcagtagatgaaggcgtttctgagggcttgcctacacttcaaagcacgtctagcactaatgctcctccggatgatgatgatcgattggaaaatgttcagtatccctaccaactctacattgctccttccaccagcagtacagagcgaccaagtccaaatggtcccgacagaccttttcagtgtccaacctgcggggtgcgattcacccgtattcagaacctaaagcagcacatgctcatccactcaggaattaaaccatttcagtgtgaccgctgtgggaaaaagttcaccagggcttactcgctaaagatgcatcgcctaaagcatgaaggtaaacgctgtttccggtgccagatatgtagtgccactttcacttccttcggggaatataaacaccacatgagggtttcccggcacattatccgcaagcctcggatttacgagtgcaaaacatgtggcgccatgttcaccaactctggaaatttaatcgtgcacctgaggagtctgaaccatgaagcatcagagctagcaaactacttccagagcagtgatttcctagtaccggactacttaaaccaggaacaagaagagacccttgttcaatatgatcttggagaacacggttttgaaagcaactcctctgttcaaatgcctgtcatttcacagtaccactccaaaggcaaggaaccatgattgacaacagtcaagctgtggatgaaatgaccaggaacggagaatgaattccaagaggtggtttttgaaagagcaagaggaaagaaaaaagaaaagaaggaaagaagaataaagaagagaaacgtgtaagaatggtttgcagattgattggttaaaagtgtttttagcacatccccaaccctgaaaacttcgcattaagagccaagcacaatgttggtagctccaagatattctgactgtgttctcagaatgagggattacccatcactgggtattccttcccaagtagaaactttagattttcactggtaatacacattgccaagttttatgggaaatctgaatatactgtgaaaatgcatatctggttagttgtctgctgcccagatcttatcaataccagtaactaaccagtatttaacataaaatgatacaaataaaggcctttttctatttcagtgagggtacatttttcttgatatatatgtactttaaggatattggatctgtttatggatctgttttaggaaacagatttgcaagggataattgtatatatagtagtatttaggtttatttcaaattcatcttagggatgcctagatgcataatttttaccaggacatattgaaaatattgcaaagagatagccagttatattatcccattcattagaaattaccagtgtaactaaacataaatattccagtttagagtgcttaaacgtagctatctttcttaaggccaggagggtaactttgtggtatctaaagggcttaaatttcagaatgcaga

SEQ ID NO: 201051 - DNA, 3951 bp, Homo sapiens
  Payload ID: 19687
  Gene Name: zinc finger and BTB domain containing 44
  ENST ID: ENST00000397753
  CDS Start-End: 295-2007
cactcccactcgcgggcacgccggtggctgtgccgccatgccccaccacaggctgctcacgggcctaggcgcggcggcccgagataggggcccctgagcctcccgggggaggagagaggcagcgagccgcgctccgccccctccccccgggccgccgccgccgccgcctcgccgccccagcctggcgggagaaggaggaggagcagcaggcctccgggcccggcgccgccgcccgcaggacatttctgatttatttgcatccttgaagagcatctgtagaagaggaagtaaaagatgggtgtgaaaacatttactcatagctcctcttcccacagccaggaaatgcttggaaagctaaatatgctgcgaaatgatggacatttttgtgatatcactattcgtgtccaggacaaaatcttccgggcacataaggtggtactagcagcttgcagtgatttctttcgcaccaaacttgtaggccaagccgaggatgagaacaagaatgtgttggatctgcatcatgttacagtgactggctttatacctcttttagaatatgcttacacagccactctatcaattaacacagaaaatattattgatgttctagcagcagccagctatatgcaaatgttcagtgttgccagcacctgctcagagttcatgaaatcaagcattttatggaatacacccaacagccaacctgaaaagggtctagatgctggacaagaaaataattctaactgcaattttacttctcgagatgggagcatttctcccgtgtcctcagagtgcagtgtggtagaaagaaccattcctgtctgccgagaatcccggagaaagcgcaaaagctacattgttatgtctcctgaaagtcctgtaaagtgtggcacacaaacaagctcaccccaggtattgaattcttcagcttcctactcagaaaatagaaaccaaccagttgactcttccttagcttttccttggacttttccttttggaattgatcgaaggattcagcctgagaaagttaagcaagcagaaaatacccggactttagaattacctggcccatctgagaccggtagaagaatggctgattatgtgacttgtgagagcacaaaaactaccttgcctttaggtaccgaagaagatgtccgggtcaaagtagaaagattaagtgatgaggaggtccatgaggaagtgtcccagcctgtcagtgcatctcagagttcgctgagtgatcagcagacagttccaggaagtgaacaagtccaagaggaccttctgattagtccacagtcttcctctataggctcagtagatgaaggcgtttctgagggcttgcctacacttcaaagcacgtctagcactaatgctcctccggatgatgatgatcgattggaaaatgttcagtatccctaccaactctacattgctccttccaccagcagtacagagcgaccaagtccaaatggtcccgacagaccttttcagtgtccaacctgcggggtgcgattcacccgtattcagaacctaaagcagcacatgctcatccactcaggaattaaaccatttcagtgtgaccgctgtgggaaaaagttcaccagggcttactcgctaaagatgcatcgcctaaagcatgaaggtaaacgctgtttccggtgccagatatgtagtgccactttcacttccttcggggaatataaacaccacatgagggtttcccggcacattatccgcaagcctcggatttacgagtgcaaaacatgtggcgccatgttcaccaactctggaaatttaatcgtgcacctgaggagtctgaaccatgaagcatcagagctagcaaactacttccagagcagtgatttcctagtaccggactacttaaaccaggaacaagaagagacccttgttcaatatgatcttggagaacacggttttgaaagcaactcctctgttcaaatgcctgtcatttcacagtaccactccaaaggcaaggaaccatgattgacaacagtcaagctgtggatgaaatgaccaggaacggagaatgaattccaagaggtggtttttgaaagagcaagaggaaagaaaaaagaaaagaaggaaagaagaataaagaagagaaacgttcatctgcaaagtatgaagctgtaattctgaaatacacatccaagtgaatgagaattaaaaattttctaaatattaatactaactgggaaaaaaaaactagtgtgaagtttacagttagaagaaacagacccaaagttgccagaaggtacctgaaatgagtgacatcaggtatttggaaggagtaagatcataaactgtattcattttcttccttgtacaaagtgatgacttctaatgcttatatctcaaggtattttttaaaaaagcaacggtccctaatagagtaaaatttggttttggtccaagttcccaataatgtatttaatgtttctgttgtttactggtgcctcccgttgcatcaggtagagattgcctgcctctttgtagggcagccttgtggcaccttatgtccaacttggaggatagtatatggcttctttgtgcctctactatcttttcaaaagccattttataaaaatcctaggtagcctattttaatatttaaatatatatatttgtgaaagaacttttagaacagaccttttctttttactttaaaattcctgtatttccatttttaagagtaaatttaatctccaggatttagaagtgtctttccagagaagcataatgagaaagtcagactgaggtaataagaccagaattaagtgatagaagaaactgttgtttggttaaaggacacagatttgaaggaaaaaaattttgatgtaacaattttttaaataaaattttgtttttctgtaatgtcatatttgctgctacagtagctcaatattttacagggctaacataaagctggctccatttaaaaactggagtacttcctagtgcagccagcctaggcggaaactgtacaccatggtcttccagatgggtgactgatggctttgggtagctgatgcatgctttaatatttgcctatagcccggcagcaaggaagtcggggcggggggacttttttaccctgccagttatagcattgtgattctttctgggcactggcattttgtgaaactctcaagggaaggtgatgcaggggagaaaatgtgaattaaattacatagatgggtgtttttatgtcttctacccctttcctagaattagtacaactcttaactgtgccagtccccagttcaccagctttgtatccagtcgtcatctcattcaagtatggctttacttggtgacactggccatagctaagttaacttggcatgtttgacttttgacaataacaaaaatggttttggattttgttttatttccaaaaaatgtatacaatatcagaacttcacattttatatactagtatctggctattagtattttacaggaaccatagttcttggtgactacatatatatatatatttttgtgaccttttttgtaaactaagtgccgtttcaacgttacaatcatttttagggttattgtaatcaatgtgaatatcatgttttttcaaatctgttctgagcctatagtgtttgctttgtgaacatgtgtattgtatatattctgtatagttatattgtactgaaattagcttgtttgatataaggaaaatatgtattgagtacctttttgctagcctgattgtttaatctttttaaaaaaggtttaaactttttttaaaaaaaaaatctttaaactggcctttattacatggtcacacataaagttgcagttaggaaagggatgggcagggaaaaactagttttgagtgtctttagatagaaacatgagactaaggtttgattttgttttcgttttctcattaaaatatcttatgctttatgg

SEQ ID NO: 201052 - DNA, 3848 bp, Homo sapiens
  Payload ID: 19687
  Gene Name: zinc finger and BTB domain containing 44
  Uniprot ID: Q8NCP5
  ENST ID: ENST00000445008
  CDS Start-End: 295-1698
cactcccactcgcgggcacgccggtggctgtgccgccatgccccaccacaggctgctcacgggcctaggcgcggcggcccgagataggggcccctgagcctcccgggggaggagagaggcagcgagccgcgctccgccccctccccccgggccgccgccgccgccgcctcgccgccccagcctggcgggagaaggaggaggagcagcaggcctccgggcccggcgccgccgcccgcaggacatttctgatttatttgcatccttgaagagcatctgtagaagaggaagtaaaagatgggtgtgaaaacatttactcatagctcctcttcccacagccaggaaatgcttggaaagctaaatatgctgcgaaatgatggacatttttgtgatatcactattcgtgtccaggacaaaatcttccgggcacataaggtggtactagcagcttgcagtgatttctttcgcaccaaacttgtaggccaagccgaggatgagaacaagaatgtgttggatctgcatcatgttacagtgactggctttatacctcttttagaatatgcttacacagccactctatcaattaacacagaaaatattattgatgttctagcagcagccagctatatgcaaatgttcagtgttgccagcacctgctcagagttcatgaaatcaagcattttatggaatacacccaacagccaacctgaaaagggtctagatgctggacaagaaaataattctaactgcaattttacttctcgagatgggagcatttctcccgtgtcctcagagtgcagtgtggtagaaagaaccattcctgtctgccgagaatcccggagaaagcgcaaaagctacattgttatgtctcctgaaagtcctgtaaagtgtggcacacaaacaagctcaccccaggtattgaattcttcagcttcctactcagaaaatagaaaccaaccagttgactcttccttagcttttccttggacttttccttttggaattgatcgaaggattcagcctgagaaagttaagcaagcagaaaatacccggactttagaattacctggcccatctgagaccggtagaagaatggctgattatgtgacttgtgagagcacaaaaactaccttgcctttaggtaccgaagaagatgtccgggtcaaagtagaaagattaagtgatgaggaggtccatgaggaagtgtcccagcctgtcagtgcatctcagagttcgctgagtgatcagcagacagttccaggaagtgaacaagtccaagaggaccttctgattagtccacagtcttcctctataggctcagtagatgaaggcgtttctgagggcttgcctacacttcaaagcacgtctagcactaatgctcctccggatgatgatgatcgattggaaaatgttcagtatccctaccaactctacattgctccttccaccagcagtacagagcgaccaagtccaaatggtcccgacagaccttttcagtgtccaacctgcggggtgcgattcacccgtattcagaacctaaagcagcacatgctcatccactcaggaattaaaccatttcagtgtgaccgctgtgggaaaaagttcaccagggcttactcgctaaagatgcatcgcctaaagcatgaagggcatcccaggaaatcagcttctagatctagctctgccactaactgctgttgattaaacctgtcactttacacatgaaaaagcttgaaacttagagaaagataaaattgatttcctagtaccggactacttaaaccaggaacaagaagagacccttgttcaatatgatcttggagaacacggttttgaaagcaactcctctgttcaaatgcctgtcatttcacagtaccactccaaaggcaaggaaccatgattgacaacagtcaagctgtggatgaaatgaccaggaacggagaatgaattccaagaggtggtttttgaaagagcaagaggaaagaaaaaagaaaagaaggaaagaagaataaagaagagaaacgttcatctgcaaagtatgaagctgtaattctgaaatacacatccaagtgaatgagaattaaaaattttctaaatattaatactaactgggaaaaaaaaactagtgtgaagtttacagttagaagaaacagacccaaagttgccagaaggtacctgaaatgagtgacatcaggtatttggaaggagtaagatcataaactgtattcattttcttccttgtacaaagtgatgacttctaatgcttatatctcaaggtattttttaaaaaagcaacggtccctaatagagtaaaatttggttttggtccaagttcccaataatgtatttaatgtttctgttgtttactggtgcctcccgttgcatcaggtagagattgcctgcctctttgtagggcagccttgtggcaccttatgtccaacttggaggatagtatatggcttctttgtgcctctactatcttttcaaaagccattttataaaaatcctaggtagcctattttaatatttaaatatatatatttgtgaaagaacttttagaacagaccttttctttttactttaaaattcctgtatttccatttttaagagtaaatttaatctccaggatttagaagtgtctttccagagaagcataatgagaaagtcagactgaggtaataagaccagaattaagtgatagaagaaactgttgtttggttaaaggacacagatttgaaggaaaaaaattttgatgtaacaattttttaaataaaattttgtttttctgtaatgtcatatttgctgctacagtagctcaatattttacagggctaacataaagctggctccatttaaaaactggagtacttcctagtgcagccagcctaggcggaaactgtacaccatggtcttccagatgggtgactgatggctttgggtagctgatgcatgctttaatatttgcctatagcccggcagcaaggaagtcggggcggggggacttttttaccctgccagttatagcattgtgattctttctgggcactggcattttgtgaaactctcaagggaaggtgatgcaggggagaaaatgtgaattaaattacatagatgggtgtttttatgtcttctacccctttcctagaattagtacaactcttaactgtgccagtccccagttcaccagctttgtatccagtcgtcatctcattcaagtatggctttacttggtgacactggccatagctaagttaacttggcatgtttgacttttgacaataacaaaaatggttttggattttgttttatttccaaaaaatgtatacaatatcagaacttcacattttatatactagtatctggctattagtattttacaggaaccatagttcttggtgactacatatatatatatatttttgtgaccttttttgtaaactaagtgccgtttcaacgttacaatcatttttagggttattgtaatcaatgtgaatatcatgttttttcaaatctgttctgagcctatagtgtttgctttgtgaacatgtgtattgtatatattctgtatagttatattgtactgaaattagcttgtttgatataaggaaaatatgtattgagtacctttttgctagcctgattgtttaatctttttaaaaaaggtttaaactttttttaaaaaaaaaatctttaaactggcctttattacatggtcacacataaagttgcagttaggaaagggatgggcagggaaaaactagttttgagtgtctttagatagaaacatgagactaaggtttgattttgttttcgttttctcattaaaatatcttatgctttatggaataaaa

SEQ ID NO: 201053 - DNA, 2629 bp, Homo sapiens
  Payload ID: 19687
  Gene Name: zinc finger and BTB domain containing 44
  ENST ID: ENST00000529982
  CDS Start-End: 1-986
ataattctaactgcaattttacttctcgagatgggagcatttctcccgtgtcctcagagtgcagtgtggtagaaagaaccattcctgtctgccgagaatcccggagaaagcgcaaaagctacattgttatgtctcctgaaagtcctgtaaagtgtggcacacaaacaagctcaccccaggtattgaattcttcagcttcctactcagaaaatagaaaccaaccagttgactcttccttagcttttccttggacttttccttttggaattgatcgaaggattcagcctgagaaagttaagcaagcagaaaatacccggactttagaattacctggcccatctgagaccggtagaagaatggctgattatgtgacttgtgagagcacaaaaactaccttgcctttaggtaccgaagaagatgtccgggtcaaagtagaaagattaagtgatgaggaggtccatgaggaagtgtcccagcctgtcagtgcatctcagagttcgctgagtgatcagcagacagttccaggaagtgaacaagtccaagaggaccttctgattagtccacagtcttcctctataggctcagtagatgaaggcgtttctgagggcttgcctacacttcaaagcacgtctagcactaatgctcctccggatgatgatgatcgattggaaaatgttcagtatccctaccaactctacattgctccttccaccagcagtacagagcgaccaagtccaaatggtcccgacagaccttttcagtgtccaacctgcggggtgcgattcacccgtattcagaacctaaagcagcacatgctcatccactcaggaattaaaccatttcagtgtgaccgctgtgggaaaaagttcaccagggcttactcgctaaagatgcatcgcctaaagcatgaagtaccactccaaaggcaaggaaccatgattgacaacagtcaagctgtggatgaaatgaccaggaacggagaatgaagtatgtaaatcccagcttcataggaactcttctcatactgcttttcagattaaaattgctgtttacctggtctccgaatgtaatgcctgactgtgtcattgcccggatcagttttccccctgccccatcaatatgttctcttgcatatattggcgtgctgccatataaagtaaaaatactggagatattctatattttatatataggtttatgtgttgttggggatgttttcattgtgctcttttggacataataaataattctctattgaggctacattctttttttttttctttttttttaaaagaatggcatctcactctgttgcccaggctggagtatagtggctaagtcatagctcactgcagcttcgaactcctgggctcaggccattctcctgcctcagcctcttgagtatctaggattataggcatgctccaccacacctggttaacttcatttttattttttgtagagatgaggtctcactatggtgcccaggctggtcttgaactcctagaccaagtgatcctcctcctttggcctcccagactgctgggatcactgcaccggccaaggctgcattcttaacccaactagattgtttactgaatcccatatgacagcgatacattgtccttacatatttatttttagacattgcaaagttattaaaaacagttaactatagtttttacacaacgtaggcaacaatgaagagtatagactgtaagattttcatctatgactcataaatctgggagaaaaaaattattaagactaatgagaaactgaaaaccttaaactaatgaatattatttctgctgctaaaaatatgaaactttctggtctgtagttgaaatttgtatgatcctctagacttgggtatacttttcatctggtgccattaaagcatctctaatattgatcctaaatatttgtaagtccatgagcagtgaactttggaataagtttctgtgtagatacccaaagtttaataattatgagagcacctgatttgatagacagaaaatacagttctttagtcaaaacacaagatctgaattttgttcaggtgctagaccatactaaatgtatatatttttaattatagtgatttgtttcatttttttagattggctaattctgtaattttttccccaaaaacatgtgaagaaaggaaaagtaaattaaattccttagaactgttttaggttaagattctctgtgtctgcccatattctgcagtccttaacttgttttcaactctttacctcactcatgaacttgtttttacccatttgctgccaaacataggtgtgttcccttcaggagaatcagcatatacaggttatgataggctcccaccatttatgcttcttcactgatagggttgcattactttctgcagcagactataatacttcatatagtactgctgtgtctcaactggaaaggtcaggaattttaatgttacgttgtggtctttgaaaactgttaggcctagcaatagataaatctcaaaattaattttaaaatctgtattgacaagaataggtaaaattatgaccaggaatcattgttacccttagttccaagaggtggtttttgaaagagcaagaggaaagaaaaaagaaaagaa

SEQ ID NO: 201054 - DNA, 9315 bp, Homo sapiens
  Payload ID: 19687
  Gene Name: zinc finger and BTB domain containing 44
  Uniprot ID: Q8NCP5
  ENST ID: ENST00000525842
  CDS Start-End: 369-1730
cggctcccgggccccctcgctcctcccctctggcccctccgagcgctgggggtgcttccctccccgcctcctcgcactcccactcgcgggcacgccggtggctgtgccgccatgccccaccacaggctgctcacgggcctaggcgcggcggcccgagataggggcccctgagcctcccgggggaggagagaggcagcgagccgcgctccgccccctccccccgggccgccgccgccgccgcctcgccgccccagcctggcgggagaaggaggaggagcagcaggcctccgggcccggcgccgccgcccgcaggacatttctgatttatttgcatccttgaagagcatctgtagaagaggaagtaaaagatgggtgtgaaaacatttactcatagctcctcttcccacagccaggaaatgcttggaaagctaaatatgctgcgaaatgatggacatttttgtgatatcactattcgtgtccaggacaaaatcttccgggcacataaggtggtactagcagcttgcagtgatttctttcgcaccaaacttgtaggccaagccgaggatgagaacaagaatgtgttggatctgcatcatgttacagtgactggctttatacctcttttagaatatgcttacacagccactctatcaattaacacagaaaatattattgatgttctagcagcagccagctatatgcaaatgttcagtgttgccagcacctgctcagagttcatgaaatcaagcattttatggaatacacccaacagccaacctgaaaagggtctagatgctggacaagaaaataattctaactgcaattttacttctcgagatgggagcatttctcccgtgtcctcagagtgcagtgtggtagaaagaaccattcctgtctgccgagaatcccggagaaagcgcaaaagctacattgttatgtctcctgaaagtcctgtaaagtgtggcacacaaacaagctcaccccaggtattgaattcttcagcttcctactcagaaaatagaaaccaaccagttgactcttccttagcttttccttggacttttccttttggaattgatcgaaggattcagcctgagaaagttaagcaagcagaaaatacccggactttagaattacctggcccatctgagaccggtagaagaatggctgattatgtgacttgtgagagcacaaaaactaccttgcctttaggtaccgaagaagatgtccgggtcaaagtagaaagattaagtgatgaggaggtccatgaggaagtgtcccagcctgtcagtgcatctcagagttcgctgagtgatcagcagacagttccaggaagtgaacaagtccaagaggaccttctgattagtccacagtcttcctctataggctcagtagatgaaggcgtttctgagggcttgcctacacttcaaagcacgtctagcactaatgctcctccggatgatgatgatcgattggaaaatgttcagtatccctaccaactctacattgctccttccaccagcagtacagagcgaccaagtccaaatggtcccgacagaccttttcagtgtccaacctgcggggtgcgattcacccgtattcagaacctaaagcagcacatgctcatccactcaggaattaaaccatttcagtgtgaccgctgtgggaaaaagttcaccagggcttactcgctaaagatgcatcgcctaaagcatgaagtgatttcctagtaccggactacttaaaccaggaacaagaagagacccttgttcaatatgatcttggagaacacggttttgaaagcaactcctctgttcaaatgcctgtcatttcacaggtctcctcaacccagaattgtgaaagcacttttcccttggggtctcttggtgggctggcagaaaaagaggaagaagtgccagagcagccaaagagcagtgcttgtgctgaggcaaccagagatgaccccccaaaatcagagctgtcttctataactattgagtagttttgtgatttggcttcagttttgttttttggaaagtgcctgtgcttggtcttgtacatttaaatttaatttaattttttaaacaaaaaaagccgggtgggagggagggggagattgggaaagaatttccctttttactttctgagccctgaaactgattttatttttcctaactgagagattgcttctgtaagtacacaataacatgatgttgaaacagaaactatgagacttaaggagaactggttgacttaaaacatataccagttccttcttccattgttaaaagtaggctaacaacagatcattagctagagaggaaatcagatgattattgaccttcttgagacaagagggtacatgagaaactaattactaaacagcttgacaaatggcctgagtagatacttactgctgtacacaggatgttgtataatattttgtaaagcctgttgtttttggaagtatttatggtaagctttcttaaaaattattatggtaaatacttctgaaatccggcgtacttttctttaagctttgtcatttctgttatgatttttcatggtgaaattttggtactgagatgggcattctctgtacctttatagtaccactccaaaggcaaggaaccatgattgacaacagtcaagctgtggatgaaatgaccaggaacggagaatgaagtatgtaaatcccagcttcataggaactcttctcatactgcttttcagattaaaattgctgtttacctggtctccgaatgtaatgcctgactgtgtcattgcccggatcagttttccccctgccccatcaatatgttctcttgcatatattggcgtgctgccatataaagtaaaaatactggagatattctatattttatatataggtttatgtgttgttggggatgttttcattgtgctcttttggacataataaataattctctattgaggctacattctttttttttttctttttttttaaaagaatggcatctcactctgttgcccaggctggagtatagtggctaagtcatagctcactgcagcttcgaactcctgggctcaggccattctcctgcctcagcctcttgagtatctaggattataggcatgctccaccacacctggttaacttcatttttattttttgtagagatgaggtctcactatggtgcccaggctggtcttgaactcctagaccaagtgatcctcctcctttggcctcccagactgctgggatcactgcaccggccaaggctgcattcttaacccaactagattgtttactgaatcccatatgacagcgatacattgtccttacatatttatttttagacattgcaaagttattaaaaacagttaactatagtttttacacaacgtaggcaacaatgaagagtatagactgtaagattttcatctatgactcataaatctgggagaaaaaaattattaagactaatgagaaactgaaaaccttaaactaatgaatattatttctgctgctaaaaatatgaaactttctggtctgtagttgaaatttgtatgatcctctagacttgggtatacttttcatctggtgccattaaagcatctctaatattgatcctaaatatttgtaagtccatgagcagtgaactttggaataagtttctgtgtagatacccaaagtttaataattatgagagcacctgatttgatagacagaaaatacagttctttagtcaaaacacaagatctgaattttgttcaggtgctagaccatactaaatgtatatatttttaattatagtgatttgtttcatttttttagattggctaattctgtaattttttccccaaaaacatgtgaagaaaggaaaagtaaattaaattccttagaactgttttaggttaagattctctgtgtctgcccatattctgcagtccttaacttgttttcaactctttacctcactcatgaacttgtttttacccatttgctgccaaacataggtgtgttcccttcaggagaatcagcatatacaggttatgataggctcccaccatttatgcttcttcactgatagggttgcattactttctgcagcagactataatacttcatatagtactgctgtgtctcaactggaaaggtcaggaattttaatgttacgttgtggtctttgaaaactgttaggcctagcaatagataaatctcaaaattaattttaaaatctgtattgacaagaataggtaaaattatgaccaggaatcattgttacccttagttccaagaggtggtttttgaaagagcaagaggaaagaaaaaagaaaagaaggaaagaagaataaagaagagaaacgtgtaagaatggtttgcagattgattggttaaaagtgtttttagcacatccccaaccctgaaaacttcgcattaagagccaagcacaatgttggtagctccaagatattctgactgtgttctcagaatgagggattacccatcactgggtattccttcccaagtagaaactttagattttcactggtaatacacattgccaagttttatgggaaatctgaatatactgtgaaaatgcatatctggttagttgtctgctgcccagatcttatcaataccagtaactaaccagtatttaacataaaatgatacaaataaaggcctttttctatttcagtgagggtacatttttcttgatatatatgtactttaaggatattggatctgtttatggatctgttttaggaaacagatttgcaagggataattgtatatatagtagtatttaggtttatttcaaattcatcttagggatgcctagatgcataatttttaccaggacatattgaaaatattgcaaagagatagccagttatattatcccattcattagaaattaccagtgtaactaaacataaatattccagtttagagtgcttaaacgtagctatctttcttaaggccaggagggtaactttgtggtatctaaagggcttaaatttcagaatgcagaataaattgcctttttaaaaccaagcattttgtacaagcttttattttcagttttttaactaccaaataggtgtgatgtactttagaagtaaacaaagatgttcacccatgataatggatgttaaagctcctgcagttgttcttttcgtgtttaaagggtatattctaatagtggaagcatcaaacatgtcagtgatttcatctcattcagaaataaagagattaatattggtctttattttttggcattttaagttttatataaatggatgcagatggagattatcacccacaaatatatttaaatggatttttcttaatttgaatttcaagtaatctttttatttcaagtaattagttacgcatttagttacattgccagttttttttttttatcaatttcagtaagacaaaatatactaaaatgtttaaatagcctcattcaatcttacattttgacatttcagcaatcattctggcttacagtaattagatcccctgttacgacacatgccctttgttcttaataactagcaaaaaaaaaaaaaaaaaaaaactttcatcttgttaaaatactttgccaaatgaaatagactagtcaatacatctgatgtccataattattggtaactcagttaccttctaactaataggctggttcaggagactctcccagtttataaatggttctcttgggagcctttggaagctgtattaaatctttcagtcttttatttctaattttttctcttaatctaaatagaggccagttatctattttatcagcttttattcttgaagattctcagattatgttttagtcccttttagctttaatagtccttgaaaaatacattactgtataatgtggcaattctgtaacagagacttattacttgaatgaataatcctaaaattttaatattttagctgaagtttgagatttgtggaatgaacaaaagaattagaaactttcatatgttactttgtttcagtcatctgcaaagtatgaagctgtaattctgaaatacacatccaagtgaatgagaattaaaaattttctaaatattaatactaactgggaaaaaaaaactagtgtgaagtttacagttagaagaaacagacccaaagttgccagaaggtaataaataaatgtagttttcactgtaagtaagttattgacgtaagatgctttatttgtaatatatttagattttgaaagttattgagagatgaatgtataaaagctaaattttcttttctgaagcagtgaaacaaaattggggtaacaaggaagctctgttgtggcaaacatgtctatgaggaatattaaaactaagcatactcccacaggctttaaactcaaactatgaacatttaaattaagttgttccttattttgcctatacccatttttatctttcattgtcgtttttgcttgacagtatggtgacagagtatttttatttggaaagtcctcagcaagatgaattagccaaaagcaataatggttcagattaaacaataaagtggaattgattcaatcccaggctcaactaagaacagtcgctctctggatgtttcattttagacgatagataagttgagatgttgtaatatttatggggggttaagcctgtgtcagttatgggatgaagacttgtagtaccagtaccatcagtggtcatacttttttttaactttttactaaactaatacagttagacatttccactctatcgtgattatatttttatgatgggaaaataaaaacacttccatgtttttataaatagtctctgcaaagatttcagatgttattggtatctcggtttggcagtatctgaaaaattgagattgtctttgaaatgtttgtgctacttttacttaagtaaacccccactgtgcaagacccaggccggcttcagctaataccaaggtttctgtgtgcataatagtttacagagaacttaagagtaaggactgcggattaaaaacaaaactttttttaactttaaaatttttagtttttgttcaaagtacctggtttataaagtcaaattcttttattagttcctttctcgtttaaattgactgatgttgctgatgaagcttaaagtcccaggcacggttgtggcgatatactgataaaattggtgcctagtggtgggaggagctccagtgtcaggacttttattaaaaggcccttgttttcccaaatgccaatctagccacatttagatttcattattcaataaaacagatgaaaaatcatcccataaatgaatgttgaggttaccaaagtacatcacctgctgaggaaggataaatcttcctgctttaagggagccctgtcatctctcctcttaatgcacgtttcccttggtattagtggaagctgtgttcaagatgggaagcctttcctgcagttcttagaaacacctgctttctaaggagagccttttctaggattagcttatgtgtgttttctctaggcgattttttatttcagttaccaatttaattttcaagttgacagatgctgtgtaaagtctctcataatgagagtagtccattaaattgttgaaagttgcactgcttttcatctttcaggtacctgaaatgagtgacatcaggtatttggaaggagtaagatcataaactgtattcattttcttccttgtacaaagtgatgacttctaatgcttatatctcaaggtattttttaaaaaagcaacggtccctaatagagtaaaatttggttttggtccaagttcccaataatgtatttaatgtttctgttgtttactggtgcctcccgttgcatcaggtagagattgcctgcctctttgtagggcagccttgtggcaccttatgtccaacttggaggatagtatatggcttctttgtgcctctactatcttttcaaaagccattttataaaaatcctaggtagcctattttaatatttaaatatatatatttgtgaaagaacttttagaacagaccttttctttttactttaaaattcctgtatttccatttttaagagtaaatttaatctccaggatttagaagtgtctttccagagaagcataatgagaaagtcagactgaggtaataagaccagaattaagtgatagaagaaactgttgtttggttaaaggacacagatttgaaggaaaaaaattttgatgtaacaattttttaaataaaattttgtttttctgtaatgtcatatttgctgctacagtagctcaatattttacagggctaacataaagctggctccatttaaaaactggagtacttcctagtgcagccagcctaggcggaaactgtacaccatggtcttccagatgggtgactgatggctttgggtagctgatgcatgctttaatatttgcctatagcccggcagcaaggaagtcggggcggggggacttttttaccctgccagttatagcattgtgattctttctgggcactggcattttgtgaaactctcaagggaaggtgatgcaggggagaaaatgtgaattaaattacatagatgggtgtttttatgtcttctacccctttcctagaattagtacaactcttaactgtgccagtccccagttcaccagctttgtatccagtcgtcatctcattcaagtatggctttacttggtgacactggccatagctaagttaacttggcatgtttgacttttgacaataacaaaaatggttttggattttgttttatttccaaaaaatgtatacaatatcagaacttcacattttatatactagtatctggctattagtattttacaggaaccatagttcttggtgactacatatatatatatatttttgtgaccttttttgtaaactaagtgccgtttcaacgttacaatcatttttagggttattgtaatcaatgtgaatatcatgttttttcaaatctgttctgagcctatagtgtttgctttgtgaacatgtgtattgtatatattctgtatagttatattgtactgaaattagcttgtttgatataaggaaaatatgtattgagtacctttttgctagcctgattgtttaatctttttaaaaaaggtttaaactttttttaaaaaaaaaatctttaaactggcctttattacatggtcacacataaagttgcagttaggaaagggatgggcagggaaaaactagttttgagtgtctttagatagaaacatgagactaaggtttgattttgttttcgttttctcattaaaatatcttatgctttatggaataaa

SEQ ID NO: 201055 - DNA, 2179 bp, Homo sapiens
  Payload ID: 19687
  Gene Name: zinc finger and BTB domain containing 44
  Uniprot ID: Q8NCP5
  ENST ID: ENST00000530205
  CDS Start-End: 17-1441
gaagaggaagtaaaagatgggtgtgaaaacatttactcatagctcctcttcccacagccaggaaatgcttggaaagctaaatatgctgcgaaatgatggacatttttgtgatatcactattcgtgtccaggacaaaatcttccgggcacataaggtggtactagcagcttgcagtgatttctttcgcaccaaacttgtaggccaagccgaggatgagaacaagaatgtgttggatctgcatcatgttacagtgactggctttatacctcttttagaatatgcttacacagccactctatcaattaacacagaaaatattattgatgttctagcagcagccagctatatgcaaatgttcagtgttgccagcacctgctcagagttcatgaaatcaagcattttatggaatacacccaacagccaacctgaaaagggtctagatgctggacaagaaaataattctaactgcaattttacttctcgagatgggagcatttctcccgtgtcctcagagtgcagtgtggtagaaagaaccattcctgtctgccgagaatcccggagaaagcgcaaaagctacattgttatgtctcctgaaagtcctgtaaagtgtggcacacaaacaagctcaccccaggtattgaattcttcagcttcctactcagaaaatagaaaccaaccagttgactcttccttagcttttccttggacttttccttttggaattgatcgaaggattcagcctgagaaagttaagcaagcagaaaatacccggactttagaattacctggcccatctgagaccggtagaagaatggctgattatgtgacttgtgagagcacaaaaactaccttgcctttaggtaccgaagaagatgtccgggtcaaagtagaaagattaagtgatgaggaggtccatgaggaagtgtcccagcctgtcagtgcatctcagagttcgctgagtgatcagcagacagttccaggaagtgaacaagtccaagaggaccttctgattagtccacagtcttcctctataggctcagtagatgaaggcgtttctgagggcttgcctacacttcaaagcacgtctagcactaatgctcctccggatgatgatgatcgattggaaaatgttcagtatccctaccaactctacattgctccttccaccagcagtacagagcgaccaagtccaaatggtcccgacagaccttttcagtgtccaacctgcggggtgcgattcacccgtattcagaacctaaagcagcacatgctcatccactcaggaattaaaccatttcagtgtgaccgctgtgggaaaaagttcaccagggcttactcgctaaagatgcatcgcctaaagcatgaagtaccactccaaaggcaaggaaccatgattgacaacagtcaagctgtggatgaaatgaccaggaacggagaatgaattccaagaggtggtttttgaaagagcaagaggaaagaaaaaagaaaagaaggaaagaagaataaagaagagaaacgtgtaagaatggtttgcagattgattggttaaaagtgtttttagcacatccccaaccctgaaaacttcgcattaagagccaagcacaatgttggtagctccaagatattctgactgtgttctcagaatgagggattacccatcactgggtattccttcccaagtagaaactttagattttcactggtaatacacattgccaagttttatgggaaatctgaatatactgtgaaaatgcatatctggttagttgtctgctgcccagatcttatcaataccagtaactaaccagtatttaacataaaatgatacaaataaaggcctttttctatttcagtgagggtacatttttcttgatatatatgtactttaaggatattggatctgtttatggatctgttttaggaaacagatttgcaagggataattgtatatatagtagtatttaggtttatttcaaattcatcttagggatgcctagatgcataatttttaccaggacatattgaaaatattgcaaagagatagccagttatattatcccattcattagaaattaccagtgtaactaaacataaatattccagtttagagtgcttaaacgtagctatctttcttaaggccaggagggtaactttgtggtatctaaagggcttaaatttc

SEQ ID NO: 201056 - DNA, 539 bp, Homo sapiens
  Payload ID: 19687
  Gene Name: zinc finger and BTB domain containing 44
  ENST ID: ENST00000528448
  CDS Start-End: 1-539
agaattacctggcccatctgagaccggtagaagaatggctgattatgtgacttgtgagagcacaaaaactaccttgcctttaggtaccgaagaagatgtccgggtcaaagtagaaagattaagtgatgaggaggtccatgaggaagtgtcccagcctgtcagtgcatctcagagttcgctgagtgatcagcagacagttccaggaagtgaacaagtccaagaggaccttctgattagtccacagtcttcctctataggctcagtagatgaaggcgtttctgagggcttgcctacacttcaaagcacgtctagcactaatgctcctccggatgatgatgatcgcagtacagagcgaccaagtccaaatggtcccgacagaccttttcagtgtccaacctgcggggtgcgattcacccgtattcagaacctaaagcagcacatgctcatccactcaggaattaaaccatttcagtgtgaccgctgtgggaaaaagttcaccagggcttactcgctaaagatgcatcgcctaaagcatgaag

SEQ ID NO: 201057 - DNA, 3085 bp, Homo sapiens
  Payload ID: 19687
  Gene Name: zinc finger and BTB domain containing 44
  ENST ID: ENST00000527478
  CDS Start-End: 1-1786
aacatttactcatagctcctcttcccacagccaggaaatgcttggaaagctaaatatgctgcgaaatgatggacatttttgtgatatcactattcgtgtccaggacaaaatcttccgggcacataaggtggtactagcagcttgcagtgatttctttcgcaccaaacttgtaggccaagccgaggatgagaacaagaatgtgttggatctgcatcatgttacagtgactggctttatacctcttttagaatatgcttacacagccactctatcaattaacacagaaaatattattgatgttctagcagcagccagctatatgcaaatgttcagtgttgccagcacctgctcagagttcatgaaatcaagcattttatggaatacacccaacagccaacctgaaaagggtctagatgctggacaagaaaataattctaactgcaattttacttctcgagatgggagcatttctcccgtgtcctcagagtgcagtgtggtagaaagaaccattcctgtctgccgagaatcccggagaaagcgcaaaagctacattgttatgtctcctgaaagtcctgtaaagtgtggcacacaaacaagctcaccccaggtattgaattcttcagcttcctactcagaaaatagaaaccaaccagttgactcttccttagcttttccttggacttttccttttggaattgatcgaaggattcagcctgagaaagttaagcaagcagaaaatacccggactttagaattacctggcccatctgagaccggtagaagaatggctgattatgtgacttgtgagagcacaaaaactaccttgcctttaggtaccgaagaagatgtccgggtcaaagtagaaagattaagtgatgaggaggtccatgaggaagtgtcccagcctgtcagtgcatctcagagttcgctgagtgatcagcagacagttccaggaagtgaacaagtccaagaggaccttctgattagtccacagtcttcctctataggctcagtagatgaaggcgtttctgagggcttgcctacacttcaaagcacgtctagcactaatgctcctccggatgatgatgatcgtacagagcgaccaagtccaaatggtcccgacagaccttttcagtgtccaacctgcggggtgcgattcacccgtattcagaacctaaagcagcacatgctcatccactcaggaattaaaccatttcagtgtgaccgctgtgggaaaaagttcaccagggcttactcgctaaagatgcatcgcctaaagcatgaaggtaaacgctgtttccggtgccagatatgtagtgccactttcacttccttcggggaatataaacaccacatgagggtttcccggcacattatccgcaagcctcggatttacgagtgcaaaacatgtggcgccatgttcaccaactctggaaatttaatcgtgcacctgaggagtctgaaccatgaagcatcagagctagcaaactacttccagagcagtgatttcctagtaccggactacttaaaccaggaacaagaagagacccttgttcaatatgatcttggagaacacggttttgaaagcaactcctctgttcaaatgcctgtcatttcacaggtctcctcaacccagaattgtgaaagcacttttcccttggggtctcttggtgggctggcagaaaaagaggaagaagtgccagagcagccaaagagcagtgcttgtgctgaggcaaccagagatgaccccccaaaatcagagctgtcttctataactattgagtagttttgtgatttggcttcagttttgttttttggaaagtgcctgtgcttggtcttgtacatttaaatttaatttaattttttaaacaaaaaaagccgggtgggagggagggggagattgggaaagaatttccctttttactttctgagccctgaaactgattttatttttcctaactgagagattgcttctgtaagtacacaataacatgatgttgaaacagaaactatgagacttaaggagaactggttgacttaaaacatataccagttccttcttccattgttaaaagtaggctaacaacagatcattagctagagaggaaatcagatgattattgaccttcttgagacaagagggtacatgagaaactaattactaaacagcttgacaaatggcctgagtagatacttactgctgtacacaggatgttgtataatattttgtaaagcctgttgtttttggaagtatttatggtaagctttcttaaaaattattatggtaaatacttctgaaatccggcgtacttttctttaagctttgtcatttctgttatgatttttcatggtgaaattttggtactgagatgggcattctctgtacctttatagtaccactccaaaggcaaggaaccatgattgacaacagtcaagctgtggatgaaatgaccaggaacggagaatgaagtatgtaaatcccagcttcataggaactcttctcatactgcttttcagattaaaattgctgtttacctggtctccgaatgtaatgcctgactgtgtcattgcccggatcagttttccccctgccccatcaatatgttctcttgcatatattggcgtgctgccatataaagtaaaaatactggagatattctatattttatatataggtttatgtgttgttggggatgttttcattgtgctcttttggacataataaataattctctattgaggctacattctttttttttttctttttttttaaaagaatggcatctcactctgttgcccaggctggagtatagtggctaagtcatagctcactgcagcttcgaactcctgggctcaggccattctcctgcctcagcctcttgagtatctaggattataggcatgctccaccacacctggttaacttcatttttattttttgtagagatgaggtctcactatggtgcccaggctggtcttgaactcctagaccaagtgatcctcctcctttggcctcccagactgctgggatcactgcaccggccaaggctgcattcttaacccaactagattgtttactgaatcc

SEQ ID NO: 201058 - DNA, 2207 bp, Homo sapiens
  Payload ID: 19687
  Gene Name: zinc finger and BTB domain containing 44
  ENST ID: ENST00000615689
  CDS Start-End: 371-979
gggagaaggaggaggagcagcaggcctccgggcccggcgccgccgcccgcaggacatttctgatttatttgcatccttgaagagcatctgtagaagaggaagtaaaagatgggtgtgaaaacatttactcatagctcctcttcccacagccaggaaatgcttggaaagctaaatatgctgcgaaatgatggacatttttgtgatatcactattcgtgtccaggacaaaatcttccgggcacataaggtggtactagcagcttgcagtgatttctttcgcaccaaacttgtaggccaagccgaggatgagaacaagaatgtgttggatctgcatcatgttacagtgactggctttatacctcttttagaatatgcttacagccactctatcaattaacacagaaaatattattgatgttctagcagcagccagctatatgcaaatgttcagtgttgccagcacctgctcagagttcatgaaatcaagcattttatggaatacacccaacagccaacctgaaaagggtctagatgctggacaagaaaataattctaactgcaattttacttctcgagatgggagcatttctcccgtgtcctcagagtgcagtgtggtagaaagaaccattcctgtctgccgagaatcccggagaaagcgcaaaagctacattgttatgtctcctgaaagtcctgtaaagtgtggcacacaaacaagctcaccccaggtattgaattcttcagcttcctactcagaaaatagaaaccaaccagttgactcttccttagcttttccttggacttttccttttggaattgatcgaaggattcagcctgagaaagttaagcaagcagaaaatacccggactttagaattacctggcccatctgagaccggtagaagaatggctgattatgtgacttgtgagagcacaaaaactaccttgcctttaggtaccgaagaagatgtccggtcaaagtagaaagattaagtgatgaggaggtccatgaggaagtgtcccagcctgtcagtgcatctcagagttcgctgagtgatcagcagacagttccaggaagtgaacaagtccaagaggaccttctgattagtccacagtcttcctctataggctcagtagatgaaggcgtttctgagggcttgcctacacttcaaagcacgtctagcactaatgctcctccggatgatgatgatcggtcagtactaacatagcatttcgttacctcttaagggttgtgtttacaactccaaattcaagcatttcatctcaagagttgtagaagtttattacaacctcacttcagtatacttttcaaagtaatgaagtagcatcatcacattataaattagagtacctatacaaggcttttttttttccccagcatttccaaaactacctagtcccattgctttaaatcgtatctgtaccaagtgttggcaaactatgaaccacaggccaattccagcctaccacctttatttgtaaatcaagtattactggaacacaaccaggctcatttgctgacatattgtttgtggatggcagagttgagtggttgaaacagactgtatggtgtgcaaagtcagaatgtgtgctgtacggactgctgtgaaaaacatctgccaaagtctgatctgtatacccataactccctccctgcttgatatttccacataaatgtataaagggcatttcacatttaacaaggccaagacagaactcttgatttctaactccttgtctgaatcctgcttctccagcctttctcccatttcagtaagcatcatcattatcccctaatttctcaagcaaaatctctgaggattgttcttaatcttttttccttaccactcttcatctccctcgtagttaatccttaagtcctgtcaactctgcctataaaatatatccctgtctacttttctaatctgtactgtagccaccctactctaagtcaccaccatcttttgccttgactactgcaataaccttcaaagtagcctctgattgcattcttcccctaatccattttccatgtagcagccaaaatcatcttttcttttttaattaagtcagattatgtcactgttttaagctatagattcttaacattctttattcatacctaaaatctataggccttgctatgccttctaaagccctacacgatatgacttctgcctaactccgtctc

SEQ ID NO: 201059 - DNA, 2352 bp, Homo sapiens
  Payload ID: 19688
  Gene Name: zinc finger and BTB domain containing 45
  Uniprot ID: Q96K62
  ENST ID: ENST00000354590
  CDS Start-End: 293-1828
gtggggcgcgggcaatggagcagagtatgggagaacgcgctcggagtaaagcacacggcgcggcgaaggcgtggcgggagtgtgcggcgccggacccgggaagctggcctgggcgccgggtctcgagtgcaggcctttgttctgaagtgtccaggccggccttgcggcgtcgggactgaggaatggagcccgtcgcggggcggggcgggaaaggaaggttcaagtctctcgggttgatgcgcaagtttccgtccccatcggccggacagattagaatcctttcaggtgctagatggcggctgcagaggctgtgcatcacatacacctgcagaacttctcacgctctctgcttgagaccctcaatgggcagaggcttgggggacacttctgtgacgtgactgtgcgcattcgtgaagcttcgctgcgtgcccaccgctgcgtgctggcggccggctcacccttcttccaagacaagctgctgctcggccactctgagatccgtgtgcctccggtggtgcccgcgcagacagtgcgacagctggtagagttcctgtacagcggttcgctcgttgtggcgcagggtgaagccctgcaggtgctcacggccgcgtcagtgcttcgcatacagacagttatcgacgaatgcacgcagattatcgcccgcgctcgagccccgggcacctctgcgcccacgcccctgcccacccctgtgcccccgccactcgcacctgcgcagctgcgtcaccgcctgcgccacctgctggctgcacgtcccccggggcaccccggtgctgcacacagccgtaagcagcgccagcccgcgcgtttgcagctgccagcgcccccaacacctgccaaggctgaggggcctgatgctgacccctcactgtccgcggcccctgatgaccgaggtgacgaggatgacgaggaaagtgacgatgagaccgatggcgaggatggcgaaggtggcggcccaggcgagggccaggcacctccttccttcccagactgtgctgctggcttcctcactgctgctgctgacagcgcgtgcgaggagccccctgcacccactggcctcgctgactacagtggtgccgggagagattttcttcggggagctgggtcagctgaggacgtatttccagacagctatgtatccacttggcacgacgaggatggcgctgtccccgaaggctgtcccactgagacccctgtccagcccgactgcatactgtctggatcccgcccgcctggtgtgaagaccccagggccgcccgttgcactcttcccctttcacttgggtgcccctgggccacccgcaccacccccttcagcaccatcggggccagcccctgcgcccccacccgccttctaccccacactccagcccgaggcagcccccagtactcagctgggggaggtcccggctccctctgctgctcccaccacggccccctcaggcacccctgctcgcaccccaggtgctgagccacctacgtatgagtgcagccactgtcgcaagacgttcagctcccggaaaaactacaccaagcacatgttcatccactcgggggagaagccgcaccagtgcgccgtgtgctggcgatccttctctctacgcgactacctgctcaaacacatggtcacgcacaccggcgtgcgcgccttccagtgcgccgtctgcgccaagcgcttcacgcagaagagctcgctcaacgtgcacatgcgcactcaccggcccgagcgcgcgccctgccccgcctgcggcaaggtcttctcgcaccgcgcgctgctggagcgccacctggcggcgcaccctgcgccctgatggcgctggggcctggcctcgcccacggtggatccggggcctcccgcacagtcggccacgcccgctgcgggacccgtggttcccgccactagaccacgctccctcctgagcgcaggtcctctctctcccttcaccctttctccataccagggcctaagtccgccttactcctctcctccatgtacttgaaccctccaggtggtgccgggctggggctggggctggttagaccacttctgagaactggactatttcctgcgtaaaccgggcgctcaggcgcttggacccggcccaagatttgactccggttctcaccccgccctctcctggggtggtggtgggggctggggggccgcttgcctgccccagggtcaggctgggcaaggtccctagctctctacccaagctgttactccctcatggggcgcctaaggagactcaagtggacccatcatatatgggggctgggcctcgggactctcgctctaataaaggactgtaggccatggggcctaaaccacgaa

SEQ ID NO: 201060 - DNA, 2541 bp, Homo sapiens
  Payload ID: 19688
  Gene Name: zinc finger and BTB domain containing 45
  Uniprot ID: Q96K62
  ENST ID: ENST00000594051
  CDS Start-End: 482-2017
gcttgcacctcctggcggccagggaccgagacctacttcagctctcacccgtgtcacaggaataaggccacttccccggttcgcagtggggtttaaactggccagaacacgttgggcacttgggccgggaactgccttcccattctgcatcacagggagcttgcggattgatcgcgcaggcccgccacacccctgatctcctgggcgacgccggaagagtgctctggtccagacattcctcgcgacgcggcagccctagcctcttcgactttggttccgactaagaggagagccggagtgcagactggcgggagctgatcgccataaaaataccggaaacgtgcttcggcctagggtttcccctgcgccgccgcgaccgcaggcctccgttccgccggggtaacggcccggaagtgcggccttgtagtcggtcaggaggaagcggccacggcagagcctggtgcctgaagaggagtcggagatggcggctgcagaggctgtgcatcacatacacctgcagaacttctcacgctctctgcttgagaccctcaatgggcagaggcttgggggacacttctgtgacgtgactgtgcgcattcgtgaagcttcgctgcgtgcccaccgctgcgtgctggcggccggctcacccttcttccaagacaagctgctgctcggccactctgagatccgtgtgcctccggtggtgcccgcgcagacagtgcgacagctggtagagttcctgtacagcggttcgctcgttgtggcgcagggtgaagccctgcaggtgctcacggccgcgtcagtgcttcgcatacagacagttatcgacgaatgcacgcagattatcgcccgcgctcgagccccgggcacctctgcgcccacgcccctgcccacccctgtgcccccgccactcgcacctgcgcagctgcgtcaccgcctgcgccacctgctggctgcacgtcccccggggcaccccggtgctgcacacagccgtaagcagcgccagcccgcgcgtttgcagctgccagcgcccccaacacctgccaaggctgaggggcctgatgctgacccctcactgtccgcggcccctgatgaccgaggtgacgaggatgacgaggaaagtgacgatgagaccgatggcgaggatggcgaaggtggcggcccaggcgagggccaggcacctccttccttcccagactgtgctgctggcttcctcactgctgctgctgacagcgcgtgcgaggagccccctgcacccactggcctcgctgactacagtggtgccgggagagattttcttcggggagctgggtcagctgaggacgtatttccagacagctatgtatccacttggcacgacgaggatggcgctgtccccgaaggctgtcccactgagacccctgtccagcccgactgcatactgtctggatcccgcccgcctggtgtgaagaccccagggccgcccgttgcactcttcccctttcacttgggtgcccctgggccacccgcaccacccccttcagcaccatcggggccagcccctgcgcccccacccgccttctaccccacactccagcccgaggcagcccccagtactcagctgggggaggtcccggctccctctgctgctcccaccacggccccctcaggcacccctgctcgcaccccaggtgctgagccacctacgtatgagtgcagccactgtcgcaagacgttcagctcccggaaaaactacaccaagcacatgttcatccactcgggggagaagccgcaccagtgcgccgtgtgctggcgatccttctctctacgcgactacctgctcaaacacatggtcacgcacaccggcgtgcgcgccttccagtgcgccgtctgcgccaagcgcttcacgcagaagagctcgctcaacgtgcacatgcgcactcaccggcccgagcgcgcgccctgccccgcctgcggcaaggtcttctcgcaccgcgcgctgctggagcgccacctggcggcgcaccctgcgccctgatggcgctggggcctggcctcgcccacggtggatccggggcctcccgcacagtcggccacgcccgctgcgggacccgtggttcccgccactagaccacgctccctcctgagcgcaggtcctctctctcccttcaccctttctccataccagggcctaagtccgccttactcctctcctccatgtacttgaaccctccaggtggtgccgggctggggctggggctggttagaccacttctgagaactggactatttcctgcgtaaaccgggcgctcaggcgcttggacccggcccaagatttgactccggttctcaccccgccctctcctggggtggtggtgggggctggggggccgcttgcctgccccagggtcaggctgggcaaggtccctagctctctacccaagctgttactccctcatggggcgcctaaggagactcaagtggacccatcatatatgggggctgggcctcgggactctcgctctaataaaggactgtaggccatggggcctaaaccacgaa

SEQ ID NO: 201061 - DNA, 576 bp, Homo sapiens
  Payload ID: 19688
  Gene Name: zinc finger and BTB domain containing 45
  ENST ID: ENST00000600130
  CDS Start-End: 212-576
gttgaaaacgtggtgggtgggtgcattgaggctggccccgggggggtgggcctcagccccctgtgcggtgcccctggggtcgtgaggtctccggtccaggtgacaacggctgggggcggggtaggtggcagcttccggaggatgtttggaggccgcgaggactggcgcgaacaaccatgaaacccattcgccactcccaaggcgcgcacagatggcggctgcagaggctgtgcatcacatacacctgcagaacttctcacgctctctgcttgagaccctcaatgggcagaggcttgggggacacttctgtgacgtgactgtgcgcattcgtgaagcttcgctgcgtgcccaccgctgcgtgctggcggccggctcacccttcttccaagacaagctgctgctcggccactctgagatccgtgtgcctccggtggtgcccgcgcagacagtgcgacagctggtagagttcctgtacagcggttcgctcgttgtggcgcagggtgaagccctgcaggtgctcacggccgcgtcagtgcttcgcatacagacagttatcgacgaatgcacgcagattat

SEQ ID NO: 201062 - DNA, 592 bp, Homo sapiens
  Payload ID: 19688
  Gene Name: zinc finger and BTB domain containing 45
  ENST ID: ENST00000596739
  CDS Start-End: 542-592
gtagggtggggcgcgggcaatggagcagagtatgggagaacgcgctcggagtaaagcacacggcgcggcgaaggcgtggcgggagtgtgcggcgccggacccgggaagctggcctgggcgccgggtctcgagtgcaggcctttgttctgaagtgtccaggccggccttgcggcgtcgggactgaggaatggagcccgtcgcggggcggggcgggaaaggaaggttcaagtctctcgggttgatgcgcaagtttccgtccccatcggccggacagattagaatcctttcaggtgctaggtgaatacagatggggcggtgctgcttgctgagttagcctttgcgcgggcacaggcctggcttttttgaggcattgcacagaaggctcagaacagggccagggagcggggtggtgtatccggatccgtagtctggaaaagctccctctggctgccgtgtggggaacagaaggggaggcgaggggcgcagagacaccagccaggtttcttcatccgtccaggacagcgggaacggggcagtggagatggcggctgcagaggctgtgcatcacatacacctgcagaacttctcacgc

SEQ ID NO: 201063 - DNA, 2159 bp, Homo sapiens
  Payload ID: 19688
  Gene Name: zinc finger and BTB domain containing 45
  Uniprot ID: Q96K62
  ENST ID: ENST00000600990
  CDS Start-End: 136-1671
ggagtcggaggtggggtcgaatgggcatccccctgccgcagggcgggcgaggaggctggggcgtgccaggggaggggcacctgcgctccgctagaagcgcacgctgagaacgcgagggggcgctgcaggaccgggatggcggctgcagaggctgtgcatcacatacacctgcagaacttctcacgctctctgcttgagaccctcaatgggcagaggcttgggggacacttctgtgacgtgactgtgcgcattcgtgaagcttcgctgcgtgcccaccgctgcgtgctggcggccggctcacccttcttccaagacaagctgctgctcggccactctgagatccgtgtgcctccggtggtgcccgcgcagacagtgcgacagctggtagagttcctgtacagcggttcgctcgttgtggcgcagggtgaagccctgcaggtgctcacggccgcgtcagtgcttcgcatacagacagttatcgacgaatgcacgcagattatcgcccgcgctcgagccccgggcacctctgcgcccacgcccctgcccacccctgtgcccccgccactcgcacctgcgcagctgcgtcaccgcctgcgccacctgctggctgcacgtcccccggggcaccccggtgctgcacacagccgtaagcagcgccagcccgcgcgtttgcagctgccagcgcccccaacacctgccaaggctgaggggcctgatgctgacccctcactgtccgcggcccctgatgaccgaggtgacgaggatgacgaggaaagtgacgatgagaccgatggcgaggatggcgaaggtggcggcccaggcgagggccaggcacctccttccttcccagactgtgctgctggcttcctcactgctgctgctgacagcgcgtgcgaggagccccctgcacccactggcctcgctgactacagtggtgccgggagagattttcttcggggagctgggtcagctgaggacgtatttccagacagctatgtatccacttggcacgacgaggatggcgctgtccccgaaggctgtcccactgagacccctgtccagcccgactgcatactgtctggatcccgcccgcctggtgtgaagaccccagggccgcccgttgcactcttcccctttcacttgggtgcccctgggccacccgcaccacccccttcagcaccatcggggccagcccctgcgcccccacccgccttctaccccacactccagcccgaggcagcccccagtactcagctgggggaggtcccggctccctctgctgctcccaccacggccccctcaggcacccctgctcgcaccccaggtgctgagccacctacgtatgagtgcagccactgtcgcaagacgttcagctcccggaaaaactacaccaagcacatgttcatccactcgggggagaagccgcaccagtgcgccgtgtgctggcgatccttctctctacgcgactacctgctcaaacacatggtcacgcacaccggcgtgcgcgccttccagtgcgccgtctgcgccaagcgcttcacgcagaagagctcgctcaacgtgcacatgcgcactcaccggcccgagcgcgcgccctgccccgcctgcggcaaggtcttctcgcaccgcgcgctgctggagcgccacctggcggcgcaccctgcgccctgatggcgctggggcctggcctcgcccacggtggatccggggcctcccgcacagtcggccacgcccgctgcgggacccgtggttcccgccactagaccacgctccctcctgagcgcaggtcctctctctcccttcaccctttctccataccagggcctaagtccgccttactcctctcctccatgtacttgaaccctccaggtggtgccgggctggggctggggctggttagaccacttctgagaactggactatttcctgcgtaaaccgggcgctcaggcgcttggacccggcccaagatttgactccggttctcaccccgccctctcctggggtggtggtgggggctggggggccgcttgcctgccccagggtcaggctgggcaaggtccctagctctctacccaagctgttactccctcatggggcgcctaaggagactcaagtggacccatcatatatgggggctgggcctcgggactctcgctcta

SEQ ID NO: 201064 - DNA, 5185 bp, Homo sapiens
  Payload ID: 19689
  Gene Name: zinc finger and BTB domain containing 46
  Uniprot ID: Q86UZ6
  ENST ID: ENST00000245663
  CDS Start-End: 152-1921
ggcgagcgcgcagctcggacccgcccggacgcagcgccctcccggcggcggcggcgatcaccggcgccggcccggcggccgcggcgcccgccctcgcccgcgccccatggggtcacagagtctgtagaagaggcgacaccagggcttccaaatgaacaaccgaaaggaagatatggaaatcacgtcccactaccggcacctgctgcgggagctcaacgagcagaggcagcacggcgtcctgtgcgacgtctgcgtggtcgtggagggcaaggtcttcaaggcgcacaagaacgtcctgctgggcagcagccgctacttcaagacgctctactgccaggtgcagaagacgtcggagcaggccacggtcacgcacctggacatcgtcacggcccagggcttcaaggccatcatcgacttcatgtactcagcgcacctggcgctcaccagcaggaacgtcatcgaggtgatgtcagccgccagcttcctgcagatgacggacatcgtgcaagcctgccacgacttcatcaaggcggcgctggacatcagcatcaagtcggacgcctcagatgagcttgcggagttcgagatcggcgcctcgtccagcagcagcacggaagctctcatctcggccgtgatggctgggaggagcatctccccgtggctggcacggcgaacgagtcctgccaattcttccggagactcggccatcgccagctgtcacgacggagggagcagctacgggaaagaggatcaggagcccaaggccgatggccctgatgatgtttcttcacagcctctatggcctggagacgtgggctacgggcctctgcgcatcaaggaagagcaggtttcaccgtctcagtacggagggagcgagctgccttctgccaaggacggtgcagtacagaactctttctcagagcagagtgctggtgatgcctggcagcccacgggccgaaggaagaatcggaaaaacaaagagaccgtccggcacatcacacagcaggtggaagatgacagccgggccagctccccggtgccgtccttcctgccgacgtcggggtggccgttcagcagccgagactcaaatgcggacctgtccgtcaccgaagccagcagctccgacagccgaggagagagggccgagctctatgcacaggtggaggagggtctcctgggaggagaagccagctatctgggccctcccctcaccccagagaaggacgacgccctgcatcaggccaccgcggtggccaacctgcgcgcggcgctcatgagtaagaacagcctgctgtcgctgaaggccgacgtgctgggggatgacggctccctgctgttcgagtacctgcccagaggggcccactcgctgtccctgaatgagttcacggtgatcaggaagaagttcaagtgtccgtactgcagcttctcggccatgcaccagtgcatcctcaagcgacacatgcgctcgcacacgggagagcggccctacccctgcgagatctgcgggaagaagttcacgcggcgcgagcacatgaagcgccacacgctggtccacagcaaggacaagaagtatgtgtgcaaggtgtgcagccgcgtcttcatgtccgccgccagcgtgggcatcaggcatggctccaggcgccacggtgtgtgcaccgactgtgctggccgcggcatggccgggcccctggaccatggcggcggaggcggcgagggctctccagaggcgctgttcccaggcgacgggccctatctggaggaccctgaggacccacgaggggaggcggaggagctgggcgaggacgacgagggcctggcccctgaggatgcgctgttggcggacgacaaggatgaggaagactcgccgcggccgcgcagccccccaggaggccctgacaaggacttcgcctggctctcctaggcccgcccgccggcagggtcggtggctgcctcgctccgtccacccgtgtgtgtgtccggtgggtctccactgcggggccagggccacgctcacccctctcgcggcccctcctctgcttccccctgaacccaccccccacggaaaccagccctgcgggctaagcaggtgcgaccccagcaagaggggtgctctgggaccagacatgaagtgagttgggggagggcacagggtgggtttgagtgaagggagagcacggtcctaagtccccagcaggtggtgcgggtgtgtgagtggcccctgtgatggccagcctggcttggacacgtgatgggcctgtggccgggtccagtgggcactgggcggggtggtgtgttcggcccagaggcccctggcctgagcaggtgcagagttttacagacacccggtcagcccggctggagcccgccctcccctcccctagcagccaggtcactgcctgtggctgcagccgtggcccgtggtgcagccgtggcccatggcagcctgtagaatccaggtgcacagagagccctgccaccgtcttacctctgggctttggtgcttaacacacaacacagctgcagaccctgctggaggccgagggctccaggtgctatcttaggtggacacagccctgggggctccttccaggaggggaccctcagccctgtgccccccaccacttcaggccacaccaggttccctctgcaagggcctcggctcagtcgtgtgcacttcctcggagagccttgggctgccacgtccaccccgggctctgcccgtcctgttctgcccatggcccagcccggccgctcctgctgacccctcctggacgggctggagctgggctcctgcctttgctgctaacactggaggcggtgttcctaactgcagtgtgctgcttacacctccccgcgtgggtaaccaaatttttaagtagtcagagacatatcgaggtagttacataaaattattttgtttggcattatttttctcactcgaagaaactatatagggttgtttttcctttagcttgtgctcaagtcctcttgctgtgttttcagaagcactcacatgttctttcttttcctgagtgaaaagcaaaggtcccacggtgtgtgctgtggtgcaccgcctggctttgggggtcccggaggcaggctgcctagactcacagcctcgggaccgttgccacggcctgtcttctcgttcaggcctgcctctgacagcactcaccatgaggacattccatccttcaccccctcctctggcacaggccaccactgcggtgctgtgccttcagatgggaggtgggcgcggtggcctcctccttccctccaggacctgcccgtgtgaagaccccccggagtgctgagcttcagggctgcgtggaaagagtttttactctctttttctagcctgtataccaggcttttccccacattgtcaggtagagcaccagcttccctgaccgctgctgctcggggagggctggggctggccgggggtcctgtggaggagtacatggaggactccaggtacagcgcaggagtcacggcttttgttttttgacattggcccccggttctaccaatgacagggtgccctggctggagctgtcatcacacacacccctcagctcggaggctgtgggctcctcaaagctggagaaagaggccaagatttttctgcacacggagtgtggggataggagccgggccaagcgctggcccctcagcggtgagccctgcccactcttaccgagcaaggtgggtggctctggcacgagtcccccagggggagagcatggctaccagggagctgcagcggagccctccagccctcaccccaggccagccccaccccggcctctttgagaattctcagaactttgtacctttcccctgatttttaaaccctttttctaaacagactgactttcttacaaaatgcatttggaaaccagacctttgctacccaccaatgtctctgggttttgtaccagtccctgctctcaggccaccctgcccaggacccaggcccgcctccccctccacactcaggatgtcctgctccatctggccggctcactccgtgtggcctgcctttgctgaccgttttggggttccccgccggagctacaggggcattttcttccctaaaaccaacagtgtcccactgacctccccaagtgtttgctgcgtggcagatttcctgttcttgttcgcagtttgccgactgaagagtgtgggatttccgaggcccaggtgagcacgtccatctcaggaggcgtggagggaaaagacatgtcatgaagggttttttttatgtgactgatttttttttaaatcgatgttcaaactaataaatatttttttatgaagaggaaaaatgtgtagattacatttcacattttgtatttttgtttgtgtctgtttgtattttggtgtttacaacaccaaagtgggaaatacagtccattggggatggtgttatttgggggcggggagggggcagggacaccacgatttttctgtcaagctctggatcctgaccaggttgtacactggggctctctgagctttgggacacaggacactgccagggctacgtagggaactgactcagaagacgcagcttactgcttccaactttgcacatcttcctctttaaaaaactgagaaaatgcaaaaactggaactttttgcaatattataaaagaagtaatcttattttagctcattctgtgacatgtgcgactcttaagaaagccatacttaatggtggtggttttttttagatcttatattgtgttttgtatgcagcccttttagaactacttgtagtgagggtgctgtgtgtgcttttcttaaatatttatttttttcaacatgctttcaacctgtcaacaaaaacaaaacacacaaaaaaagggcagtgtttgaagattgttgatttttttctggggataatctatattatattgacttcctattacttattataaacctgtgtttgtattggagatgtgtctactattgggggaagaggttctcgtaatcgctcggtgggaaatcatggctctgccgtcctgcctctctgtggccgtgggttcacgtggcctctgcggtgagtctccaagtttctgcctaggcgcctgtgcgtttcctttctgtgacgggattagcttagacatccttgcaaagcgatcactttcaataaattgggaaattgctgctccagcag

SEQ ID NO: 201065 - DNA, 2335 bp, Homo sapiens
  Payload ID: 19689
  Gene Name: zinc finger and BTB domain containing 46
  Uniprot ID: Q86UZ6
  ENST ID: ENST00000302995
  CDS Start-End: 182-1951
gacggacggacggacggaccgagcagccccggcgagcgcgcagctcggacccgcccggacgcagcgccctcccggcggcggcggcgatcaccggcgccggcccggcggccgcggcgcccgccctcgcccgcgccccatggggtcacagagtctgtagaagaggcgacaccagggcttccaaatgaacaaccgaaaggaagatatggaaatcacgtcccactaccggcacctgctgcgggagctcaacgagcagaggcagcacggcgtcctgtgcgacgtctgcgtggtcgtggagggcaaggtcttcaaggcgcacaagaacgtcctgctgggcagcagccgctacttcaagacgctctactgccaggtgcagaagacgtcggagcaggccacggtcacgcacctggacatcgtcacggcccagggcttcaaggccatcatcgacttcatgtactcagcgcacctggcgctcaccagcaggaacgtcatcgaggtgatgtcagccgccagcttcctgcagatgacggacatcgtgcaagcctgccacgacttcatcaaggcggcgctggacatcagcatcaagtcggacgcctcagatgagcttgcggagttcgagatcggcgcctcgtccagcagcagcacggaagctctcatctcggccgtgatggctgggaggagcatctccccgtggctggcacggcgaacgagtcctgccaattcttccggagactcggccatcgccagctgtcacgacggagggagcagctacgggaaagaggatcaggagcccaaggccgatggccctgatgatgtttcttcacagcctctatggcctggagacgtgggctacgggcctctgcgcatcaaggaagagcaggtttcaccgtctcagtacggagggagcgagctgccttctgccaaggacggtgcagtacagaactctttctcagagcagagtgctggtgatgcctggcagcccacgggccgaaggaagaatcggaaaaacaaagagaccgtccggcacatcacacagcaggtggaagatgacagccgggccagctccccggtgccgtccttcctgccgacgtcggggtggccgttcagcagccgagactcaaatgcggacctgtccgtcaccgaagccagcagctccgacagccgaggagagagggccgagctctatgcacaggtggaggagggtctcctgggaggagaagccagctatctgggccctcccctcaccccagagaaggacgacgccctgcatcaggccaccgcggtggccaacctgcgcgcggcgctcatgagtaagaacagcctgctgtcgctgaaggccgacgtgctgggggatgacggctccctgctgttcgagtacctgcccagaggggcccactcgctgtccctgaatgagttcacggtgatcaggaagaagttcaagtgtccgtactgcagcttctcggccatgcaccagtgcatcctcaagcgacacatgcgctcgcacacgggagagcggccctacccctgcgagatctgcgggaagaagttcacgcggcgcgagcacatgaagcgccacacgctggtccacagcaaggacaagaagtatgtgtgcaaggtgtgcagccgcgtcttcatgtccgccgccagcgtgggcatcaggcatggctccaggcgccacggtgtgtgcaccgactgtgctggccgcggcatggccgggcccctggaccatggcggcggaggcggcgagggctctccagaggcgctgttcccaggcgacgggccctatctggaggaccctgaggacccacgaggggaggcggaggagctgggcgaggacgacgagggcctggcccctgaggatgcgctgttggcggacgacaaggatgaggaagactcgccgcggccgcgcagccccccaggaggccctgacaaggacttcgcctggctctcctaggcccgcccgccggcagggtcggtggctgcctcgctccgtccacccgtgtgtgtgtccgggtgccctggctggagctgtcatcacacacacccctcagctcggaggctgtgggctcctcaaagctggagaaagaggccaagatttttctgcacacggagtgtggggataggagccgggccaagcgctggcccctcagcggtgagccctgcccactcttaccgagcaagtttgccgactgaagagtgtgggatttccgaggcccaggtgagcacgtccatctcaggaggcgtggagggaaaagacatgtcatgaagggttttttttatgtgactgatttttttttaaatcgatgttcaaactaataaatatttttttatgaagagg

SEQ ID NO: 201066 - DNA, 5198 bp, Homo sapiens
  Payload ID: 19689
  Gene Name: zinc finger and BTB domain containing 46
  Uniprot ID: Q86UZ6
  ENST ID: ENST00000395104
  CDS Start-End: 167-1936
gatgggctctcgcgtgggtcgtcctcccactggccgcactctgtgccccatggccctcctgcgccccgcccggcgtcctctcacggcctctgtctgtgctgagcttgggtaactcttgttcttacctccacagagtctgtagaagaggcgacaccagggcttccaaatgaacaaccgaaaggaagatatggaaatcacgtcccactaccggcacctgctgcgggagctcaacgagcagaggcagcacggcgtcctgtgcgacgtctgcgtggtcgtggagggcaaggtcttcaaggcgcacaagaacgtcctgctgggcagcagccgctacttcaagacgctctactgccaggtgcagaagacgtcggagcaggccacggtcacgcacctggacatcgtcacggcccagggcttcaaggccatcatcgacttcatgtactcagcgcacctggcgctcaccagcaggaacgtcatcgaggtgatgtcagccgccagcttcctgcagatgacggacatcgtgcaagcctgccacgacttcatcaaggcggcgctggacatcagcatcaagtcggacgcctcagatgagcttgcggagttcgagatcggcgcctcgtccagcagcagcacggaagctctcatctcggccgtgatggctgggaggagcatctccccgtggctggcacggcgaacgagtcctgccaattcttccggagactcggccatcgccagctgtcacgacggagggagcagctacgggaaagaggatcaggagcccaaggccgatggccctgatgatgtttcttcacagcctctatggcctggagacgtgggctacgggcctctgcgcatcaaggaagagcaggtttcaccgtctcagtacggagggagcgagctgccttctgccaaggacggtgcagtacagaactctttctcagagcagagtgctggtgatgcctggcagcccacgggccgaaggaagaatcggaaaaacaaagagaccgtccggcacatcacacagcaggtggaagatgacagccgggccagctccccggtgccgtccttcctgccgacgtcggggtggccgttcagcagccgagactcaaatgcggacctgtccgtcaccgaagccagcagctccgacagccgaggagagagggccgagctctatgcacaggtggaggagggtctcctgggaggagaagccagctatctgggccctcccctcaccccagagaaggacgacgccctgcatcaggccaccgcggtggccaacctgcgcgcggcgctcatgagtaagaacagcctgctgtcgctgaaggccgacgtgctgggggatgacggctccctgctgttcgagtacctgcccagaggggcccactcgctgtccctgaatgagttcacggtgatcaggaagaagttcaagtgtccgtactgcagcttctcggccatgcaccagtgcatcctcaagcgacacatgcgctcgcacacgggagagcggccctacccctgcgagatctgcgggaagaagttcacgcggcgcgagcacatgaagcgccacacgctggtccacagcaaggacaagaagtatgtgtgcaaggtgtgcagccgcgtcttcatgtccgccgccagcgtgggcatcaggcatggctccaggcgccacggtgtgtgcaccgactgtgctggccgcggcatggccgggcccctggaccatggcggcggaggcggcgagggctctccagaggcgctgttcccaggcgacgggccctatctggaggaccctgaggacccacgaggggaggcggaggagctgggcgaggacgacgagggcctggcccctgaggatgcgctgttggcggacgacaaggatgaggaagactcgccgcggccgcgcagccccccaggaggccctgacaaggacttcgcctggctctcctaggcccgcccgccggcagggtcggtggctgcctcgctccgtccacccgtgtgtgtgtccggtgggtctccactgcggggccagggccacgctcacccctctcgcggcccctcctctgcttccccctgaacccaccccccacggaaaccagccctgcgggctaagcaggtgcgaccccagcaagaggggtgctctgggaccagacatgaagtgagttgggggagggcacagggtgggtttgagtgaagggagagcacggtcctaagtccccagcaggtggtgcgggtgtgtgagtggcccctgtgatggccagcctggcttggacacgtgatgggcctgtggccgggtccagtgggcactgggcggggtggtgtgttcggcccagaggcccctggcctgagcaggtgcagagttttacagacacccggtcagcccggctggagcccgccctcccctcccctagcagccaggtcactgcctgtggctgcagccgtggcccgtggtgcagccgtggcccatggcagcctgtagaatccaggtgcacagagagccctgccaccgtcttacctctgggctttggtgcttaacacacaacacagctgcagaccctgctggaggccgagggctccaggtgctatcttaggtggacacagccctgggggctccttccaggaggggaccctcagccctgtgccccccaccacttcaggccacaccaggttccctctgcaagggcctcggctcagtcgtgtgcacttcctcggagagccttgggctgccacgtccaccccgggctctgcccgtcctgttctgcccatggcccagcccggccgctcctgctgacccctcctggacgggctggagctgggctcctgcctttgctgctaacactggaggcggtgttcctaactgcagtgtgctgcttacacctccccgcgtgggtaaccaaatttttaagtagtcagagacatatcgaggtagttacataaaattattttgtttggcattatttttctcactcgaagaaactatatagggttgtttttcctttagcttgtgctcaagtcctcttgctgtgttttcagaagcactcacatgttctttcttttcctgagtgaaaagcaaaggtcccacggtgtgtgctgtggtgcaccgcctggctttgggggtcccggaggcaggctgcctagactcacagcctcgggaccgttgccacggcctgtcttctcgttcaggcctgcctctgacagcactcaccatgaggacattccatccttcaccccctcctctggcacaggccaccactgcggtgctgtgccttcagatgggaggtgggcgcggtggcctcctccttccctccaggacctgcccgtgtgaagaccccccggagtgctgagcttcagggctgcgtggaaagagtttttactctctttttctagcctgtataccaggcttttccccacattgtcaggtagagcaccagcttccctgaccgctgctgctcggggagggctggggctggccgggggtcctgtggaggagtacatggaggactccaggtacagcgcaggagtcacggcttttgttttttgacattggcccccggttctaccaatgacagggtgccctggctggagctgtcatcacacacacccctcagctcggaggctgtgggctcctcaaagctggagaaagaggccaagatttttctgcacacggagtgtggggataggagccgggccaagcgctggcccctcagcggtgagccctgcccactcttaccgagcaaggtgggtggctctggcacgagtcccccagggggagagcatggctaccagggagctgcagcggagccctccagccctcaccccaggccagccccaccccggcctctttgagaattctcagaactttgtacctttcccctgatttttaaaccctttttctaaacagactgactttcttacaaaatgcatttggaaaccagacctttgctacccaccaatgtctctgggttttgtaccagtccctgctctcaggccaccctgcccaggacccaggcccgcctccccctccacactcaggatgtcctgctccatctggccggctcactccgtgtggcctgcctttgctgaccgttttggggttccccgccggagctacaggggcattttcttccctaaaaccaacagtgtcccactgacctccccaagtgtttgctgcgtggcagatttcctgttcttgttcgcagtttgccgactgaagagtgtgggatttccgaggcccaggtgagcacgtccatctcaggaggcgtggagggaaaagacatgtcatgaagggttttttttatgtgactgatttttttttaaatcgatgttcaaactaataaatatttttttatgaagaggaaaaatgtgtagattacatttcacattttgtatttttgtttgtgtctgtttgtattttggtgtttacaacaccaaagtgggaaatacagtccattggggatggtgttatttgggggcggggagggggcagggacaccacgatttttctgtcaagctctggatcctgaccaggttgtacactggggctctctgagctttgggacacaggacactgccagggctacgtagggaactgactcagaagacgcagcttactgcttccaactttgcacatcttcctctttaaaaaactgagaaaatgcaaaaactggaactttttgcaatattataaaagaagtaatcttattttagctcattctgtgacatgtgcgactcttaagaaagccatacttaatggtggtggttttttttagatcttatattgtgttttgtatgcagcccttttagaactacttgtagtgagggtgctgtgtgtgcttttcttaaatatttatttttttcaacatgctttcaacctgtcaacaaaaacaaaacacacaaaaaaagggcagtgtttgaagattgttgatttttttctggggataatctatattatattgacttcctattacttattataaacctgtgtttgtattggagatgtgtctactattgggggaagaggttctcgtaatcgctcggtgggaaatcatggctctgccgtcctgcctctctgtggccgtgggttcacgtggcctctgcggtgagtctccaagtttctgcctaggcgcctgtgcgtttcctttctgtgacgggattagcttagacatccttgcaaagcgatcactttcaataaattgggaaattgctgctccagc

SEQ ID NO: 201067 - DNA, 3781 bp, Homo sapiens
  Payload ID: 19690
  Gene Name: zinc finger and BTB domain containing 47
  Uniprot ID: Q9UFB7
  ENST ID: ENST00000232974
  CDS Start-End: 282-2525
gagcaagggggccactcagcagtggtcaggtcacacggctagaggggcacagtggggcctgggcctctggtccctactcctctggtccctctgtctcctggccctgggccagtcaccttagatgatttgatcgctgcggttgtagtcctgggatttaaatctcctgccctgggtggccctatgcagcatgaggccgccagttgctggttgagaagacaactgactccccggcggctgagttctcgctggtggaggacgtggcgctgcactttgcctgcttgatgggccgcctgaacgagcagcgcctcttccagcctgacctctgcgacgtggacttggtgctggtgccccagcgcagcgtctttccggcacacaagggtgtgctagccgcctacagccagttcttccactcactcttcacccagaacaagcagctgcagcgtgtggagctgtccctggaggcactggcacctggtggcctgcagcagatcctcaacttcatctatacgtccaagctgctggtcaacgcggccaacgtccacgaggtgctcagcgccgcctcattgctgcagatggctgacatcgctgcgtcctgccaagagctgctggacgcccgctctctaggcccaccaggtccgggcactgtggccctggcccagccggctgccagctgcactccagctgcgccgccctactactgtgacatcaagcaggaggccgacaccccaggcctgcccaagatctatgcccgcgagggccctgacccttactcggtgcgtgttgaggacggggcagggactgctggtggcacagtgcctgccaccattgggccagcccagcccttctttaaggaggagaaggagggtggtgtcgaggaggccggtgggcccccagccagcttgtgcaagctggagggtggagaagagttggaggaagagcttgggggttctggcacctacagccgcagggagcaatcccagatcatcgtggaggtgaacctcaacaaccagacactgcacgtgtccacggggccagaggggaagccaggtgccgggccaagcccagccaccgtggttctgggccgggaggacgggctgcagagacactcggacgaggaggaggaggacgacgaggaggaggaggaggaagaagaggaagaggaaggtggtggcagtggacgggaggaggaggaggaggaagagggtggcagtcagggagaagaggaagaagaggaggaggacgggcacagtgagcaggaagaggaagaggaggaggaagaggaggaagggcctagtgagcaggatcaagagagctctgaggaggaggagggggaggagggggaggctgggggcaagcaggggccacggggaagccgaagcagccgggcagacccccctccccacagtcacatggccacacggtcccgggagaacgcccggcgccggggtacccctgaacctgaagaagctgggcggcggggtgggaagaggccaaagccaccccctggagtggcctctgcatcggcccgagggccgccagccactgatgggctgggggccaaggtgaagctggaggagaagcagcaccatccatgccagaagtgcccacgagttttcaacaaccgctggtacctggagaaacacatgaatgtgacccacagccgcatgcagatctgcgaccagtgcggcaagcgcttcctgctggagagcgagctgctgctgcacaggcagacagactgcgagcgcaacatccagtgtgtgacatgtggcaaagctttcaagaagctttggtccctccatgagcataacaagattgtgcacggctacgcagagaagaagttctcatgcgagatctgtgagaagaagttctacaccatggcccacgtgcgtaagcacatggttgcccacaccaaggacatgcccttcacctgcgagacctgcggaaagtccttcaagcgcagcatgtccctcaaggtgcactcactgcagcactcaggggagaagccgttcagatgtgagaactgcaatgagcgcttccagtacaagtaccagctgcggtcacacatgagcatccacattggccacaagcagttcatgtgccaatggtgcggcaaggacttcaacatgaagcagtacttcgatgagcacatgaagacccacacaggagagaagccgtacatctgcgagatctgtggcaagagcttcaccagccggcccaacatgaagcggcaccggcgcacgcacacgggcgagaagccgtacccgtgcgacgtgtgtggccagcgcttccgcttctccaacatgctcaaggcccacaaggagaagtgcttccgcgtcagccacaccctggccggcgacggcgtccccgctgccccaggcctgcccccaacccagccccaggcgcacgcactgcccctgctcccggggctgccccagaccctgccgcccccgccccacctgccgcccccgcctccgctcttccccaccactgccagccccggcgggaggatgaacgccaacaactagctgccgagctgcacccgtgcacccgctggggcctggagtcagggcccactccaggagggacccactgccttcccggggagcacagtagtgcgggcctgggccctgctccacctccagaagtggctggatgtaccctgcctgaggccccgacgaggaggggtatgcaggctggcaggccccagagctggtggagggcatctcactcccaagtgccccccctttctgtgactccttgaagcctttacttttttttttttttggaagtgaaggaaaaagaaactatttacagcactcccctccaggtgaggggggtgctgggggtctgcagcagaaagaaaggggcctgggcagcaggtgtggccagtccctctgccaaggcctgtgccagaggggttggccagttggagcctgggtcagcctcagcagcctatccccatgtcctctatgcccctaatttgcttcctcatcttggagggtttggggagaagttggcgtgccacccccacaacccctgaggaggtgtagacccagtctgagagccgcaagcactgaggcagggcctgagactggacctgggtgagcgtggggggtggagggtggcgaggtgcggagactgcagaccagtgcttcactgtgtggagtggggcaggcaggggctggaccccagggacttgccttccccacccactctgctgccagcaggcccagggatccctgacctgcaccaggtggcaccaagggtcctgagtcctggagatgtccccagaagctgctgtgcctcacagcgctgtgagccagaccctccttgggcagacaggctgactggcagcaccagctttgggggcagagtcctaggatgaggcttgggcagtgctggtagggtttcaaggtgctattagtggggcaggggcagggcggctgctcacagagcaccccagttcctcaccagctactctggccatatatcccacaccagaaggaacaagtgtggctgtgtccatctctgctcccccaaaggcccgctctaggccttatcctccctctaggtcctgccacaacctgtccctggctggctccagcgtcctcgtccctcctgggcctgtgcaccggtgggtggggcgcccatagcactgccggtaaaggagcctgcatgttcaggcccctcgggggattggggggactggggaggcgcagcctagacccaattgcttgcccccatgaggctagcactaataggaaacccttttttgttgtca

SEQ ID NO: 201068 - DNA, 2456 bp, Homo sapiens
  Payload ID: 19690
  Gene Name: zinc finger and BTB domain containing 47
  ENST ID: ENST00000505904
  CDS Start-End: 319-1200
gatctatgcccgcgagggccctgacccttactcgccgcagggagcaatcccagatcatcgtggaggtgaacctcaacaaccagacactgcacgtgtccacggggccagaggggaagccaggtgccgggccaagcccagccaccgtggttctgggccgggaggacgggctgcagagacactcggacgaggaggaggaggacgacgaggaggaggaggaggaagaagaggaagaggaaggtgaagctggaggagaagcagcaccatccatgccagaagtgcccacgagttttcaacaaccgctggtacctggagaaacacatgaatgtgacccacagccgcatgcagatctgcgaccagtgcggcaagcgcttcctgctggagagcgagctgctgctgcacaggcagacagactgcgagcgcaacatccagtgtgtgacatgtggcaaagctttcaagaagctttggtccctccatgagcataacaagattgtgcacggctacgcagagaagaagttctcatgcgagatctgtgagaagaagttctacaccatggcccacgtgcgtaagcacatggttgcccacaccaaggacatgcccttcacctgcgagacctgcggaaagtccttcaagcgcagcatgtccctcaaggtgcactcactgcagcactcaggggagaagccgttcagatgtgagaactgcaatgagcgcttccagtacaagtaccagctgcggtcacacatgagcatccacattggccacaagcagttcatgtgccaatggtgcggcaaggacttcaacatgaagcagtacttcgatgagcacatgaagacccacacaggagagaagccgtacatctgcgagatctgtggcaagagcttcaccagccggcccaacatgaagcggcaccggcgcacgcacacgggcgagaagccgtacccgtgcgacgtgtgtggccagcgcttccgcttctccaacatgctcaaggcccacaaggagaagtgcttccgcgtcagccacaccctggccggcgacggcgtccccgctgccccaggcctgcccccaacccagccccaggcgcacgcactgcccctgctcccggggctgccccagaccctgccgcccccgccccacctgccgcccccgcctccgctcttccccaccactgccagccccggcgggaggatgaacgccaacaactagctgccgagctgcacccgtgcacccgctggggcctggagtcagggcccactccaggagggacccactgccttcccggggagcacagtagtgcgggcctgggccctgctccacctccagaagtggctggatgtaccctgcctgaggccccgacgaggaggggtatgcaggctggcaggccccagagctggtggagggcatctcactcccaagtgccccccctttctgtgactccttgaagcctttacttttttttttttttggaagtgaaggaaaaagaaactatttacagcactcccctccaggtgaggggggtgctgggggtctgcagcagaaagaaaggggcctgggcagcaggtgtggccagtccctctgccaaggcctgtgccagaggggttggccagttggagcctgggtcagcctcagcagcctatccccatgtcctctatgcccctaatttgcttcctcatcttggagggtttggggagaagttggcgtgccacccccacaacccctgaggaggtgtagacccagtctgagagccgcaagcactgaggcagggcctgagactggacctgggtgagcgtggggggtggagggtggcgaggtgcggagactgcagaccagtgcttcactgtgtggagtggggcaggcaggggctggaccccagggacttgccttccccacccactctgctgccagcaggcccagggatccctgacctgcaccaggtggcaccaagggtcctgagtcctggagatgtccccagaagctgctgtgcctcacagcgctgtgagccagaccctccttgggcagacaggctgactggcagcaccagctttgggggcagagtcctaggatgaggcttgggcagtgctggtagggtttcaaggtgctattagtggggcaggggcagggcggctgctcacagagcaccccagttcctcaccagctactctggccatatatcccacaccagaaggaacaagtgtggctgtgtccatctctgctcccccaaaggcccgctctaggccttatcctccctctaggtcctgccacaacctgtccctggctggctccagcgtcctcgtccctcctgggcctgtgcaccggtgggtggggcgcccatagcactgccggtaaaggagcctgcatgttcaggcccctcgggggattggggggactggggaggcgcagcctagacccaattgcttgcccccatgaggctagcactaataggaaacccttttttgttgtca

SEQ ID NO: 201069 - DNA, 1050 bp, Homo sapiens
  Payload ID: 19691
  Gene Name: zinc finger and BTB domain containing 48
  ENST ID: ENST00000319084
  CDS Start-End: 119-1050
gacgtcacgtccggcgcggagacggtggagtctccgcactgtcggcggggagctttctcttgcataccctcgcttaggctggccggggtgtcacttctgcctccctgccctccagaccatggacggctccttcgtccagcacagtgtgagggttctgcaggagctcaacaagcagcgggagaagggccagtactgcgacgccactctggacgtggggggcctggtgtttaaggcacactggagtgtccttgcctgctgcagtcactttttccagagcctctacggggatggctcagggggcagtgtcgtcctccctgctggcttcgctgagatctttggcctcttgttggactttttctacactggtcacctcgctctcacctcagggaaccgggatcaggtgctcctggcagccagggagttgcgagtgccagaggccgtagagctgtgccagagcttcaagcccaaaacttcagtgggacaggcagcaggtggccagagtgggctggggccccctgcctcccagaatgtgaacagccacgtcaaggagccggcaggcttggaagaagaggaagtttcgaggactctgggtctagtccccagggatcaggagcccagaggcagtcatagtcctcagaggccccagctccattccccagctcagagtgagggcccctcctccctctgtgggaaactgaagcaggccttgaagccttgtccccttgaggacaagaaacccgaggactgcaaagtgcccccaaggcccttagaggctgaaggtgcccagctgcagggcggcagtaatgagtgggaagtggtggttcaagtggaggatgatggggatggcgattacatgtctgagcctgaggctgtgctgaccaggaggaagtcaaatgtaatccgaaagccctgtgcagctgagccagccctgagcgcgggctccctagcagctgagcctgctgagaacagaaaaggtacagcggtgccggtcgaatgccccacatgtcataaaaagttcctcagcaaatattatctaaaagtccacaacag

SEQ ID NO: 201070 - DNA, 2293 bp, Homo sapiens
  Payload ID: 19691
  Gene Name: zinc finger and BTB domain containing 48
  Uniprot ID: P10074
  ENST ID: ENST00000377674
  CDS Start-End: 159-2225
gggtacgcatagccgggcactaggttcgtgggctgtggaggcgacggagcagggggccagtggggccagctcagggaggacctgcctgggagctttctcttgcataccctcgcttaggctggccggggtgtcacttctgcctccctgccctccagaccatggacggctccttcgtccagcacagtgtgagggttctgcaggagctcaacaagcagcgggagaagggccagtactgcgacgccactctggacgtggggggcctggtgtttaaggcacactggagtgtccttgcctgctgcagtcactttttccagagcctctacggggatggctcagggggcagtgtcgtcctccctgctggcttcgctgagatctttggcctcttgttggactttttctacactggtcacctcgctctcacctcagggaaccgggatcaggtgctcctggcagccagggagttgcgagtgccagaggccgtagagctgtgccagagcttcaagcccaaaacttcagtgggacaggcagcaggtggccagagtgggctggggccccctgcctcccagaatgtgaacagccacgtcaaggagccggcaggcttggaagaagaggaagtttcgaggactctgggtctagtccccagggatcaggagcccagaggcagtcatagtcctcagaggccccagctccattccccagctcagagtgagggcccctcctccctctgtgggaaactgaagcaggccttgaagccttgtccccttgaggacaagaaacccgaggactgcaaagtgcccccaaggcccttagaggctgaaggtgcccagctgcagggcggcagtaatgagtgggaagtggtggttcaagtggaggatgatggggatggcgattacatgtctgagcctgaggctgtgctgaccaggaggaagtcaaatgtaatccgaaagccctgtgcagctgagccagccctgagcgcgggctccctagcagctgagcctgctgagaacagaaaaggtacagcggtgccggtcgaatgccccacatgtcataaaaagttcctcagcaaatattatctaaaagtccacaacaggaaacatactggggagaaaccctttgagtgtcccaaatgtgggaagtgttactttcggaaggagaacctcctggagcatgaagcccggaattgcatgaaccgctcggaacaggtcttcacgtgctctgtgtgccaggagacattccgccgaaggatggagctgcgggtgcacatggtgtctcacacaggggagatgccctacaagtgttcctcctgctcccagcagttcatgcagaagaaggacttgcagagccacatgatcaaacttcatggagcccccaagccccatgcatgccccacctgtgccaagtgcttcctgtctcggacagagctgcagctgcatgaagctttcaagcaccgtggtgagaagctgtttgtgtgtgaggagtgtgggcaccgggcctcgagccggaatggcctgcagatgcacatcaaggccaagcacaggaatgagaggccacacgtatgtgagttctgcagccacgccttcacccaaaaggccaatctcaacatgcacctgcgcacacacacgggtgagaagcccttccagtgccacctctgtggcaagaccttccgaacccaagccagcctggacaagcacaaccgcacccacaccggggaaaggcccttcagttgcgagttctgtgaacagcgcttcactgagaaggggcccctcctgaggcacgtggccagccgccatcaggagggccggccccacttctgccagatatgcggcaagaccttcaaagccgtggagcaactgcgtgtgcacgtcagacggcacaagggggtgaggaagtttgagtgcaccgagtgtggctacaagtttacccgacaggcccacctgcggaggcacatggagatccacgaccgggtagagaactacaacccgcggcagcgcaagctccgcaacctgatcatcgaggacgagaagatggtggtggtggcgctgcagccgcctgcagagctggaggtgggctcggcggaggtcattgtggagtccctggcccagggcggcctggcctcccagctccccggccagagactgtgtgcagaggagagcttcaccggcccaggtgtcctggagccctccctcatcatcacagctgctgtccccgaggactgtgacacatagcccattctggccaccagagcccacttggccccacccctcaataaaccgtgtggctttggactctcgta

SEQ ID NO: 201071 - DNA, 1001 bp, Homo sapiens
  Payload ID: 19691
  Gene Name: zinc finger and BTB domain containing 48
  ENST ID: ENST00000435905
  CDS Start-End: 124-1001
cggagacggtggagtctccgcactgtcggcggggtacgcatagccgggcactaggagctttctcttgcataccctcgcttaggctggccggggtgtcacttctgcctccctgccctccagaccatggacggctccttcgtccagcacagtgtgagggttctgcaggagctcaacaagcagcgggagaagggccagtactgcgacgccactctggacgtggggggcctggtgtttaaggcacactggagtgtccttgcctgctgcagtcactttttccagagcctctacggggatggctcagggggcagtgtcgtcctccctgctggcttcgctgagatctttggcctcttgttggactttttctacactggtcacctcgctctcacctcagggaaccgggatcaggtgctcctggcagccagggagttgcgagtgccagaggccgtagagctgtgccagagcttcaagcccaaaacttcagtgggacaggcagcaggtggccagagtgggctggggccccctgcctcccagaatgtgaacagccacgtcaaggagccggcaggcttggaagaagaggaagtttcgaggactctgggtctagtccccagggatcaggagcccagaggcagtcatagtcctcagaggccccagctccattccccagctcagagtgagggcccctcctccctctgtgggaaactgaagcaggccttgaagccttgtccccttgaggacaagaaacccgaggactgcaaagtgcccccaaggcccttagaggctgaaggtgcccagctgcagggcggcagtaatgagtgggaagtggtggttcaagtggaggatgatggggatggcgattacatgtctgagcctgaggctgtgctgaccaggaggaagtcaaatgtaatccgaaagccctgtgcagctgagccagccctgagcgcgggctccctagcagctgagcctgctgagaacagaaaaggtacagcggtgccggtcgaatg

SEQ ID NO: 201072 - DNA, 784 bp, Homo sapiens
  Payload ID: 19691
  Gene Name: zinc finger and BTB domain containing 48
  ENST ID: ENST00000488936
  CDS Start-End: 95-784
gcgacggagcagggggccagtggggccagctcagggaggacctgcctggtgggaagtggtggttcaagtggaggatgatggggatggcgattacatgtctgagcctgaggctgtgctgaccaggaggaagtcaaatgtaatccgaaagccctgtgcagctgagccagccctgagcgcgggctccctagcagctgagcctgctgagaacagaaaaggtacagcggtgccggtcgaatgccccacatgtcataaaaagttcctcagcaaatattatctaaaagtccacaacaggaaacatactggggagaaaccctttgagtgtcccaaatgtgggaagtgttactttcggaaggagaacctcctggagcatgaagcccggaattgcatgaaccgctcggaacaggtcttcacgtgctctgtgtgccaggagacattccgccgaaggatggagctgcgggtgcacatggtgtctcacacaggggagatgccctacaagtgttcctcctgctcccagcagttcatgcagaagaaggacttgcagagccacatgatcaaacttcatggagcccccaagccccatgcatgccccacctgtgccaagtgcttcctgtctcggacagagctgcagctgcatgaagctttcaagcaccgtggtgagaagctgtttgtgtgtgaggagtgtgggcaccgggcctcgagccggaatggcctgcagatgcacatcaaggccaagcacaggaatgagaggccacacgtatgtgagttctgcagccacgccttcacc

SEQ ID NO: 201073 - DNA, 790 bp, Homo sapiens
  Payload ID: 19691
  Gene Name: zinc finger and BTB domain containing 48
  ENST ID: ENST00000466813
  CDS Start-End: 1-387
atgatcaaacttcatggagcccccaagccccatgcaagctgcagctgcatgaagctttcaagcaccgtggtgagaagctgtttgtgtgtgaggagtgtgggcaccgggcctcgagccggaatggcctgcagatgcacatcaaggccaagcacaggaatgagaggccacacgtatgtgagttctgcagccacgccttcacccaaaaggccaatctcaacatgcacctgcgcacacacacgggtgagaagcccttccagtgccacctctgtggcaagaccttccgaacccaagccagcctggacaagcacaaccgcacccacaccggggaaaggcccttcagttgcgagttctgtgaacagcgcttcactgagaaggggcccctcctgaggcacgtggccagccgccatcaggagggccggccccacttctgccagatatgcggcaagaccttcaaagccgtggagcaactgcgtgtgcacgtcagacggcacaagggggtgaggaagtttgagtgcaccgagtgtggctacaagtttacccgacaggcccacctgcggaggcacatggagatccacgaccgggtagagaactacaacccgcggcagcgcaagctccgcaacctgatcatcgaggacgagaagatggtggtggtggcgctgcagccgcctgcagagctggaggtgggctcggcggaggtcattgtggagtccctggcccagggcggcctggcctcccagctccccggccagagactgtgtgcagaggagagcttcaccggcccaggtgtcct

SEQ ID NO: 201074 - DNA, 2449 bp, Homo sapiens
  Payload ID: 19691
  Gene Name: zinc finger and BTB domain containing 48
  ENST ID: ENST00000619514
  CDS Start-End: 531-926
tgagggcggaagggacaggcataggagggactctgtgggaggcatttggggttggctttcctaggcccctggcccacctccaccttggctttggagaaggggagccgctacaggggatggcagctgggaaaggccccctggccacccccagcaaccccactgctggcttctgtgtcagggcccgccgaaacccaggcccactcttcctagaggcctgtcagcagccactagggccagggactgtgggtgaggccactcggaccctgcccccagtctgtctgggcctgagaagggcctggtgtgcggtgggcttgcagcactcagtgatggtcaggccaggcaggttatgtgttgccctctcccaccctagcgtccccaccctccccaggcagactcttcccagcagcaagcggaagcccgggcagaggctgctgtcataggcagaggcccccgctgatgccggccctgcttgcccctcacactgccaggtcttcacgtgctctgtgtgccaggagacattccgccgaaggatggagctgcgggtgcacatggtgtctcacacaggggagatgccctacaaggtcaggcttggcctgtctccagggccagggttgggtggccccaggatccttcctgctgagccctttacgtggggtgctgtcaggcacctccctcacagtagctgtcagggagcctgccttccctgccttccctgcctttccagtgcccccttatctaggcagggcctgtctgcagcctcacctccaaggtccttattaggcccttgtttctttccatggaggacaggcttggcatcctctgggcagctgagccctgaggccctcctttgcaccatccttcacaccagatcaggggtcctcccagaatcatctcaccggggcctccctctagttcctgccctatagcccaagggtgggtggcagggtttcatgggtgcaggccgccctggaggtgactgtgggcctctttttcagtgttcctcctgctcccagcagttcatgcagaagaaggacttgcagagccacatgatcaaacttcatggagcccccaagccccatgcatgccccacctgtgccaagtgcttcctgtctcggacagagctgcagctgcatgaagctttcaagcaccgtggtgagaagctgtttgtgtgtgaggagtgtgggcaccgggcctcgagccggaatggcctgcagatgcacatcaaggccaagcacaggaatgagaggccacacgtatgtgagttctgcagccacgccttcacccaaaaggccaatctcaacatgcacctgcgcacacacacgggtgagaagcccttccagtgccacctctgtggcaagaccttccgaacccaaggtgaggtacgccctgcccctcccctcgcctccccatcctgaggccaaggccacaggctgagctcttgccttgtgcctgcagccagcctggacaagcacaaccgcacccacaccggggaaaggcccttcagttgcgagttctgtgaacagcgcttcactgagaaggggcccctcctgaggcacgtggccagccgccatcaggagggccggccccacttctgccagatatgcggcaagaccttcaaaggtacctgggcggccctgggagagccatttcctgctcatccgagttggagggtctctgaggaggaaacgctcctttcttgcctgtgaacctcttttgtgccccacatggttagagttgagagtggacctgctttgaaggcaggggtgtcctgtgcagtagtgaccctgggtggcactggagagcctggcagggcctgtgcagcacttgtaaaccactggtcccctcccttgctgcctgtcccaacctcctgctgggtttcctcgagggtcccggggctcctgcatgatcccccacggtgttctccctcttgcagccgtggagcaactgcgtgtgcacgtcagacggcacaagggggtgaggaagtttgagtgcaccgagtgtggctacaagtttacccgacaggtaggccagggcctgggccccttcccctaccctaggatcccccaaagttctgagctcaccctccccgccaggcccacctgcggaggcacatggagatccacgaccgggtagagaactacaacccgcggcagcgcaagctccgcaacctgatcatcgaggacgagaagatggtggtggtggcgctgcagccgcctgcagagctggaggtgggctcggcggaggtcattgtggagtccctggcccagggcggcctggcctcccagctccccggccagagactgtgtgcagaggagagcttcaccggcccaggtgtcctggagccctccctcatcatcacagctgctgtccccgaggactgtgacacatagcccattctggccaccagagcccacttggccccacccctcaataaaccgtgtggctttgg

SEQ ID NO: 201075 - DNA, 2889 bp, Homo sapiens
  Payload ID: 19692
  Gene Name: zinc finger and BTB domain containing 49
  Uniprot ID: Q6ZSB9
  ENST ID: ENST00000337872
  CDS Start-End: 122-2419
gttgtcgtgatgattccgcggccagcggatcgctgcgagtggccttgaaggcagctgctgcaggtgaagagtaggcggcggggcagagagcggcctccgagggtcacctgaatggttgagcatggaccctgttgctacccacagctgccatctgctccagcaactgcatgagcagcgaatccaaggcctgctttgtgactgtatgttggtggtaaaaggagtctgctttaaagcgcataagaatgtcctggcagcattcagccagtattttaggagcctctttcagaattcttcaagccagaagaatgatgtttttcacttggatgttaaaaatgtcagtggcatagggcagatcctggacttcatgtacacttctcatctagatcttaaccaggacaatatacaagtaatgctggacacagcacagtgtttgcaagttcaaaatgttctgagtctgtgtcacacatttttaaaatcagccactgtagtacagccacctggcatgccttgtaatagtacattgtctctacaaagcaccctgaccccagatgccacttgtgttatcagtgaaaactacccccctcatttactgcaggaatgttcagcagatgcacagcagaacaaaacgttggatgaatcgcatccgcatgcttcaccatcagttaatcgtcatcactccgcaggtgaaatctcaaaacaagctcctgatacttcagatggcagctgcacagaactgcctttcaaacagccaaattactattacaaactcagaaacttttacagtaagcagtaccataaacacgcagctggtcccagtcaggagagagttgttgagcagccttttgctttcagcacctctacagaccttaccacggtagagagccagccttgtgccgtcagtcattctgaatgcatcctggagtctcccgagcacttaccttccaacttcctggcccagcctgtgaatgactctgccccacaccctgagtcagacgccacatgccaacaacctgtcaagcagatgaggctcaaaaaggccattcatctgaagaagctcaatttcctgaagtcacagaaatacgcagagcaagtatctgaacccaagtcagatgatggtttgacaaagaggttggaatctgctagtaaaaataccctagagaaagctagcagccaaagtgctgaagaaaaagaaagtgaagaagtcgtcagttgtgagaattttaattgcattagtgagacggagaggcctgaagacccggctgccctggaagaccagtcccagacacttcagtcccagagacaatacgcgtgtgaattatgcgggaaaccttttaaacacccaagcaacttggagcttcacaaacggtctcatacaggtgagaaaccttttgaatgtaacatttgtgggaaacatttctctcaggcaggtaacttgcagactcacttacgacggcattctggtgaaaaaccatacatctgcgagatctgtggaaagaggtttgcagcctctggcgacgtccagcgtcacattattattcactcaggagaaaaaccacacttgtgtgacatctgtggtcgagggtttagtaacttcagtaatttgaaggagcacaaaaagacacacacggctgataaagtcttcacctgtgatgagtgtggaaagtcttttaatatgcaaaggaagttagtaaagcacagaattcggcacacgggggagcggccttacagctgctctgcctgcgggaaatgttttgggggatcaggtgacctccgcaggcatgtccgcactcacactggggagaagccgtacacatgtgagatctgtaacaagtgctttacccgctctgcggtgctccggcggcacaagaagatgcactgcaaagctggtgacgagagcccagatgtgctggaggagctcagccaagccatcgagacctccgacctcgagaaatctcagagctcagactctttctcccaagacacgtctgtgacgctgatgccagtgtcggttaaactccctgtccacccagtggaaaattctgtggcagaatttgatagccactctggcggctcctattgtaagttacggtccatgatccaacctcatggagttagtgaccaggagaagctgagtttggatcctggtaaacttgccaagccccagatgcagcagacacagcctcaggcctatgcttactcggatgtggacaccccagccggtggcgaaccactgcaggccgatggcatggccatgatccgttcctctctggctgctttggacaaccacggcggtgaccccctgggcagtcgagcatcttccaccacttataggaactcagagggtcagtttttctccagcatgactctctgggggctagcgatgaagacgctgcagaatgaaaacgagttagaccagtgatgtaccgcgcttctccacggtagaggcgtgttctcagtttagcaggctggtgttaaggctgtaggaggacccagtttccccatgacagtgccttctaactagccagagaataggtagcttccctcctgatgatggctcataatctgaagcatcttgagctgggggtgtgagggggagggcctgctggctcaccgtgaggcagccgcgggagggagcgctgacgtcacagaagcgaaggcttgatgctgtctcagcagcctcagctgtgggggggaagcgcgtgtgcatcgtgtcaactactgtacatgttggtcatgtgaaaggaattatatatgtatagtattacaagtatttttgcatttttacaagattgaaatttgtagcattttgtattatttacacagaatttatttgtatatgaaactcataccataatttaattcgaataaatgaaacttttctatatatta

SEQ ID NO: 201076 - DNA, 523 bp, Homo sapiens
  Payload ID: 19692
  Gene Name: zinc finger and BTB domain containing 49
  ENST ID: ENST00000504302
  CDS Start-End: 1-523
gcatcctggagtctcccgagcacttaccttccaacttcctggcccagcctgtgaatgactctgccccacaccctgagtcagacgccacatgccaacaacctgtcaagcagatgaggctcaaaaaggccattcatctgaagaagctcaatttcctgaagtcacagaaatacgcagagcaagtatctgaacccaagtcagatgatggtttgacaaagaggttggaatctgctagtaaaaataccctagagaaagctagcagccaaagtgctgaagaaaaagaaagtgaagaagtcgtcagttgtgagaattttaattgcattagtgagacggagaggcctgaagacccggctgccctggaagaccagtcccagacacttcagtcccagagacaatacgcgtgtgaattatgcgggaaaccttttaaacacccaagcaacttggagcttcacaaacggtctcatacagggaaatgttttgggggatcaggtgacctccgcaggcatgtccgcactcacactgggga

SEQ ID NO: 201077 - DNA, 2380 bp, Homo sapiens
  Payload ID: 19692
  Gene Name: zinc finger and BTB domain containing 49
  ENST ID: ENST00000515012
  CDS Start-End: 122-1483
gttgtcgtgatgattccgcggccagcggatcgctgcgagtggccttgaaggcagctgctgcaggtgaagagtaggcggcggggcagagagcggcctccgagggtcacctgaatggttgagcatggaccctgttgctacccacagctgccatctgctccagcaactgcatgagcagcgaatccaaggcctgctttgtgactgtatgttggtggtaaaaggagtctgctttaaagcgcataagaatgtcctggcagcattcagccagtattttaggagcctctttcagaattcttcaagccagaagaatgatgtttttcacttggatgttaaaaatgtcagtggcatagggcagatcctggacttcatgtacacttctcatctagatcttaaccaggacaatatacaagtaatgctggacacagcacagtgtttgcaagttcaaaatgttctgagtctgtgtcacacatttttaaaatcagccactgtagtacagccacctggcatgccttgtaatagtacattgtctctacaaagcaccctgaccccagatgccacttgtgttatcagtgaaaactacccccctcatttactgcaggaatgttcagcagatgcacagcagaacaaaacgttggatgaatcgcatccgcatgcttcaccatcagttaatcgtcatcactccgcaggtgaaatctcaaaacaagctcctgatacttcagatggcagctgcacagaactgcctttcaaacagccaaattactattacaaactcagaaacttttacagtaagcagtaccataaacacgcagctggtcccagtcaggagagagttgttgagcagccttttgctttcagcacctctacagaccttaccacggtagagagccagccttgtgccgtcagtcattctgaatgcatcctggagtctcccgagcacttaccttccaacttcctggcccagcctgtgaatgactctgccccacaccctgagtcagacgccacatgccaacaacctgtcaagcagatgaggctcaaaaaggccattcatctgaagaagctcaatttcctgaagtcacagaaatacgcagagcaagtatctgaacccaagtcagatgatggtttgacaaagaggttggaatctgctagtaaaaataccctagagaaagctagcagccaaagtgctgaagaaaaagaaagtgaagaagtcgtcagttgtgagaattttaattgcattagtgagacggagaggcctgaagacccggctgccctggaagaccagtcccagacacttcagtcccagagacaatacgcgtgtgaattatgcgggaaaccttttaaacacccaagcaacttggagcttcacaaacggtctcatacaggtttgcagcctctggcgacgtccagcgtcacattattattcactcaggagaaaaaccacacttgtgtgacatctgtggtcgagggtttagtaacttcagtaatttgaaggagcacaaaaagacacacacggctgataaagtcttcacctgtgatgagtgtggaaagtcttttaatatgcaaaggaagttagtaaagcacagaattcggcacacgggggagcggccttacagctgctctgcctgcgggaaatgttttgggggatcaggtgacctccgcaggcatgtccgcactcacactggggagaagccgtacacatgtgagatctgtaacaagtgctttacccgctctgcggtgctccggcggcacaagaagatgcactgcaaagctggtgacgagagcccagatgtgctggaggagctcagccaagccatcgagacctccgacctcgagaaatctcagagctcagactctttctcccaagacacgtctgtgacgctgatgccagtgtcggttaaactccctgtccacccagtggaaaattctgtggcagaatttgatagccactctggcggctcctattgtaagttacggtccatgatccaacctcatggagttagtgaccaggagaagctgagtttggatcctggtaaacttgccaagccccagatgcagcagacacagcctcaggcctatgcttactcggatgtggacaccccagccggtggcgaaccactgcaggccgatggcatggccatgatccgttcctctctggctgctttggacaaccacggcggtgaccccctgggcagtcgagcatcttccaccacttataggaactcagagggtcagtttttctccagcatgactctctgggggctagcgatgaagacgctgcagaatgaaaacgagttagaccagtgatgtaccgcgcttctccacggtagaggcgtgttctcagtttagcaggctggtgttaaggctgtaggaggacccagtttcccca

SEQ ID NO: 201078 - DNA, 2520 bp, Homo sapiens
  Payload ID: 19692
  Gene Name: zinc finger and BTB domain containing 49
  ENST ID: ENST00000503703
  CDS Start-End: 122-556
gttgtcgtgatgattccgcggccagcggatcgctgcgagtggccttgaaggcagctgctgcaggtgaagagtaggcggcggggcagagagcggcctccgagggtcacctgaatggttgagcatggaccctgttgctacccacagctgccatctgctccagcaactgcatgagcagcgaatccaaggcctgctttgtgactgtatgttggtggtaaaaggagtctgctttaaagcgcataagaatgtcctggcagcattcagccagtattttaggaatgttcagcagatgcacagcagaacaaaacgttggatgaatcgcatccgcatgcttcaccatcagttaatcgtcatcactccgcaggtgaaatctcaaaacaagctcctgatacttcagatggcagctgcacagaactgcctttcaaacagccaaattactattacaaactcagaaacttttacagtaagcagtaccataaacacgcagctggtcccagtcaggagagagttgttgagcagccttttgctttcagcacctctacagaccttaccacggtagagagccagccttgtgccgtcagtcattctgaatgcatcctggagtctcccgagcacttaccttccaacttcctggcccagcctgtgaatgactctgccccacaccctgagtcagacgccacatgccaacaacctgtcaagcagatgaggctcaaaaaggccattcatctgaagaagctcaatttcctgaagtcacagaaatacgcagagcaagtatctgaacccaagtcagatgatggtttgacaaagaggttggaatctgctagtaaaaataccctagagaaagctagcagccaaagtgctgaagaaaaagaaagtgaagaagtcgtcagttgtgagaattttaattgcattagtgagacggagaggcctgaagacccggctgccctggaagaccagtcccagacacttcagtcccagagacaatacgcgtgtgaattatgcgggaaaccttttaaacacccaagcaacttggagcttcacaaacggtctcatacaggcaggtaacttgcagactcacttacgacggcattctggtgaaaaaccatacatctgcgagatctgtggaaagaggtttgcagcctctggcgacgtccagcgtcacattattattcactcaggagaaaaaccacacttgtgtgacatctgtggtcgagggtttagtaacttcagtaatttgaaggagcacaaaaagacacacacggctgataaagtcttcacctgtgatgagtgtggaaagtcttttaatatgcaaaggaagttagtaaagcacagaattcggcacacgggggagcggccttacagctgctctgcctgcgggaaatgttttgggggatcaggtgacctccgcaggcatgtccgcactcacactggggagaagccgtacacatgtgagatctgtaacaagtgctttacccgctctgcggtgctccggcggcacaagaagatgcactgcaaagctggtgacgagagcccagatgtgctggaggagctcagccaagccatcgagacctccgacctcgagaaatctcagagctcagactctttctcccaagacacgtctgtgacgctgatgccagtgtcggttaaactccctgtccacccagtggaaaattctgtggcagaatttgatagccactctggcggctcctattgtaagttacggtccatgatccaacctcatggagttagtgaccaggagaagctgagtttggatcctggtaaacttgccaagccccagatgcagcagacacagcctcaggcctatgcttactcggatgtggacaccccagccggtggcgaaccactgcaggccgatggcatggccatgatccgttcctctctggctgctttggacaaccacggcggtgaccccctgggcagtcgagcatcttccaccacttataggaactcagagggtcagtttttctccagcatgactctctgggggctagcgatgaagacgctgcagaatgaaaacgagttagaccagtgatgtaccgcgcttctccacggtagaggcgtgttctcagtttagcaggctggtgttaaggctgtaggaggacccagtttccccatgacagtgccttctaactagccagagaataggtagcttccctcctgatgatggctcataatctgaagcatcttgagctgggggtgtgagggggagggcctgctggctcaccgtgaggcagccgcgggagggagcgctgacgtcacagaagcgaaggcttgatgctgtctcagcagcctcagctgtgggggggaagcgcgtgtgcatcgtgtcaactactgtacatgttggtcatgtgaaaggaattatatatgtatagtattacaagtatttttgcatttttacaagattgaaatttgtagcattttgtattatttacacagaatttatttgtatatgaaactcataccataatttaattcgaataaatgaaacttttctatatatta

SEQ ID NO: 201079 - DNA, 502 bp, Homo sapiens
  Payload ID: 19692
  Gene Name: zinc finger and BTB domain containing 49
  ENST ID: ENST00000502918
  CDS Start-End: 65-502
cggccagcggatcgctgcgagtggccttgaaggcagctgctgcaggtcacctgaatggttgagcatggaccctgttgctacccacagctgccatctgctccagcaactgcatgagcagcgaatccaaggcctgctttgtgactgtatgttggtggtaaaaggagtctgctttaaagcgcataagaatgtcctggcagcattcagccagtattttaggagcctctttcagaattcttcaagccagaagaatgatgtttttcacttggatgttaaaaatgtcagtggcatagggcagatcctggacttcatgtacacttctcatctagatcttaaccaggacaatatacaagtaatgctggacacagcacagtgtttgcaagttcaaaatgttctgagtctgtgtcacacatttttaaaatcagccactgtagtacagccacctggcatgccttgtaatagtacattgtctctacaaagcaccctgaccccagatgccacttgt

SEQ ID NO: 201080 - DNA, 492 bp, Homo sapiens
  Payload ID: 19692
  Gene Name: zinc finger and BTB domain containing 49
  ENST ID: ENST00000511458
  CDS Start-End: 1-368
agcagatgaggctcaaaaaggccattcatctgaagaagctcaatttcctgaagtcacagaaatacgcagagcaagtatctgaacccaagtcagatgatggtttgacaaagaggttggaatctgctagtaaaaataccctagagaaagctagcagccaaagtgctgaagaaaaagaaagtgaagaagtcgtcagttgtgagaattttaattgcattagtgagacggagaggcctgaagacccggctgccctggaagaccagtcccagacacttcagtcccagagacaatacgcgtgtgaattatgcgggaaaccttttaaacacccaagcaacttggagcttcacaaacggtctcatacaggcaggtaacttgcagactcacttacgacggcattctggtgaaaaaccatacatctgcgagatctgtggaaagagggaaatgttttgggggatcaggtgacctccgcaggcatgtccgcactcacactgggga

SEQ ID NO: 201081 - DNA, 4627 bp, Homo sapiens
  Payload ID: 19693
  Gene Name: zinc finger and BTB domain containing 5
  Uniprot ID: O15062
  ENST ID: ENST00000307750
  CDS Start-End: 190-2223
gcgaactggctggaggagctaggggactagaggcggggtgggaggggggcgggtggaagggggaggaagtcccgtaacggagacgctggtcaggacgttcccacctcctctgacactgccgagtccgatcggagaggggtcaccgcctccttcagcgaggaggaggggggcggagcccgactcaggatcatggattttcctggtcactttgaacaaatcttccagcagctgaactaccagagacttcatggccagctctgtgattgtgtcattgtagtggggaatagacactttaaagcccaccgctccgtgctggcagcatgcagcacgcatttccgagccctgttctcagtggcagaaggagatcagaccatgaacatgatccagctggatagcgaggtggtgacagcagaggcctttgctgcactgattgacatgatgtatacctccaccctcatgctgggggagagcaatgtaatggatgtcttattggcagcctctcacctgcatttgaactctgttgttaaggcatgtaaacattacttaacgacaaggacgctgcccatgtctccccccagtgagcgcgttcaggagcagagcgcccgcatgcagcgctcctttatgctacagcagctgggactaagcatcgtgagctcagccctcaattccagccagaatggcgaggagcagccagcccccatgagctcttccatgcgcagtaacctggatcagcgcacgcccttccccatgagacgccttcataagcgcaagcagtctgcagaggagcgggccaggcagcgcctccgaccctccatagatgagtctgccatttcagatgttacaccggagaatgggccttcaggggttcattctcgggaggagttcttttcaccagattctctgaaaattgtggataatcctaaagctgatggaatgactgataaccaggaagatagtgcgatcatgtttgatcagtcttttggcactcaagaagatgcccaggtgcccagccagtctgataacagtgctggcaacatggcacagttgtccatggcctctcgtgcaactcaggttgagactagttttgatcaggaagctgcacctgagaaaagtagttttcagtgtgaaaaccctgaggttggccttggtgagaaggagcacatgagagtggtggttaaatctgagcccctgagctcacctgagcctcaggatgaagtgagcgatgtgacctcacaagcagaaggcagcgagtctgtggaagtggaaggagttgtggtcagtgccgagaagatagacctcagccctgaaagcagtgatcggagtttttcagatccccagtctagcacagacagggtaggtgatatccatattttggaagtcacaaataacctagagcataagtccacttttagtatttcgaattttcttaacaagagcagaggaaataactttactgcaaatcagaacaatgatgataatattccaaacaccactagtgactgcaggctggagagtgaggccccctatttgttgagtccagaggctgggcctgcaggtgggccctcctctgcccctggctcccatgtagagaacccatttagtgaacctgcagactcccacttcgtcaggcctatgcaggaggtgatgggcctgccgtgtgtgcagacttcaggctaccaaggaggagaacagtttgggatggacttttccaggtctggtttgggcctccactcctccttctccagggtaatgataggttccccaaggggaggagccagtaactttccttactaccgccgcatagctcccaaaatgccagttgtaacttccgtcaggagctcacagatcccagaaaactctaccagttctcagctaatgatgaatggagctacgtcctcatttgaaaatggccatccttcccagcctggccctccacagttgaccagggcatctgcagatgttctgtcaaagtgcaagaaggccttatcagagcacaatgttttggttgtagagggagctcgcaagtatgcctgcaaaatctgctgcaaaacttttctgactttgacagattgcaagaagcacatccgtgttcacacaggtgaaaagccttacgcctgcctgaagtgtggcaagaggtttagtcagtccagccacctgtataagcactcaaagactacctgcctgcgctggcagagcagcaatcttcccagcactttgctctagctgtttgtccttacaagacaacgctgaggccagttgtcagactgaatttcttttggtaagcagttaatgcctttgggttcgaggcttccagctgcccagtggctcttaaacagtttagcaactaataaccggagaactaacatgtagtatttgtgctgctgcatttctgagtgaagtgcacgtcttgggaaagggatgcaatccctgaaaccaggtgcttccttggggttgagtaatgcagtcagaaagtagtttgtaattgatattaaaagtggcacatttaaaaatttaaaaattgaagtgcaaaaaaaattttttagcaatttttgtaaaactgtgtagcatttaaatttcctataccttctgatgggagtattatatccctgtatagtgatgcaaaatgcacttatgtgtaaccagtggtgatttggtgcctgtcttaaaggaaggcctttgaggacacacctgtctgccacaaatgctttaaagtgtatcatgagctagtcctaggcctcaaagtactgtattttttatttttacctgatttgcagtcataaacactgcactttggtgctgacactgggtccagagtgagcattctcttggactattagatgtatatacttttgaatacatcactgttggatagatgttttaacagttttttctggtttaaaaaccaaattgtaaatggagtgtgtacttgtagagagtgacaaggtattgtttccctatgtgctgtttgagcagtattttaaccaacttgtattacagatgttacagttccatgttaggaagtcagaaaagacttgtgtttgtctttgttctgctgatgtggagtcatgttttgtggggtcttccatggcacatttacctgttgctccgtccagatgttgagggccagtctaggctgacacatcctacccgaggacaagcctgttctccatttcttcactctcccctccccatatagcaactctcccaggtttagattaccgttttcgacgacagattaaccaaaaatgccccacacaggttttattactgttatatactatacttttaacagtacagaccctaaattttattatttgttgctcccccaatctgataccaaatgtttaaagttgtttgaaatccaaacatggtagtgttcatgggtaaatattttctaggctatgtaagagttagcagcccatagcatagaagtaatcaagtagcatctgagactgttggaggcactagggcctctctgggccctacagcctcacttccccagcctcaccttgctgtcctctgacactgccatcagggctgttagtggcacctgtatgaggccaagtgtgcgtccaggggaacagcacaggttaatgcgtctccctagaactcatgaagtcagtttaattcatgcatgaacatgagttcattttatgttttatatagctttcttagacataccaaaccatcattcataaatcagataaattattcagtttttgtgtttagaaagctaagtatgtgtagctggaaacaaaaatgagcgtgttttctctcctgttaatctagagtgtgcagttacacatgtgtggataatttcatgttccaggggcgcttggcatctcccatggactgattcccaggaagaaaagcccaaagggaaacccacgattcctttcgagtagatgtgggaaagagcccattggaggatatgaggtcctgtgaaattcagttgtgtgtgtggctccttgttagcagtcatgttgacatggtgttaggaggctccccatccaccctttacatgatgtagggaccagtgtcttgtgagattaaccttgggacacagtgggttagcctggagaaaatgagaggccctgcctggacccagggagaggagccagtgacacaggcagagcggtgcagccctccttcccttccatttggaggaggtggtgccaggagcctgcccgcttacctctgctgaagcataagtggactttgcttttggggcttatctctgatacatgctggagccctgcctctccactgctagatggaacctggaatctctcatctacctcttagtctgtcagtttctacgtgtgagaagcaagcttgtgggccagtgtccttgtacatgctgtagcacttaaaaaataattccagggttccctggaaaaccagtcccagggttcctatgatctgtagtttctacctggattataactggttttgggtacctgaattttgattggttagccttaattatagtctggcgtgatcatgtagaatcttttctggtgaacagatcataaagttctatcaaggagttctatcaaggcatccatgtcagtggtgctatgctggttacaacttgagatttttgaaataaaaaatttgtcatatt

SEQ ID NO: 201082 - DNA, 4106 bp, Homo sapiens
  Payload ID: 19694
  Gene Name: zinc finger and BTB domain containing 6
  Uniprot ID: Q15916
  ENST ID: ENST00000373659
  CDS Start-End: 90-1364
gtgttttcttccaggctaagtccatcttccggcttgggcagacgctgccgcggaatccttgactctagttttctgagtcgattgtgatcatggctgctgagtctgatgttctgcatttccagtttgaacagcaaggagatgtggtcttgcagaaaatgaatcttttgagacagcagaatttattttgtgatgtatcaatttacattaatgacactgagttccaggggcacaaggtgattttggctgcttgctccacttttatgagagatcagtttttactcacacagtcaaaacatgtcagaatcaccatcttacagagtgcagaagttggcagaaaattgttactgtcttgctatactggagcacttgaagttaaaaggaaagagcttttgaaatacttgactgctgccagttaccttcagatggttcacattgtggaaaagtgcacagaagctttgtcaaagtatctggaaattgatctttctatgaaaaacaacaaccaacacactgacctgtgtcagtcttctgatcctgatgttaagaatgaagatgaaaattctgataaagactgtgagataattgaaatttcagaagatagtcctgtaaacatagatttccatgttaaagaagaggaaagcaatgctttgcagtctacagtagagagtctgacatcagagagaaaggaaatgaagtcaccagagctgtctacagtagacataggttttaaagacaatgaaatttgtatccttcatgtagaatccatcagtacagctggtgtcgaaaatgggcagttttcacagccttgtacctcttcaaaagcaagcatgtatttctctgaaacacagcattcattgatcaattctacagttgagagcagagtggctgaagttcctgggaatcaagatcagggcttattttgtgagaatactgaaggaagttatggtacagtgagtgagattcagaatctggaggaaggttattcactgaggcaccagtgccccaggtgtcctcgaggctttcttcatgttgaaaactatctgcgccaccttaaaatgcataaactattcttatgcttacagtgcggaaaaacatttacacagaagaaaaatctcaaccgacacatccgaggacacatgggcatacggccctttcagtgtactgtgtgcttgaagacatttactgccaaaagcacacttcaggaccacttgaacatacacagtggggatcggccatacaaatgccactgttgtgatatggatttcaagcacaagtctgctctcaaaaagcacttaacctctgtccatggcagaagcagtggtgaaaaactatctaggcctgatctcaaaaggcaaagtctactataattataatcacagacttgttatataaagtttgtattattctattacgcaagtctttctgtagagatgcagcatttgtaatatttcatccccccaatctttgtttcttatattttgtcggcttacacataatcattctttctgaacttctaacagttccaaagttatgggaggcacagtaaagctgatgggattctgtctcatctcataccttacatataagtctcagtagtatccctagagaaatagtgttcctctcttatatattcttgattctagtgacaaaggatccagcagtatttgcagattccgatttggagtctctaggtaattgatttaagtataaaatccaatcatataaaaactttaatgaattaggataacaagaagagaaaataaaggtaaaaacactattacctgtttctagtcactttagaacagatggcactaaaaaaatttttttttaactttttaccagctgttcttggattccaaactaaacaccaagatacttttcattttaaaatgtataaagtaacaattcagattcacttgggaatagcagaatttttttatacagggttaataatccttaaaatacttttatttccatgccttattagtatacatacttaagaaatggttcattgggcccgagtttcttgattttatttaatacaatcggatttaataattttgtggccagtaaaattataccattggcatgaagctgtgaaaaatgagaaattctacctttaccagggatatctgttctactgttttaaaagttcctctctattttattttttatttaacatgaagtaaaattgaaatttcttcttggtgtatagttctgtgaattttaacagaaagatttgtgcaccactactgcagtcggtacagaacagttccttcactcccaatagctctcttatgctgtccctttgtagtcagctccttctagctctaatcctggcaacagttctccgtcactattattttgccttttctggactgtcatataaacagaatcttatagtacgttccctcttgaaatgctttttcacccagcataatgactttgaggttcatccatgtcattttaaattttgaattggcaatatatattctagctgttactagatgagcaatttaaaaaggtgtagctattagtgttgtattttttcatttacattaatgtaatttccattcactatgtgttgataaaaatcttaaccatccctagagttttatatttccaaaaatatgccaaaaggaaaactatgactgtatgattattttagcgagagtcatatttgagatggtgttctgagccatagttctctaacatctccgtctacatataacacaaaacttttataaattattttaacaaagattaaaatatactgcagggcaaataatattctctaaaacacaggaactgcttttcgtaaagaagactgactagatgcatctttctttgaagctgttctagtcctcctctagttaacttagctttatgtagaatttctactgtatttaatttctattgaagcccttctgtattttaaaatgtaatatactttgtaccatttataaaaattgtgtgatgaatgaatcacatgttcgttgttataagtgttaacctttttttgacaattttgtgggaaagacattctccactgaattttaactttccttgagactttcaagaatgcaggtctcgtttgatgaaaaaaccgacttcataacccaatgttactagttagcgacattgtgctgaatttctccttgaactttttaactttatatgtaaaataactttgatcttggtcatttgaaagatcatttccaggtctaaaattccatgattttgtatttaattcttcctgagaacagaagaggggaaagcaagagaggacggttttgtgtctttatgaactttgttacttaagtactccattggagacataatttttctaattagtggatctttttccactggaaagtgtgatagctcattgctaatttttcattcatagttcattgcttccatttgacctaagattggccatttgttggtgtgaaaatattttcttttcagaaatagtttactagtgattgaagtacttttcttatttttgcttcctattataaaatggcgtggggggaagggggaaggatggagatgggaggagagggtaaaagaatagtactctgattttttaagaattagtatctactatcttggatatttgaaaaaaaattggttgaaactatgtttaagttttatgtgtgccttgtaagattgttgtaaaattttttgtgagcactttgagatttttgctgggggaggggtgttttgtgaaagtgatggttattatttatattatttattcctgttcagtagcacggaatgatctccaaacattcctaggagagtgtctgtttgcatgatatgtctaaaaattttcaggaaaatggaatctttttttaaagttcaggtatgacaaagtatagaatttattcatttaacatattcacatttagtttatgtttctgatatgacagaaaaatgaaaagtgtttgagttcagcctcttcatttactccatttacatataaaagatcttgaaaaggtagttgttacttcgttgtcagagaaaaacacttgccctttttcctgggatgtaactatcttacatgtttacataagaaataataaactggaggtgggaatgga

SEQ ID NO: 201083 - DNA, 5422 bp, Homo sapiens
  Payload ID: 19695
  Gene Name: zinc finger and BTB domain containing 7A
  Uniprot ID: O95365
  ENST ID: ENST00000322357
  CDS Start-End: 280-2034
ggcggctgcggcacctttaagacaagggaggacccctcttgccctcggagaaaccaggaagggagtcgcgagcatcatacggggctttggctgtactgtacagttactgtaggggcagtgacgccgccgccgccgcgcgagggagcgaccagggcagcgcgacgcgggcagagcgagcgccgcggaccccggaggcgagcggccgagggagcccagtcccaacttcgggccccggccccgcgcgccccggcccggccccgcgaggtctcggcgcggaagatggccggcggcgtggacggccccatcgggatcccgttccccgaccacagcagcgacatcctgagtgggctgaacgagcagcggacgcagggcctgctgtgcgacgtggtgatcctggtggagggccgcgagttccccacgcaccgctcggtgctggccgcctgcagccagtacttcaagaagctgttcacgtcgggcgccgtggtggaccagcagaacgtgtacgagatcgacttcgtcagcgccgaggcgctcaccgcgctcatggacttcgcctacacggccacgctcaccgtcagcacagccaacgtgggtgacatcctcagcgccgcccgcctgctggagatccccgccgtgagccacgtgtgcgccgacctcctggaccggcagatcctggcggccgacgcgggcgccgacgccgggcagctggaccttgtagatcaaattgatcagcgcaacctcctccgcgccaaggagtacctcgagttcttccagagcaaccccatgaacagcctgccccccgcggccgccgccgccgctgccagcttcccgtggtccgcctttggggcgtccgatgatgacctggatgccaccaaggaggccgtggccgccgctgtggccgccgtggccgcgggcgactgcaacggcttagacttctatgggccgggccccccggccgagcggcccccgacgggggacggggacgagggcgacagcaacccgggtctgtggccagagcgggatgaggacgcccccaccgggggtctctttccgccgccggtggccccgccggccgccacgcagaacggccactacggccgcggcggagaggaggaggccgcctcgctgtcggaggcggcccccgagccgggcgactctccgggcttcctgtcgggagcggccgagggcgaggacggggacgggcccgacgtggacgggctggcggccagcacgctgctgcagcagatgatgtcatcggtgggccgggcgggggccgcggcgggggacagcgacgaggagtcgcgggccgacgacaagggcgtcatggactactacctgaagtacttcagcggcgcccacgacggcgacgtctacccggcctggtcgcagaaggtggagaagaagatccgagccaaggccttccagaagtgccccatctgcgagaaggtcatccagggcgccggcaagctgccgcgacacatccgcacccacacgggcgagaagccctacgagtgcaacatctgcaaggtccgcttcaccaggcaggacaagctgaaggtgcacatgcggaagcacacgggcgagaagccgtacctgtgccagcagtgcggcgccgcctttgcccacaactacgacctgaagaaccacatgcgcgtgcacacgggcctgcgcccctaccagtgcgacagctgctgcaagaccttcgtccgctccgaccacctgcacagacacctcaagaaagacggctgcaacggcgtcccctcgcgccgcggccgcaagccccgcgtccggggcggggcgcccgaccccagcccgggggccaccgcgacccccggcgcccccgcccagcccagctcccccgacgcccggcgcaacggccaggagaagcactttaaggacgaggacgaggacgaggacgtggccagccccgacggcttgggccggttgaatgtagcgggcgccggtggaggaggtgacagcggaggtggccccggggccgccaccgacggtaacttcacagccggactcgcctaaaaaccaaaaagagaaaacagaaacccgagaaagagagagacagagagagagaaaaaaaatcacccaccacccccccaaaaacacaaaaaaagaaaatctatctatatacagatatctatatctatatatatatatacagatatatatatatgacgcgtcacagaatctagggtagcgctttctcagatttccctcctttctgacgtttttctccctccgcaggggccccggccctccctggctccccttccccccaccaccccatcgctgggtttcggggcttggtttggggttttttgtaggacacaaggaatccgagaccccgcacagccccctgggcacccggcatggggcctggggcccgatccgaggccctgggctggggggagggtagacgtgggggcgctggggggggactggggtgggcttttaatttcctcccctcgctggtttctatgagtctttcagacaagaccttaaatgatttctgtctgctctgagcggacgttaaaatgggcccccgtcccccgacccgcaccctccttcctcagggcacttactaagggaggggtctccctctccatctccccagtggcctccccgcctccaaccctgcctgcggcctccccccgtcgcccaccccacgtctcctggccactgagacacaaacctatttatttctaggcctggagaaaggagatcggactggggttcccggtggggcgccaggatggctcctgggggtgctcctgccgccttccttcacggcacttacaaccggcgggacccccagggaccacccctcagggcgcccccccacccccgcccggtccacctagacccccacgtttggagattcaaaacttctgtcttcgtcctctcccccgagccccctctcccaaatttttaaagcactttttagatttttttttctctttcctccttaaaaacaaaatttatatatagatatatatatatatataaataatatacttttcctcagaggagcaggcaacagtgtgggataaacagagtcacgatcagaggaaccccagggtctggtgatggcagggatggggggagagagagaaaatccacaaattccaatgtcacaaaagcaataaaacaaactagaaaaaaaaaaggttttacaaaatgaaaggaaggaaaaaaaaaaaggcaaccaaccacattagaagtcttggcactttgtaacggaacgggtactacactttatcttaattcttaatttaaaaacatgtttacaagttacaaccaacttctatgaaaagttgaaaagacaaaaaaaaaaaaaaaaagcgagcgagagagagagcgagagagagagcgagagcagaagaaattcctaaaagtcgatttatttttgtacaaaataataaaaaaaaaaacccaccacaaacgtagaatccacttctgttccccaaaaagcgagaaggggggttcaggaggaagccatcgcaggggacctgggagacgccccgaggtgtttgtgcttcacccccagacgtcagcctcgaaggcaggactgtggggtgttcgtgctgtgttccccccgctccccctttctgtccccttttttggttctgacgtgaagaggtcttagcgcccgcttctgtccacggggtctctccttcctcctccctagctcagggatgggccttccagccggagcaccccgatccccatccggcaccccccaatcccccaacacgcctgtccctcccgcatggccaccaaggagctggaccttggatgcgcctaccctgctgaggtgggtgacaggggccccccacctccagggccttagaaccaccgcccctctccccaccccaggcacccctctttttactcaaaggcactgactgtaatccagggggactgggacctgcctccccccaacctctggctcccacaaggcccggtgttgaccgagccacaggccacggacaggggccggggttggggagactatgtcgccagatgccaggacgccctcaccccgtttgcatatgcaatgctagcatgggaccccgaaaatagacgctctgctgcactgagacttcttgtcaatgcccaaccggcgggggggtgtctccctgcccccgacccccccatacccccttctctgtgacacacacatcttctcgtctctttttctttcattgttaaagggaagctttttaagaaggcaattttcatattgtttctacaggatggttttggttcccttcccttcccacccccccttaagcctgtcagccccctccaaatgtctcaggatcccccctctcccctggggctgggtgacagcaccccggctgcgttcacaccccagtgtcacagggcgagctgttctggagagaaaaccatctgtcgtggctgagcggggagcttgaacacccaggccagggacacccctccccagctcccagagaggccccctgaggggtgagccctctttccaccttcccctatccatgcaccccctcgcaataaaaccaactctaaaatcacagctgtcgtcctagccagtgggggcgaccggacttggggggtggagccctctgggacttccgtaggaacaagggctgcggcccaccgcgacacttacacagacctcggggattgcactaaaccctcgttcctagctccgcactcagcttcgcctgtcctgcccgcccactttgccttaactacccgcccgtcctgggggccacagcctctgcatgggcccagagccgggacccccccagcccagccccgccctccccagactccgcgcaatcacatactgtatatagacgtgaatcgattttatttttattctttaaattaaggtcgtgataaagtgttgccaaagatacctgctgaattctcgcgtttcaggaaacaaacaaacaaaaaaaaatgatatttgaggagggtcgtgttgactccatatgaaaggacacagctcaaagcttttttgtttggttgtttggggttttttgtgttttctttttttggggtgttttttttttaactgcctggtacaaaaaaaaaaagagaaaaaaaaaaaagaaaaacaatgcgaaattgttatttccattctcatggtgaagttgcgtggacgcgtgtgtgcgtgtgtgcaagagagcgggagtgaggtccaggctggggttggggggcttcaggcgggggcgcccgggggccggggaggtggccgggccggagcccccgtctgcagtgccccccagcctgccgggcccaggagagagagagaagcatctttgctactagctgttgctgctacctgcctctgccccccgacgccccccgccttttgagattaaggaaaaaaaaaaaaagtcaaaaaagtttttaaaaa

SEQ ID NO: 201084 - DNA, 2083 bp, Homo sapiens
  Payload ID: 19695
  Gene Name: zinc finger and BTB domain containing 7A
  Uniprot ID: O95365
  ENST ID: ENST00000601588
  CDS Start-End: 319-2073
tccccgcgctccccggggagggcggcggcccgggcggccgcgcggtgcaggcgagcccggggatgcgcggcctagcgcaggccgggcccgggcgtgggggaggcgggcgggcggacccagatccggggtaatttgcatcgccctccccccagcccgggtggggattggccgccggcggcggggggtggcgcggggccaggctcactgccgcctcccggcccctcggagggagccagcccagccgcagccgccgccaccgccgccgccggggccgggccccctcgccgctgccccgggaaggaggtctcggcgcggaagatggccggcggcgtggacggccccatcgggatcccgttccccgaccacagcagcgacatcctgagtgggctgaacgagcagcggacgcagggcctgctgtgcgacgtggtgatcctggtggagggccgcgagttccccacgcaccgctcggtgctggccgcctgcagccagtacttcaagaagctgttcacgtcgggcgccgtggtggaccagcagaacgtgtacgagatcgacttcgtcagcgccgaggcgctcaccgcgctcatggacttcgcctacacggccacgctcaccgtcagcacagccaacgtgggtgacatcctcagcgccgcccgcctgctggagatccccgccgtgagccacgtgtgcgccgacctcctggaccggcagatcctggcggccgacgcgggcgccgacgccgggcagctggaccttgtagatcaaattgatcagcgcaacctcctccgcgccaaggagtacctcgagttcttccagagcaaccccatgaacagcctgccccccgcggccgccgccgccgctgccagcttcccgtggtccgcctttggggcgtccgatgatgacctggatgccaccaaggaggccgtggccgccgctgtggccgccgtggccgcgggcgactgcaacggcttagacttctatgggccgggccccccggccgagcggcccccgacgggggacggggacgagggcgacagcaacccgggtctgtggccagagcgggatgaggacgcccccaccgggggtctctttccgccgccggtggccccgccggccgccacgcagaacggccactacggccgcggcggagaggaggaggccgcctcgctgtcggaggcggcccccgagccgggcgactctccgggcttcctgtcgggagcggccgagggcgaggacggggacgggcccgacgtggacgggctggcggccagcacgctgctgcagcagatgatgtcatcggtgggccgggcgggggccgcggcgggggacagcgacgaggagtcgcgggccgacgacaagggcgtcatggactactacctgaagtacttcagcggcgcccacgacggcgacgtctacccggcctggtcgcagaaggtggagaagaagatccgagccaaggccttccagaagtgccccatctgcgagaaggtcatccagggcgccggcaagctgccgcgacacatccgcacccacacgggcgagaagccctacgagtgcaacatctgcaaggtccgcttcaccaggcaggacaagctgaaggtgcacatgcggaagcacacgggcgagaagccgtacctgtgccagcagtgcggcgccgcctttgcccacaactacgacctgaagaaccacatgcgcgtgcacacgggcctgcgcccctaccagtgcgacagctgctgcaagaccttcgtccgctccgaccacctgcacagacacctcaagaaagacggctgcaacggcgtcccctcgcgccgcggccgcaagccccgcgtccggggcggggcgcccgaccccagcccgggggccaccgcgacccccggcgcccccgcccagcccagctcccccgacgcccggcgcaacggccaggagaagcactttaaggacgaggacgaggacgaggacgtggccagccccgacggcttgggccggttgaatgtagcgggcgccggtggaggaggtgacagcggaggtggccccggggccgccaccgacggtaacttcacagccggactcgcctaaaaaccaaaaa

SEQ ID NO: 201085 - DNA, 2129 bp, Homo sapiens
  Payload ID: 19696
  Gene Name: zinc finger and BTB domain containing 7B
  Uniprot ID: O15156
  ENST ID: ENST00000292176
  CDS Start-End: 214-1833
tcacctgtctgaacctcagtttccttgtctgtgaaacagatgatgatcatacttcagagggttctggaagatgaaatgagtgtaaagtactcagaagggtgactggcatgcagtcatccctcaataagtattggctaaagttggtcctctttccccagacccctgtgggctgagcgctcttaatctcccctctacttgactctgcaggagaagatggggagccccgaggatgacctgattgggattccattcccggaccacagcagtgagctcctgagctgcctcaatgagcagcgccagctgggccacctatgtgacctcaccatccggacgcagggccttgaataccgcacccacagggctgtgctagctgcctgtagccactacttcaagaagcttttcactgagggcggtggcggagctgtcatgggggccgggggtagcgggacggccactgggggagcaggggccggtgtgtgtgagctggactttgtagggccagaggcactaggcgccctccttgaatttgcctatacagccacactgaccaccagcagcgccaacatgccagctgtgctccaggctgcccgcctgctggagatcccgtgtgtcatcgctgcttgcatggagattctgcagggcagtgggctagaagctcccagcccggacgaggatgactgtgagcgagcccgccagtatctggaggcctttgccacagccacggcctctggagttcccaatggtgaagacagtcctccacaggtgcccctcccaccacctccgccaccgccacctcggcctgttgcccgccgcagccgcaagccccggaaagctttcctgcaaaccaagggggccagagcaaaccacctagtccctgaggtgcccacagtgcccgcccatcccttgacctatgaggaggaggaggtggcgggcagagtgggcagcagtgggggcagtgggccgggggacagctacagccctcccacaggaactgcctcccctcctgagggtccccagagctacgaaccctatgagggtgaggaagaagaagaggagctggtatatcccccagcctatgggctggcgcagggtggcgggcccccgctgtccccagaggagctgggctcagatgaggatgccatcgatcctgacctgatggcctacctaagctccctgcaccaggacaacctggcaccaggcctggacagccaagacaagctggtgcgcaaacgccgctcccagatgcctcaggagtgccctgtctgccacaagatcatccatggggcaggcaaactgcctcgccacatgaggacccacacaggcgagaagccctttgcctgcgaggtctgcggtgttcgattcaccaggaacgacaagctgaagatccacatgcggaagcacacgggagagcgcccctactcatgcccgcactgcccagcccgcttcctgcacagctacgacctcaagaaccacatgcacctgcacacaggggaccggccctatgagtgccacctgtgccacaaggctttcgccaaggaggaccacctgcagcgccacctcaaaggccagaactgcctggaggtgcgcacccgacggcgccgcaaggacgatgcaccaccccactacccaccaccctctaccgctgctgcatcccccgctggcctcgacctctccaatggccacctggacaccttccgcctctctctagctcgattctgggagcagtcagcccccactgggcccccggtctctaccccagggccccctgatgacgatgaggaggaaggggcacccaccacaccccaggctgaaggtgccatggagtcctcttaaagagggacgagggccagactgaagcagcacaaggccggggacacccatgccaagcagtgggagcacgcaggacagacacagcaggggtctggggcacggagccttgctggcatcagcatcagcccttcctcccagagccctcattccaattccaagctaagaaggtattggggcagaggctccccaaattggggtgatcccccaaggagtgatacatatattgtgtatatatttacagctgtattgtaaaagtggggtccctgtccccagctgctcctggggagtagaagcaataa

SEQ ID NO: 201086 - DNA, 3594 bp, Homo sapiens
  Payload ID: 19696
  Gene Name: zinc finger and BTB domain containing 7B
  Uniprot ID: O15156
  ENST ID: ENST00000368426
  CDS Start-End: 138-1757
agctggaggacaggtgagacagcaggacaggaccggagcagggccccaagcccccgggcctggtgggggacgcgcttcttcccacactgtgagcctcagcagctccagccagcggacccgacggctgagaggagaagatggggagccccgaggatgacctgattgggattccattcccggaccacagcagtgagctcctgagctgcctcaatgagcagcgccagctgggccacctatgtgacctcaccatccggacgcagggccttgaataccgcacccacagggctgtgctagctgcctgtagccactacttcaagaagcttttcactgagggcggtggcggagctgtcatgggggccgggggtagcgggacggccactgggggagcaggggccggtgtgtgtgagctggactttgtagggccagaggcactaggcgccctccttgaatttgcctatacagccacactgaccaccagcagcgccaacatgccagctgtgctccaggctgcccgcctgctggagatcccgtgtgtcatcgctgcttgcatggagattctgcagggcagtgggctagaagctcccagcccggacgaggatgactgtgagcgagcccgccagtatctggaggcctttgccacagccacggcctctggagttcccaatggtgaagacagtcctccacaggtgcccctcccaccacctccgccaccgccacctcggcctgttgcccgccgcagccgcaagccccggaaagctttcctgcaaaccaagggggccagagcaaaccacctagtccctgaggtgcccacagtgcccgcccatcccttgacctatgaggaggaggaggtggcgggcagagtgggcagcagtgggggcagtgggccgggggacagctacagccctcccacaggaactgcctcccctcctgagggtccccagagctacgaaccctatgagggtgaggaagaagaagaggagctggtatatcccccagcctatgggctggcgcagggtggcgggcccccgctgtccccagaggagctgggctcagatgaggatgccatcgatcctgacctgatggcctacctaagctccctgcaccaggacaacctggcaccaggcctggacagccaagacaagctggtgcgcaaacgccgctcccagatgcctcaggagtgccctgtctgccacaagatcatccatggggcaggcaaactgcctcgccacatgaggacccacacaggcgagaagccctttgcctgcgaggtctgcggtgttcgattcaccaggaacgacaagctgaagatccacatgcggaagcacacgggagagcgcccctactcatgcccgcactgcccagcccgcttcctgcacagctacgacctcaagaaccacatgcacctgcacacaggggaccggccctatgagtgccacctgtgccacaaggctttcgccaaggaggaccacctgcagcgccacctcaaaggccagaactgcctggaggtgcgcacccgacggcgccgcaaggacgatgcaccaccccactacccaccaccctctaccgctgctgcatcccccgctggcctcgacctctccaatggccacctggacaccttccgcctctctctagctcgattctgggagcagtcagcccccactgggcccccggtctctaccccagggccccctgatgacgatgaggaggaaggggcacccaccacaccccaggctgaaggtgccatggagtcctcttaaagagggacgagggccagactgaagcagcacaaggccggggacacccatgccaagcagtgggagcacgcaggacagacacagcaggggtctggggcacggagccttgctggcatcagcatcagcccttcctcccagagccctcattccaattccaagctaagaaggtattggggcagaggctccccaaattggggtgatcccccaaggagtgatacatatattgtgtatatatttacagctgtattgtaaaagtggggtccctgtccccagctgctcctggggagtagaagcaataatgtatttctaatttgtgggtcccacttcggctatgcgggtttctagggggtgggggcttgggaccaaagccttgccccgcccctatgccccttgggggttttggctgtgtaagggggtgaaggactgcccctccctttcgagacccctccttcctggtttctgttcctttttcctggcagtgaattatgcaaagggggccggcaaaggaagggtaggtgggggaaagccaggtggaagcttgaaagactgggggactgggcctgtaaggaaggagccatcccagtccccctccgccctgctcccggcgctgagtcatggggtcgtggagaagggggcggggtggcctgattggctcgcctgcccctgggggcagtagaggggccccgcccagctaggggagccgctccgttccactcccctccctagccctccctccccacggccctgggcagggaatgtcttgttcccgccgctccctccccggggccagagggcagggcgggccgggcggcgtcctaccctcttctcctcctccccatctcctccccgcccaggtgcgagccggagccgccgccaccgctgccgcccctgactcacgccgcccccgggctggcgcagcgaagggtgtgggacagggtaaggggttggaagagccttgtggagagcgggcgagccggcgccatctggcggccatgctctgagtgggcgagcgccccccgcggccactggagcgagctgtcttcacgctcctcatccaccccagctggtgagcggcgcccccttgccaaggcagtgggcacagaacttctcgcttggccgcaggggaaggggctgcggacctgtgggaaagtgatccccttcccagatccttgccagccgggcttcctgtcaggcaggggagaataatccccactctgctcttaggattgaatccacccccattctgtacatagcctcttctgttggtcttgttgaaatctagtttcagatttttaactacccaattctgctgggggtgggggacacccccccttcctcgctgggtgctggaccccttttgcagcctgggctctgccttgcactatttccccttcctggcctgacggctcctccccctccttaaaaggggcaggttcaggggcccggtgctcttcctcccttccatgcacccccatgcccatttgcacagctgcccaggtacccctaacagtggggaggggtcacagggagggggtagcgggaccagtccctgttatctatttaaaaagtgatgatgtaatatattggggtggcggggagatcgggttgtcctgggcctcatcttagcatttcaggtgatggggggagcccagggctggggagacctggggcccagccccagaaagtggggacaatgtggcctcccttctccctactttcggctttcccagtcagtgccttagggggagaggcactccccccctcctattcccttccccccaccccaactcccccacctcgggtgtaagcgacaggaagaaataataataatttaagattc

SEQ ID NO: 201087 - DNA, 4017 bp, Homo sapiens
  Payload ID: 19696
  Gene Name: zinc finger and BTB domain containing 7B
  Uniprot ID: O15156
  ENST ID: ENST00000417934
  CDS Start-End: 459-2180
agggaggggagggatggggggaaagcaagctggaggacaggtgagacagcaggacaggtgaggcgggccctgaggggggggcgggtgggagccaggtgaatgtacggctcttggcggccgagggggggcgggcggcaggaggaggcagagggcggcggaggaggagccccccagcagcgagcggcgagcaactgaccgcggccttctgaccaggaccggagcagggccccaagcccccgggcctggtgggggacgcgcttcttcccacactgtgagcctcagcagctccagccagcggacccgacggctgagaggagccccagaaccaggactgggggatttggagctgggcagagacttaacccccacagcaccgggaagcagccaactcccctcgcctccttcccccttcgtggcttgcggtctctcttccccgcctcggcccccaggaagtgaagatgttacagcctggtcctcatcctccctcaccccaagctgctgctcctggagaagcctggccaggcccctctcaggctccctggcagagcctagaggagaagatggggagccccgaggatgacctgattgggattccattcccggaccacagcagtgagctcctgagctgcctcaatgagcagcgccagctgggccacctatgtgacctcaccatccggacgcagggccttgaataccgcacccacagggctgtgctagctgcctgtagccactacttcaagaagcttttcactgagggcggtggcggagctgtcatgggggccgggggtagcgggacggccactgggggagcaggggccggtgtgtgtgagctggactttgtagggccagaggcactaggcgccctccttgaatttgcctatacagccacactgaccaccagcagcgccaacatgccagctgtgctccaggctgcccgcctgctggagatcccgtgtgtcatcgctgcttgcatggagattctgcagggcagtgggctagaagctcccagcccggacgaggatgactgtgagcgagcccgccagtatctggaggcctttgccacagccacggcctctggagttcccaatggtgaagacagtcctccacaggtgcccctcccaccacctccgccaccgccacctcggcctgttgcccgccgcagccgcaagccccggaaagctttcctgcaaaccaagggggccagagcaaaccacctagtccctgaggtgcccacagtgcccgcccatcccttgacctatgaggaggaggaggtggcgggcagagtgggcagcagtgggggcagtgggccgggggacagctacagccctcccacaggaactgcctcccctcctgagggtccccagagctacgaaccctatgagggtgaggaagaagaagaggagctggtatatcccccagcctatgggctggcgcagggtggcgggcccccgctgtccccagaggagctgggctcagatgaggatgccatcgatcctgacctgatggcctacctaagctccctgcaccaggacaacctggcaccaggcctggacagccaagacaagctggtgcgcaaacgccgctcccagatgcctcaggagtgccctgtctgccacaagatcatccatggggcaggcaaactgcctcgccacatgaggacccacacaggcgagaagccctttgcctgcgaggtctgcggtgttcgattcaccaggaacgacaagctgaagatccacatgcggaagcacacgggagagcgcccctactcatgcccgcactgcccagcccgcttcctgcacagctacgacctcaagaaccacatgcacctgcacacaggggaccggccctatgagtgccacctgtgccacaaggctttcgccaaggaggaccacctgcagcgccacctcaaaggccagaactgcctggaggtgcgcacccgacggcgccgcaaggacgatgcaccaccccactacccaccaccctctaccgctgctgcatcccccgctggcctcgacctctccaatggccacctggacaccttccgcctctctctagctcgattctgggagcagtcagcccccactgggcccccggtctctaccccagggccccctgatgacgatgaggaggaaggggcacccaccacaccccaggctgaaggtgccatggagtcctcttaaagagggacgagggccagactgaagcagcacaaggccggggacacccatgccaagcagtgggagcacgcaggacagacacagcaggggtctggggcacggagccttgctggcatcagcatcagcccttcctcccagagccctcattccaattccaagctaagaaggtattggggcagaggctccccaaattggggtgatcccccaaggagtgatacatatattgtgtatatatttacagctgtattgtaaaagtggggtccctgtccccagctgctcctggggagtagaagcaataatgtatttctaatttgtgggtcccacttcggctatgcgggtttctagggggtgggggcttgggaccaaagccttgccccgcccctatgccccttgggggttttggctgtgtaagggggtgaaggactgcccctccctttcgagacccctccttcctggtttctgttcctttttcctggcagtgaattatgcaaagggggccggcaaaggaagggtaggtgggggaaagccaggtggaagcttgaaagactgggggactgggcctgtaaggaaggagccatcccagtccccctccgccctgctcccggcgctgagtcatggggtcgtggagaagggggcggggtggcctgattggctcgcctgcccctgggggcagtagaggggccccgcccagctaggggagccgctccgttccactcccctccctagccctccctccccacggccctgggcagggaatgtcttgttcccgccgctccctccccggggccagagggcagggcgggccgggcggcgtcctaccctcttctcctcctccccatctcctccccgcccaggtgcgagccggagccgccgccaccgctgccgcccctgactcacgccgcccccgggctggcgcagcgaagggtgtgggacagggtaaggggttggaagagccttgtggagagcgggcgagccggcgccatctggcggccatgctctgagtgggcgagcgccccccgcggccactggagcgagctgtcttcacgctcctcatccaccccagctggtgagcggcgcccccttgccaaggcagtgggcacagaacttctcgcttggccgcaggggaaggggctgcggacctgtgggaaagtgatccccttcccagatccttgccagccgggcttcctgtcaggcaggggagaataatccccactctgctcttaggattgaatccacccccattctgtacatagcctcttctgttggtcttgttgaaatctagtttcagatttttaactacccaattctgctgggggtgggggacacccccccttcctcgctgggtgctggaccccttttgcagcctgggctctgccttgcactatttccccttcctggcctgacggctcctccccctccttaaaaggggcaggttcaggggcccggtgctcttcctcccttccatgcacccccatgcccatttgcacagctgcccaggtacccctaacagtggggaggggtcacagggagggggtagcgggaccagtccctgttatctatttaaaaagtgatgatgtaatatattggggtggcggggagatcgggttgtcctgggcctcatcttagcatttcaggtgatggggggagcccagggctggggagacctggggcccagccccagaaagtggggacaatgtggcctcccttctccctactttcggctttcccagtcagtgccttagggggagaggcactccccccctcctattcccttccccccaccccaactcccccacctcgggtgtaagcgacaggaagaaataataataatttaagattc

SEQ ID NO: 201088 - DNA, 3777 bp, Homo sapiens
  Payload ID: 19696
  Gene Name: zinc finger and BTB domain containing 7B
  Uniprot ID: O15156
  ENST ID: ENST00000535420
  CDS Start-End: 321-1940
agggaggggagggatggggggaaagcaagctggaggacaggtgagacagcaggacaggtgaggcgggccctgaggggggggcgggtgggagccaggtgaatgtacggctcttggcggccgagggggggcgggcggcaggaggaggcagagggcggcggaggaggagccccccagcagcgagcggcgagcaactgaccgcggccttctgaccaggaccggagcagggccccaagcccccgggcctggtgggggacgcgcttcttcccacactgtgagcctcagcagctccagccagcggacccgacggctgagaggagaagatggggagccccgaggatgacctgattgggattccattcccggaccacagcagtgagctcctgagctgcctcaatgagcagcgccagctgggccacctatgtgacctcaccatccggacgcagggccttgaataccgcacccacagggctgtgctagctgcctgtagccactacttcaagaagcttttcactgagggcggtggcggagctgtcatgggggccgggggtagcgggacggccactgggggagcaggggccggtgtgtgtgagctggactttgtagggccagaggcactaggcgccctccttgaatttgcctatacagccacactgaccaccagcagcgccaacatgccagctgtgctccaggctgcccgcctgctggagatcccgtgtgtcatcgctgcttgcatggagattctgcagggcagtgggctagaagctcccagcccggacgaggatgactgtgagcgagcccgccagtatctggaggcctttgccacagccacggcctctggagttcccaatggtgaagacagtcctccacaggtgcccctcccaccacctccgccaccgccacctcggcctgttgcccgccgcagccgcaagccccggaaagctttcctgcaaaccaagggggccagagcaaaccacctagtccctgaggtgcccacagtgcccgcccatcccttgacctatgaggaggaggaggtggcgggcagagtgggcagcagtgggggcagtgggccgggggacagctacagccctcccacaggaactgcctcccctcctgagggtccccagagctacgaaccctatgagggtgaggaagaagaagaggagctggtatatcccccagcctatgggctggcgcagggtggcgggcccccgctgtccccagaggagctgggctcagatgaggatgccatcgatcctgacctgatggcctacctaagctccctgcaccaggacaacctggcaccaggcctggacagccaagacaagctggtgcgcaaacgccgctcccagatgcctcaggagtgccctgtctgccacaagatcatccatggggcaggcaaactgcctcgccacatgaggacccacacaggcgagaagccctttgcctgcgaggtctgcggtgttcgattcaccaggaacgacaagctgaagatccacatgcggaagcacacgggagagcgcccctactcatgcccgcactgcccagcccgcttcctgcacagctacgacctcaagaaccacatgcacctgcacacaggggaccggccctatgagtgccacctgtgccacaaggctttcgccaaggaggaccacctgcagcgccacctcaaaggccagaactgcctggaggtgcgcacccgacggcgccgcaaggacgatgcaccaccccactacccaccaccctctaccgctgctgcatcccccgctggcctcgacctctccaatggccacctggacaccttccgcctctctctagctcgattctgggagcagtcagcccccactgggcccccggtctctaccccagggccccctgatgacgatgaggaggaaggggcacccaccacaccccaggctgaaggtgccatggagtcctcttaaagagggacgagggccagactgaagcagcacaaggccggggacacccatgccaagcagtgggagcacgcaggacagacacagcaggggtctggggcacggagccttgctggcatcagcatcagcccttcctcccagagccctcattccaattccaagctaagaaggtattggggcagaggctccccaaattggggtgatcccccaaggagtgatacatatattgtgtatatatttacagctgtattgtaaaagtggggtccctgtccccagctgctcctggggagtagaagcaataatgtatttctaatttgtgggtcccacttcggctatgcgggtttctagggggtgggggcttgggaccaaagccttgccccgcccctatgccccttgggggttttggctgtgtaagggggtgaaggactgcccctccctttcgagacccctccttcctggtttctgttcctttttcctggcagtgaattatgcaaagggggccggcaaaggaagggtaggtgggggaaagccaggtggaagcttgaaagactgggggactgggcctgtaaggaaggagccatcccagtccccctccgccctgctcccggcgctgagtcatggggtcgtggagaagggggcggggtggcctgattggctcgcctgcccctgggggcagtagaggggccccgcccagctaggggagccgctccgttccactcccctccctagccctccctccccacggccctgggcagggaatgtcttgttcccgccgctccctccccggggccagagggcagggcgggccgggcggcgtcctaccctcttctcctcctccccatctcctccccgcccaggtgcgagccggagccgccgccaccgctgccgcccctgactcacgccgcccccgggctggcgcagcgaagggtgtgggacagggtaaggggttggaagagccttgtggagagcgggcgagccggcgccatctggcggccatgctctgagtgggcgagcgccccccgcggccactggagcgagctgtcttcacgctcctcatccaccccagctggtgagcggcgcccccttgccaaggcagtgggcacagaacttctcgcttggccgcaggggaaggggctgcggacctgtgggaaagtgatccccttcccagatccttgccagccgggcttcctgtcaggcaggggagaataatccccactctgctcttaggattgaatccacccccattctgtacatagcctcttctgttggtcttgttgaaatctagtttcagatttttaactacccaattctgctgggggtgggggacacccccccttcctcgctgggtgctggaccccttttgcagcctgggctctgccttgcactatttccccttcctggcctgacggctcctccccctccttaaaaggggcaggttcaggggcccggtgctcttcctcccttccatgcacccccatgcccatttgcacagctgcccaggtacccctaacagtggggaggggtcacagggagggggtagcgggaccagtccctgttatctatttaaaaagtgatgatgtaatatattggggtggcggggagatcgggttgtcctgggcctcatcttagcatttcaggtgatggggggagcccagggctggggagacctggggcccagccccagaaagtggggacaatgtggcctcccttctccctactttcggctttcccagtcagtgccttagggggagaggcactccccccctcctattcccttccccccaccccaactcccccacctcgggtgtaagcgacaggaagaaataataataatttaagattc

SEQ ID NO: 201089 - DNA, 4818 bp, Homo sapiens
  Payload ID: 19697
  Gene Name: zinc finger and BTB domain containing 7C
  Uniprot ID: A1YPR0
  ENST ID: ENST00000535628
  CDS Start-End: 372-2231
gctcctccaccgcccttgcctttatttctgctttaccttttccaaagatcttaatttggtgtcataaagtgaagcgtaacgcgcgagtggtgagatcgtcctgtcctgcgcttaacagtacaggtggaccaaaggggctcccggccaaatacttctggttggagggtggggagggagtgctctctcaaaaccactcctggaatggcttaactcgcccagcacgaatcaatgacaacctcccgccggctgcggcaggctcccgcgagcagcgcggccgcgtggattcccagcccgggaccctggcggcgctcaggacacggcccgggcacgagcgcggcgtccccggggcggccagggctctggctgagaacatggccaatgacattgatgagctcattggcattcccttccccaaccacagcagtgaggtcctgtgcagcctcaatgagcaacggcacgatggcctgctgtgtgacgtgctcctggtggtgcaggagcaggagtatcggacccaccgctccgtcctggctgcctgcagcaagtacttcaagaagcttttcacagccggcaccctagccagccagccctacgtctatgagatcgactttgtccagcctgaggctctggctgctatcctggagttcgcctacacctccacgctcaccatcaccgctggcaatgtcaagcacatcctcaacgcagccaggatgctggagatccagtgcatcgtgaacgtgtgcctggagatcatggagcctgggggggacgggggggaggaggatgacaaggaggacgatgacgacgacgaagatgatgatgatgaggaggacgaagaggaggaggaggaagaggaggaggatgacgatgatgacacggaggactttgctgaccaagaaaacttgcctgacccccaggacatcagctgccaccaaagcccttccaagacagaccatctcacagagaaggcctattcagacacccccagggacttccctgactccttccaggctggcagtcctggccatctgggggtgatccgggacttctccatcgaatctctgctaagggagaacctgtaccccaaggccaacatccccgacaggagaccctccttgtctccattcgccccggacttctttccacacctctggccaggggacttcggtgcctttgcccagctgcctgagcagcccatggacagtgggccactggatctggtcatcaagaatcggaagatcaaggaggaggagaaggaggagctgcccccacccccaccgccacccttccctaatgacttcttcaaggacatgttccctgacctgccgggggggcctctgggacccatcaaggcggagaacgactacggtgcctatctcaacttcctgagtgccacccacctgggaggcctcttcccaccctggcccctggtagaagagcgcaagctgaagcccaaggcctctcagcagtgccccatctgccacaaagtcatcatgggggccgggaagctgccgcggcacatgaggacccataccggggagaagccatacatgtgcaccatctgcgaggtccgcttcaccaggcaggacaagctgaaaatccacatgcggaagcacacaggggagcggccctacctgtgcatccactgcaacgccaagttcgtgcacaactacgacctcaagaaccacatgcgcatccacacgggcgtgcggccctaccagtgcgagttctgctacaagagcttcacgcgctctgaccacctgcaccgccacatcaagcgccagagctgccgcatggcacggccccgacgcggccgcaagcctgctgcgtggagggccgccagcctgctcttcgggcccggcggcccggcccccgacaaggcggccttcgtgatgccccctgcgctgggcgaggtgggcggccacctgggcggcgcagctgtgtgcctcccgggccccagccccgccaagcacttcctggcagcgcccaagggcgccctgagcctgcaagagctggagcggcagttcgaggagacacagatgaagctgttcgggcgcgcgcagctggaggctgagaggaacgcggggggcctcctggccttcgcgctggccgagaacgtggcggcggcgcggccctacttcccgctgcccgacccttgggccgccggcctggccggcctccctgggctcgccggcctcaaccacgtggcctccatgtccgaagccaacaactaggctggtccctgtcggctccagcccaccagccctccagtccttctccctccaggcccactctaccctaccccatggatctgaacttttcattttaaaaacacaaagggaaaatgggaaaataataataatactatcagtgatggcattttcccgggctcctaaagcagctgcctccttttgctggtctgagacgggcatcttttcccaaaaggccaggagcccgggcctccctccctgtctctctggctctcatatagaaacttgcaccggcccatgccacaaagaactgggtgcccaggggcacttaggagctgggtgagtcatgaggggtcagggggtggttggcctggtgcccagccagccacagcaggaggaggtaggggctgggcatgcaccttggttaagccccaccccctatggcaaagtctctgccaacactcctctgagggctcattttccagtctccagtggccccggggtctttttgagaactacccacctgccacatagaaagaaatgctctgttggcagggaggcctcctggaaccagtcaggaaccaggctctggaaggcccgggccatttcttccctgacctgtcctgtgaccttgacaggtcagccctctgtagctcagtgtcacctggctatggaaggggctggtaactgaggtttccgccctccacctctaaacacatacacacctatccccccagagaatcacagagatggtagaagctttgtactccccaagtccatggggaaacagtttatctttctggacttagttttatcacatccagctctatattagcatattagcataggtgagaaatatggccagactagacagagatcaggtcatcaggggagcttccgagcttcagcaaagcccacaggtagctctgcgaactcagaatgctaccctaccttccctgcaggccgctgttcatgtctggactcctgggggcgctatttaatgtttacccccatctccagtgccccctccaaggctgtgcagtgtcttggggctctcagggccaacatcgaagagatgggggccacctcttaacacctggcaacagtctcccctcatcctgattcctgacaacagacaaaacaccggtttctagggtttatctgtttgttttttgagttgagggttcctcagggccttggcattgctagtgatggtcccctttgctgtgtgagaaccccctcaaccccttcctcctccctctggggatgaagtgggagtatttggctccccatttttgacaaaagggctcagtgcagggaggtggaggcctctgaggtttgaagggctctgtgagttagagttgtcacatgttctcctggttcttgaatttgcagcaggtcctgaaaaggaaggctctgctggccccgtgccttcctgaccttctctctccttccctcccctctcttttcttgccaagtttgctttggtttctgagcagcccagagaggaggagggttcgtccccagggagagcccagggctggagtccccaatccctgtgctatgggcacaaagagacttcagctcttcctgttgccttggctttttcctgagcaaaaacacaacaaacaaaaaggccagagaagagcacagactctgtccctctcacaactctccagaagagaccccctgattcttcacaccaccggatgccactccagccagcaggattgctacacacaccctctgttctcagaagtcatctgcctgggcagccgcctctcagattcctgtcttcgtttcagacacttttctctgaagcatgcccatgtccaccagccaacgtgcccccgtgttcccccccatcagccaagtgattggggctgaaccagactttaaaagagaggaaaaaaaaaaaaaaaggaaacatgaataaattggaatccagtggtgttggggcttttgtttttattttgtaaaggtgatgacttcttataaactcaatttttcagatgactggttagttctttctgttttttcttggctgcagtttggaattgtacattgtaaaatatccaaagatgttgagtactgtatgatcaagaacttgaagcaaatgggttgtggggggaggggtggttgtgtttttgttttgcttcaatttttttttttttttgatgtttcaatttccctgtctgtctgtgggagaactttggaattttttctatttataactctttttttatgtgattgctctacgtaaaatgacactcaacaaagtttgccttagtgattcaagggacaatcttccataacttcggtcgcacgccacatcccgccgagaaaaactctcagctaattttctggcctatttattaaacagtattaattgacttgattaaattatattgagagttgcacttctgtgagatgtgacttctgaaagttcacaggacagcaacaagccagtcttaaggtttttaattgttgggtgtcataaacttaaaataatgtcaaagacaccttaacaaagaaaaaaaaaaaaacctttgacccttattttatactttaaaggacagtgttttgagtaaaagtgagctatgcttgctta

SEQ ID NO: 201090 - DNA, 600 bp, Homo sapiens
  Payload ID: 19697
  Gene Name: zinc finger and BTB domain containing 7C
  ENST ID: ENST00000585404
  CDS Start-End: 526-600
ctgagcagctgggagctcagaagctctgtccaaccctgaggagtgggtcagccacaagagcaagaagtgatggcgtggagtccacccagggcctgaggcatgagcagaatccacgcccattagacctggagcctgggcgtttggggctgcactgctggggagatccaagaagaatcaatgctttggcccctggtgacatgtacatggtgtaatgacaggaaatgagcagatttgcagaaaaactggtgtcctgaaatttaaaactaaggcatcggtgcttgcctgtttctttgacagcccagacttagagcaatgtgtccctcctttgagctcctgaagggccagctgaagactctgtcatttggttggtggaggccaagagaaagggtctcgttctgttgcccaggtgagcctggagtgcagtagtacagtcacagctcactgcagcctcaaactcttgggctcaagagatgttcctgcctcagcctcccaagtagtcgggactacagggctctggctgagaacatggccaatgacattgatgagctcattggcattcccttccccaaccacagcagtgaggtcctgtgcagcctcaat

SEQ ID NO: 201091 - DNA, 574 bp, Homo sapiens
  Payload ID: 19697
  Gene Name: zinc finger and BTB domain containing 7C
  ENST ID: ENST00000590178
  CDS Start-End: 519-574
tcctacctgcaattgctgtgtgtgtgtgtatgtgtacacacacagaacatgaagaactacatccagaagctgcccagaaaggatgcagatcccctctgagcagctgggagctcagaagctctgtccaaccctgaggagtgggtcagccacaagagcaagaagtgatggcgtggagtccacccagggcctgaggcatgagcagaatccacgcccattagacctggagcctgggcgtttggggctgcactgctggggagatccaagaagaatcaatgctttggcccctggtgacatgtacatggtgtaatgacaggaaatgagcagatttgcagaaaaactggtgtcctgaaatttaaaactaaggcatcggtgcttacagagctgctctaagctgtgggccaacaggaggctgggagctctcctctaaattgctttgtgaccttggacaagaaccctccccttcctggactgcaaatttcctcctctgtaaaatgaagggttgggctctggctgagaacatggccaatgacattgatgagctcattggcattcccttccccaaccacagcagtga

SEQ ID NO: 201092 - DNA, 518 bp, Homo sapiens
  Payload ID: 19697
  Gene Name: zinc finger and BTB domain containing 7C
  ENST ID: ENST00000591279
  CDS Start-End: 444-518
aggaggacgccaggactgcgtcccggagccaagtgcgggaggcgcgcagggccggcggcgcgcggagtctcacttcgcgctgtcttttcttgaaaattggaaaatgagctggaaaggctgggatccagcacctctcgatgagatctgagcagagtacagtccttgcccgaggtgtcgctcatgcaggactcaaagatccttgctgctgtcaagtcgggaagctgggggaaatgggcgcacgcacacagttcctccaagcctcggacaagtgaagccgagcctggcccggtgcctgtcgccgcgcggggtagtgcgaggtctgttcccagcgacacgcacgggaactgcgtgcgtcttctctcaaggaaatgagcagatttgcagaaaaactggtgtcctgaaatttaaaactaaggcatcggtgcttggctctggctgagaacatggccaatgacattgatgagctcattggcattcccttccccaaccacagcagtgaggtcctgtgcagcctcaat

SEQ ID NO: 201093 - DNA, 630 bp, Homo sapiens
  Payload ID: 19697
  Gene Name: zinc finger and BTB domain containing 7C
  ENST ID: ENST00000590374
  CDS Start-End: 586-630
tccagaagctgcccagaaaggatgcagatcccctctgagcagctgggagctcagaagctctgtccaaccctgaggagtgggtcagccacaagagcaagaagtgatggcgtggagtccacccagggcctgaggcatgagcagaatccacgcccattagacctggagcctgggcgtttggggctgcactgctggggagatccaagaagaatcaatgctttggcccctggtgacatgtacatggtgtaatgacaggaaatgagcagatttgcagaaaaactggtgtcctgaaatttaaaactaaggcatcggtgcttgtgccaggcagcacctggaagctctgggaaatccacgagaagcagcaggcattggctctgttttggaggagctttcagtccagttcaggaagagaagacacctgcatatgagacaaagaactttatgaccagagctgctctaagctgtgggccaacaggaggctgggagctctcctctaaattgctttgtgaccttggacaagaaccctccccttcctggactgcaaatttcctcctctgtaaaatgaagggttgggctctggctgagaacatggccaatgacattgatgagctcattggcattcccttccccaac

SEQ ID NO: 201094 - DNA, 704 bp, Homo sapiens
  Payload ID: 19697
  Gene Name: zinc finger and BTB domain containing 7C
  ENST ID: ENST00000587107
  CDS Start-End: 630-704
aggaggacgccaggactgcgtcccggagccaagtgcgggaggcgcgcagggccggcggcgcgcggagatcccctctgagcagctgggagctcagaagctctgtccaaccctgaggagtgggtcagccacaagagcaagaagtgatggcgtggagtccacccagggcctgaggcatgagcagaatccacgcccattagacctggagcctgggcgtttggggctgcactgctggggagatccaagaagaatcaatgctttggcccctggtgacatgtacatggtgtaatgacaggaaatgagcagatttgcagaaaaactggtgtcctgaaatttaaaactaaggcatcggtgcttgtgccaggcagcacctggaagctctgggaaatccacgagaagcagcaggcattggctctgttttggaggagctttcagtccagttcaggaagagaagacacctgcatatgagacaaagaactttatgaccagacagagctgctctaagctgtgggccaacaggaggctgggagctctcctctaaattgctttgtgaccttggacaagaaccctccccttcctggactgcaaatttcctcctctgtaaaatgaagggttgggctctggctgagaacatggccaatgacattgatgagctcattggcattcccttccccaaccacagcagtgaggtcctgtgcagcctcaat

SEQ ID NO: 201095 - DNA, 566 bp, Homo sapiens
  Payload ID: 19697
  Gene Name: zinc finger and BTB domain containing 7C
  ENST ID: ENST00000593159
  CDS Start-End: 522-566
tccagaagctgcccagaaaggatgcagatcccctctgagcagctgggagctcagaagctctgtccaaccctgaggagtgggtcagccacaagagcaagaagtgatggcgtggagtccacccagggcctgaggcatgagcagaatccacgcccattagacctggagcctgggcgtttggggctgcactgctggggagatccaagaagaatcaatgctttggcccctggtgacatgtacatggtgtaatgacaggaaatgagcagatttgcagaaaaactggtgtcctgaaatttaaaactaaggcatcggtgcttagctgctctaagctgtgggccaacaggaggctgggagctctcctctaaattgctttgtgaccttggacaagaaccctccccttcctggactgcaaatttcctcctctgtaaaatgaagggttgggaacttaggtgctgtcttggccaagttcagaaacatgtaggacattatggagaagtgttaaagccagggctctggctgagaacatggccaatgacattgatgagctcattggcattcccttccccaac

SEQ ID NO: 201096 - DNA, 397 bp, Homo sapiens
  Payload ID: 19697
  Gene Name: zinc finger and BTB domain containing 7C
  ENST ID: ENST00000592387
  CDS Start-End: 323-397
aggaggacgccaggactgcgtcccggagccaagtgcgggaggcgcgcagggccggcggcgcgcggaggaaatgagcagatttgcagaaaaactggtgtcctgaaatttaaaactaaggcatcggtgcttacagagctgctctaagctgtgggccaacaggaggctgggagctctcctctaaattgctttgtgaccttggacaagaaccctccccttcctggactgcaaatttcctcctctgtaaaatgaagggttgatgcaacaactgaggcatagagaagtcacttgcccaaggtcacccagcagggctctggctgagaacatggccaatgacattgatgagctcattggcattcccttccccaaccacagcagtgaggtcctgtgcagcctcaat

SEQ ID NO: 201097 - DNA, 566 bp, Homo sapiens
  Payload ID: 19697
  Gene Name: zinc finger and BTB domain containing 7C
  ENST ID: ENST00000586743
  CDS Start-End: 492-566
ctgagcagctgggagctcagaagctctgtccaaccctgaggagtgggtcagccacaagagcaagaagtgatggcgtggagtccacccagggcctgaggcatgagcagaatccacgcccattagacctggagcctgggcgtttggggctgcactgctggggagatccaagaagaatcaatgctttggcccctggtgacatgtacatggtgtaatgacaggaaatgagcagatttgcagaaaaactggtgtcctgaaatttaaaactaaggcatcggtgcttacagagctgctctaagctgtgggccaacaggaggctgggagctctcctctaaattgctttgtgaccttggacaagaaccctccccttcctggactgcaaatttcctcctctgtaaaatgaagggttgggaacttaggtgctgtcttggccaagttcagaaacatgtaggacattatggagaagtgttaaagccagggctctggctgagaacatggccaatgacattgatgagctcattggcattcccttccccaaccacagcagtgaggtcctgtgcagcctcaat

SEQ ID NO: 201098 - DNA, 585 bp, Homo sapiens
  Payload ID: 19697
  Gene Name: zinc finger and BTB domain containing 7C
  ENST ID: ENST00000588053
  CDS Start-End: 530-585
acacagaacatgaagaactacatccagaagctgcccagaaaggatgcagatcccctctgagcagctgggagctcagaagctctgtccaaccctgaggagtgggtcagccacaagagcaagaagtgatggcgtggagtccacccagggcctgaggcatgagcagaatccacgcccattagacctggagcctgggcgtttggggctgcactgctggggagatccaagaagaatcaatgctttggcccctggtgacatgtacatggtgtaatgacaggaaatgagcagatttgcagaaaaactggtgtcctgaaatttaaaactaaggcatcggtgcttacagagctgctctaagctgtgggccaacaggaggctgggagctctcctctaaattgctttgtgaccttggacaagaaccctccccttcctggactgcaaatttcctcctctgtaaaatgaagggttgatgcaacaactgaggcatagagaagtcacttgcccaaggtcacccagcagggctctggctgagaacatggccaatgacattgatgagctcattggcattcccttccccaaccacagcagtga

SEQ ID NO: 201099 - DNA, 321 bp, Homo sapiens
  Payload ID: 19697
  Gene Name: zinc finger and BTB domain containing 7C
  ENST ID: ENST00000586047
  CDS Start-End: 266-321
cacacagaaatgaagcaacctgaaggcagctccatggggccgctgtccctgttgttgatgtttctggaatatgggtctaggatcagaagcaaaagaggaagtccattcttttgcactgcagaacattcctacagtggacccaagctgttttgtccttctcagcagctttaagatttctccacatagggaaatgagcagatttgcagaaaaactggtgtcctgaaatttaaaactaaggcatcggtgcttggctctggctgagaacatggccaatgacattgatgagctcattggcattcccttccccaaccacagcagtga

SEQ ID NO: 201100 - DNA, 462 bp, Homo sapiens
  Payload ID: 19697
  Gene Name: zinc finger and BTB domain containing 7C
  ENST ID: ENST00000589077
  CDS Start-End: 388-462
ctgagcagctgggagctcagaagctctgtccaaccctgaggagtgggtcagccacaagagcaagaagtgatggcgtggagtccacccagggcctgaggcatgagcagaatccacgcccattagacctggagcctgggcgtttggggctgcactgctggggagatccaagaagaatcaatgctttggcccctggtgacatgtacatggtgtaatgacaggaaatgagcagatttgcagaaaaactggtgtcctgaaatttaaaactaaggcatcggtgcttgcatggcataggtgacatgaaagcttctgtctccagacccttgtcttcaagaggagtgctggcctgtcaatgagcgtgcctgattaccgtgggctctggctgagaacatggccaatgacattgatgagctcattggcattcccttccccaaccacagcagtgaggtcctgtgcagcctcaat

SEQ ID NO: 201101 - DNA, 546 bp, Homo sapiens
  Payload ID: 19697
  Gene Name: zinc finger and BTB domain containing 7C
  ENST ID: ENST00000590437
  CDS Start-End: 347-546
gacgggctacgtcggagtgttgtcttagattcgaatgcatgaggaactggaataatcagtaacatttctcccagacagagctgctctaagctgtgggccaacaggaggctgggagctctcctctaaattgctttgtgaccttggacaagaaccctccccttcctggactgcaaatttcctcctctgtaaaatgaagggttgagaaagggtctcgttctgttgcccaggtgagcctggagtgcagtagtacagtcacagctcactgcagcctcaaactcttgggctcaagagatgttcctgcctcagcctcccaagtagtcgggactacagggctctggctgagaacatggccaatgacattgatgagctcattggcattcccttccccaaccacagcagtgaggtcctgtgcagcctcaatgagcaacggcacgatggcctgctgtgtgacgtgctcctggtggtgcaggagcaggagtatcggacccaccgctccgtcctggctgcctgcagcaagtacttcaagaagcttttcacagccggcac

SEQ ID NO: 201102 - DNA, 891 bp, Homo sapiens
  Payload ID: 19697
  Gene Name: zinc finger and BTB domain containing 7C
  ENST ID: ENST00000589170
  CDS Start-End: 847-891
tccagaagctgcccagaaaggatgcagcaccccctgcaacctgcaatttggcaccttggaatcttttaataaataaccaaggagacaagaaatggcctctccaaaatgtccacactcaaatccccagaacctctcctctgatggtctgttagccccgctctggggaaaccagccattgagacagaaggaagcagcgcccagtgacactctgcttacccagagaccagcctgcaagcaacctctcctatccagaacacagacacagatggcaaagtcagatcccctctgagcagctgggagctcagaagctctgtccaaccctgaggagtgggtcagccacaagagcaagaagtgatggcgtggagtccacccagggcctgaggcatgagcagaatccacgcccattagacctggagcctgggcgtttggggctgcactgctggggagatccaagaagaatcaatgctttggcccctggtgacatgtacatggtgtaatgacagtgctatgaagaaatggaaggtcaggaaggtggataaactttcccaaaaccacacagctaaaaacatgtttcaacccctgggttgagtccaaagccagtagtgctttgtaacgcagtctcccagttcttctggctaatagaaatgagcagatttgcagaaaaactggtgtcctgaaatttaaaactaaggcatcggtgcttacagagctgctctaagctgtgggccaacaggaggctgggagctctcctctaaattgctttgtgaccttggacaagaaccctccccttcctggactgcaaatttcctcctctgtaaaatgaagggttgggctctggctgagaacatggccaatgacattgatgagctcattggcattcccttccccaac

SEQ ID NO: 201103 - DNA, 467 bp, Homo sapiens
  Payload ID: 19697
  Gene Name: zinc finger and BTB domain containing 7C
  ENST ID: ENST00000588566
  CDS Start-End: 423-467
tccagaagctgcccagaaaggatgcagaagaggtggccttctccagaaagattttaaagtgggctctatttgtgtgttcgtaaacatcctctgatggcttctaggaactggacactgagatcccctctgagcagctgggagctcagaagctctgtccaaccctgaggagtgggtcagccacaagagcaagaagtgatggcgtggagtccacccagggcctgaggcatgagcagaatccacgcccattagacctggagcctgggcgtttggggctgcactgctggggagatccaagaagaatcaatgctttggcccctggtgacatgtacatggtgtaatgacaggaaatgagcagatttgcagaaaaactggtgtcctgaaatttaaaactaaggcatcggtgcttggctctggctgagaacatggccaatgacattgatgagctcattggcattcccttccccaac

SEQ ID NO: 201104 - DNA, 430 bp, Homo sapiens
  Payload ID: 19697
  Gene Name: zinc finger and BTB domain containing 7C
  ENST ID: ENST00000591405
  CDS Start-End: 375-430
gtgtgtgtgtgtatgtgtacacacacagaacatgaagaactacatccagaagctgcccagaaaggatgcagatcccctctgagcagctgggagctcagaagctctgtccaaccctgaggagtgggtcagccacaagagcaagaagtgatggcgtggagtccacccagggcctgaggcatgagcagaatccacgcccattagacctggagcctgggcgtttggggctgcactgctggggagatccaagaagaatcaatgctttggcccctggtgacatgtacatggtgtaatgacaggaaatgagcagatttgcagaaaaactggtgtcctgaaatttaaaactaaggcatcggtgcttggctctggctgagaacatggccaatgacattgatgagctcattggcattcccttccccaaccacagcagtga

SEQ ID NO: 201105 - DNA, 4947 bp, Homo sapiens
  Payload ID: 19697
  Gene Name: zinc finger and BTB domain containing 7C
  Uniprot ID: A1YPR0
  ENST ID: ENST00000590800
  CDS Start-End: 501-2360
gaggagctgcccgctcgcccgctgccgccgctcagctccatacccgccggcgcagccccgccacgagactctgacagcggcgcggccggcgaggctcgggcgcgcagggaccggcggacaccggcggcgaaggaggacgccaggactgcgtcccggagccaagtgcgggaggcgcgcagggccggcggcgcgcggagatcccctctgagcagctgggagctcagaagctctgtccaaccctgaggagtgggtcagccacaagagcaagaagtgatggcgtggagtccacccagggcctgaggcatgagcagaatccacgcccattagacctggagcctgggcgtttggggctgcactgctggggagatccaagaagaatcaatgctttggcccctggtgacatgtacatggtgtaatgacaggaaatgagcagatttgcagaaaaactggtgtcctgaaatttaaaactaaggcatcggtgcttggctctggctgagaacatggccaatgacattgatgagctcattggcattcccttccccaaccacagcagtgaggtcctgtgcagcctcaatgagcaacggcacgatggcctgctgtgtgacgtgctcctggtggtgcaggagcaggagtatcggacccaccgctccgtcctggctgcctgcagcaagtacttcaagaagcttttcacagccggcaccctagccagccagccctacgtctatgagatcgactttgtccagcctgaggctctggctgctatcctggagttcgcctacacctccacgctcaccatcaccgctggcaatgtcaagcacatcctcaacgcagccaggatgctggagatccagtgcatcgtgaacgtgtgcctggagatcatggagcctgggggggacgggggggaggaggatgacaaggaggacgatgacgacgacgaagatgatgatgatgaggaggacgaagaggaggaggaggaagaggaggaggatgacgatgatgacacggaggactttgctgaccaagaaaacttgcctgacccccaggacatcagctgccaccaaagcccttccaagacagaccatctcacagagaaggcctattcagacacccccagggacttccctgactccttccaggctggcagtcctggccatctgggggtgatccgggacttctccatcgaatctctgctaagggagaacctgtaccccaaggccaacatccccgacaggagaccctccttgtctccattcgccccggacttctttccacacctctggccaggggacttcggtgcctttgcccagctgcctgagcagcccatggacagtgggccactggatctggtcatcaagaatcggaagatcaaggaggaggagaaggaggagctgcccccacccccaccgccacccttccctaatgacttcttcaaggacatgttccctgacctgccgggggggcctctgggacccatcaaggcggagaacgactacggtgcctatctcaacttcctgagtgccacccacctgggaggcctcttcccaccctggcccctggtagaagagcgcaagctgaagcccaaggcctctcagcagtgccccatctgccacaaagtcatcatgggggccgggaagctgccgcggcacatgaggacccataccggggagaagccatacatgtgcaccatctgcgaggtccgcttcaccaggcaggacaagctgaaaatccacatgcggaagcacacaggggagcggccctacctgtgcatccactgcaacgccaagttcgtgcacaactacgacctcaagaaccacatgcgcatccacacgggcgtgcggccctaccagtgcgagttctgctacaagagcttcacgcgctctgaccacctgcaccgccacatcaagcgccagagctgccgcatggcacggccccgacgcggccgcaagcctgctgcgtggagggccgccagcctgctcttcgggcccggcggcccggcccccgacaaggcggccttcgtgatgccccctgcgctgggcgaggtgggcggccacctgggcggcgcagctgtgtgcctcccgggccccagccccgccaagcacttcctggcagcgcccaagggcgccctgagcctgcaagagctggagcggcagttcgaggagacacagatgaagctgttcgggcgcgcgcagctggaggctgagaggaacgcggggggcctcctggccttcgcgctggccgagaacgtggcggcggcgcggccctacttcccgctgcccgacccttgggccgccggcctggccggcctccctgggctcgccggcctcaaccacgtggcctccatgtccgaagccaacaactaggctggtccctgtcggctccagcccaccagccctccagtccttctccctccaggcccactctaccctaccccatggatctgaacttttcattttaaaaacacaaagggaaaatgggaaaataataataatactatcagtgatggcattttcccgggctcctaaagcagctgcctccttttgctggtctgagacgggcatcttttcccaaaaggccaggagcccgggcctccctccctgtctctctggctctcatatagaaacttgcaccggcccatgccacaaagaactgggtgcccaggggcacttaggagctgggtgagtcatgaggggtcagggggtggttggcctggtgcccagccagccacagcaggaggaggtaggggctgggcatgcaccttggttaagccccaccccctatggcaaagtctctgccaacactcctctgagggctcattttccagtctccagtggccccggggtctttttgagaactacccacctgccacatagaaagaaatgctctgttggcagggaggcctcctggaaccagtcaggaaccaggctctggaaggcccgggccatttcttccctgacctgtcctgtgaccttgacaggtcagccctctgtagctcagtgtcacctggctatggaaggggctggtaactgaggtttccgccctccacctctaaacacatacacacctatccccccagagaatcacagagatggtagaagctttgtactccccaagtccatggggaaacagtttatctttctggacttagttttatcacatccagctctatattagcatattagcataggtgagaaatatggccagactagacagagatcaggtcatcaggggagcttccgagcttcagcaaagcccacaggtagctctgcgaactcagaatgctaccctaccttccctgcaggccgctgttcatgtctggactcctgggggcgctatttaatgtttacccccatctccagtgccccctccaaggctgtgcagtgtcttggggctctcagggccaacatcgaagagatgggggccacctcttaacacctggcaacagtctcccctcatcctgattcctgacaacagacaaaacaccggtttctagggtttatctgtttgttttttgagttgagggttcctcagggccttggcattgctagtgatggtcccctttgctgtgtgagaaccccctcaaccccttcctcctccctctggggatgaagtgggagtatttggctccccatttttgacaaaagggctcagtgcagggaggtggaggcctctgaggtttgaagggctctgtgagttagagttgtcacatgttctcctggttcttgaatttgcagcaggtcctgaaaaggaaggctctgctggccccgtgccttcctgaccttctctctccttccctcccctctcttttcttgccaagtttgctttggtttctgagcagcccagagaggaggagggttcgtccccagggagagcccagggctggagtccccaatccctgtgctatgggcacaaagagacttcagctcttcctgttgccttggctttttcctgagcaaaaacacaacaaacaaaaaggccagagaagagcacagactctgtccctctcacaactctccagaagagaccccctgattcttcacaccaccggatgccactccagccagcaggattgctacacacaccctctgttctcagaagtcatctgcctgggcagccgcctctcagattcctgtcttcgtttcagacacttttctctgaagcatgcccatgtccaccagccaacgtgcccccgtgttcccccccatcagccaagtgattggggctgaaccagactttaaaagagaggaaaaaaaaaaaaaaaggaaacatgaataaattggaatccagtggtgttggggcttttgtttttattttgtaaaggtgatgacttcttataaactcaatttttcagatgactggttagttctttctgttttttcttggctgcagtttggaattgtacattgtaaaatatccaaagatgttgagtactgtatgatcaagaacttgaagcaaatgggttgtggggggaggggtggttgtgtttttgttttgcttcaatttttttttttttttgatgtttcaatttccctgtctgtctgtgggagaactttggaattttttctatttataactctttttttatgtgattgctctacgtaaaatgacactcaacaaagtttgccttagtgattcaagggacaatcttccataacttcggtcgcacgccacatcccgccgagaaaaactctcagctaattttctggcctatttattaaacagtattaattgacttgattaaattatattgagagttgcacttctgtgagatgtgacttctgaaagttcacaggacagcaacaagccagtcttaaggtttttaattgttgggtgtcataaacttaaaataatgtcaaagacaccttaacaaagaaaaaaaaaaaaacctttgacccttattttatactttaaaggacagtgttttgagtaaaagtgagctatgcttgctta

SEQ ID NO: 201106 - DNA, 725 bp, Homo sapiens
  Payload ID: 19697
  Gene Name: zinc finger and BTB domain containing 7C
  ENST ID: ENST00000589194
  CDS Start-End: 651-725
aggaggacgccaggactgcgtcccggagccaagtgcgggaggcgcgcagggccggcggcgcgcggagatcccctctgagcagctgggagctcagaagctctgtccaaccctgaggagtgggtcagccacaagagcaagaagtgatggcgtggagtccacccagggcctgaggcatgagcagaatccacgcccattagacctggagcctgggcgtttggggctgcactgctggggagatccaagaagaatcaatgctttggcccctggtgacatgtacatggtgtaatgacaggaaatgagcagatttgcagaaaaactggtgtcctgaaatttaaaactaaggcatcggtgcttgtgccaggcagcacctggaagctctgggaaatccacgagaagcagcaggcattggctctgttttggaggagctttcagtccagttcaggaagagaagacacctgcatatgagacaaagaactttatgaccaggcatggcataggtgacatgaaagcttctgtctccagacccttgtcttcaagaggagtgctggcctgtcaatgagcgtgcctgattaccgtggtaatcaccagcgaatggtgtgattttataatacatttccatctgaaatatgaacagggctctggctgagaacatggccaatgacattgatgagctcattggcattcccttccccaaccacagcagtgaggtcctgtgcagcctcaat

SEQ ID NO: 201107 - DNA, 680 bp, Homo sapiens
  Payload ID: 19697
  Gene Name: zinc finger and BTB domain containing 7C
  ENST ID: ENST00000592656
  CDS Start-End: 606-680
ctgagcagctgggagctcagaagctctgtccaaccctgaggagtgggtcagccacaagagcaagaagtgatggcgtggagtccacccagggcctgaggcatgagcagaatccacgcccattagacctggagcctgggcgtttggggctgcactgctggggagatccaagaagaatcaatgctttggcccctggtgacatgtacatggtgtaatgacaggaaatgagcagatttgcagaaaaactggtgtcctgaaatttaaaactaaggcatcggtgcttgtgccaggcagcacctggaagctctgggaaatccacgagaagcagcaggcattggctctgttttggaggagctttcagtccagttcaggaagagaagacacctgcatatgagacaaagaactttatgaccagacagagctgctctaagctgtgggccaacaggaggctgggagctctcctctaaattgctttgtgaccttggacaagaaccctccccttcctggactgcaaatttcctcctctgtaaaatgaagggttgatgcaacaactgaggcatagagaagtcacttgcccaaggtcacccagcagggctctggctgagaacatggccaatgacattgatgagctcattggcattcccttccccaaccacagcagtgaggtcctgtgcagcctcaat

SEQ ID NO: 201108 - DNA, 565 bp, Homo sapiens
  Payload ID: 19697
  Gene Name: zinc finger and BTB domain containing 7C
  ENST ID: ENST00000588028
  CDS Start-End: 521-565
tccagaagctgcccagaaaggatgcagcaccccctgcaacctgcaatttggcaccttggaatcttttaataaataaccaaggagacaaatcccctctgagcagctgggagctcagaagctctgtccaaccctgaggagtgggtcagccacaagagcaagaagtgatggcgtggagtccacccagggcctgaggcatgagcagaatccacgcccattagacctggagcctgggcgtttggggctgcactgctggggagatccaagaagaatcaatgctttggcccctggtgacatgtacatggtgtaatgacaggaaatgagcagatttgcagaaaaactggtgtcctgaaatttaaaactaaggcatcggtgcttagaaagggtctcgttctgttgcccaggtgagcctggagtgcagtagtacagtcacagctcactgcagcctcaaactcttgggctcaagagatgttcctgcctcagcctcccaagtagtcgggactacagggctctggctgagaacatggccaatgacattgatgagctcattggcattcccttccccaac

SEQ ID NO: 201109 - DNA, 4899 bp, Homo sapiens
  Payload ID: 19697
  Gene Name: zinc finger and BTB domain containing 7C
  Uniprot ID: A1YPR0
  ENST ID: ENST00000586438
  CDS Start-End: 453-2312
gcacaacaggaacagagggaaaggctttgtcttcaaaggtgtcccagcagttacaacaaggactagagcaggtgctgatgaggccgcagtttgggagtctgatccctaacaaggccaggtcccctctctctgcccaagtttgctctctgaatacagaggaggacttgggccatagagtatgggcagctccgcagggcgattcttgctcatcactggacactcattgtctctgaaggacgggctacgtcggagtgttgtcttagattcgaatgcatgaggaactggaataatcagtaacatttctcccagacagagctgctctaagctgtgggccaacaggaggctgggagctctcctctaaattgctttgtgaccttggacaagaaccctccccttcctggactgcaaatttcctcctctgtaaaatgaagggttgggctctggctgagaacatggccaatgacattgatgagctcattggcattcccttccccaaccacagcagtgaggtcctgtgcagcctcaatgagcaacggcacgatggcctgctgtgtgacgtgctcctggtggtgcaggagcaggagtatcggacccaccgctccgtcctggctgcctgcagcaagtacttcaagaagcttttcacagccggcaccctagccagccagccctacgtctatgagatcgactttgtccagcctgaggctctggctgctatcctggagttcgcctacacctccacgctcaccatcaccgctggcaatgtcaagcacatcctcaacgcagccaggatgctggagatccagtgcatcgtgaacgtgtgcctggagatcatggagcctgggggggacgggggggaggaggatgacaaggaggacgatgacgacgacgaagatgatgatgatgaggaggacgaagaggaggaggaggaagaggaggaggatgacgatgatgacacggaggactttgctgaccaagaaaacttgcctgacccccaggacatcagctgccaccaaagcccttccaagacagaccatctcacagagaaggcctattcagacacccccagggacttccctgactccttccaggctggcagtcctggccatctgggggtgatccgggacttctccatcgaatctctgctaagggagaacctgtaccccaaggccaacatccccgacaggagaccctccttgtctccattcgccccggacttctttccacacctctggccaggggacttcggtgcctttgcccagctgcctgagcagcccatggacagtgggccactggatctggtcatcaagaatcggaagatcaaggaggaggagaaggaggagctgcccccacccccaccgccacccttccctaatgacttcttcaaggacatgttccctgacctgccgggggggcctctgggacccatcaaggcggagaacgactacggtgcctatctcaacttcctgagtgccacccacctgggaggcctcttcccaccctggcccctggtagaagagcgcaagctgaagcccaaggcctctcagcagtgccccatctgccacaaagtcatcatgggggccgggaagctgccgcggcacatgaggacccataccggggagaagccatacatgtgcaccatctgcgaggtccgcttcaccaggcaggacaagctgaaaatccacatgcggaagcacacaggggagcggccctacctgtgcatccactgcaacgccaagttcgtgcacaactacgacctcaagaaccacatgcgcatccacacgggcgtgcggccctaccagtgcgagttctgctacaagagcttcacgcgctctgaccacctgcaccgccacatcaagcgccagagctgccgcatggcacggccccgacgcggccgcaagcctgctgcgtggagggccgccagcctgctcttcgggcccggcggcccggcccccgacaaggcggccttcgtgatgccccctgcgctgggcgaggtgggcggccacctgggcggcgcagctgtgtgcctcccgggccccagccccgccaagcacttcctggcagcgcccaagggcgccctgagcctgcaagagctggagcggcagttcgaggagacacagatgaagctgttcgggcgcgcgcagctggaggctgagaggaacgcggggggcctcctggccttcgcgctggccgagaacgtggcggcggcgcggccctacttcccgctgcccgacccttgggccgccggcctggccggcctccctgggctcgccggcctcaaccacgtggcctccatgtccgaagccaacaactaggctggtccctgtcggctccagcccaccagccctccagtccttctccctccaggcccactctaccctaccccatggatctgaacttttcattttaaaaacacaaagggaaaatgggaaaataataataatactatcagtgatggcattttcccgggctcctaaagcagctgcctccttttgctggtctgagacgggcatcttttcccaaaaggccaggagcccgggcctccctccctgtctctctggctctcatatagaaacttgcaccggcccatgccacaaagaactgggtgcccaggggcacttaggagctgggtgagtcatgaggggtcagggggtggttggcctggtgcccagccagccacagcaggaggaggtaggggctgggcatgcaccttggttaagccccaccccctatggcaaagtctctgccaacactcctctgagggctcattttccagtctccagtggccccggggtctttttgagaactacccacctgccacatagaaagaaatgctctgttggcagggaggcctcctggaaccagtcaggaaccaggctctggaaggcccgggccatttcttccctgacctgtcctgtgaccttgacaggtcagccctctgtagctcagtgtcacctggctatggaaggggctggtaactgaggtttccgccctccacctctaaacacatacacacctatccccccagagaatcacagagatggtagaagctttgtactccccaagtccatggggaaacagtttatctttctggacttagttttatcacatccagctctatattagcatattagcataggtgagaaatatggccagactagacagagatcaggtcatcaggggagcttccgagcttcagcaaagcccacaggtagctctgcgaactcagaatgctaccctaccttccctgcaggccgctgttcatgtctggactcctgggggcgctatttaatgtttacccccatctccagtgccccctccaaggctgtgcagtgtcttggggctctcagggccaacatcgaagagatgggggccacctcttaacacctggcaacagtctcccctcatcctgattcctgacaacagacaaaacaccggtttctagggtttatctgtttgttttttgagttgagggttcctcagggccttggcattgctagtgatggtcccctttgctgtgtgagaaccccctcaaccccttcctcctccctctggggatgaagtgggagtatttggctccccatttttgacaaaagggctcagtgcagggaggtggaggcctctgaggtttgaagggctctgtgagttagagttgtcacatgttctcctggttcttgaatttgcagcaggtcctgaaaaggaaggctctgctggccccgtgccttcctgaccttctctctccttccctcccctctcttttcttgccaagtttgctttggtttctgagcagcccagagaggaggagggttcgtccccagggagagcccagggctggagtccccaatccctgtgctatgggcacaaagagacttcagctcttcctgttgccttggctttttcctgagcaaaaacacaacaaacaaaaaggccagagaagagcacagactctgtccctctcacaactctccagaagagaccccctgattcttcacaccaccggatgccactccagccagcaggattgctacacacaccctctgttctcagaagtcatctgcctgggcagccgcctctcagattcctgtcttcgtttcagacacttttctctgaagcatgcccatgtccaccagccaacgtgcccccgtgttcccccccatcagccaagtgattggggctgaaccagactttaaaagagaggaaaaaaaaaaaaaaaggaaacatgaataaattggaatccagtggtgttggggcttttgtttttattttgtaaaggtgatgacttcttataaactcaatttttcagatgactggttagttctttctgttttttcttggctgcagtttggaattgtacattgtaaaatatccaaagatgttgagtactgtatgatcaagaacttgaagcaaatgggttgtggggggaggggtggttgtgtttttgttttgcttcaatttttttttttttttgatgtttcaatttccctgtctgtctgtgggagaactttggaattttttctatttataactctttttttatgtgattgctctacgtaaaatgacactcaacaaagtttgccttagtgattcaagggacaatcttccataacttcggtcgcacgccacatcccgccgagaaaaactctcagctaattttctggcctatttattaaacagtattaattgacttgattaaattatattgagagttgcacttctgtgagatgtgacttctgaaagttcacaggacagcaacaagccagtcttaaggtttttaattgttgggtgtcataaacttaaaataatgtcaaagacaccttaacaaagaaaaaaaaaaaaacctttgacccttattttatactttaaaggacagtgttttgagtaaaagtgagctatgcttgctta

SEQ ID NO: 201110 - DNA, 572 bp, Homo sapiens
  Payload ID: 19697
  Gene Name: zinc finger and BTB domain containing 7C
  ENST ID: ENST00000590855
  CDS Start-End: 498-572
aggaggacgccaggactgcgtcccggagccaagtgcgggaggcgcgcagggccggcggcgcgcggagatcccctctgagcagctgggagctcagaagctctgtccaaccctgaggagtgggtcagccacaagagcaagaagtgatggcgtggagtccacccagggcctgaggcatgagcagaatccacgcccattagacctggagcctgggcgtttggggctgcactgctggggagatccaagaagaatcaatgctttggcccctggtgacatgtacatggtgtaatgacaggaaatgagcagatttgcagaaaaactggtgtcctgaaatttaaaactaaggcatcggtgcttacagagctgctctaagctgtgggccaacaggaggctgggagctctcctctaaattgctttgtgaccttggacaagaaccctccccttcctggactgcaaatttcctcctctgtaaaatgaagggttgggctctggctgagaacatggccaatgacattgatgagctcattggcattcccttccccaaccacagcagtgaggtcctgtgcagcctcaat

SEQ ID NO: 201111 - DNA, 596 bp, Homo sapiens
  Payload ID: 19697
  Gene Name: zinc finger and BTB domain containing 7C
  ENST ID: ENST00000588970
  CDS Start-End: 522-596
aggaggacgccaggactgcgtcccggagccaagtgcgggaggcgcgcagggccggcggcgcgcggagatcccctctgagcagctgggagctcagaagctctgtccaaccctgaggagtgggtcagccacaagagcaagaagtgatggcgtggagtccacccagggcctgaggcatgagcagaatccacgcccattagacctggagcctgggcgtttggggctgcactgctggggagatccaagaagaatcaatgctttggcccctggtgacatgtacatggtgtaatgacaggaaatgagcagatttgcagaaaaactggtgtcctgaaatttaaaactaaggcatcggtgctttctttgcttgtttgcttgttgcaagcgccccggggagacactgtgaagcttggcctcctgcccctgtgtctgtctgttgagtcgcaggaagctggcggccctccttcaggagtgggacatgggaaggaggctgcagatcgacctgggaaagggctctggctgagaacatggccaatgacattgatgagctcattggcattcccttccccaaccacagcagtgaggtcctgtgcagcctcaat

SEQ ID NO: 201112 - DNA, 347 bp, Homo sapiens
  Payload ID: 19697
  Gene Name: zinc finger and BTB domain containing 7C
  ENST ID: ENST00000586525
  CDS Start-End: 273-347
aggaggacgccaggactgcgtcccggagccaagtgcgggaggcgcgcagggccggcggcgcgcggaggaaatgagcagatttgcagaaaaactggtgtcctgaaatttaaaactaaggcatcggtgcttacagagctgctctaagctgtgggccaacaggaggctgggagctctcctctaaattgctttgtgaccttggacaagaaccctccccttcctggactgcaaatttcctcctctgtaaaatgaagggttgggctctggctgagaacatggccaatgacattgatgagctcattggcattcccttccccaaccacagcagtgaggtcctgtgcagcctcaat

SEQ ID NO: 201113 - DNA, 570 bp, Homo sapiens
  Payload ID: 19697
  Gene Name: zinc finger and BTB domain containing 7C
  ENST ID: ENST00000589619
  CDS Start-End: 496-570
ctgagcagctgggagctcagaagctctgtccaaccctgaggagtgggtcagccacaagagcaagaagtgatggcgtggagtccacccagggcctgaggcatgagcagaatccacgcccattagacctggagcctgggcgtttggggctgcactgctggggagatccaagaagaatcaatgctttggcccctggtgacatgtacatggtgtaatgacaggaaatgagcagatttgcagaaaaactggtgtcctgaaatttaaaactaaggcatcggtgcttacagagctgctctaagctgtgggccaacaggaggctgggagctctcctctaaattgctttgtgaccttggacaagaaccctccccttcctggactgcaaatttcctcctctgtaaaatgaagggttggtgaggaacttaggtgctgtcttggccaagttcagaaacatgtaggacattatggagaagtgttaaagccagggctctggctgagaacatggccaatgacattgatgagctcattggcattcccttccccaaccacagcagtgaggtcctgtgcagcctcaat

SEQ ID NO: 201114 - DNA, 548 bp, Homo sapiens
  Payload ID: 19697
  Gene Name: zinc finger and BTB domain containing 7C
  ENST ID: ENST00000591526
  CDS Start-End: 504-548
tccagaagctgcccagaaaggatgcagatcccctctgagcagctgggagctcagaagctctgtccaaccctgaggagtgggtcagccacaagagcaagaagtgatggcgtggagtccacccagggcctgaggcatgagcagaatccacgcccattagacctggagcctgggcgtttggggctgcactgctggggagatccaagaagaatcaatgctttggcccctggtgacatgtacatggtgtaatgacaggaaatgagcagatttgcagaaaaactggtgtcctgaaatttaaaactaaggcatcggtgcttagctgctctaagctgtgggccaacaggaggctgggagctctcctctaaattgctttgtgaccttggacaagaaccctccccttcctggactgcaaatttcctcctctgtaaaatgaagggttgatgcaacaactgaggcatagagaagtcacttgcccaaggtcacccagcagggctctggctgagaacatggccaatgacattgatgagctcattggcattcccttccccaac

SEQ ID NO: 201115 - DNA, 4949 bp, Homo sapiens
  Payload ID: 19697
  Gene Name: zinc finger and BTB domain containing 7C
  Uniprot ID: A1YPR0
  ENST ID: ENST00000588982
  CDS Start-End: 503-2362
gcacaacaggaacagagggaaaggctttgtcttcaaaggtgtcccagcagttacaacaaggactagagcaggtgctgatgaggccgcagtttgggagtctgatccctaacaaggccaggtcccctctctctgcccaagtttgctctctgaatacagaggaggacttgggccatagagtatgggcagctccgcagggcgattcttgctcatcactggacactcattgtctctgaaggacgggctacgtcggagtgttgtcttagattcgaatgcatgaggaactggaataatcagtaacatttctcccagacagagctgctctaagctgtgggccaacaggaggctgggagctctcctctaaattgctttgtgaccttggacaagaaccctccccttcctggactgcaaatttcctcctctgtaaaatgaagggttgatgcaacaactgaggcatagagaagtcacttgcccaaggtcacccagcagggctctggctgagaacatggccaatgacattgatgagctcattggcattcccttccccaaccacagcagtgaggtcctgtgcagcctcaatgagcaacggcacgatggcctgctgtgtgacgtgctcctggtggtgcaggagcaggagtatcggacccaccgctccgtcctggctgcctgcagcaagtacttcaagaagcttttcacagccggcaccctagccagccagccctacgtctatgagatcgactttgtccagcctgaggctctggctgctatcctggagttcgcctacacctccacgctcaccatcaccgctggcaatgtcaagcacatcctcaacgcagccaggatgctggagatccagtgcatcgtgaacgtgtgcctggagatcatggagcctgggggggacgggggggaggaggatgacaaggaggacgatgacgacgacgaagatgatgatgatgaggaggacgaagaggaggaggaggaagaggaggaggatgacgatgatgacacggaggactttgctgaccaagaaaacttgcctgacccccaggacatcagctgccaccaaagcccttccaagacagaccatctcacagagaaggcctattcagacacccccagggacttccctgactccttccaggctggcagtcctggccatctgggggtgatccgggacttctccatcgaatctctgctaagggagaacctgtaccccaaggccaacatccccgacaggagaccctccttgtctccattcgccccggacttctttccacacctctggccaggggacttcggtgcctttgcccagctgcctgagcagcccatggacagtgggccactggatctggtcatcaagaatcggaagatcaaggaggaggagaaggaggagctgcccccacccccaccgccacccttccctaatgacttcttcaaggacatgttccctgacctgccgggggggcctctgggacccatcaaggcggagaacgactacggtgcctatctcaacttcctgagtgccacccacctgggaggcctcttcccaccctggcccctggtagaagagcgcaagctgaagcccaaggcctctcagcagtgccccatctgccacaaagtcatcatgggggccgggaagctgccgcggcacatgaggacccataccggggagaagccatacatgtgcaccatctgcgaggtccgcttcaccaggcaggacaagctgaaaatccacatgcggaagcacacaggggagcggccctacctgtgcatccactgcaacgccaagttcgtgcacaactacgacctcaagaaccacatgcgcatccacacgggcgtgcggccctaccagtgcgagttctgctacaagagcttcacgcgctctgaccacctgcaccgccacatcaagcgccagagctgccgcatggcacggccccgacgcggccgcaagcctgctgcgtggagggccgccagcctgctcttcgggcccggcggcccggcccccgacaaggcggccttcgtgatgccccctgcgctgggcgaggtgggcggccacctgggcggcgcagctgtgtgcctcccgggccccagccccgccaagcacttcctggcagcgcccaagggcgccctgagcctgcaagagctggagcggcagttcgaggagacacagatgaagctgttcgggcgcgcgcagctggaggctgagaggaacgcggggggcctcctggccttcgcgctggccgagaacgtggcggcggcgcggccctacttcccgctgcccgacccttgggccgccggcctggccggcctccctgggctcgccggcctcaaccacgtggcctccatgtccgaagccaacaactaggctggtccctgtcggctccagcccaccagccctccagtccttctccctccaggcccactctaccctaccccatggatctgaacttttcattttaaaaacacaaagggaaaatgggaaaataataataatactatcagtgatggcattttcccgggctcctaaagcagctgcctccttttgctggtctgagacgggcatcttttcccaaaaggccaggagcccgggcctccctccctgtctctctggctctcatatagaaacttgcaccggcccatgccacaaagaactgggtgcccaggggcacttaggagctgggtgagtcatgaggggtcagggggtggttggcctggtgcccagccagccacagcaggaggaggtaggggctgggcatgcaccttggttaagccccaccccctatggcaaagtctctgccaacactcctctgagggctcattttccagtctccagtggccccggggtctttttgagaactacccacctgccacatagaaagaaatgctctgttggcagggaggcctcctggaaccagtcaggaaccaggctctggaaggcccgggccatttcttccctgacctgtcctgtgaccttgacaggtcagccctctgtagctcagtgtcacctggctatggaaggggctggtaactgaggtttccgccctccacctctaaacacatacacacctatccccccagagaatcacagagatggtagaagctttgtactccccaagtccatggggaaacagtttatctttctggacttagttttatcacatccagctctatattagcatattagcataggtgagaaatatggccagactagacagagatcaggtcatcaggggagcttccgagcttcagcaaagcccacaggtagctctgcgaactcagaatgctaccctaccttccctgcaggccgctgttcatgtctggactcctgggggcgctatttaatgtttacccccatctccagtgccccctccaaggctgtgcagtgtcttggggctctcagggccaacatcgaagagatgggggccacctcttaacacctggcaacagtctcccctcatcctgattcctgacaacagacaaaacaccggtttctagggtttatctgtttgttttttgagttgagggttcctcagggccttggcattgctagtgatggtcccctttgctgtgtgagaaccccctcaaccccttcctcctccctctggggatgaagtgggagtatttggctccccatttttgacaaaagggctcagtgcagggaggtggaggcctctgaggtttgaagggctctgtgagttagagttgtcacatgttctcctggttcttgaatttgcagcaggtcctgaaaaggaaggctctgctggccccgtgccttcctgaccttctctctccttccctcccctctcttttcttgccaagtttgctttggtttctgagcagcccagagaggaggagggttcgtccccagggagagcccagggctggagtccccaatccctgtgctatgggcacaaagagacttcagctcttcctgttgccttggctttttcctgagcaaaaacacaacaaacaaaaaggccagagaagagcacagactctgtccctctcacaactctccagaagagaccccctgattcttcacaccaccggatgccactccagccagcaggattgctacacacaccctctgttctcagaagtcatctgcctgggcagccgcctctcagattcctgtcttcgtttcagacacttttctctgaagcatgcccatgtccaccagccaacgtgcccccgtgttcccccccatcagccaagtgattggggctgaaccagactttaaaagagaggaaaaaaaaaaaaaaaggaaacatgaataaattggaatccagtggtgttggggcttttgtttttattttgtaaaggtgatgacttcttataaactcaatttttcagatgactggttagttctttctgttttttcttggctgcagtttggaattgtacattgtaaaatatccaaagatgttgagtactgtatgatcaagaacttgaagcaaatgggttgtggggggaggggtggttgtgtttttgttttgcttcaatttttttttttttttgatgtttcaatttccctgtctgtctgtgggagaactttggaattttttctatttataactctttttttatgtgattgctctacgtaaaatgacactcaacaaagtttgccttagtgattcaagggacaatcttccataacttcggtcgcacgccacatcccgccgagaaaaactctcagctaattttctggcctatttattaaacagtattaattgacttgattaaattatattgagagttgcacttctgtgagatgtgacttctgaaagttcacaggacagcaacaagccagtcttaaggtttttaattgttgggtgtcataaacttaaaataatgtcaaagacaccttaacaaagaaaaaaaaaaaaacctttgacccttattttatactttaaaggacagtgttttgagtaaaagtgagctatgcttgctta

SEQ ID NO: 201116 - DNA, 565 bp, Homo sapiens
  Payload ID: 19697
  Gene Name: zinc finger and BTB domain containing 7C
  ENST ID: ENST00000588149
  CDS Start-End: 510-565
gcctccgatgtactaccaaggagggcgagggttcctatgtctgtctggagcgcagaggggtggactgcaaaaagatcccctctgagcagctgggagctcagaagctctgtccaaccctgaggagtgggtcagccacaagagcaagaagtgatggcgtggagtccacccagggcctgaggcatgagcagaatccacgcccattagacctggagcctgggcgtttggggctgcactgctggggagatccaagaagaatcaatgctttggcccctggtgacatgtacatggtgtaatgacaggaaatgagcagatttgcagaaaaactggtgtcctgaaatttaaaactaaggcatcggtgcttgtgccaggcagcacctggaagctctgggaaatccacgagaagcagcaggcattggctctgttttggaggagctttcagtccagttcaggaagagaagacacctgcatatgagacaaagaactttatgaccagggctctggctgagaacatggccaatgacattgatgagctcattggcattcccttccccaaccacagcagtga

SEQ ID NO: 201117 - DNA, 312 bp, Homo sapiens
  Payload ID: 19698
  Gene Name: zinc finger and BTB domain containing 8 opposite strand
  ENST ID: ENST00000341885
  CDS Start-End: 1-231
atgaagggcggaagtagagtgtctaatcctgcagtcatggcgcaggaagaggaagatgttagagattacaatttgactgaagaacagaaggcgatcaaggccaagtatccgccagtcaataggaagtacgagtatcagcagacccatcttctacaatctccacataggatctattctcatcttcactcaagtgccatctggaatccttatctccatctgatggggacataagatgttgttcagcttccaagtcaatggggaggctgtctatgccaaattctgcaagacactcattacacagtctgtagcgcc

SEQ ID NO: 201118 - DNA, 598 bp, Homo sapiens
  Payload ID: 19698
  Gene Name: zinc finger and BTB domain containing 8 opposite strand
  Uniprot ID: Q8IWT0
  ENST ID: ENST00000373501
  CDS Start-End: 171-566
cgcaggaagaggaagatgttagagattacaatttgactgaagaacagaaggcgatcaaggccaagtatccgccagtcaataggaagtacgagtatttggatcatacagcagatgtccagtgagtatagcgggagttcattcctttgaaaccacgtcagtaggaagactgaatgtttcaatcttggttacacgcatggggagatactctggaggaagcatttgagcaatgtgcaatggccatgtttggttacatgacagatactgggacagtggagcccctccaaacagtagaagtagaaacccaaggagatgacttacagtctcttctgtttcactttttggatgaatggctttataagttcagtgctgatgaattcttcataccccgggaagtgaaagtacttagcattgatcaaagaaatttcaaattacgatcaattgggtggggagaagaattttcattgtccaagcaccctcagggaacagaagtcaaagcaataacatattcagcaatgcaggtctataatgaagagaacccggaagtttttgtgatcattgacatttaagacaccaaaaaataaaagactcctacgaagaa

SEQ ID NO: 201119 - DNA, 514 bp, Homo sapiens
  Payload ID: 19698
  Gene Name: zinc finger and BTB domain containing 8 opposite strand
  ENST ID: ENST00000436661
  CDS Start-End: 1-442
gggcggaagtagagtgtctaatcctgcagtcatggcgcaggaagaggaagatgttagagattacaatttgactgaagaacagaaggcgatcaaggccaagtatccgccagtcaataggaagtacgagtatttggatcatacagcagatgtccagttacacgcatggggagatactctggaggaagcatttgagcaatgtgcaatggccatgtttggttacatgacagatactgggacagtggagcccctccaaacagtagaagtagaaacccaaggagatgacttacagtctcttctgtttcactttttggatgaatggctttataagttcagtgctgatgaattcttcataccccgggtggggagaagaattttcattgtccaagcaccctcagggaacagaagtcaaagcaataacatattcagcaatgcaggtctataatgaagagaacccggaagtttttgtgatcattgacatttaagacaccaaaaaataaaagactcctacgaagaa

SEQ ID NO: 201120 - DNA, 1601 bp, Homo sapiens
  Payload ID: 19698
  Gene Name: zinc finger and BTB domain containing 8 opposite strand
  ENST ID: ENST00000468695
  CDS Start-End: 20-559
ccgggccgaagtccggtggatgaagggcggaagtagagtgtctaatcctgcagtcatggcgcaggaagaggaagatgttagagattacaatttgactgaagaacagaaggcgatcaaggccaagtatccgccagtcaataggaagtacgagtatttggatcatacagcagatgtccagttacacgcatggggagatactctggaggaagcatttgagcaatgtgcaatggccatgtttggttacatgacagatactgggacagtggagcccctccaaacagtagaagtagaaacccaaggagatgacttacagtctcttctgtttcactttttggatgaatggctttataagttcagtgctgatgaattcttcataccccgggaagtgaaagtacttagcattgatcaaagaaatttcaaattacgatcaattgggtggggagaagaattttcattgtccaagcaccctcagggaacagaagtcaaagcaataacatattcagcaatgcaggtctataatgaagagaacccggaagtttttgtgatcattgacatttaagacaccaaaaaataaaagactcctacgaagaactgtttttgttttcctcttccttttgagaagacactatgaattaaattctacagcttttttttgatatatggaaatttgtagaacagaaatattttagttaaagtgtgactttcagaaagggaaaatcagggcacagccttggtctgtgttccccaaatattcacactttaaagaattcttcaaccccccaagggacagttatggtcctttgattctctgctgtggcagtaggtgtgcctcatgcccttccagtgcaatgcaagccctccagcctcaccccagagaggatcactgatgtcagcagcagcctgaggctgaatccaggttgaaagaagaataacttgaaaaaatatatttccacacacagaattttgtttttcttccaagttggttaagacatatattttgtttcttttttttttttttttttgagacggagtctcgctctgtagcccaggctgaagcgcagtggtgtgagctcggcttactgcaagctccacctcccgggttcacgccattctcctacctcagcctcccgagtagctgggactataggcacccgccaccatgcccggctaatttttgtatctttagtagagacggggtttcactgtgttagctaggatggtcttgatctcctgaccttgtgatccgcccaccttggcctcccaaggtactgcgattacaggcatgagctaccatgcccggccacaagacatagattttctatatgcacatcaagggaggtgctggtttaggttgctataggacagagctatcctgtattccagttggtttttgtagagaaacaattagacttctctagatagagccctgatttttctctcacgctttcagttttttaaaagcactaatgatatttcctgttttctcataagaaaaagtcaatactatgccttacaaagagacctttccttctaatatagaattttatttgaaagtgagtacatgtttataactagagaataaaaggagaatttttgaaaaa

SEQ ID NO: 201121 - DNA, 620 bp, Homo sapiens
  Payload ID: 19698
  Gene Name: zinc finger and BTB domain containing 8 opposite strand
  ENST ID: ENST00000473294
  CDS Start-End: 1-237
gcagtcatggcgcaggaagaggaagatgttagagattacaatttgactgaagaacagaaggcgatcaaggccaagtatccgccagtcaataggaagtacgagtatttggatcatacagcagatgtccatggattgtattacacagagcatgaatatacttctttaggttacacgcatggggagatactctggaggaagcatttgagcaatgtgcaatggccatgtttggttacatgacagatactgggacagtggagcccctccaaacagtagaagtagaaacccaaggagatgacttacagtctcttctgtttcactttttggatgaatggctttataagttcagtgctgatgaattcttcataccccggagacagggtgttgctatgttgtcgaggctagtcttgaactcctagcttccggcaatcctcctgcctcaattttgcaaagtgctgggattacaggtggggagaagaattttcattgtccaagcaccctcagggaacagaagtcaaagcaataacatattcagcaatgcaggtctataatgaagagaacccggaagtttttgtgatcattgacatttaagacaccaaaaaataaaagactcctacgaagaa

SEQ ID NO: 201122 - DNA, 769 bp, Homo sapiens
  Payload ID: 19698
  Gene Name: zinc finger and BTB domain containing 8 opposite strand
  ENST ID: ENST00000479075
  CDS Start-End: 339-509
cgaccctttcagagtactgagatgaaaaatctagaatgccttcgggtctagttatcaattttgggggtgaagcgggggaaagaacctcgccagtcagacccagacgggtttcattcaaggtgcccttcaacgtttttccttagtctttggaaagaactagtaatgaaggaatcgcagaagatggggttttggctttttaaatatgcgatccaagcggcagggtagggactaaagtaggtcaacagccaactccgagaaaggagtgtggtcctttaagggtgtgcgccaaggggcggagtctagagcggaagtagtaactccgggccgaagtccggtggatgaagggcggaagtagagtgtctaatcctgcagtcatggcgcaggaagaggaagatgttagagattacaatttgactgaagaacagaaggcgatcaaggccaagtatccgccagtcaataggaagtacgagttggattgtattacacagagcatgaatatacttctttaggttacacgcatggggagatactctggaggaagcatttgagcaatgtgcaatggccatgtttggttacatgacagatactgggacagtggagcccctccaaacagtagaagtagaaacccaaggagatgacttacagtctcttctgtttcactttttggatgaatggctttataagttcagtgctgatgaattcttcataccccgggaagtgaaagtacttagcattgatcaaagaaatttcaaattacgatcaattgggt

SEQ ID NO: 201123 - DNA, 588 bp, Homo sapiens
  Payload ID: 19698
  Gene Name: zinc finger and BTB domain containing 8 opposite strand
  ENST ID: ENST00000476493
  CDS Start-End: 1-171
agagtgtctaatcctgcagtcatggcgcaggaagaggaagatgttagagattacaatttgactgaagaacagaaggcgatcaaggccaagtatccgccagtcaataggaagtacgagtgtgaatttggatcatacagcagatgtccatggattgtattacacagagcatgaatatacttctttaggttacacgcatggggagatactctggaggaagcatttgagcaatgtgcaatggccatgtttggttacatgacagatactgggacagtggagcccctccaaacagtagaagtagaaacccaaggagatgacttacagtctcttctgtttcactttttggatgaatggctttataagttcagtgctgatgaattcttcataccccgggaagtgaaagtacttagcattgatcaaagaaatttcaaattacgatcaattgggtggggagaagaattttcattgtccaagcaccctcagggaacagaagtcaaagcaataacatattcagcaatgcaggtctataatgaagagaacccggaagtttttgtgatcattgacatttaagacaccaaaaaataaaagact

SEQ ID NO: 201124 - DNA, 541 bp, Homo sapiens
  Payload ID: 19698
  Gene Name: zinc finger and BTB domain containing 8 opposite strand
  ENST ID: ENST00000498691
  CDS Start-End: 1-218
ggggagatactctggaggaagcatttgagcaatgtgcaatggccatgtttggttacatgacagatactgggacagtggagcccctccaaacagtagaagtagaaacccaaggagatgacttacagtctcttctgtttcactttttggatgaatggctttataagttcagtgctgatgaattcttcataccccggaagttgtgtgctattgttttctagaaaaggttgtaaaggccaggcgcggtggcttacgcctgtaatcccagcactttgggaagccgaggcaggtggatcacctgaggtcaggagttcgagaccagtctgaccaataaggaagtgaaagtacttagcattgatcaaagaaatttcaaattacgatcaattgggtggggagaagaattttcattgtccaagcaccctcagggaacagaagtcaaagcaataacatattcagcaatgcaggtctataatgaagagaacccggaagtttttgtgatcattgacatttaagacaccaaaaaataaaagactcctacgaagaa

SEQ ID NO: 201125 - DNA, 548 bp, Homo sapiens
  Payload ID: 19698
  Gene Name: zinc finger and BTB domain containing 8 opposite strand
  ENST ID: ENST00000465588
  CDS Start-End: 212-544
cgcaggaagaggaagatgttagagattacaatttgactgaagaacagaaggcgatcaaggccaagtatccgccagtcaataggaagtacgagtgtgagtaggtggcttacttctctctttacattggattgtattacacagagcatgaatatacttctttaggttacacgcatggggagatactctggaggaagcatttgagcaatgtgcaatggccatgtttggttacatgacagatactgggacagtggagcccctccaaacagtagaagtagaaacccaaggagatgacttacagtctcttctgtttcactttttggatgaatggctttataagttcagtgctgatgaattcttcataccccgggaagtgaaagtacttagcattgatcaaagaaatttcaaattacgatcaattgggtggggagaagaattttcattgtccaagcaccctcagggaacagaagtcaaagcaataacatattcagcaatgcaggtctataatgaagagaacccggaagtttttgtgatcattgacatttaagaca

SEQ ID NO: 201126 - DNA, 766 bp, Homo sapiens
  Payload ID: 19698
  Gene Name: zinc finger and BTB domain containing 8 opposite strand
  ENST ID: ENST00000373506
  CDS Start-End: 1-508
aagtagagtgtctaatcctgcagtcatggcgcaggaagaggaagatgttagagattacaatttgactgaagaacagaaggcgatcaaggccaagtatccgccagtcaataggaagtacgagtgtgagttacacgcatggggagatactctggaggaagcatttgagcaatgtgcaatggccatgtttggttacatgacagatactgggacagtggagcccctccaaacagtagaagtagaaacccaaggagatgacttacagtctcttctgtttcactttttggatgaatggctttataagttcagtgctgatgaattcttcataccccgggaagtgaaagtacttagcattgatcaaagaaatttcaaattacgatcaattgggtggggagaagaattttcattgtccaagcaccctcagggaacagaagtcaaagcaataacatattcagcaatgcaggtctataatgaagagaacccggaagtttttgtgatcattgacatttaagacaccaaaaaataaaagactcctacgaagaactgtttttgttttcctcttccttttgagaagacactatgaattaaattctacagcttttttttgatatatggaaatttgtagaacagaaatattttagttaaagtgtgactttcagaaagggaaaatcagggcacagccttggtctgtgttccccaaatattcacactttaaagaattcttcaaccccccaagggacagttatggtcctttgattctctgctgtgg

SEQ ID NO: 201127 - DNA, 817 bp, Homo sapiens
  Payload ID: 19698
  Gene Name: zinc finger and BTB domain containing 8 opposite strand
  ENST ID: ENST00000492007
  CDS Start-End: 1-266
gagtgtctaatcctgcagtcatggcgcaggaagaggaagatgttagagattacaatttgactgaagaacagaaggcgatcaaggccaagtatccgccagtcaataggaagtacgagtatttggatcatacagcagatgtccagtggggagaagaattttcattgtccaagcaccctcagggaacagaagtcaaagcaataacatattcagcaatgcaggtctataatgaagagaacccggaagtttttgtgatcattgacatttaagacaccaaaaaataaaagactcctacgaagaactgtttttgttttcctcttccttttgagaagacactatgaattaaattctacagcttttttttgatatatggaaatttgtagaacagaaatattttagttaaagtgtgactttcagaaagggaaaatcagggcacagccttggtctgtgttccccaaatattcacactttaaagaattcttcaaccccccaagggacagttatggtcctttgattctctgctgtggcagtaggtgtgcctcatgcccttccagtgcaatgcaagccctccagcctcaccccagagaggatcactgatgtcagcagcagcctgaggctgaatccaggttgaaagaagaataacttgaaaaaatatatttccacacacagaattttgtttttcttccaagttggttaagacatatattttgtttcttttttttttttttttttgagacggagtctcgctctgtagcccaggctgaagcgcagtggtgtgagctcggcttactgcaagctccacctcccgggttcacgccat

SEQ ID NO: 201128 - DNA, 1943 bp, Homo sapiens
  Payload ID: 19699
  Gene Name: zinc finger and BTB domain containing 8A
  ENST ID: ENST00000316459
  CDS Start-End: 228-1250
caaataccttttgtttctctcacgttggggctacttgttttagggcgcaaaggaacggcctcgaaagggggtccttccccagccgagaaccaggaatcttccctcggcccgcgcgcgcgaccggccggtgcgccgcggcccgcggacaatcctccaaacacagactgtttgacttagaatcttcccttttttactccattcaagagcagcattcataaatttccagaatggagatctcctctcatcagtctcacctcctgcagcaactgaacgagcagcgcaggcaagatgtattttgtgactgcagtattctagttgaagggaaggtcttcaaagcacatcgaaatgtattattcgctagtagcggctactttaaaatgcttctttctcagaattcaaaggagacgagtcagccaaccacagctacatttcaggctttctcccctgacacttttacagttatcttggacttcgtatattctggcaaactgtctcttactggtcagaatgtcatagaagtgatgtcggctgctagcttccttcagatgactgatgtcataagtgtatgtaagacttttattaaatcttccttagacattagtgagaaagaaaaagatcgctatttcagtctctcagataaagatgccaattctaatggtgtagaacgttcctctttttatagtggtggctggcaagaaggaagcagttctccacgttctcacctaagcccagagcaaggaacaggtataataagtggaaaatcttggaataagtataattatcatccagcctcccagaagaatactcaacaacccttggccaagcatgaaccaaggaaagagtccattaaaaagaccaaacatttgagattgtcacagccttctgaagttactcattataagtcaagcaaacgagaagtacgaacatctgattcttccagccatgtttcccagtctgaagaacaagcacagattgatgctgaaatggactctactcctgttggctatcagtacggtcaaggatctgatgtcacatccaaaagctttccagatgatctgcctcggatgcgattcaagtgcccgtactgcacacatgtggtgaagcggaaggcagacctaaagcgccaccttcgttgtcatacaggagaaaggccctatccatgtcaagcttgtggaaaaagatttagcaggctagaccatctaagtagccattttcgaacaatggagataaggattccagatggcacttgagtgaagatgagaatagatcctatgtggagattgtagaagatgggtctgctgatctggtcatccaacaggttgatgatagtgaagaagaagaagaaaaagaaattaagcccaacattaggtagctgtaatgtgaaccaacagagctggcatgtctgcaatttacattgacttcctgtatctctctctttctatggtcggagtctagttaacaaatttatcacactgactttaaagaaatgatctgatataacttgcatgctttctgaacaggccattgtatccattctgaactttgttgccctaaaatgtgttgctgcactggaaagaaagaactagcttgagttggcttgatggatgaacaattatcctcttactttcattacaatcctcttactttattccagagatacctttttcttttaatattggaggatctacttagcaaacttttttcaaagaaaatactttaaataaattcaccacaaccaaactttatgtaagacaatttcaaggtgtttcaaaaacacataactaccaatgtttaatttcacagggaaccagttaagagcacatttaaggatctggcaacccaccttactaaacaaattagtctttctattaatttgagatctgaaacaacctgtcattactctgatatcctgaacgtttaaggattatggaagaagactaaag

SEQ ID NO: 201129 - DNA, 7075 bp, Homo sapiens
  Payload ID: 19699
  Gene Name: zinc finger and BTB domain containing 8A
  Uniprot ID: Q96BR9
  ENST ID: ENST00000373510
  CDS Start-End: 230-1555
agcaaataccttttgtttctctcacgttggggctacttgttttagggcgcaaaggaacggcctcgaaagggggtccttccccagccgagaaccaggaatcttccctcggcccgcgcgcgcgaccggccggtgcgccgcggcccgcggacaatcctccaaacacagactgtttgacttagaatcttcccttttttactccattcaagagcagcattcataaatttccagaatggagatctcctctcatcagtctcacctcctgcagcaactgaacgagcagcgcaggcaagatgtattttgtgactgcagtattctagttgaagggaaggtcttcaaagcacatcgaaatgtattattcgctagtagcggctactttaaaatgcttctttctcagaattcaaaggagacgagtcagccaaccacagctacatttcaggctttctcccctgacacttttacagttatcttggacttcgtatattctggcaaactgtctcttactggtcagaatgtcatagaagtgatgtcggctgctagcttccttcagatgactgatgtcataagtgtatgtaagacttttattaaatcttccttagacattagtgagaaagaaaaagatcgctatttcagtctctcagataaagatgccaattctaatggtgtagaacgttcctctttttatagtggtggctggcaagaaggaagcagttctccacgttctcacctaagcccagagcaaggaacaggtataataagtggaaaatcttggaataagtataattatcatccagcctcccagaagaatactcaacaacccttggccaagcatgaaccaaggaaagagtccattaaaaagaccaaacatttgagattgtcacagccttctgaagttactcattataagtcaagcaaacgagaagtacgaacatctgattcttccagccatgtttcccagtctgaagaacaagcacagattgatgctgaaatggactctactcctgttggctatcagtacggtcaaggatctgatgtcacatccaaaagctttccagatgatctgcctcggatgcgattcaagtgcccgtactgcacacatgtggtgaagcggaaggcagacctaaagcgccaccttcgttgtcatacaggagaaaggccctatccatgtcaagcttgtggaaaaagatttagcaggctagaccatctaagtagccattttcgaacaattcaccaggcatgtaaactcatctgcagaaaatgtaaacgtcatgtgacagatctaacagggcaagtggtacaggagggaaccaggcgctacagactgtgtaatgagtgtcttgcagaatttggcatagacagcctccccattgacttggaagctgaacaacatcttatgtccccatcagatggagataaggattccagatggcacttgagtgaagatgagaatagatcctatgtggagattgtagaagatgggtctgctgatctggtcatccaacaggttgatgatagtgaagaagaagaagaaaaagaaattaagcccaacattaggtagctgtaatgtgaaccaacagagctggcatgtctgcaatttacattgacttcctgtatctctctctttctatggtcggagtctagttaacaaatttatcacactgactttaaagaaatgatctgatataacttgcatgctttctgaacaggccattgtatccattctgaactttgttgccctaaaatgtgttgctgcactggaaagaaagaactagcttgagttggcttgatggatgaacaattatcctcttactttcattacaatcctcttactttattccagagatacctttttcttttaatattggaggatctacttagcaaacttttttcaaagaaaatactttaaataaattcaccacaaccaaactttatgtaagacaatttcaaggtgtttcaaaaacacataactaccaatgtttaatttcacagggaaccagttaagagcacatttaaggatctggcaacccaccttactaaacaaattagtctttctattaatttgagatctgaaacaacctgtcattactctgatatcctgaacgtttaaggattatggaagaagactaaagtgtttgaaatcattcatatttgaaatttttatcattagcttaaaaattactctcagtattgttaaaaaaaaaaaaaagtagaggctggccaaagattatatacagatattttcttaaagcaggaaactaatgttgcctaaaagtcaaggtagtttgtgaagacaatctgtcaatatggttgtccatctctctaaagaaaagcaggctgggcgctgtggctcatgcctataatcccaatactttgggaggccgaggcaggcggatcacaaggtcaggagtttgaaaccagcctggccaacatggtgaaacctcgtctctactaaaaaatacaaaattagccgggcatggtggcgggtgcctataatcccagctactcgggaggctgaggcaggagaatcgattgaacctggaaggcagaagttgcagtgagccgagatcacaccattgcactccagcctgggcaacaagagcgaaactccgtctcaaaaaaaaaaggaaaacaaactaggaggttcttaccatatgtgagtgatttctaacgtttatgtagtgctatattatttataaagtactctctcatgtattttctcagtgaggtggatactatctccgatttacaaatgaggaaattaaggtcagaaagtctgagagagaaaactgatgattggacaggatctgattttaaacaatcctctttcagccttctctccctgtatgtctcctgaaatggcaaagaatagaagtcaaacctcaccagttggcagtcattataaaaataagccaatcagaattagaaagtatgaaaggaggaattgaatcattttcaacaacatacaatatcttgatctagagattttcaaataatgctaagtaatgtccctacagtacctattggtatgtttttatgtcacgttatttatatgtaaatttaaagtataaaactatttgaacaaattattcacttaaatatgttgaacatttttgcttctcttgtttatataatattttcaaaacaaacttttctcctagtatacaaagtttaaacttctcccctttgggctgggcccagtggctcacgcctgtaatcccagcactttgggaggctgaggcaggtggatcaccgaggtcgggagtttgagaccagcctgaccaacatggagaaaccccgtctctactaaaaatacaaaattagccgggcgtggtggtgcatgcctgtaatcccagctactcagaaggctgaggcaggaggatagcttgaacccaggaggcagaggctgcggtgggctgaggttgcgccattgcactccagcctgggcaacaagagcgaaactccgtctcaaaaaaaaaaaaaaaaaaaacttctcccctgcataaattatgaaacattccaaaattacagctaaattagagaagcattgtttcagttctaaaggtaaaatctaaatatccgaagtaaagaactgagcttcataaaggtctcttctgcaagttatcacagtgaagcttgatagaatttcactgtatatggagaggctccatctattttactgttttcttttttgtttttgtttttttttcgagacggagtctcgctctgtcgcccaggctggagtgcagtggtgcaatctcagctcactgcaagctccacctcccgggttctcgccattctcctgcctcagcctcccgagtagctgggacttacaggcgcccaccaccactcccagctaattttttgtatttttaatagagatggggtttcaccgtgttagccaggatggtctcaatctcctgatctcgtgatccgcccccctcggcctcccaaagtgctgggattacaggcgtgagccactgcgcccagccaattttactgtatttttaaatgccatgacatacctcaaaattatcctttttatgttactattttctcttgttctttcattaattattgtccttgataccaatttctaggctaaattggttactttcttttaaaaaatttaaaaatagatgaataaccacttgtttcatggtacttaattgagactttttcaagattcccctgatggcacatttgcagttgcttcaagactggatgatgtgcattgagttctctgttctcccaacatggctgttcctaaatcaggattctggtttttttgagatggactctcgctctgttgtccaagctggagtgcagtggcgtgatctcgctcaccacaacctctgcctcccgggttcaagcgattctcctgcctcagcctcctgagtagccgggactacaggcatgtgccaccatgcctggctaatttttgtatttttagtagagacagggtttcgctatgttggccaggctggtctcgaactcctgacctcgtgatctgcccgcctcagcctcccaaagtgctgggattacaggcgtgagccagcacgcccggcctaaatcaggattcttaacaattaaagtgtatctgaatgaggaaggaaacgcttgtcattctctagtcttacccaattaatactgacaccttttgaaattaaaacctgattttttagttgttggagccagtaggaaaaatggctgatttgaacttttttcctataaatgaagtagtgcttgcatgtgtgtactctaatgcactttagtctatgatctaaatgtccttttatgctattatcttctgcatgcaaactttacatacatcagcatgaatatccaacattcactgaacacagtgccaccagcacttgtaattgccttttcagaaataatgctttctcataattgtttataacgagcatcaaactatccccacaaaatgatcaagttcaccaaactagacaaagaatctgttgtatcattttaacatcatagaagaacatttaagacatgtttgtaagttgtaaataatgactccagttatagcatatatatctaagacgttagagaccagttattttctagagtgaaactgtctattgatgattgagaaaattgaattctttggtttttacatgtgggcaaatgttacataggggtataatctgtttaaataagctttatttatgccaaggattttttttttaatatcaagacttggttagaccaaagtttgctcttgcaggaatgccatttatcagcttctgaatgcccttctaactccattaccctcaagagtgtctgggtataggatgaagcattacaaaaagaaagcaccactgcagtcatgcctagtgtctgggagaaacaaaatggactagacctgcagtttaaaataatttaacccgagaaactcttcaaatgaattgtttcctaaagatgctcaaatttaagggataaactctaaaatcagagctgctgtggttaaagtcccccacaaacctttccccagacacctctgcagaactcaggtgcacaatgttgaaaaccatggaattagacaacttcctgaattccctttgagccttgcagcctcatttcgttactcctgttactcacggtgcttataagcaggtaaccatatggtctcttagtgaagcaaatcacatccttagcacatgatgttccttctatgggtatcagatcttaagactttttaaaatttaggaacaaatgtttcaatattatattttcagtaatgcaatcaaaataagcatagttactgttttctgtacggctaagtactgcctaatggatgaaagaagtttggtgcttcaattatttatgagctcagaactcaattcattaaagttattttgccaagtcatgccaagatatattgaaatttccactcatattggtttttaaaattttttttagtcctaaaattaataagtatggaaaatcactaaaagcagtgtaggataaggtgtgtttaactggccgggcacggtggctcatgcctgtaatcctagcactttgggaggccgaggcgggcggatcacttaaggccaggtgttcgagaccatcctggccaacatggtgaaaccccgtctctagtaaaaatacaaaaaatagctgggcatgatggtgggtgcctgtaatcccaggtactcgggaggctgaggcaggagaatcgcttgaacccgggaggtggaggttgcagtggccgagatcgcaccactgcactccagcctgggtgacagagcgagactccatcaaaaaaaaaaaaaaaaaaaaaaaagatgtgtttaactgggaagggtgataataatagaataataggtacaggaggaccaaactttagattataaaccagaaagttttgttattttatataagtgtatcagtattactatttatcatttatatagcattttatatttgcaaagtgtttaataatttttgttattctttacatatatatgaaataggacagttatcccacatgaacggtaaataaattgaggcacagaacagtaaaaaaacctcagggtcaggcgtggtggctcacacctgtaatcccagcactttgggaggccaaggcgggtggatcactttaggtcaagagttggagaccagcctggggcaatatagtgaaaccccttctctactaaaaatacaaaaattagccaggcatggtggtgggcacctgtaatcccagctactctgggggctgagacaggagaattgcttgaactcaggaggcggaggttgcagtgagccaagatcacgctactgcactccaggctgggtgacagagcgagactccacctcaaaaaaaaaaaaaaaaaaaaaaaaaagaacctaagacaacccagtgaaatggtagcaaaaaataggaaatataatgatcacattttctgaatcctagaccatcagcctaattcactgaggtgtgttgtgtatcactctattttatagatgattttatataagtaacagtggattgttttaaagctgacgtcattgtatgtggatacattctatatggaataaatgttatgtaaag

SEQ ID NO: 201130 - DNA, 12834 bp, Homo sapiens
  Payload ID: 19700
  Gene Name: zinc finger and BTB domain containing 8B
  Uniprot ID: Q8NAP8
  ENST ID: ENST00000609129
  CDS Start-End: 79-1566
ggtgctccgtggctgcgctgctggaacccgctggaagagatacaggtttgctctggagcagcagcagctggcggagcaatggagatgcaatcctattatgccaagcttttgggggagctgaatgaacagagaaagagggactttttctgtgactgcagcatcattgtggaagggcggatcttcaaggcccacaggaacattttgtttgctaacagcggctacttccgagccctgctcattcactatatccaggacagcgggcggcatagcaccgcctccttggacattgtcacctctgatgccttctccatcatcttagatttcctctattctgggaagttggatttgtgtggggagaatgtgattgaagtgatgtcggctgccagctacctgcagatgaatgacgtggtgaacttctgcaagacatacattaggtcatccctcgacatttgccgaaagatggagaaggaggctgctgtggctgcagcagtggcggcggcagcggcggcggctgcagcggcggcagcagcggcggctcatcaggttgacagtgaaagccccagttcaggccgggaggggacctcctgtggtaccaagagcttggtctcctctccagccgagggagaaaagagcgtggagtgcctgagagagtccccttgcggtgactgcggagactgccaccccttggaactggtggtgagagacagccttggcggtggctcggctgacagcaacctctctactccacccaaacggatagagcccaaggtggaatttgatgctgatgaagtggaggtggacgttggtgaacagctgcagcagtatgctgccccgctgaacctggcccacgtggaggaggccttgccaagcggccaggcggttgacttggcttacagcaactaccacgtgaagcagttcctggaggcgctcttgcgcaacagcgctgccccgagcaaggatgatgcagaccatcacttttctaggagtttggaaggaagaccagaaggtgcaggagtagccatgagttccatgatggatgtccaggctgactggtatggagaggactcaggtgatgtgctggtggtccccatcaagctccacaagtgtcctttctgcccttacactgccaaacagaagggcatcctcaagcggcacatccgttcacacacaggcgagcggccctacccctgtgagacctgcggcaagaggttcactcgacaagagcacctgcggagccacgcactgagtgtccacagatccaaccgtccaatcatctgcaagggctgcaggagaacattcacgagtcacctgtcccaggggctgcggcgcttcgggctgtgtgacagctgcacctgcgttacagacacacccgatgatgatgatgatttgatgcccatcaaccttagcttggtggaggcttcatctgaaagccaagaaaagagcgacacagacaatgactggccaatctatgtggagtcgggtgaggaaaatgaccctgctggagatgattctgatgacaaaccacaaattcagcctaacttatcagaccgagagacacttacgtagcaataaattggtggggaagaggaggttttaaaacttgttagtgctcgttctgttgttgaaagataccatttgtccaattttgtggaaccctgagaggaacattttttcactgttattatatgtgcatttttattagactatctgatagaggttggattttgtgactcaaaggacagataacctttttgtgtggtgcccttggtttctgagggctttgctggccactccttaattctgagtgagtcaaagcaggccctgaggtctcctgtttttcttgctgtgtgtccaaactctggttaggagaaagataagaaaatctccaggcttgtttttatattgattcagtcctctgcattcctttgttatcatcctctttctctaaaaaccattaagttttgggatcaagtttacctttgccaagcctttcctaatgaattccacattaaattttctggcaaagtattaaagagaaaccttcattgatataaagcaggcagggcggtctggctacatgatcataaaaggtactccctaaatctagaacaattttaaaggcttggaatacttatgggcagacgaacatgggaatgatctgaaaggctcattatggcatcctgacttgcccagttgaattaaattttaagttagccctgagaagggaggctatgaccccaggtctggatggtttccctgtctggtttggcatttgacgattctacacatacaacctgttctgttatcataaaacaactcatttgggcaaaactcaaaatgctcccctactttttccagcaatttccaaaagctggagctgtgtaacttggaaatgtagctgcctctggcattcttttacttagtttatgctgatgtagggcaggtgagcccaaaaattggggcttagcccagaggagttcttggcttcacccaggaaagaattcaagggcaagccagtggtgttagacagcagcttgtattgaagcagcagtgcccaacagcagctaaggggccgctcctcgtggagcagggctacaccataggcagtgtgcccagagtagtagctcagaggcaggtcggcacttatatttatacccacttttagttacatgcaaattaaggggcagattatgcagcaatatttaggaaaatggtggtaacttccaagccgctgggtggttgccatgataaggggcagtgacttccaggtgttgccatggcaatggtaattgacatggcacagtgataagtgtttcttatggaaatctgcttcctgcaccaccctcccaccaccgccctgttttagctagtcctcaatttggtccatgtccgagtccggcctttggagttgagtcctgccttctacctccttgcctagaactttaattggagggaaagtataagcccataatgccaagtaacatttctaaaatgttcatcttttaaaagatcttcatgagggaaagggaaggttagtagcagaacaggtttttaaaagcagtctacctttcgcccactttccagccacacaattattgtaacaaaagaggctgaactctttaaagggctaaagggcaggcagtgttaggaattcggaatgtaattgaaggcaatttccataattttgtcttatgttaaaatatccaaaatggattttaaaagaaatcttcttgtcttcctttaagtgtagttgtctttcaaaaggtggtaaaagtcacttttatttctacctcttgaacaacaaaaaagtcaaaaacattataaattggcttgtaaatgttagccaaagcattagacaggtgtttaagtcgtacttctcaatagtagttaaaactggaacagtgcaactcaaactctggcccacagagaggccctgttctgtaaactgttttctaccagtctgctacaaggaaagtcagaaattaagaatacacatatagaaatgttgataacactttgacattgctgtgactcatggctttgtcttcttgagtgaggtatggaccagttcagttctggtcagctagagggccacatggtgcagaggttggataccagcctgtacagcaggaccacgtattggtctgcagtagaatggaaaatttaaaacttctcttatcacaggtagttcgataaatatcattcttggctgtgtgcggtggctcacgcctataatcccagcactttgggaggccaaggcagatggaacacttgaggtcaggagttcgataccagcctgaccaacatggcgaaaccccgtctctagcaaaaatacaaaaattagtcaggagtggtggcatgtgcctgtaatcccagctactcaggaggctgtggcgagaggaacacttgagcctggaaaaggttgcagtgagctggaatcgtgccactccactccagcctgggcaacagtgtgagaccttgtctcaaaaaaataataataaaataaataaataaaagaaaaatattctagatcaagagttactcattgaaaattatcagggaccagagatatttgtcttatctgaaataaaaatactagctgtggccaggcgcagtggctcacgcctgtaatcccaacactttgggaggccaaggcaggtggatcacctgaggtcgggagttcaagaccagcctggccaacatggagaaaccccgtctctactaaaaatacaaaattagccaggcatggtggcgcatgcctgtaattccagctactcaggaggctgaagcaggagaatcgcttgaacccaggaggcggaggttgctgtgagccgacatcacaccactgcactccagcctgggcaacaagagcgaaactgtctccaaaaatgtatacatatatttgctgttattttaaaagagggatctcagcaaaaaggaaacctaaatggatgtgtagaagatttacttggccaggaacagtgtttgatatttttgctttctctgtttaaattatctctgatgttttaatgacttttctacctcatagttcagcctctttgcctgctttctccagtggagctatgatcctcttcagtgattccgtgacctcttcatatccctgggtaaaacattttacattagagatttcactgtaggacagtgattctcagttgggggtgatttcgtgccttgcaggtggctactggcatctagtgggtagaggccagggaagctgccaaacatcctgaaatgcacaggacagtccccacaacaatgaattctccaattcaaaatgtcagtaataccaatgttgagaaactctgctgtaagataaagtaggattttttaaaggatctttaatgagtggacttaattttgtgttctattttaagctaccttttacctgcataatatttatttatttttaattttattttatgtatttatttatttattttgagatggagtttcatctttgtcacccaggctggagtgcaatggcgtgatctcggctcactgcaacctccacctcccaggttcaagagattcttctgtctcagcctcttgagtagttgggattataggcacgcgccaccacgcctggccaatttttgtatttttagtagaaatggggtttcaccatgttggccaggctggtcttgaactcctgacctcaagtgatccgcctgcctcagcctcccaaagtgctgggattacaggcgtgagccaccgtgcctggctgaccttcataatatttagtagccccttatactctcgcaaattttagaaaatagtggattagtaaaatgaagcgctgaggccagatggttcatagcttgcccaagatctgatttaggtttataatgtggaaacttagaaaattctgactcattcatacacccagaatcgttactaggttctgatcattttgttaatttttaaagtagcagaatcactgggaagaaaacagaatgtgacacctaatgtttaaatgattctctttctttcgtaatatctcagattgttgcatttctggtggactatttggagtttgtgtataggcactggcaataactggatcactgagttctatcacttttaaaggagatacttcctctgtctagactatcagatcataaattggtcccctttaggtggtcagtatttataatcacagtgtctttgaggtttaatttgtggggttggtggtatttttatactaagtaaatttacagttgagcccaacacagaccgttagtggtttagtttctattctggcacattccacccaagttcacaaagggatattttcgtctcatattagatgtattgcatgaatgggaacaggactcttacttgtaatggaattccaaaatggcattcttgggaagttatttctcttgggggatgaggacccccttctcaaaagttgagaaggaatgtaaatagggccttacctataataattaagaaatgacatagtgcatcatgattctgatcatttggcagaaagatgccgttctgatgtaaatattttggtggccaccagactttgaatattccttaaggaagctgctgacctagtgttctgcaacatgttatggaattgagtattctggtggtttggaatactgagatgggttttttttgttattgttcattgatgtcgtgacaaaccccagggagagaaaggcaacaggtagggctgcatgcactgattctgggagccgtaggaaagagtggagtggcctttggttaactgaactcagactgttttatttggaactctagatttttcttgtgtgtgtcccttgtgcattaagagaatgatctctgtgaagtctagtgtaatggggtagggaggggcaaagggttgggatgggtgagaagttcctattatgctctgttttgagcattcccactgtgcttcctgttgttgctggtctcttgtagcttgccttgtgttttcatgtgatcacactatcttctaacctgataaagggacactttattcaggtgcatatgatgggcactgttttcattgatttctgttgcttttgtagttctctccactcaacagtactgtgttccacaaacctttcattgtagtgctggaaatttgaattcttttcttcaaatgatgtttctgtagagaaaaacgaaaagtgttttggggtcagagtagtttggttggttcctaaacatgtcctagtttttgttgttgttgttgtttttcttttctttttttttctgagacggagtctcgctctgttgcccaggctggagtgcagtggcacaatctcggctcactgcaagctccgcctcctgggttcatgccattctcctgcctcagcctcctgagtagctgggactacaggcacccgccaccatgcccagctaattttttgtatttttagtagagacggggtttcaccgtgttagccaggatagtctcaatatcctgaccttgtgatccacccgcctcggcctcccaaagtgctaggattacaggcgtgagccaccgcgcccggcctaaatatatcctagttttaaaaggtgacagtaactcacatgactgcatgatcggatgacatggaaacttcataactgaaggagaacatttagcatccgtcttgaccctccaggtagattattttactactgccaattcttcattgacaattgtggttttagggggggcaatttttatatccatcatttgatttctggacctttgtcagttaatcagtggaggttagggcagggattatgtgctttgatgaggaaggtttagtagtaacaagcttggggattttgaaggaaggcatcaatttcatatacaggtcttggtgacatgtaatggatatggattatctgtcatgcatacagtgaagggtatggtcaggatttttttggaagtagaaaaacataccaaacagtttcacatcttttaccatccatagcccctgaggagcatctactgccatcagaaaaacatgcaaataatactgcagtgccctccaagggtcttaggcccaactgaaggtttagaaacattcaaatttataaactgccacacttggcatcagattcacttaaaaggatatagaatgggaagcactgcttactagcaaggcagaaccagttgctcttctctgaaagtctctgcagctgtctgtgtggcatagtgcaggtgcaaggagacagatctacatggggcaagtatggaagcttccccggcttaagagccccttgtcccacaggaacaagtatctcttataacagcttcatagacatggcctccagtgtccctataaaagacatgcctgttccaagcgtcactgtacttagggatgcccagagctgaggcttcctatcaggcatttatagttctcccagtccagatgcagtttaccaattgggcatcatgtctaccatatgtaacattgcctagcagttgacatatgaatttttattaggttgccaggggaacagagctagaaagttaacaaaggtaaaattctcatgcagaagggaaagaggctttgttaatactttgccaaacactatgctaagcaattgcataacagatattacacctaattcctatagaatatagccagaggaatttcctagtaaaatataacccaccctaactcatttttcctttcttgaatagtgttgttggtgcttagttgcttgtgattaatagacagtttgcaaattttggtaaggtgtgtgtaagagttggcttaacagtcaaaatgatcctagccaaaatatcatgtatcctttggtgtcactcataataggtgagtatagtatgtcgtactgtagggacattattgaatggacatgtctgagtattccatcagtcatattttgatgggagcctttggccatctggcaaacaccaaacacaggctcttggtaaccgtgcctttttttttttttttttttttttaaagatggagtttcactcttgttgccaggctggagtgcagtggtgcaatctcggctcaccacaacctccgcctcctggattgaagcgattctcctgtctcagcctcctgagtagctgggattacaggcgcccgccaccacgcccggctaatttttgtatttttagtagagatagggtttcaccatgttggtcaggctgatctcggcctgacctcaggcaatccgcctctgcctcccaaagtgctgggattacaggcgtgagtcactgcgtccggcctgctcttggaaaccgtgcctcttattcctgtgtcatgtggtgctactcttgcctgcttctgttgctcccagcagatcaatgagtgaagatggctggttactcattcagtagttatcaaacaattatttatggagtctttactgtatgtcaagcacgaagggtacttcagtgaaccagcaccatccctgccctcaaggatcctgcagtgtgtaatcacagagactggcagttataacacggcatgttgggtgtgacaacagggacaagcacagggtactctgagaacgcgtgggtcgggtacctagccagtcatagagcctcagagacgctttctgtctaagctactcttcctatccagtaaacttccagctttggcatactatatttataagcagtttaaacagttgctgaaatttattgccttttctcaaacatggtggctttggtcactaacagtgtttaaattatgtgttttattcagttatgcaaaaatatatactatacatagaatatcagaatgttgtagtctttaggaaatatgcatcaggtttgttttttttgtttttttgacagactctcactctgtcgccaggctggagtgcagtggcgcgatcttggctcactgcaacctccgtatcccaggttcaagtgattcccctgcctcagcctcccgagtagctggcactacaggcgtgtgccaccacgcccagctaattttttgtattttataagagatggcgtgtcaccatgttgaccaggatggtcttgatctcctgacctcgtgatctgcctgcctcagcctcccaaagtgctgggattacaggcgtgagccactgtgcctgactgggtggttttcttttttaaaaaataatatggttttctggccgggagcagtggctcatgcctgtaatcccagcactttgggaggtcaacgggggtggatcacctgaggtcaggagttaaagaccagcctggccaacatggtgaaactccgtctctactaaaaatacaaaacaggagaatcgcttgaactcgggaggtagaggttgcagtgagctgagataatgccactgcactccagcctgggcgacggagtgagactccatctcaaaaaaataaaaaataataataatatggttttcttatttaaaaaataatatagtatgtaaattatttttcaagtaaaaatgaaatgacaacaacagataacttcccattatgttgatccagtgtactgtgacagatggggaggagccccactgcatctggagtgggtcttggctggccatgtgaactaattaataccccagaaatcaggatacatgccaggcgtcggggcttacgcctgtaatcccagcattttgggaggctaaggtgggtggatcccttgaggtcaggagtttgagaccagcctgaccaacatggtgaaaccccatctctactaaaaatatacaaaattagcctgtaattccagctacttgggaagctgaggaaggagaattgcttgagcccaggaggtggaggttgcagtgagctgagatcacaccactgcacttcagcctgggcaacgagagcaaaactccatctcaaaaaaaaaaaaaaaaaaaaaaaagaaatcaggatacatataggacagaaccattaaatcaagagatttgaaagttagaagggacaggagagatagtctagtccaactccatgtgacagatgaaatgacgtttctagttctcacacagctggttaggatcagaaaccaggtcctgccaggccagtcctgataatagacagacatgtttgggcaggcagaaaagaccattcatagataacatttgtttccctgggtatccatcagaccagaggcacaggagaggaaaatgctgttttggcctcatatgataaagtatgcattgtgtgattatggtctgcattcttgcaatgcttagacagggagggggaaatcacattttgagcatgggggagttaatttctttgtcctgtaataccacacatatctaaaacataaaccaccatggaacacactcacactcacatacacacaaaaggcaaattaaaatatttattgtccacttaatatgtgttctgtgtttgattgtaatgtattcattttacttataaaaaatttcaaaagtaaaaatatatatattattaacttgaagtgattttttccaacctcgctgatttttttccttctttcttttttgagacagagttccactctgtcacccaggctggagtgcagtggtgcaatctcggcccactgcaatctccgcctccagagttcaaagagttctcatgcctcagcctcctgagtagctgggattacagaggtatgccaccatgcccggctaatttttgtatttttagaagagatggggtttcattttggtcaggctggtctcgaactcctaacctcaggtgatacacccgcctcagccttccaaagtgctgagattacaggtgtgagccaccatgtccggcctctaactgatttttgaaatataaattgggtgtgattcagggaatgtaacaagaacaatcttatttgaaacagaaaaccacatatttttaagtcagcagcccacatgataagatggtattgagtaaaaatgtattcttaggtatttcttgactcagtggattttaatcagtctactgcaaaagctagttttatttaaagggctgcaattatatataagaattattagaaaaacagattagccacttaatctaaaaatacctagatgcagtattcctggtttttaatgaaatatttatctagtttgggattaaaattaacttagggccatcaaaaatgcaaattatctttaatttggttaaatcaacctgggagtaaatggaaataatctcaagctaaatttttgttttgatttatatacagtcagattgaaacaccctagttacaagtttagaataggagtggcctcaacaaaggaaaaagtcctttgttcctctgttgctcattttgtcctcggaaacaaatacaatttaactattttctgtaccgtcccaaatttgaagctgacctgaatttggtacctataaatttaaaatggctaaggttaaaatagttaaaacagtttctttagaatgagttgttagctgggtgtggtagtgtacacctgtagtcccagctactccaaaggctgaggcaggaggattgcttgagcccagaagttcaaagctgcagtgaactaggatcatgtcaccacactccagcgtgggcaacagaatgagaccctgtctcaaaaaaaaaggtttttttttaattgaatgaatgcaataaggaattgaggatcgtctcacattaatgagtgaataacccttcataattttagttactgtttttctcagggcaattattttatataaaattctaatggagaattttatggacaagattttagttaaggaaaaaaataaccccacaaaataaagagaactattagagctctaaacagaagaagcttccatcaaaccgtttttcccacttttttgtcccacggtcttaggaccaacaatttagtaatacgagacaatttctggcagactatcccaagctgggacattttagattctgtgaaagaagactgactactgtctgatgaatgggtaattgatgatgcaatgtatgaaaaaagtaaggcagacaactcaaaaatcacaggaagtgcagccattctacgtgccgagctctacagttacacactgtccaacagctctcggaagaaaaacagaaactgactttatctttgcctgccaagtttgcaaatggattagttcattacaaaggcacttgtcaaaacatatttattaaaaagaggagccagagttggaaatcatcttgaccattaaaaaaatagcaactgataccttgtttaacaagtaagacagtttctgctttttggaattgaattggtttttaagtggtaatgtaccaggtctgtttatataggtcagtgttgcccaggttgtattgttttgctgtttttacttttttatatataaagaactaaaattacgagagaataaattcgtggatataatctaaa

SEQ ID NO: 201131 - DNA, 2716 bp, Homo sapiens
  Payload ID: 19701
  Gene Name: zinc finger and BTB domain containing 9
  Uniprot ID: Q96C00
  ENST ID: ENST00000395064
  CDS Start-End: 269-1690
ttccggtctgggacggagctgtagcggcactgtaactgcgagggcagcgccgcgtgtgtaacggcgggggcgtgtcggcgggaaggacaatcgggccgggactcgcggtgtccgggtgaccgcggcttcccgggagcagacctctgtgggcactgtgaggcggaacggagcggcggggcaggagctgttctgggcagccttcatcccgcgtggagtctacccccaagcccttctcctcttcccaattcttgtcaccttcgaggaggccatggaaaccccaacacctttgccgcctgtacccgcctccccgacctgcaacccagccccacggacaatccagatcgagttcccacagcatagctcgtctctgctggaatctctgaaccgccacaggctagagggaaagttctgtgatgtgtccctcctggtgcagggccgggaacttagggctcataaagcagtgttagctgctgcctctccttacttccatgacaagctgcttctgggggatgcgcctcgtctcactctaccgagtgtcattgaagccgatgccttcgaggggctgctccagctcatttattcagggcgtctccgcctgccactggatgctcttcctgctcatctccttgtggccagtggccttcaaatgtggcaggtagtagatcagtgctcagaaattcttagagaattagaaacttcaggtggtggaatttcagcccgtggaggaaactcctaccatgcccttctttccactacatcctctacaggaggctggtgcattcgctcttcgcctttccagaccccagtacagtcctctgcttctactgaaagccctgcttccactgagagccctgtgggaggggagggaagtgaactgggagaagtgctgcaaattcaggtggaagaagaagaggaggaggaggaagatgatgatgatgaggaccaggggtcagccacactctctcagactcctcagccccagagagtatcaggggtttttccccgtcctcatggaccccacccactgcccatgactgctactccccgaaagcttccagagggtgagagtgcaccacttgagcttcctgcccctcctgcactgccccccaaaatcttctacattaagcaggaacccttcgagcctaaggaggagatatcaggaagcggaactcagcctggaggagcaaaggaggaaaccaaagtgttttctggaggggacactgaagggaatggggagctagggttcttgttgccttcagggccagggccaacatctgggggagggggtccatcctggaaaccagtggatcttcatgggaatgaaatcctgtcagggggtggaggacctgggggagcaggccaggccgtgcatgggcctgtgaagctaggggggacaccccctgcagatggaaaacgctttggttgcctgtgtgggaagcggtttgcagtgaagccaaagcgtgaccggcacatcatgctgaccttcagccttcggccttttggctgtggcatctgcaacaagcgcttcaagctgaagcaccatctgacagagcacatgaagacccatgctggagccctgcatgcctgtccccactgtggccgtcggttccgagtccatgcctgttttctccgccaccgggacctatgcaagggccagggctgggccactgcccactggacttacaagtgactgctgaggctatacactagcttctagaacaagataaccactgctgctgatggatacttttccctcactgccatggcacaccagtcatggatcttgtaatcatgccaagagaatagatacattatggacctcttgttcttagatatgggcctctcagcctggcagatgtggaaactcaaatttctcgtcccactccaggttttggctagccaaccctgcaggaaagtggtttataggccattcatacttaagttgatcacttgcccatggtggacatttttgtggtggtgatgtccattaaggaaaccagattttcaattatttagtgagagaagagttagagcaaaagacagtggtaaatgttttattccgtctccatgaggaattgaaggagttggtctccacctagagatacatttgatttacagcttaagtaattcagaggctaagctctaagcttttttctctcattgctggaatgatttaagcagaagtccttttgtgtacttttaaaattgtatctttccaggagcccctcagattgtaccttgctttctcaccaatagacaccttcccgacacttttttaatgttgtagctgagcactttaacaagttgagcattccatgtttcattcttagaaccttctttaatagagggtcttccctcaacagcctgtgcctctggtctacctttgaccaccactgataactaatatattggtcacaatgactggaatgtgactagtgatctcaggagatggcactgtcctaaagtgctgtcagggtggcaccactgctctctgaacaacttaccttggtcagagggactcaggtttgggacagcacaagctgaaggctggagagtaacttgcatagtaggaccatacctcttcctttcccatcccacccacatatgatagacagcccctctgttgagatatggaggggacagatactggaatcgggggtgggacttgcagttacttaaaattttttaataaactgtgccctgaaacctaaactga

SEQ ID NO: 201132 - DNA, 2716 bp, Homo sapiens
  Payload ID: 19701
  Gene Name: zinc finger and BTB domain containing 9
  Uniprot ID: Q96C00
  ENST ID: ENST00000414934
  CDS Start-End: 269-1690
ttccggtctgggacggagctgtagcggcactgtaactgcgagggcagcgccgcgtgtgtaacggcgggggcgtgtcggcgggaaggacaatcgggccgggactcgcggtgtccgggtgaccgcggcttcccgggagcagacctctgtgggcactgtgaggcggaacggagcggcggggcaggagctgttctgggcagccttcatcccgcgtggagtctacccccaagcccttctcctcttcccaattcttgtcaccttcgaggaggccatggaaaccccaacacctttgccgcctgtacccgcctccccgacctgcaacccagccccacggacaatccagatcgagttcccacagcatagctcgtcgctgctggaatctctgaaccgccacaggctagagggaaagttctgtgatgtgtccctcctggtgcagggccgggaacttagggctcataaagcagtgttagctgctgcctctccttacttccatgacaagctgcttctgggggatgcgcctcgtctcactctaccgagtgtcattgaagccgatgccttcgaggggctgctccagctcatttattcagggcgtctccgcctgccactggatgctcttcctgctcatctccttgtggccagtggccttcaaatgtggcaggtagtagatcagtgctcagaaattcttagagaattagaaacttcaggtggtggaatttcagcccgtggaggaaactcctaccatgcccttctttccactacatcctctacaggaggctggtgcattcgctcttcgcctttccagaccccagtacagtcctctgcttctactgaaagccctgcttccactgagagccctgtgggaggggagggaagtgaactgggagaagtgctgcaaattcaggtggaagaagaagaggaggaggaggaagatgatgatgatgaggaccaggggtcagccacactctctcagactcctcagccccagagagtatcaggggtttttccccgtcctcatggaccccacccactgcccatgactgctactccccgaaagcttccagagggtgagagtgcaccacttgagcttcctgcccctcctgcactgccccccaaaatcttctacattaagcaggaacccttcgagcctaaggaggagatatcaggaagcggaactcagcctggaggagcaaaggaggaaaccaaagtgttttctggaggggacactgaagggaatggggagctagggttcttgttgccttcagggccagggccaacatctgggggagggggtccatcctggaaaccagtggatcttcatgggaatgaaatcctgtcagggggtggaggacctgggggagcaggccaggccgtgcatgggcctgtgaagctaggggggacaccccctgcagatggaaaacgctttggttgcctgtgtgggaagcggtttgcagtgaagccaaagcgtgaccggcacatcatgctgaccttcagccttcggccttttggctgtggcatctgcaacaagcgcttcaagctgaagcaccatctgacagagcacatgaagacccatgctggagccctgcatgcctgtccccactgtggccgtcggttccgagtccatgcctgttttctccgccaccgggacctatgcaagggccagggctgggccactgcccactggacttacaagtgactgctgaggctatacactagcttctagaacaagataaccactgctgctgatggatacttttccctcactgccatggcacaccagtcatggatcttgtaatcatgccaagagaatagatacattatggacctcttgttcttagatatgggcctctcagcctggcagatgtggaaactcaaatttctcgtcccactccaggttttggctagccaaccctgcaggaaagtggtttataggccattcatacttaagttgatcacttgcccatggtggacatttttgtggtggtgatgtccattaaggaaaccagattttcaattatttagtgagagaagagttagagcaaaagacagtggtaaatgttttattccgtctccatgaggaattgaaggagttggtctccacctagagatacatttgatttacagcttaagtaattcagaggctaagctctaagcttttttctctcattgctggaatgatttaagcagaagtccttttgtgtacttttaaaattgtatctttccaggagcccctcagattgtaccttgctttctcaccaatagacaccttcccgacacttttttaatgttgtagctgagcactttaacaagttgagcattccatgtttcattcttagaaccttctttaatagagggtcttccctcaacagcctgtgcctctggtctacctttgaccaccactgataactaatatattggtcacaatgactggaatgtgactagtgatctcaggagatggcactgtcctaaagtgctgtcagggtggcaccactgctctctgaacaacttaccttggtcagagggactcaggtttgggacagcacaagctgaaggctggagagtaacttgcatagtaggaccatacctcttcctttcccatcccacccacatatgatagacagcccctctgttgagatatggaggggacagatactggaatcgggggtgggacttgcagttacttaaaattttttaataaactgtgccctgaaacctaaactga

SEQ ID NO: 201133 - DNA, 673 bp, Homo sapiens
  Payload ID: 19701
  Gene Name: zinc finger and BTB domain containing 9
  ENST ID: ENST00000612407
  CDS Start-End: 1-349
catttattcagggcgtctccgcctgccactggatgctcttcctgctcatctccttgtggccagtggccttcaaatgtggcaggaggctggtgcattcgctcttcgcctttccagaccccagtacagtcctctgcttctactgaaagccctgcttccactgagagccctgtgggaggggagggaagtgaactgggagaagtgctgcaaattcaggtggaagaagaagaggaggaggaggaagatgatgatgatgaggaccaggggtcagccacactctctcagactcctcagccccagagagtatcaggggtttttccccgtcctcatggaccccacccactgcccatgactgctactccccgaaagcttccagagggtgagagtgcaccacttgagcttcctgcccctcctgcactgccccccaaaatcttctacattaagcaggaacccttcgagcctaaggaggagatatcaggaagcggaactcagcctggaggagcaaaggaggaaaccaaagtgttttctggaggggacactgaagggaatggggagctagggttcttgttgccttcagggccagggccaacatctgggggagggggtccatcctggaaaccagtggatcttcatgggaatgaaatcctgtcagggggtggaggacctgggggagcag

SEQ ID NO: 201134 - DNA, 575 bp, Homo sapiens
  Payload ID: 19701
  Gene Name: zinc finger and BTB domain containing 9
  ENST ID: ENST00000621915
  CDS Start-End: 161-575
gcacttggcgacggtgtccggcggggaggcggcggcttccggtctgggacggagctgtagcggcactgtaactgcgagggcagcgccgcccttcatcccgcgtggagtctacccccaagcccttctcctcttcccaattcttgtcaccttcgaggaggccatggaaaccccaacacctttgccgcctgtacccgcctccccgacctgcaacccagccccacggacaatccagatcgagttcccacagcatagctcgtctctgctggaatctctgaaccgccacaggctagagggaaagttctgtgatgtgtccctcctggtgcagggccgggaacttagggctcataaagcagtgttagctgctgcctctccttacttccatgacaagctgcttctgggggatgcgcctcgtctcactctaccgagtgtcattgaagccgatgccttcgaggggctgctccagctcatttattcagggcgtctccgcctgccactggatgctcttcctgctcatctccttgtggccagtggccttcaaatgtggcaggtagtagatcagtgctcagaaattctta

SEQ ID NO: 201135 - DNA, 570 bp, Homo sapiens
  Payload ID: 19701
  Gene Name: zinc finger and BTB domain containing 9
  ENST ID: ENST00000612775
  CDS Start-End: 334-570
atatatccacatttatctcttttaaaaattacctagaaataaggtttctttaattgctggttaaaatgctcccgtgcagaaaacaggaaagaacctgcctggttccttagcaaatctgagttccagtcccaggtccactactattagctgagtgacgcttccagcccgtttcccccgcctggaaactgaggacggcaacccccaccctcgcagggccggtgggaagacacaaagtgatgtgggcaagtgccaggcccacatgccttcatcccgcgtggagtctacccccaagcccttctcctcttcccaattcttgtcaccttcgaggaggccatggaaaccccaacacctttgccgcctgtacccgcctccccgacctgcaacccagccccacggacaatccagatcgagttcccacagcatagctcgtctctgctggaatctctgaaccgccacaggctagagggaaagttctgtgatgtgtccctcctggtgcagggccgggaacttagggctcataaagcagtgttagctgctgcctctccttacttccatgacaagctgcttctg

SEQ ID NO: 201136 - DNA, 2054 bp, Homo sapiens
  Payload ID: 19702
  Gene Name: zinc finger and SCAN domain containing 1
  Uniprot ID: Q8NBB4
  ENST ID: ENST00000282326
  CDS Start-End: 248-1474
gtgcggggatggggtccgcccgcggcgttgggcgcgctcgccagcccaggggtcgccatgaccgagtggcccaggcccgagcgaagcccgcgcgcggtcacatgggagcccgacaccatttggaggagattcagagaagcccctgattgctgattctgtccgcctgccacaccggctctgtccggagccactgggactcgggatccagtccacacacacccctcagaggggcactgtggccagagaaatgcttccacggcccaaagcccctgcctcccccagacgcccccagaccccaaccccgagtgagcaggacgcagaccctgggccagcaagccccagggacaccgaagcccagcgtctgcgcttccggcagttccagtaccacgtggcgagcgggccgcacctcgcgctgggccagctctggacgctgtgccgccagtggctgaggcccgaggcgcgctccaaggagcagatgctggagctgctggtgctggagcagttcctgggcgcgctgcccagcaagatgcggacctgggtgcagtcacagggcccccgaagctgcagggaggccgccagcctggtggaggacctcacacagatgtgccagcaggaagttctggtatctctggactcggtcgaaccccaggactggagtttcggtgaggaggaagatgggaagagtccaaggtcccagaaagaaccatcgcaggcgtctgagctgattctggatgcagtggcagcagccccagcactccccgaggaaagtgagtggctggagactacccagctccagcagagtctgcacaccagggcggaggccgaagcgccccgcgcccctggcttgctggggtcccgggcccgcttgcctctgaagccgagtatctgggacgagcctgaggaccttctcgcagggccctcctcagacctgcgggcagaagggactgtgatctcgagccccaagggtccaagtgctcagagaatcagtccccgaaggagaaacaggaacactgaccagagcggccgccaccagccatccctcaagcacaccaaaggtggtacccaagaggctgttgcaggcatctcggtagtgccgcgtgggccccgaggtgggcggcccttccagtgtgccgactgtgggatggtcttcacctgggtcacccacttcatcgagcaccagaagacccatcgcgaggaagggccctttccgtgccccgagtgtggcaaggtcttcctgcacaactccgtcctcactgagcatggcaagatccacctgctggagccaccgaggaagaaagccccccggagcaagggcccccgggagtccgtcccacccagggatggagcccagggcccagtggcccctcgcagccccaaaagacccttccagtgtagcgtctgcgggaaggccttcccctggatggtccacctcattgaccaccagaagctccacacggcccacggccacatgtgaatggccagcctcgggcctcggccacccggccctgagtccctggggggagctgatgggccccagaagatgggggacatcccccagccccaccaacccctggccaccttgggactcctcttgaaggacacaagctgtttctcggaagaccctggacacctgctccgaagccaagcacgggatggggcttcccagggtctcagctgagaagcagcagttccacagcacagcctggtcagtcctgcgcactatagttttgcaagtggcttgaagaggagtttcattcgcgtcccatctttcagaagccttgtccaggtctccctgttagcacctgactcagcggcagcttctgccgctgggttttcatttcactgtggatatccctgaggccatgagggtgggagccggcctgggcagctccaactccagagaagggtacagctgaccccggctgccctcctgccagcttagcccccttggaacctaacagataaacagggttttgtttttttccttttttgggtaaagtacatgcaacataaaatttaccatttcagtcattaaaaatgaacagttcagtggc

SEQ ID NO: 201137 - DNA, 952 bp, Homo sapiens
  Payload ID: 19702
  Gene Name: zinc finger and SCAN domain containing 1
  ENST ID: ENST00000391700
  CDS Start-End: 345-881
agcggaccaatggcggccgcccgcggcgcgcagggtgcggggatggggtccgcccgcggcgttgggcgcgctcgccagcccaggggtcgccatgaccgagtggcccaggcccgagcgaagcccgcgcgcgacctcagcccaggaccctggaggatgctgaggggctacagcccccctccctagagtctccagggtcacatgggagcccgacaccatttggaggagattcagagaagcccctgattgctgattctgtccgcctgccacaccggctctgtccggagccactgggactcgggatccagtccacacacacccctcagaggggcactgtggccagagaaatgcttccacggcccaaagcccctgcctcccccagacgcccccagaccccaaccccgagtgagcaggacgcagaccctgggccagcaagccccagggacaccgaagcccagcgtctgcgcttccggcagttccagtaccacgtggcgagcgggccgcacctcgcgctgggccagctctggacgctgtgccgccagtggctgaggcccgaggcgcgctccaaggagcagatgctggagctgctggtgctggagcagttcctgggcgcgctgcccagcaagatgcggacctgggtgcagtcacagggcccccgaagctgcagggaggccgccagcctggtggaggacctcacacagatgtgccagcaggaaggtgagaggcgcaggcttcctgccccgggccgggccagggggcctgacgtctccgaggaccgaactgccctccttcccgcccacatcgctcccacccctgcccggcccctcccgaccagcaaacctctcctgccccgcggctgtgtttttaattatttttacatataaatgtgctgcacgcctcatctgcctcgaatttctcactcagtcggtgattaaagatccctccatttcccatg

SEQ ID NO: 201138 - DNA, 813 bp, Homo sapiens
  Payload ID: 19702
  Gene Name: zinc finger and SCAN domain containing 1
  ENST ID: ENST00000601162
  CDS Start-End: 208-744
ccagcccaggggtcgccatgaccgagtggcccaggcccgagcgaagcccgcgcgcggtcacatgggagcccgacaccatttggaggagattcagagaagcccctgattgctgattctgtccgcctgccacaccggctctgtccggagccactgggactcgggatccagtccacacacacccctcagaggggcactgtggccagagaaatgcttccacggcccaaagcccctgcctcccccagacgcccccagaccccaaccccgagtgagcaggacgcagaccctgggccagcaagccccagggacaccgaagcccagcgtctgcgcttccggcagttccagtaccacgtggcgagcgggccgcacctcgcgctgggccagctctggacgctgtgccgccagtggctgaggcccgaggcgcgctccaaggagcagatgctggagctgctggtgctggagcagttcctgggcgcgctgcccagcaagatgcggacctgggtgcagtcacagggcccccgaagctgcagggaggccgccagcctggtggaggacctcacacagatgtgccagcaggaaggtgagaggcgcaggcttcctgccccgggccgggccagggggcctgacgtctccgaggaccgaactgccctccttcccgcccacatcgctcccacccctgcccggcccctcccgaccagcaaacctctcctgccccgcggctgtgtttttaattatttttacatataaatgtgctgcacgcctcatctgcctcgaatttctcactcagtcggtgattaaagatccctccatttccca

SEQ ID NO: 201139 - DNA, 2463 bp, Homo sapiens
  Payload ID: 19703
  Gene Name: zinc finger and SCAN domain containing 10
  Uniprot ID: Q96SZ4
  ENST ID: ENST00000252463
  CDS Start-End: 89-2266
cagcccagaggaccccaggcgaccagagtccaggctgaggcccgaggtggctcaccagctgttcagatgcttccagtatcaggaggacatggggccacgggcgtccctgagccggctccgggagctctgcggccactggctgcggccggctctgcacaccaagaaacagatcctggagctgctggtgctggagcagttcctgagtgtgctgcctccgcacctcctgggccgcctgcaggggcagccgctcagggatggggaggaggtggtgctgctgctcgagggcatccaccgggagcccagccacgcggggccgctggattttagttgtaatgctggcaagagttgtccccgtgcagacgtcaccttggaggaaaaggggtgtgcttcccaggtccccagccacagccccaagaaggaattgcctgcggaagagccttcagtgctgggcccatcggatgagcctccccgaccccagccaagggctgcccagcctgctgagccgggacagtggaggcttcccccaagttcaaagcagccgctgagcccggggccccagaagacattccaggccctgcaagaaagcagtccccagggcccctcaccatggccagaggagagttcccgagatcaggagctggcggctgtgctggagtgcctgacctttgaggatgtgccagagaataaggcgtggcctgcacaccccctgggattcggaagcagaaccccagacaaggaggaatttaaacaagaagagcccaaaggggctgcctggcccactcccatcttagcagagtcccaggcagatagtcctggggtgccgggagagccttgcgcccagtcgctcggacggggcgctgcggctagcggccctggtgaagatgggtcccttcttggcagcagtgaaattttggaggtcaaagtggctgagggcgtccccgagcccaatccggagttgcagttcatctgcgcggactgcggggtgagcttcccgcagctgtctcgcctgaaggcgcaccagctgcgctcgcacccggctgggcgctccttcctgtgcctttgctgcgggaagagcttcggccgcagctccattctcaagctgcacatgcgcactcacacggacgagcggccgcacgcctgccacctgtgcggccaccgcttccgccagagctcgcacctgagcaagcacctgctgacccactcctccgaacccgccttcctgtgcgcagagtgcggccgcggcttccagcgccgcgccagccttgtgcagcacctgctggcgcacgcccaggaccagaagccgccctgcgctcctgagagtaaggccgaagcgccgccactgaccgatgtcctgtgctcccactgcggccagagcttccagcgccgctccagcctcaagcgccacctgcggatccacgccagggacaaggaccgccggtcctccgaaggctccggcagccgccgccgggactccgaccggaggcccttcgtgtgcagcgactgcggcaaggccttccggcgcagcgagcacctggtggcccaccggagggtgcacacgggcgagcggcccttctcctgccaggcttgcggccgcagcttcacgcagagctcgcagctggtcagccaccaacgggtgcacacgggcgagaagccctacgcctgtccgcagtgcgggaagcgctttgtgcgccgggccagccttgcccgccacctgctgacccacggtggccctcggccccaccactgcacccagtgcgggaagagtttcggccagacccaggatctggcccgccaccagcgcagccacacgggcgagaagccctgccgctgcagcgagtgcggtgagggcttcagccagagcgcccacctggcgcgccaccagcgcatccacacaggggagaagccccacgcctgcgacacctgcggccaccgtttccgcaatagctccaacctggcccgccatcgccgcagccacacgggcgagcggccctacagctgtcagacgtgcggtcgcagcttccggcgcaacgcgcatctgcggcggcacctggctacccatgcggagcccgggcaggagcaggccgagcccccgcaggagtgcgtggagtgcgggaagagcttcagccgcagctgcaatctgctgcgacacctgctggtgcacacgggcgccaggccctactcctgcacgcagtgtggccgcagcttcagccgcaactcccacctgctgcgccacctgcgcacccacgcccgcgagacgctgtactagcttggcccgccttccgccagccgcgccctgcgccacctacccggggtcctccacagcggaggcctgcaggaatgtcccttcccaccacaccccacttccctctccttccactttcacagctgtccttccctggccgaggcattgctttctggcctcagctatgtaattaaaacgcccgaagtaaaatggccttctcc

SEQ ID NO: 201140 - DNA, 2350 bp, Homo sapiens
  Payload ID: 19703
  Gene Name: zinc finger and SCAN domain containing 10
  Uniprot ID: Q96SZ4
  ENST ID: ENST00000538082
  CDS Start-End: 317-2248
tccattttcccagagcccttccccaggctggcggaggctggctttggccctggagtcctcagaaaaccccccagcatctctgcctgtgtagtggggactccgagtggtgtgggaggagaggagagagacccaagagcggggctggcgttagggaggcatccccgcagtgaaggatgcttggagaatcagtcccagctgccgtggagcaggagcagctgggggaagtcaagctggaggaggaggaggctgtcagcccagaggaccccaggcgaccagagtccaggctgaggcccgaggtggctcaccagctgttcagatgcttccagtatcaggaggacatggggccacgggcgtccctgagccggctccgggagctctgcggccactggctgcggccggctctgcacaccaagaaacagatcctggagctgctggtgctggagcagttcctgagtgtgctgcctccgcacctcctgggccgcctgcaggggcagccgctcagggatggggaggaggtggtgctgctgctcgagggcatccaccgggagcccagccacgcggggccgctggtccccagggcccctcaccatggccagaggagagttcccgagatcaggagctggcggctgtgctggagtgcctgacctttgaggatgtgccagagaataaggcgtggcctgcacaccccctgggattcggaagcagaaccccagacaaggaggaatttaaacaagaagagcccaaaggggctgcctggcccactcccatcttagcagagtcccaggcagatagtcctggggtgccgggagagccttgcgcccagtcgctcggacggggcgctgcggctagcggccctggtgaagatgggtcccttcttggcagcagtgaaattttggaggtcaaagtggctgagggcgtccccgagcccaatccggagttgcagttcatctgcgcggactgcggggtgagcttcccgcagctgtctcgcctgaaggcgcaccagctgcgctcgcacccggctgggcgctccttcctgtgcctttgctgcgggaagagcttcggccgcagctccattctcaagctgcacatgcgcactcacacggacgagcggccgcacgcctgccacctgtgcggccaccgcttccgccagagctcgcacctgagcaagcacctgctgacccactcctccgaacccgccttcctgtgcgcagagtgcggccgcggcttccagcgccgcgccagccttgtgcagcacctgctggcgcacgcccaggaccagaagccgccctgcgctcctgagagtaaggccgaagcgccgccactgaccgatgtcctgtgctcccactgcggccagagcttccagcgccgctccagcctcaagcgccacctgcggatccacgccagggacaaggaccgccggtcctccgaaggctccggcagccgccgccgggactccgaccggaggcccttcgtgtgcagcgactgcggcaaggccttccggcgcagcgagcacctggtggcccaccggagggtgcacacgggcgagcggcccttctcctgccaggcttgcggccgcagcttcacgcagagctcgcagctggtcagccaccaacgggtgcacacgggcgagaagccctacgcctgtccgcagtgcgggaagcgctttgtgcgccgggccagccttgcccgccacctgctgacccacggtggccctcggccccaccactgcacccagtgcgggaagagtttcggccagacccaggatctggcccgccaccagcgcagccacacgggcgagaagccctgccgctgcagcgagtgcggtgagggcttcagccagagcgcccacctggcgcgccaccagcgcatccacacaggggagaagccccacgcctgcgacacctgcggccaccgtttccgcaatagctccaacctggcccgccatcgccgcagccacacgggcgagcggccctacagctgtcagacgtgcggtcgcagcttccggcgcaacgcgcatctgcggcggcacctggctacccatgcggagcccgggcaggagcaggccgagcccccgcaggagtgcgtggagtgcgggaagagcttcagccgcagctgcaatctgctgcgacacctgctggtgcacacgggcgccaggccctactcctgcacgcagtgtggccgcagcttcagccgcaactcccacctgctgcgccacctgcgcacccacgcccgcgagacgctgtactagcttggcccgccttccgccagccgcgccctgcgccacctacccggggtcctccacagcggaggcctgcaggaatgtcccttcccaccacaccccacttccctc

SEQ ID NO: 201141 - DNA, 747 bp, Homo sapiens
  Payload ID: 19703
  Gene Name: zinc finger and SCAN domain containing 10
  ENST ID: ENST00000576483
  CDS Start-End: 264-747
ccattttcccagagcccttccccaggctggcggaggctggctttggccctggagtcctcagaaaaccccccagcatctctgcctgtgtagtggggactccgagtgagacgggatttcaccgcgttagccaggatggtctcgatatcctgacctcgtgatccacccgcctcggcctcccaaagtgctcggattacaggtgtgggaggagaggagagagacccaagagcggggctggcgttagggaggcatccccgcagtgaaggatgcttggagaatcagtcccagctgccgtggagcaggagcagctgggggaagtcaagctggaggaggaggaggctgtcagcccagaggaccccaggcgaccagagtccaggctgaggcccgaggtggctcaccagctgttcagatgcttccagtatcaggaggacatggggccacgggcgtccctgagccggctccgggagctctgcggccactggctgcggccggctctgcacaccaagaaacagatcctggagctgctggtgctggagcagttcctgagtgtgctgcctccgcacctcctgggccgcctgcaggggcagccgctcagggatggggaggaggtggtgctgctgctcgagggcatccaccgggagcccagccacgcggggccgctggattttagttgtaatgctggcaagagttgtccccgtgcagacgtcaccttggaggaaaaggggtgtgcttcccaggtccccagccaca

SEQ ID NO: 201142 - DNA, 2739 bp, Homo sapiens
  Payload ID: 19703
  Gene Name: zinc finger and SCAN domain containing 10
  ENST ID: ENST00000576985
  CDS Start-End: 196-2538
actggggcaaggaacttcctgttccattttcccagagcccttccccaggctggcggaggctggctttggccctggagtcctcagaaaaccccccagcatctctgcctgtgtagtggggactccgagtggtgtgggaggagaggagagagacccaagagcggggctggcgttagggaggcatccccgcagtgaaggatgcttggagaatcagtcccagctgccgtggagcaggagcagctgggggaagtcaagctggaggaggaggaggctgtcagcccagaggaccccaggcgaccagagtccaggctgaggcccgaggtggctcaccagctgttcagatgcttccagtatcaggaggacatggggccacgggcgtccctgagccggctccgggagctctgcggccactggctgcggccggctctgcacaccaagaaacagatcctggagctgctggtgctggagcagttcctgagtgtgctgcctccgcacctcctgggccgcctgcaggggcagccgctcagggatggggaggaggtggtgctgctgctcgagggcatccaccgggagcccagccacgcggggccgctggattttagttgtaatgctggcaagagttgtccccgtgcagacgtcaccttggaggaaaaggggtgtgcttcccaggtccccagccacagccccaagaaggaattgcctgcggaagagccttcagtgctgggcccatcggatgagcctccccgaccccagccaagggctgcccagcctgctgagccgggacagtggaggcttcccccaagttcaaagcagccgctgagcccggggccccagaagacattccaggccctgcaagaaagcagtccccagggcccctcaccatggccagaggagagttcccgagatcaggagctggcggctgtgctggagtgcctgacctttgaggatgtgccagagaataaggcgtggcctgcacaccccctgggattcggaagcagaaccccagacaaggaggaatttaaacaagaagagcccaaaggggctgcctggcccactcccatcttagcagagtcccaggcagatagtcctggggtgccgggagagccttgcgcccagtcgctcggacggggcgctgcggctagcggccctggtgaagatgggtcccttcttggcagcagtgaaattttggaggtcaaagtggctgagggcgtccccgagcccaatccggagttgcagttcatctgcgcggactgcggggtgagcttcccgcagctgtctcgcctgaaggcgcaccagctgcgctcgcacccggctgggcgctccttcctgtgcctttgctgcgggaagagcttcggccgcagctccattctcaagctgcacatgcgcactcacacggacgagcggccgcacgcctgccacctgtgcggccaccgcttccgccagagctcgcacctgagcaagcacctgctgacccactcctccgaacccgccttcctgtgcgcagagtgcggccgcggcttccagcgccgcgccagccttgtgcagcacctgctggcgcacgcccaggaccagaagccgccctgcgctcctgagagtaaggccgaagcgccgccactgaccgatgtcctgtgctcccactgcggccagagcttccagcgccgctccagcctcaagcgccacctgcggatccacgccagggacaaggaccgccggtcctccgaaggctccggcagccgccgccgggactccgaccggaggcccttcgtgtgcagcgactgcggcaaggccttccggcgcagcgagcacctggtggcccaccggagggtgcacacgggcgagcggcccttctcctgccaggcttgcggccgcagcttcacgcagagctcgcagctggtcagccaccaacgggtgcacacgggcgagaagccctacgcctgtccgcagtgcgggaagcgctttgtgcgccgggccagccttgcccgccacctgctgacccacggtggccctcggccccaccactgcacccagtgcgggaagagtttcggccagacccaggatctggcccgccaccagcgcagccacacgggcgagaagccctgccgctgcagcgagtgcggtgagggcttcagccagagcgcccacctggcgcgccaccagcgcatccacacaggggagaagccccacgcctgcgacacctgcggccaccgtttccgcaatagctccaacctggcccgccatcgccgcagccacacgggcgagcggccctacagctgtcagacgtgcggtcgcagcttccggcgcaacgcgcatctgcggcggcacctggctacccatgcggagcccgggcaggagcaggccgagcccccgcaggagtgcgtggagtgcgggaagagcttcagccgcagctgcaatctgctgcgacacctgctggtgcacacgggcgccaggccctactcctgcacgcagtgtggccgcagcttcagccgcaactcccacctgctgcgccacctgcgcacccacgcccgcgagacgctgtactagcttggcccgccttccgccagccgcgccctgcgccacctacccggggtcctccacagcggaggcctgcaggaatgtcccttcccaccacaccccacttccctctccttccactttcacagctgtccttccctggccgaggcattgctttctggcctcagctatgtaattaaaacgcccgaagtaaaatggccttctccaaaa

SEQ ID NO: 201143 - DNA, 2247 bp, Homo sapiens
  Payload ID: 19703
  Gene Name: zinc finger and SCAN domain containing 10
  Uniprot ID: Q96SZ4
  ENST ID: ENST00000575108
  CDS Start-End: 890-2050
attttcccagagcccttccccaggctggcggaggctggctttggccctggagtcctcagaaaaccccccagcatctctgcctgtgtagtggggactccgagtggattttagttgtaatgctggcaagagttgtccccgtgcagacgtcaccttggaggaaaaggggtgtgcttcccaggtccccagccacagccccaagaaggaattgcctgcggaagagccttcagtgctgggcccatcggatgagcctccccgaccccagccaagggctgcccagcctgctgagccgggacagtggaggcttcccccaagttcaaagcagccgctgagcccggggccccagaagacattccaggccctgcaagaaagcagtccccagggcccctcaccatggccagaggagagttcccgagatcaggagctggcggctgtgctggagtgcctgacctttgaggatgtgccagagaataaggcgtggcctgcacaccccctgggattcggaagcagaaccccagacaaggaggaatttaaacaagaagagcccaaaggggctgcctggcccactcccatcttagcagagtcccaggcagatagtcctggggtgccgggagagccttgcgcccagtcgctcggacggggcgctgcggctagcggccctggtgaagatgggtcccttcttggcagcagtgaaattttggaggtcaaagtggctgagggcgtccccgagcccaatccggagttgcagttcatctgcgcggactgcggggtgagcttcccgcagctgtctcgcctgaaggcgcaccagctgcgctcgcacccggctgggcgctccttcctgtgcctttgctgcgggaagagcttcggccgcagctccattctcaagctgcacatgcgcactcacacggacgagcggccgcacgcctgccacctgtgcggccaccgcttccgccagagctcgcacctgagcaagcacctgctgacccactcctccgaacccgccttcctgtgcgcagagtgcggccgcggcttccagcgccgcgccagccttgtgcagcacctgctggcgcacgcccaggaccagaagccgccctgcgctcctgagagtaaggccgaagcgccgccactgaccgatgtcctgtgctcccactgcggccagagcttccagcgccgctccagcctcaagcgccacctgcggatccacgccagggacaaggaccgccggtcctccgaaggctccggcagccgccgccgggactccgaccggaggcccttcgtgtgcagcgactgcggcaaggccttccggcgcagcgagcacctggtggcccaccggagggtgcacacgggcgagcggcccttctcctgccaggcttgcggccgcagcttcacgcagagctcgcagctggtcagccaccaacgggtgcacacgggcgagaagccctacgcctgtccgcagtgcgggaagcgctttgtgcgccgggccagccttgcccgccacctgctgacccacggtggccctcggccccaccactgcacccagtgcgggaagagtttcggccagacccaggatctggcccgccaccagcgcagccacacgggcgagaagccctgccgctgcagcgagtgcggtgagggcttcagccagagcgcccacctggcgcgccaccagcgcatccacacaggggagaagccccacgcctgcgacacctgcggccaccgtttccgcaatagctccaacctggcccgccatcgccgcagccacacgggcgagcggccctacagctgtcagacgtgcggtcgcagcttccggcgcaacgcgcatctgcggcggcacctggctacccatgcggagcccgggcaggagcaggccgagcccccgcaggagtgcgtggagtgcgggaagagcttcagccgcagctgcaatctgctgcgacacctgctggtgcacacgggcgccaggccctactcctgcacgcagtgtggccgcagcttcagccgcaactcccacctgctgcgccacctgcgcacccacgcccgcgagacgctgtactagcttggcccgccttccgccagccgcgccctgcgccacctacccggggtcctccacagcggaggcctgcaggaatgtcccttcccaccacaccccacttccctctccttccactttcacagctgtccttccctggccgaggcattgctttctggcctcagctatgtaattaaaacgcccgaagtaaaatggccttctcc

SEQ ID NO: 201144 - DNA, 575 bp, Homo sapiens
  Payload ID: 19703
  Gene Name: zinc finger and SCAN domain containing 10
  ENST ID: ENST00000572431
  CDS Start-End: 558-575
cccccagcatctctgcctgtgtagtggggactccgagtggtccccagggcccctcaccatggccagaggagagttcccgagatcaggagctggcggctgtgctggagtgcctgacctttgaggatgtgccagagaataaggcgtggcctgcacaccccctgggattcggaagcagaaccccagacaaggaggaatttaaacaagaagagcccaaaggggctgcctggcccactcccatcttagcagagtcccaggcagatagtcctggggtgccgggagagccttgcgcccagtcgctcggacggggcgctgcggctagcggccctggtgaagatgggtcccttcttggcagcagtgaaattttggaggtcaaagtggctgagggcgtccccgagcccaatccggagttgcagttcatctgcgcggactgcggggtgagcttcccgcagctgtctcgcctgaaggcgcaccagctgcgctcgcacccggctgggcgctccttcctgtgcctttgctgcgggaagagcttcggccgcagctccattctcaagctgcacatgcgcactcacacggac

SEQ ID NO: 201145 - DNA, 618 bp, Homo sapiens
  Payload ID: 19703
  Gene Name: zinc finger and SCAN domain containing 10
  ENST ID: ENST00000572548
  CDS Start-End: 140-475
aggctggctttggccctggagtcctcagaaaaccccccagcatctctgcctgtgtagtggggactccgagtggtgtgggaggagaggagagagacccaagagcggggctggcgttagggaggcatccccgcagtgaaggatgcttggagaatcagtcccagctgccgtggagcaggagcagctgggggaagtcaagctggaggaggaggaggctgtcagcccagaggaccccaggcgaccagagtccaggctgaggcccgaggtggctcaccagctgttcagatgcttccagtatcaggaggacatggggccacgggcgtccctgagccggctccgggagctctgcggccactggctgcggccggctctgcacaccaagaaacagatcctggagctgctggtccccagggcccctcaccatggccagaggagagttcccgagatcaggagctggcggctgtgctggagtgcctgacctttgaggatgtgccagagaataaggcgtggcctgcacaccccctgggattcggaagcagaaccccagacaaggaggaatttaaacaagaagagcccaaaggggctgcctggcccactcccatcttagcagagtcccaggca

SEQ ID NO: 201146 - DNA, 5495 bp, Homo sapiens
  Payload ID: 19704
  Gene Name: zinc finger and SCAN domain containing 12
  Uniprot ID: O43309
  ENST ID: ENST00000361028
  CDS Start-End: 147-1961
tccgggtcccaaaagggttcgaggcctcttgccttcgctccgtaggagggagttctcttctggccctgggggccgcaggactgtccaggaatacagtttccaggtgagatcttacttgaaacaccggtagttctagcacagctaaaatggcatctacttgggctatccaggcccacatggaccaggatgaacctttggaagtaaagatagaggaagagaaatataccaccagacaggattgggacctgcgtaaaaacaacacccatagcagagaggtcttccgtcagtacttcagacagttctgctaccaggagacatctggtccccgtgaggctttgagccgactccgagaactttgccatcagtggctgaggccagagacccacaccaaagaacagattctggagctgctggtgctggagcagttcctgaccatcctacctgaggagctccaggcctgggtgcaggagcagcatccagagagtggggaggaggtggtgactgtgctggaggatttagagagagaactggatgaaccaggagagcaggtctcagtccacactggggaacaggaaatgttcttgcaggagacggtacgtctacgaaaagaaggagaacccagtatgtccctccagtccatgaaagcccagccaaagtatgaatctccagaacttgaatcccaacaggagcaagttttagatgttgagactggaaatgagtatgggaatttaaagcaagaagtttctgaagaaatggaaccacatgggaagacatccagtaaatttgaaaatgatatgtccaagtctgctaggtgtggagaaactcgtgaacctgaagaaataacagaagagccctctgcttgctccagagaagataaacaacctacctgtgatgaaaatggagtaagcctgactgagaactctgaccatactgaacatcagagaatctgtccaggagaagaatcttacggatgtgatgactgtggaaaagcttttagtcagcactcacacctcatagaacatcagaggatccatactggagatagaccctacaaatgcgaagaatgtggaaaagctttccgtgggagaactgtgcttattcgacacaaaataatacacactggagagaaaccgtataagtgtaatgaatgtggcaaagcctttggccggtggtcagctcttaaccaacatcagagacttcacacaggagaaaaacactatcactgtaatgactgtggcaaagcctttagtcagaaagcaggcctctttcaccatatcaagatccacacaagagacaaaccttatcagtgcactcagtgtaataaaagttttagtcggcgttccatacttactcagcatcaaggagttcataccggcgccaagccgtatgagtgcaacgagtgtggaaaagcctttgtttataactcatcccttgtttcccatcaggaaatccaccacaaagaaaaatgctatcagtgtaaggaatgtgggaaatccttcagtcagagtggccttattcagcatcagagaattcacactggggaaaaaccctacaaatgtgacgtatgtgaaaaagcctttattcaaaggacaagtcttacagaacatcagcgaattcacactggagaaagaccctataaatgtgataagtgtgggaaggcgtttactcaaagatcagtcctcacggaacatcagagaatccacactggagagaggccctacaagtgtgatgagtgtgggaatgccttccgaggaatcaccagcctcattcagcatcagagaatccacactggggagaagccctaccaatgtgatgagtgtggaaaagccttcagacagaggaagaagaccagctacaaggaaatacttctgaaaaatcactctgaaccccaagctggagtgaatcttctcctgagctctctcattccagaatggcaatcttgtttcaggagagatctctaatagtgactgatggtaaaggaagaaggctgtgcctagaacaaagaatcaggctggcaaagaaatcacaggtctttcctcaaactttaaattgctactctctggagatagctacctggactttacagagctgtcagaagacttgggaaggtttgccagcattggaaaaagccacttggacttcacagagctgtcagaagacttaggaagctttgccagtagttcctgagaccagaaatacatattatgaagcaggtgctggaacaggccctggcccctacttgtgaagctgcagatataggtaagataatatcatccagaatgtggagacgaggcaatcgatgatgctggaaaagttgaagagagagtttgaatgaaggacaaaccaccgatgggaaagcttgggaggatcacttatagcttgactagcaaaaggctttgggaataggatagaaagcagcaaacctgaactttaggatccaccagatgtctctggagccataacccaacatttcccataaatagtaggttttaattctcctgttatttaggtgcatctctgggacctcctctttctatattgggttttttgtttgttgggtgttttaacttaggatttagcttcaaattccatttcccaagaccaattttatcacattgcctttaggtctcaggctaaatgatataacaagatatgcttttggcaaagatagtaccttggaatgaaaggtttcagatcaaacctaagatcctaccttagtttacctctcagtgttattgccttttgatatggaaagctgatgagagagcatctctggagagaaagaagaggagagcctcacgggaagcttttagaacttttagtagcatcctctccccagaaaacttgtctctactcatctccttctcattatctacctgattcgttaagtaggaaatctcagccatatttgtaggggattggggttttgttttttttgacccacttaactcctttagcttcagagtgttgctttcttacattttagacatgaatattacctagaaaatttatttccccactgttaattttccagtttattgatttccccacatcagattagtgtgtattttgaaactggtttagctattgtttcaagttaactttgatcatatcccgttgtttactgatccactcaacaaatatttattgaacattctgtaggtttatagtagtagccaagatacttaaagtgagtagaaatagtccttttaactgtccttaacaaattaaactttctcttggtttcatgatattccttgtttctcagctttggattcaaactgatcttctcttttttgattatactttcctgatttcttttattgtcacatttttgtgaaaagtcttccatgcacttccagtctctttctgcctagctgtctcttctcacccaaattggacccccctactcctaccctgccacgtgccttcacaaaaatgagatgcttgtttagagacttagaaaaggcatgcactttaggtaaaagtggattttatttttaatcactgtaccctatcataaatctcatttcagaagagacaactgacatttgaattgtctgtgcattttgttttagatggtgttactgagaaggaaactaaggacttggctccaaaacaaaacaaaacaaaatctggagatgctgaattttgttggggggaatgtctgtagaactgcaacatcaatgcagtaagtgtagtaaaagctttagtttatggtgagtcattactcagcatcatggagtccacgatgaagagaatctcttttcaatctgtgcaatcaacaagtttttgaaaggcttttgtttatagtggaaccctcttttccccctagaagaaccaccacaaggaaaaatgctgtcaccataaggaatgtgggaaagttttcagccacatggccttatttgacttcaaagaatccacatgagagagagactgcataaatgtaataactgaggaggcctttgttcagcaaagaaaccttatacaaactcgtataaagaatgtaggaagaccttcacccagaagccaggactgactgtgcaccagagaatctgcacaataaacatgatgaatgtggagatgcttgcttcagcattggagaattcacagtaaagggaaaccctgccagtgtgatgagtacggaaaagtcttcagaggttggaacttgggaaaaatcagtgagtgaattcatattagagaggctcttataaatgagaggattgtggaaacttgtatagacagagatcagacctcaacaagggagcctccacagtattgaaaagttaatataattaatgtaagtgggcaagttgtatggggaatgggtagtctaaattgctcattttagccagtaaaaacattaaattagtttcttagatcaagaaaaggaaatgttagaagttatttttcccttccagaggggtctatatgtgtaagcaaccaggacttttgaaataagttgcatctctggatttgtgatctgtctcctggatgattatctctgttttgggagacaggtattttttcttcatgcctgctctagtctcatctcatatctttaattcattcagcaagtatacacaatagtattatcgtctactgtttgttgtaaatatatatatattattttctttttggtctgagtaggcttgtattggtaccctaggacataaaaatcacatatatcatgtttcagtaaatgcagtgaaaggaactatattattaaattgctgggaatttctgtaaatttgagactacctttatattctccaacacaagaccgtgtaggtgtcccttcagagagtatatttttctagcttggcttctttattttctttatttttttgagatggagtcttgctcctgtcgcccaggctggagtgcaatggcacgatctcggctcactgcaacctccgcctcccaggttcaagtgattctcctgtctcagtctcccgagtagctgggattacaggcacttgccaccattcccagctaatttttgtatttttagtagagacggggtttcaccatgttggccaggctggtctcgaactcctgaccttgtgatctgcccaccttggcctcccaaagttcagggattacaggcatgagccaccatgcccggctgtttttttaagatagaaaaatatacttcatgtatagcctattgacagataatgactgatattttttcttatagataacacataataaacattgtgaagactaataagtaacttgcttattcttttcagttctaaaacctgtaggaaagaatctttagaagctgtcaacaagttgataatgtagcccaatctctacccatgataggagagtaaggcttatatattttatagtagggcactaaatacaggaaccatgtatttaaaaactttttagtgattatctcagaattctaggtgtccctctgctgtacatccctaaattttttgcataggtattattaataaattcattattttcaaagatgg

SEQ ID NO: 201147 - DNA, 3909 bp, Homo sapiens
  Payload ID: 19704
  Gene Name: zinc finger and SCAN domain containing 12
  Uniprot ID: O43309
  ENST ID: ENST00000396827
  CDS Start-End: 144-1958
gggtcccaaaagggttcgaggcctcttgccttcgctccgtaggagggagttctcttctggccctgggggccgcaggactgtccaggaatacagtttccaggtgagatcttacttgaaacaccggtagttctagcacagctaaaatggcatctacttgggctatccaggcccacatggaccaggatgaacctttggaagtaaagatagaggaagagaaatataccaccagacaggattgggacctgcgtaaaaacaacacccatagcagagaggtcttccgtcagtacttcagacagttctgctaccaggagacatctggtccccgtgaggctttgagccgactccgagaactttgccatcagtggctgaggccagagacccacaccaaagaacagattctggagctgctggtgctggagcagttcctgaccatcctacctgaggagctccaggcctgggtgcaggagcagcatccagagagtggggaggaggtggtgactgtgctggaggatttagagagagaactggatgaaccaggagagcaggtctcagtccacactggggaacaggaaatgttcttgcaggagacggtacgtctacgaaaagaaggagaacccagtatgtccctccagtccatgaaagcccagccaaagtatgaatctccagaacttgaatcccaacaggagcaagttttagatgttgagactggaaatgagtatgggaatttaaagcaagaagtttctgaagaaatggaaccacatgggaagacatccagtaaatttgaaaatgatatgtccaagtctgctaggtgtggagaaactcgtgaacctgaagaaataacagaagagccctctgcttgctccagagaagataaacaacctacctgtgatgaaaatggagtaagcctgactgagaactctgaccatactgaacatcagagaatctgtccaggagaagaatcttacggatgtgatgactgtggaaaagcttttagtcagcactcacacctcatagaacatcagaggatccatactggagatagaccctacaaatgcgaagaatgtggaaaagctttccgtgggagaactgtgcttattcgacacaaaataatacacactggagagaaaccgtataagtgtaatgaatgtggcaaagcctttggccggtggtcagctcttaaccaacatcagagacttcacacaggagaaaaacactatcactgtaatgactgtggcaaagcctttagtcagaaagcaggcctctttcaccatatcaagatccacacaagagacaaaccttatcagtgcactcagtgtaataaaagttttagtcggcgttccatacttactcagcatcaaggagttcataccggcgccaagccgtatgagtgcaacgagtgtggaaaagcctttgtttataactcatcccttgtttcccatcaggaaatccaccacaaagaaaaatgctatcagtgtaaggaatgtgggaaatccttcagtcagagtggccttattcagcatcagagaattcacactggggaaaaaccctacaaatgtgacgtatgtgaaaaagcctttattcaaaggacaagtcttacagaacatcagcgaattcacactggagaaagaccctataaatgtgataagtgtgggaaggcgtttactcaaagatcagtcctcacggaacatcagagaatccacactggagagaggccctacaagtgtgatgagtgtgggaatgccttccgaggaatcaccagcctcattcagcatcagagaatccacactggggagaagccctaccaatgtgatgagtgtggaaaagccttcagacagaggaagaagaccagctacaaggaaatacttctgaaaaatcactctgaaccccaagctggagtgaatcttctcctgagctctctcattccagaatggcaatcttgtttcaggagagatctctaatagtgactgatggtaaaggaagaaggctgtgcctagaacaaagaatcaggctggcaaagaaatcacaggtctttcctcaaactttaaattgctactctctggagatagctacctggactttacagagctgtcagaagacttgggaaggtttgccagcattggaaaaagccacttggacttcacagagctgtcagaagacttaggaagctttgccagtagttcctgagaccagaaatacatattatgaagcaggtgctggaacaggccctggcccctacttgtgaagctgcagatatagatggtgttactgagaaggaaactaaggacttggctccaaaacaaaacaaaacaaaatctggagatgctgaattttgttggggggaatgtctgtagaactgcaacatcaatgcagtaagtgtagtaaaagctttagtttatggtgagtcattactcagcatcatggagtccacgatgaagagaatctcttttcaatctgtgcaatcaacaagtttttgaaaggcttttgtttatagtggaaccctcttttccccctagaagaaccaccacaaggaaaaatgctgtcaccataaggaatgtgggaaagttttcagccacatggccttatttgacttcaaagaatccacatgagagagagactgcataaatgtaataactgaggaggcctttgttcagcaaagaaaccttatacaaactcgtataaagaatgtaggaagaccttcacccagaagccaggactgactgtgcaccagagaatctgcacaataaacatgatgaatgtggagatgcttgcttcagcattggagaattcacagtaaagggaaaccctgccagtgtgatgagtacggaaaagtcttcagaggttggaacttgggaaaaatcagtgagtgaattcatattagagaggctcttataaatgagaggattgtggaaacttgtatagacagagatcagacctcaacaagggagcctccacagtattgaaaagttaatataattaatgtaagtgggcaagttgtatggggaatgggtagtctaaattgctcattttagccagtaaaaacattaaattagtttcttagatcaagaaaaggaaatgttagaagttatttttcccttccagaggggtctatatgtgtaagcaaccaggacttttgaaataagttgcatctctggatttgtgatctgtctcctggatgattatctctgttttgggagacaggtattttttcttcatgcctgctctagtctcatctcatatctttaattcattcagcaagtatacacaatagtattatcgtctactgtttgttgtaaatatatatatattattttctttttggtctgagtaggcttgtattggtaccctaggacataaaaatcacatatatcatgtttcagtaaatgcagtgaaaggaactatattattaaattgctgggaatttctgtaaatttgagactacctttatattctccaacacaagaccgtgtaggtgtcccttcagagagtatatttttctagcttggcttctttattttctttatttttttgagatggagtcttgctcctgtcgcccaggctggagtgcaatggcacgatctcggctcactgcaacctccgcctcccaggttcaagtgattctcctgtctcagtctcccgagtagctgggattacaggcacttgccaccattcccagctaatttttgtatttttagtagagacggggtttcaccatgttggccaggctggtctcgaactcctgaccttgtgatctgcccaccttggcctcccaaagttcagggattacaggcatgagccaccatgcccggctgtttttttaagatagaaaaatatacttcatgtatagcctattgacagataatgactgatattttttcttatagataacacataataaacattgtgaagact

SEQ ID NO: 201148 - DNA, 1328 bp, Homo sapiens
  Payload ID: 19705
  Gene Name: zinc finger and SCAN domain containing 16
  Uniprot ID: Q9H4T2
  ENST ID: ENST00000340487
  CDS Start-End: 150-1196
cggcccggaagtgcccggctgaagcggccgggcgccgattggtgtctttgagtctagtctttgttcggggctgtccaaaggacgctagctgttgcacctgttcctccctgcgcgtaagatagaggataaatctcctggcaaagcccagaatgaccacagccctggaacctgaggaccaaaaaggacttctgataattaaggcagaggaccattactggggacaggattccagctcacaaaagtgcagtcctcacaggagggaactctatagacaacacttcaggaagctctgctatcaggatgcacctggaccccgtgaagctcttacccagctgtgggagctctgccgtcagtggctgaggccagaatgccacaccaaggagcagattttagacctgctggtgctagaacagttcctgagcattcttcctaaagacctgcaagcatgggtgcgtgcacaccatccagagactggagaggaggcagtgacggtactggaggatctggagagagagcttgatgaacctggaaagcaggtcccaggcaattcagaaagacgggacatactcatggacaagttggcccccttgggaaggccatatgaatcactgactgtccagctccatcccaaaaagacccagctggagcaggaagctgggaaaccacaaaggaatggtgataaaactaggactaagaatgaagagttgttccagaaggaagatatgcccaaagacaaggaattccttggggagataaatgacagactgaacaaagatactcctcagcatcctaagtccaaagatattattgaaaatgagggcagatcagaatggcaacagagggaaagaagacgatataaatgtgatgaatgtgggaaaagtttcagtcatagctcagaccttagtaaacacaggagaactcacacgggagagaagccctataaatgtgatgagtgtggaaaagccttcattcagcgctcacatctcattggacatcatagagtacacacgggagtaaaaccctataaatgtaaagaatgtgggaaagacttcagtgggcgcacaggtcttattcagcatcagagaatccacacaggtgaaaaaccctatgaatgtgatgagtgtggaaggcctttccgagtaagttcagctcttattagacatcaaagaattcataccgcaaataaactctactaatatagcagtaatatcaaaagttctttggacactcaggcctaactagttatcaaagaatctattttagaaaccttgagtttcctcaatgtggtcaaagcttcagtcatcattaaacttctctggaccaaagaa

SEQ ID NO: 201149 - DNA, 2779 bp, Homo sapiens
  Payload ID: 19706
  Gene Name: zinc finger and SCAN domain containing 18
  Uniprot ID: Q8TBC5
  ENST ID: ENST00000240727
  CDS Start-End: 401-1933
gggcggctgggaccggcctggggtagctgcgcagcaggtgggtcggtcccggggatgcagcgcgggggtcagagagcgaccccaacagggtagacggtgaggacgcctcagtgggcagcgttagggaaaggggccagggtgttcccggggttggggtgcgagcccccgctgtgcgtccaggaggccgagggtctggcatcccttcgcgtggagtgcggggcaggggccgggtccccccggaggtggctgagatccagatcggtgaggggccctgcaggcaggtctgtgggttctggcaccacctgagcccactgggcatctggtcatccctggcacctctcctttggagccaccttgtccctggctagacagtcacattttccagtgccgttttggaaagatgttgcctttggagaaggcgtttgcctcccccaggagctccccagccccgccggatctgcccacgccggggtcagcagccggagtccagcaggaagaacccgagaccatccctgagaggacccctgctgacctggagttctcccgcctgcgtttccgggaatttgtctaccaggaggctgccgggccccaccagaccctggcccggctgcatgagctgtgccgccagtggctgatgcctgaggcgcgctccaaggagcagatgctggagctgctggtgctggagcagttcctgggcatcctgcctgataaggtccggccctgggtggtggcacagtaccctgagagctgcaagaaggcagcctccctggtggagggcctcgctgatgtcctggaagagccagggatgctgctgggctcccctgcgggctcatcctcaattcttagcgatggagtgtacgagaggcacatggaccctctgctgctaccaggcgagctcgcgagccccagccaggcccttggagctggggagatcccggcaccttctgagacaccctggctttctccggaccccctgtttctggaacagaggagggtcagagaagcaaagaccgaagaggacggccctgccaacaccgagcagaagctgaagtcctttccagaggaccctcagcacctgggggagtggggccacctggaccctgccgaggagaacctgaagagctaccggaagctgctcctgtgggggtatcagctttcccagcctgacgctgcctccaggctggacactgaggaactccggttggtggaaagagatccacaaggaagcagcctcccagaaggcgggaggcggcaggagagcgctgggtgcgcctgcgaggaggccgcccccgcgggggtgctgcctgagctgcctacggaggcgccccctggggacgcccttgccgatcccccgtcgggcaccactgaggaggaggaagagcagcctgggaaggccccggacccgcaggacccccaggacgcggagtccgactctgccaccggatcgcagaggcagtccgtcatccagcagcctgccccggacaggggcacggcgaaactgggaaccaagaggccgcaccccgaggatggggacgggcagagcctcgagggcgtctctagctccggcgacagcgcagggctggaggccgggcagggccctggggctgacgagccgggcttgtcccgcgggaagccctatgcctgcggcgagtgcggggaggccttcgcgtggctctcgcacctgatggagcaccacagcagccatggcggccggaagcgctacgcctgtcagggctgctggaagaccttccacttcagcctggccctagccgagcaccagaagacccacgagaaggagaaaagctacgcgctggggggcgcccggggcccccaaccgtccacccgcgaagcccaggcgggggctagggcgggcggtcccccagagagcgtggagggcgaggctccccccgcacccccagaggcgcagaggtgagccgctgtgctgtcccgttccggaggggccgctttgccggccgtgaatcccagacgaggcattgggcctttccacgcccctgggtggcggcttcctgtggtgtttgtggacgtcctctgcctgtgccctgaatccgctcctgaggctaagcgctcccaacgagaagggtccacgggaagccctcacctctgtaaacacaccctgggccagcgctcgcatccgaggggagccgccggatgtggaagaagactcggctttcctgcagccatttagtgccgccccatgctaggttatttgacattgtgcagtgtagagttgccttaaagtgcgtgatctgccagtgctttcttcaagtcacccttgccccgattcctcctgtttgcgctccccagggttgctcaagtggaaattttgtcagctgtttagccttttcgtacttggcgtgatgtcaacttcacttctaatctgcaaaagcagaagctgtttcctagtttacctcgcgtgtgtttacctatatggagtagctcgcagagatcacagaaatgcttgcagcctaaggcagggttttcagaccgtgggtcccagcccatttagtaaaatgggaaatcaattagcaagtggtcaccagcattacacagcaatgaagcagaataaagtaggccagaatgcatcatgtagtaaaggcaaatactgttttgtgaaacttttcacccatacatctaaatgtgagaactggttgcaatgtaagacatttcttgctgggaagttgtgagcaaaataagttgaaaacactaataaagatctgtctgtctgagcaaaggagactaaactccttgggctacataa

SEQ ID NO: 201150 - DNA, 1488 bp, Homo sapiens
  Payload ID: 19706
  Gene Name: zinc finger and SCAN domain containing 18
  Uniprot ID: Q8TBC5
  ENST ID: ENST00000421612
  CDS Start-End: 117-1241
atcgcgcactggggctccgggcggctgggaccggcctggggtagctgcgcagcaggtgggtcggtcccggggatgcagcgcgggggtcagagagcgaccccaacagggtagacgggatgctgctgggctcccctgcgggctcatcctcaattcttagcgatggagtgtacgagaggcacatggaccctctgctgctaccaggcgagctcgcgagccccagccaggcccttggagctggggagatcccggcaccttctgagacaccctggctttctccggaccccctgtttctggaacagaggagggtcagagaagcaaagaccgaagaggacggccctgccaacaccgagcagaagctgaagtcctttccagaggaccctcagcacctgggggagtggggccacctggaccctgccgaggagaacctgaagagctaccggaagctgctcctgtgggggtatcagctttcccagcctgacgctgcctccaggctggacactgaggaactccggttggtggaaagagatccacaaggaagcagcctcccaggcgggaggcggcaggagagcgctgggtgcgcctgcgaggaggccgcccccgcgggggtgctgcctgagctgcctacggaggcgccccctggggacgcccttgccgatcccccgtcgggcaccactgaggaggaggaagagcagcctgggaaggccccggacccgcaggacccccaggacgcggagtccgactctgccaccggatcgcagaggcagtccgtcatccagcagcctgccccggacaggggcacggcgaaactgggaaccaagaggccgcaccccgaggatggggacgggcagagcctcgagggcgtctctagctccggcgacagcgcagggctggaggccgggcagggccctggggctgacgagccgggcttgtcccgcgggaagccctatgcctgcggcgagtgcggggaggccttcgcgtggctctcgcacctgatggagcaccacagcagccatggcggccggaagcgctacgcctgtcagggctgctggaagaccttccacttcagcctggccctagccgagcaccagaagacccacgagaaggagaaaagctacgcgctggggggcgcccggggcccccaaccgtccacccgcgaagcccaggcgggggctagggcgggcggtcccccagagagcgtggagggcgaggctccccccgcacccccagaggcgcagaggtgagccgctgtgctgtcccgttccggaggggccgctttgccggccgtgaatcccagacgaggcattgggcctttccacgcccctgggtggcggcttcctgtggtgtttgtggacgtcctctgcctgtgccctgaatccgctcctgaggctaagcgctcccaacgagaagggtccacgggaagccctcacctctgtaaacacaccctgggccagcgctcgcatccgaggggagccgccggatgtggaagaa

SEQ ID NO: 201151 - DNA, 2071 bp, Homo sapiens
  Payload ID: 19706
  Gene Name: zinc finger and SCAN domain containing 18
  ENST ID: ENST00000433686
  CDS Start-End: 1-1224
gataaggtccggccctgggtggtggcacagtaccctgagagctgcaagaaggcagcctccctggtggagggcctcgctgatgtcctggaagagccagggatgctgctgggctcccctgcgggctcatcctcaattcttagcgatggagtgtacgagaggcacatggaccctctgctgctaccaggcgagctcgcgagccccagccaggcccttggagctggggagatcccggcaccttctgagacaccctggctttctccggaccccctgtttctggaacagaggagggtcagagaagcaaagaccgaagaggacggccctgccaacaccgagcagaagctgaagtcctttccagaggaccctcagcacctgggggagtggggccacctggaccctgccgaggagaacctgaagagctaccggaagctgctcctgtgggggtatcagctttcccagcctgacgctgcctccaggctggacactgaggaactccggttggtggaaagagatccacaaggaagcagcctcccaggcgggaggcggcaggagagcgctgggtgcgcctgcgaggaggccgcccccgcgggggtgctgcctgagctgcctacggaggcgccccctggggacgcccttgccgatcccccgtcgggcaccactgaggaggaggaagagcagcctgggaaggccccggacccgcaggacccccaggacgcggagtccgactctgccaccggatcgcagaggcagtccgtcatccagcagcctgccccggacaggggcacggcgaaactgggaaccaagaggccgcaccccgaggatggggacgggcagagcctcgagggcgtctctagctccggcgacagcgcagggctggaggccgggcagggccctggggctgacgagccgggcttgtcccgcgggaagccctatgcctgcggcgagtgcggggaggccttcgcgtggctctcgcacctgatggagcaccacagcagccatggcggccggaagcgctacgcctgtcagggctgctggaagaccttccacttcagcctggccctagccgagcaccagaagacccacgagaaggagaaaagctacgcgctggggggcgcccggggcccccaaccgtccacccgcgaagcccaggcgggggctagggcgggcggtcccccagagagcgtggagggcgaggctccccccgcacccccagaggcgcagaggtgagccgctgtgctgtcccgttccggaggggccgctttgccggccgtgaatcccagacgaggcattgggcctttccacgcccctgggtggcggcttcctgtggtgtttgtggacgtcctctgcctgtgccctgaatccgctcctgaggctaagcgctcccaacgagaagggtccacgggaagccctcacctctgtaaacacaccctgggccagcgctcgcatccgaggggagccgccggatgtggaagaagactcggctttcctgcagccatttagtgccgccccatgctaggttatttgacattgtgcagtgtagagttgccttaaagtgcgtgatctgccagtgctttcttcaagtcacccttgccccgattcctcctgtttgcgctccccagggttgctcaagtggaaattttgtcagctgtttagccttttcgtacttggcgtgatgtcaacttcacttctaatctgcaaaagcagaagctgtttcctagtttacctcgcgtgtgtttacctatatggagtagctcgcagagatcacagaaatgcttgcagcctaaggcagggttttcagaccgtgggtcccagcccatttagtaaaatgggaaatcaattagcaagtggtcaccagcattacacagcaatgaagcagaataaagtaggccagaatgcatcatgtagtaaaggcaaatactgttttgtgaaacttttcacccatacatctaaatgtgagaactggttgcaatgtaagacatttcttgctgggaagttgtgagcaaaataagttgaaaacactaataaagatctgtctgtctgagcaaaggagactaaactccttgggctacataag

SEQ ID NO: 201152 - DNA, 2190 bp, Homo sapiens
  Payload ID: 19706
  Gene Name: zinc finger and SCAN domain containing 18
  Uniprot ID: Q8TBC5
  ENST ID: ENST00000601144
  CDS Start-End: 310-1842
gcgtctgattggccatgcgcactgtcacctgtcacggctcccttgctcgccccggtgcgcggcacagcctcgcggcattgtgggagtcgtagtccgcggtgaggcccagtgcgcaggcgcagtttgccggccgccatcgcgcactggggctccgggcggctgggaccggcctggggtagctgcgcagcaggtctgtgggttctggcaccacctgagcccactgggcatctggtcatccctggcacctctcctttggagccaccttgtccctggctagacagtcacattttccagtgccgttttggaaagatgttgcctttggagaaggcgtttgcctcccccaggagctccccagccccgccggatctgcccacgccggggtcagcagccggagtccagcaggaagaacccgagaccatccctgagaggacccctgctgacctggagttctcccgcctgcgtttccgggaatttgtctaccaggaggctgccgggccccaccagaccctggcccggctgcatgagctgtgccgccagtggctgatgcctgaggcgcgctccaaggagcagatgctggagctgctggtgctggagcagttcctgggcatcctgcctgataaggtccggccctgggtggtggcacagtaccctgagagctgcaagaaggcagcctccctggtggagggcctcgctgatgtcctggaagagccagggatgctgctgggctcccctgcgggctcatcctcaattcttagcgatggagtgtacgagaggcacatggaccctctgctgctaccaggcgagctcgcgagccccagccaggcccttggagctggggagatcccggcaccttctgagacaccctggctttctccggaccccctgtttctggaacagaggagggtcagagaagcaaagaccgaagaggacggccctgccaacaccgagcagaagctgaagtcctttccagaggaccctcagcacctgggggagtggggccacctggaccctgccgaggagaacctgaagagctaccggaagctgctcctgtgggggtatcagctttcccagcctgacgctgcctccaggctggacactgaggaactccggttggtggaaagagatccacaaggaagcagcctcccagaaggcgggaggcggcaggagagcgctgggtgcgcctgcgaggaggccgcccccgcgggggtgctgcctgagctgcctacggaggcgccccctggggacgcccttgccgatcccccgtcgggcaccactgaggaggaggaagagcagcctgggaaggccccggacccgcaggacccccaggacgcggagtccgactctgccaccggatcgcagaggcagtccgtcatccagcagcctgccccggacaggggcacggcgaaactgggaaccaagaggccgcaccccgaggatggggacgggcagagcctcgagggcgtctctagctccggcgacagcgcagggctggaggccgggcagggccctggggctgacgagccgggcttgtcccgcgggaagccctatgcctgcggcgagtgcggggaggccttcgcgtggctctcgcacctgatggagcaccacagcagccatggcggccggaagcgctacgcctgtcagggctgctggaagaccttccacttcagcctggccctagccgagcaccagaagacccacgagaaggagaaaagctacgcgctggggggcgcccggggcccccaaccgtccacccgcgaagcccaggcgggggctagggcgggcggtcccccagagagcgtggagggcgaggctccccccgcacccccagaggcgcagaggtgagccgctgtgctgtcccgttccggaggggccgctttgccggccgtgaatcccagacgaggcattgggcctttccacgcccctgggtggcggcttcctgtggtgtttgtggacgtcctctgcctgtgccctgaatccgctcctgaggctaagcgctcccaacgagaagggtccacgggaagccctcacctctgtaaacacaccctgggccagcgctcgcatccgaggggagccgccggatgtggaagaagactcggctttcctgcagccatttagtgccgccccatgctaggttatttgacattgtgcagtgtagagttgccttaaagtgcgtgatctgccagtgctttc

SEQ ID NO: 201153 - DNA, 558 bp, Homo sapiens
  Payload ID: 19706
  Gene Name: zinc finger and SCAN domain containing 18
  ENST ID: ENST00000601063
  CDS Start-End: 524-558
atcgcgcactggggctccgggcggctgggaccggcctggggtagctgcgcagcaggtgggtcggtcccggggatgcagcgcgggggtcagagagcgaccccaacagggtagacgatcagaaaggaccccacagagatggacatgagggtccacaactgccaaaaacaaatgaggcacagccagcatacccctcagcagaactgcactgtttgcacagtccacacacactgagccagctctgcccaggccaagggacctgcctgtgaagaacccttactctcctggagtctcgctctgtcacccaggctggagtgcagtggcatgatctcagctcactacagcctccacctcccaggttcaagcgatcctcctgcctcaggcctcctgagtagctggaattacaggtctgtgggttctggcaccacctgagcccactgggcatctggtcatccctggcacctctcctttggagccaccttgtccctggctagacagtcacattttccagtgccgttttggaaagatgttgcctttggagaaggcgtttgcctcccccag

SEQ ID NO: 201154 - DNA, 1934 bp, Homo sapiens
  Payload ID: 19706
  Gene Name: zinc finger and SCAN domain containing 18
  Uniprot ID: Q8TBC5
  ENST ID: ENST00000600404
  CDS Start-End: 31-1731
gaatatcgcatccgggaactctgcgcgcccatgcggagagtcggagggcgagctgacgaggacgctacggcggcgggaagtctgtgggttctggcaccacctgagcccactgggcatctggtcatccctggcacctctcctttggagccaccttgtccctggctagacagtcacattttccagtgccgttttggaaagatgttgcctttggagaaggcgtttgcctcccccaggagctccccagccccgccggatctgcccacgccggggtcagcagccggagtccagcaggaagaacccgagaccatccctgagaggacccctgctgacctggagttctcccgcctgcgtttccgggaatttgtctaccaggaggctgccgggccccaccagaccctggcccggctgcatgagctgtgccgccagtggctgatgcctgaggcgcgctccaaggagcagatgctggagctgctggtgctggagcagttcctgggcatcctgcctgataaggtccggccctgggtggtggcacagtaccctgagagctgcaagaaggcagcctccctggtggagggcctcgctgatgtcctggaagagccagggatgctgctgggctcccctgcgggctcatcctcaattcttagcgatggagtgtacgagaggcacatggaccctctgctgctaccaggcgagctcgcgagccccagccaggcccttggagctggggagatcccggcaccttctgagacaccctggctttctccggaccccctgtttctggaacagaggagggtcagagaagcaaagaccgaagaggacggccctgccaacaccgagcagaagctgaagtcctttccagaggaccctcagcacctgggggagtggggccacctggaccctgccgaggagaacctgaagagctaccggaagctgctcctgtgggggtatcagctttcccagcctgacgctgcctccaggctggacactgaggaactccggttggtggaaagagatccacaaggaagcagcctcccagaaggcgggaggcggcaggagagcgctgggtgcgcctgcgaggaggccgcccccgcgggggtgctgcctgagctgcctacggaggcgccccctggggacgcccttgccgatcccccgtcgggcaccactgaggaggaggaagagcagcctgggaaggccccggacccgcaggacccccaggacgcggagtccgactctgccaccggatcgcagaggcagtccgtcatccagcagcctgccccggacaggggcacggcgaaactgggaaccaagaggccgcaccccgaggatggggacgggcagagcctcgagggcgtctctagctccggcgacagcgcagggctggaggccgggcagggccctggggctgacgagccgggcttgtcccgcgggaagccctatgcctgcggcgagtgcggggaggccttcgcgtggctctcgcacctgatggagcaccacagcagccatggcggccggaagcgctacgcctgtcagggctgctggaagaccttccacttcagcctggccctagccgagcaccagaagacccacgagaaggagaaaagctacgcgctggggggcgcccggggcccccaaccgtccacccgcgaagcccaggcgggggctagggcgggcggtcccccagagagcgtggagggcgaggctccccccgcacccccagaggcgcagaggtgagccgctgtgctgtcccgttccggaggggccgctttgccggccgtgaatcccagacgaggcattgggcctttccacgcccctgggtggcggcttcctgtggtgtttgtggacgtcctctgcctgtgccctgaatccgctcctgaggctaagcgctcccaacgagaagggtccacgggaagccctcacctctgtaaacacaccct

SEQ ID NO: 201155 - DNA, 155 bp, Homo sapiens
  Payload ID: 19706
  Gene Name: zinc finger and SCAN domain containing 18
  ENST ID: ENST00000600522
  CDS Start-End: 1-155
tggaacagaggagggtcagagaagcaaagaccgaagaggacggccctgccaacaccgagcagggtatcagctttcccagcctgacgctgcctccaggctggacactgaggaactccggttggtggaaagagatccacaaggaagcagcctcccag

SEQ ID NO: 201156 - DNA, 1768 bp, Homo sapiens
  Payload ID: 19706
  Gene Name: zinc finger and SCAN domain containing 18
  ENST ID: ENST00000595944
  CDS Start-End: 32-151
ggaatatcgcatccgggaactctgcgcgcccatgcggagagtcggagggcgagctgacgaggacgctacggcggcgggaacctgggaaacaaaagtcaaatggaagcatcaacttgggatggtgttgggaaggaactatccaatttggtgaaaataaaaaggttcatcagggatgattcctgttttatctgcattaggagaggtctgggaatgtgaggaccaggtagaaatgctccatagaaatccagaggtgcatttgaggcaaacagcatccacacacaaggacccagagcatctatgaggggctgtggtcaccatgaccattgtggtcatctgctcagtcctagcttcatgtcaaagaggtcctcaaacaacaggtttctgtgaacatgactcaaaggttaaacattttagttacatacataattgtcagaaaggctctaacggtcaaattcttgaggaaaatgatgactgtagagcagccatcagccagggtggacaacctagccaccttgatgaagatctaacaaggagatgagccttcaaaatgtaacgaaggtggtaactccttcagcctttctacacaccttagtgaacaacatgtaattgccagagaaaggaacaacacaaaggagaaggacacgaggaggtgtttgatagggacacatgtccttatgaacacaatggaagtatctctggaaatgaatacaatgacagtgaatgtggactgtccgttagaccgaaatctcatttcatcagtcaccagaggactcatactggagagagcccttatacctgtaatgactgtggaaaatccctctctaagaattacaacctgattgtacatcaaaaaatccacacaggagagaaatcctataaatgcaagaagtgggaaagccttcagtgctggctccacctttaccaagcatgagaaaacccacataggaaagaagccctgtgaaaggaattggtatgggaagaccttcagctgccactcttcccttgttttgcatttcagaagtcatactgtggaaaaactattcgaatgtaatgaatgtgaaaaatccttttctgatgtctccaaccttattgtccatctgagaattcacatgtgaggggagccctatgtatgtactgggtgtagaaaggccttcattgatcacacataacttattaaacatgggagaattcacattggaaagagaccctatatgtgtatggagtgtgaaaaattctccaaccacaacagtcagctcttttgcatcaaaaaaatcattctggaaagaaatctcatgagttaaacaatgtgaaaaaatctttcactgagattatgtacctcatcaggcacaagaggattcatactggtgagaaggtctgtggctgtaaccagtgtcaaacttttcaggaacatcgcgggcctcatctggcaccagaggactcatactggtgagaagccctacgagtgtaatcggtgtggcaaagccttcagggacagctcctgtctgaccaagcacaagaaggtacatgctcaggcgaccttgtgccagtgtgtctagtgtgggaaagttttcccaagtatctgtgctctcgctagaaaccagagttgacacattggactgagacctatggggattcagtgagcatctgtggcagtgactgatctgattttctttgcctcctctttgtcagagacttcatgttgaagagtttatgttgtttgaaagtaacaaatatgtttttccatctataaatggaagaaaaaatcctg

SEQ ID NO: 201157 - DNA, 761 bp, Homo sapiens
  Payload ID: 19706
  Gene Name: zinc finger and SCAN domain containing 18
  ENST ID: ENST00000600845
  CDS Start-End: 209-761
tgggaccggcctggggtagctgcgcagcaggtgggtcggtcccggggatgcagcgcgggggtcagagagcgaccccaacagggtagacggtctgtgggttctggcaccacctgagcccactgggcatctggtcatccctggcacctctcctttggagccaccttgtccctggctagacagtcacattttccagtgccgttttggaaagatgttgcctttggagaaggcgtttgcctcccccaggagctccccagccccgccggatctgcccacgccggggtcagcagccggagtccagcaggaagaacccgagaccatccctgagaggacccctgctgacctggagttctcccgcctgcgtttccgggaatttgtctaccaggaggctgccgggccccaccagaccctggcccggctgcatgagctgtgccgccagtggctgatgcctgaggcgcgctccaaggagcagatgctggagctgctggtgctggagcagttcctgggcatcctgcctgataaggtccggccctgggtggtggcacagtaccctgagagctgcaagaaggcagcctccctggtggagggcctcgctgatgtcctggaagagccagggatgctgctgggctcccctgcgggctcatcctcaattcttagcgatggagtgtacgagaggcacatggaccctctgctgctaccaggcgagctcgcgagccccagccaggcccttggagctggggagatcccggcaccttctgagacac

SEQ ID NO: 201158 - DNA, 946 bp, Homo sapiens
  Payload ID: 19706
  Gene Name: zinc finger and SCAN domain containing 18
  ENST ID: ENST00000600897
  CDS Start-End: 391-946
ctccgggcggctgggaccggcctggggtagctgcgcagcaggtgggtcggtcccggggatgcagcgcgggggtcagagagcgaccccaacagggtagacgatcagaaaggaccccacagagatggacatgagggtccacaactgccaaaaacaaatgaggcacagccagcatacccctcagcagaactgcactgtttgcacagtccacacacactgagccagctctgcccaggccaagggacctgcctgtgaagaacccttactctcctgggtctgtgggttctggcaccacctgagcccactgggcatctggtcatccctggcacctctcctttggagccaccttgtccctggctagacagtcacattttccagtgccgttttggaaagatgttgcctttggagaaggcgtttgcctcccccaggagctccccagccccgccggatctgcccacgccggggtcagcagccggagtccagcaggaagaacccgagaccatccctgagaggacccctgctgacctggagttctcccgcctgcgtttccgggaatttgtctaccaggaggctgccgggccccaccagaccctggcccggctgcatgagctgtgccgccagtggctgatgcctgaggcgcgctccaaggagcagatgctggagctgctggtgctggagcagttcctgggcatcctgcctgataaggtccggccctgggtggtggcacagtaccctgagagctgcaagaaggcagcctccctggtggagggcctcgctgatgtcctggaagagccagggatgctgctgggctcccctgcgggctcatcctcaattcttagcgatggagtgtacgagaggcacatggaccctctgctgctaccaggcgagctcgcgagccccagccaggcccttggagctggggagatcccggcaccttctgagacacgtg

SEQ ID NO: 201159 - DNA, 342 bp, Homo sapiens
  Payload ID: 19706
  Gene Name: zinc finger and SCAN domain containing 18
  ENST ID: ENST00000595721
  CDS Start-End: 2-342
catgcggagagtcggagggcgagctgacgaggacgctacggcggcgggaagtgagttccgtcctctcgcggcctctcgggtctgtttcctccgttcccgcccaccggtcgcggagccaaggcctagtgagggtctgtgggttctggcaccacctgagcccactgggcatctggtcatccctggcacctctcctttggagccaccttgtccctggctagacagtcacattttccagtgccgttttggaaagatgttgcctttggagaaggcgtttgcctcccccaggagctccccagccccgccggatctgcccacgccggggtcagcagccggagtccagca

SEQ ID NO: 201160 - DNA, 2390 bp, Homo sapiens
  Payload ID: 19707
  Gene Name: zinc finger and SCAN domain containing 2
  ENST ID: ENST00000327179
  CDS Start-End: 195-2036
ggggtgaatctggaggggccgggccgagcccgggggcgctttcgcacgcgaagcaaccgctagagcaggacctggtctcccgagagcgggactacttgttgatatttgaggagggaagtgtcttacctgagagcctggctggagaagactgaggtccaaggcttgaagcctaagtgattgccccaggactgtggatgatggctgcagacatcccgagagtgaccactccgctgagctccttggtccaggtgcctcaagaggaagatagacaggaggaggaggtcaccaccatgatcctggaggatgactcctgggtgcaagaagctgtgctgcaggaggatggccctgagtctgagccctttccccagagtgctggcaagggcggcccccaggaggaggtgaccaggggaccacagggtgcactcggccgcctccgagagctctgccggcgctggctgagaccagaggtacacaccaaggagcagatgttaaccatgctgccaaaggaaattcaggcttggctgcaagagcatcggcctgaaagcagtgaggaggcagcggccctggtggaagacttgacccagacccttcaggacaattttgagatacagagtgaaaatggggagaactgtaatcaagacatgtttgagaatgaatcacgtaagatattctcggaaatgcctgaaggtgaaagtgctcagcactccgatggggaaagtgactttgagagagatgctggcatccagaggctccagggacacagcccaggtgaggaccacggggaggtggtttctcaggacagggaagttggccagctcataggcctgcagggcacctacctaggggagaagccctacgaatgtccccagtgtgggaagaccttcagccggaaatcccacctcatcacacacgagaggacccacacaggagagaaatactacaaatgtgatgaatgtggaaaaagctttagtgatggttcaaattttagtagacaccaaaccactcacaccggggagaagccctacaaatgcagagactgtgggaagagctttagccggagtgccaacctcataacccaccagaggatccacacgggggaaaagcccttccagtgtgccgagtgtggcaagagcttcagcaggagtcccaacctcattgcacatcagcgcacccacacaggagagaaaccctactcgtgccccgagtgtggaaagagctttggcaaccgatccagccttaacacgcatcaggggatccacactggagaaaagccctacgaatgtaaagaatgcggcgaaagctttagttacaactccaatctaatcagacaccagagaatccacacaggagagaaaccctacaaatgtaccgactgtgggcagaggttcagccagagttcagccctcatcacccaccggagaacccacacaggagagaaaccctaccagtgcagcgagtgtgggaaaagcttcagccgcagctctaacctggccacacaccggagaacccacatggtggagaagccctataagtgtggggtgtgtgggaagagcttcagccagagctccagtctgattgcacaccagggcatgcacacaggggagaaaccctacgagtgcctgacatgtggggagagcttcagctggagctccaacctcctcaagcaccagaggatccacacgggagagaaaccctacaaatgcagcgagtgtgggaaatgcttcagccagcgctcccagctcgtagtgcaccagcggacccacacgggcgagaagccctacaaatgcctcatgtgcggcaagagcttcagccggggctccattctggtcatgcaccagagagcccatttgggagacaagccctacaggtgccctgagtgtgggaaaggctttagctggaactcagtcctcattatacatcagcgaatccacactggggagaagccctacaaatgccccgagtgtggcaaaggcttcagcaacagctctaactttatcacacatcagagaactcacatgaaagagaaactttattgaagtggcaaagagtgaaagtgagggactggcctggagtgggagttgccacactgccccaacagtgattccctttcaaagagctgtgcttcctaaacattctggggggttttgccagagtcttccccttgctcatcctcatttccaggacactgtcattttagtggtctgagtcaagtcccgtatacattcaagaacagggcataggcgtggaaggtctggaaagttgggtctttttcccttacattgggtgacttgattggccccctctcatgattcctctgtgcctcagtttcctctttggtaaaatggggggaaatgtttctccatgtggaatggaagacagcatggcccaca

SEQ ID NO: 201161 - DNA, 993 bp, Homo sapiens
  Payload ID: 19707
  Gene Name: zinc finger and SCAN domain containing 2
  Uniprot ID: Q7Z7L9
  ENST ID: ENST00000334141
  CDS Start-End: 227-679
ccattgttctcggtgccccacgggcttgagccggggtgaatctggaggggccgggccgagcccgggggcgctttcgcacgcgaagcaaccgctagagcaggacctggtctcccgagagcgggactacttgttgatatttgaggagggaagtgtcttacctgagagcctggctggagaagactgaggtccaaggcttgaagcctaagtgattgccccaggactgtggatgatggctgcagacatcccgagagtgaccactccgctgagctccttggtccaggtgcctcaagaggaagatagacaggaggaggaggtcaccaccatgatcctggaggatgactcctgggtgcaagaagctgtgctgcaggaggatggccctgagtctgagccctttccccagagtgctggcaagggcggcccccaggaggaggtgaccaggggaccacagggtgcactcggccgcctccgagagctctgccggcgctggctgagaccagaggtacacaccaaggagcagatgttaaccatgctgccaaaggaaattcaggcttggctgcaagagcatcggcctgaaagcagtgaggaggcagcggccctggtggaagacttgacccagacccttcaggacagtgctgtagctgtcgttgcttcccttccggtggaggtgaccagtttgtaatgaacttctggatctccagtcagatactatggaggagagagtgatggagggctgaggagaggcctcaggttgttatttggttggggaggcacagagcagaggttcaggtctcagcaggtgtcagaggtgattacagcccttcccatccaccttgcagcaggggctttgtgcctttcatctttaactgggcacctgagatgggaaccaatggggaccatcccagacacatgggtttgtctgtccctgacttctgcctctgagattgtctttgttggtctttgtttaataaacgccccgaccttcctcatgattgc

SEQ ID NO: 201162 - DNA, 3231 bp, Homo sapiens
  Payload ID: 19707
  Gene Name: zinc finger and SCAN domain containing 2
  ENST ID: ENST00000358472
  CDS Start-End: 161-1555
attgttctcggtgccccacgggcttgagccggggtgaatctggaggggccgggccgagcccgggggcgctttcgcacgcgaagcaaccgctagagcaggacctggtctcccgagagattttgagatacagagtgaaaatggggagaactgtaatcaagacatgtttgagaatgaatcacgtaagatattctcggaaatgcctgaaggtgaaagtgctcagcactccgatggggaaagtgactttgagagagatgctggcatccagaggctccagggacacagcccaggtgaggaccacggggaggtggtttctcaggacagggaagttggccagctcataggcctgcagggcacctacctaggggagaagccctacgaatgtccccagtgtgggaagaccttcagccggaaatcccacctcatcacacacgagaggacccacacaggagagaaatactacaaatgtgatgaatgtggaaaaagctttagtgatggttcaaattttagtagacaccaaaccactcacaccggggagaagccctacaaatgcagagactgtgggaagagctttagccggagtgccaacctcataacccaccagaggatccacacgggggaaaagcccttccagtgtgccgagtgtggcaagagcttcagcaggagtcccaacctcattgcacatcagcgcacccacacaggagagaaaccctactcgtgccccgagtgtggaaagagctttggcaaccgatccagccttaacacgcatcaggggatccacactggagaaaagccctacgaatgtaaagaatgcggcgaaagctttagttacaactccaatctaatcagacaccagagaatccacacaggagagaaaccctacaaatgtaccgactgtgggcagaggttcagccagagttcagccctcatcacccaccggagaacccacacaggagagaaaccctaccagtgcagcgagtgtgggaaaagcttcagccgcagctctaacctggccacacaccggagaacccacatggtggagaagccctataagtgtggggtgtgtgggaagagcttcagccagagctccagtctgattgcacaccagggcatgcacacaggggagaaaccctacgagtgcctgacatgtggggagagcttcagctggagctccaacctcctcaagcaccagaggatccacacgggagagaaaccctacaaatgcagcgagtgtgggaaatgcttcagccagcgctcccagctcgtagtgcaccagcggacccacacgggcgagaagccctacaaatgcctcatgtgcggcaagagcttcagccggggctccattctggtcatgcaccagagagcccatttgggagacaagccctacaggtgccctgagtgtgggaaaggctttagctggaactcagtcctcattatacatcagcgaatccacactggggagaagccctacaaatgccccgagtgtggcaaaggcttcagcaacagctctaactttatcacacatcagagaactcacatgaaagagaaactttattgaagtggcaaagagtgaaagtgagggactggcctggagtgggagttgccacactgccccaacagtgattccctttcaaagagctgtgcttcctaaacattctggggggttttgccagagtcttccccttgctcatcctcatttccaggacactgtcattttagtggtctgagtcaagtcccgtatacattcaagaacagggcataggcgtggaaggtctggaaagttgggtctttttcccttacattgggtgacttgattggccccctctcatgattcctctgtgcctcagtttcctctttggtaaaatggggggaaatgtttctccatgtggaatggaagacagcatggcccacaacgtgggccgagtcctcagagaaatactggaaatcattggtgtggttctggttgttttgttgttttgctgccacgttgttgggctaaggtgccttcaccccaagctgttagtgttccagggcaccccaagctgtcagttagaatctgctcttctggctttggtgtcttgggctttgatttcaggtcaagatggaggggcttctccagttctgagtcacccacgtgaaggtaaagaccctttctatttccagaaagtgtcaggagcacagaaacttgaggaagtacagcctggagccagtgtcccagtgtcctttccattggtaagagttggacagggccttcaggaaaggggtaaaccgaggacatttcagtgcttgcttttgtctctgcctactgtcctgtggtagatcagctaccaggggaacacatttgttctcgtggggttttgtcctggagagtgtagtgaagtccgagagccctagctgccaacccatggtggatggtaacttctgtctcatcaagagtaaaacagtcctgcacacagcagggtgggtttgtgcctttggcccaacaggtacatagccccataatttctgaattattctatgcacttgtttccctcttcttttattttttatttgatatatgccgagctagaatcctgtcgggtagcttttgtatactaagaacattattattattattatttttgagacggagtctcactctgtcacccaggctggagtgcagtggtgccatctcagctcactgcaagctccgcctcccgggttcacgccattctcctgcctcagcctcccgagtagctgggactacaggtgcccaccaccacacccagctaatttctttttttgtatttttagtagagacggggtttcaccgcgttagccaggatggtttcgatctcctgtcctcgtgatctgcccgccttggcctcccgaagtgctgggattacaggcgtgagccagcgcacccggccaagaacattatttttaaagaagtgttaactttgaggacatatctgttccctggagatatttgggcttgaatcaggagtttgtcctacaggtgtcgcccttgatctcaggatgctaccagggctttgttctcgggatcctcgcacctggagagtgaagacgggcatgacggcaggtgaaggggtttgctgtgaaggaagaggagataaggcatttccaggaaatgggaaactgcctcctcctacacatggggcctgtgctcagaatgggcttagttcttataggatggatgctcagtattccttaataaagtagagttccattctt

SEQ ID NO: 201163 - DNA, 906 bp, Homo sapiens
  Payload ID: 19707
  Gene Name: zinc finger and SCAN domain containing 2
  Uniprot ID: Q7Z7L9
  ENST ID: ENST00000379358
  CDS Start-End: 195-635
ggggtgaatctggaggggccgggccgagcccgggggcgctttcgcacgcgaagcaaccgctagagcaggacctggtctcccgagagcgggactacttgttgatatttgaggagggaagtgtcttacctgagagcctggctggagaagactgaggtccaaggcttgaagcctaagtgattgccccaggactgtggatgatggctgcagacatcccgagagtgaccactccgctgagctccttggtccaggtgcctcaagaggaagatagacaggaggaggaggtcaccaccatgatcctggaggatgactcctgggtgcaagaagctgtgctgcaggaggatggccctgagtctgagccctttccccagagtgctggcaagggcggcccccaggaggaggtgaccaggggaccacagggtgcactcggccgcctccgagagctctgccggcgctggctgagaccagaggtacacaccaaggagcagatgttaaccatgctgccaaaggaaattcaggcttggctgcaagagcatcggcctgaaagcagtgaggaggcagcggccctggtggaagacttgacccagacccttcaggacagtgaaacagcttcctgcgtacatggctgccctgtgtgattccagttgcagcctcacctcctttgcctctctgaaccaaagaagccagccctgcttaccccagttcccaaacacaggaagtgattttctgcctgagctttctgagttctgttccctcccaccccagggctctccatgcttattcattgcatttccttcctcattgcttttacccagtctgctgttttgggaagccctgacatgtattttggtgcctacatattttatcttctgatctcactgaaaataaaattggattttacttgttttc

SEQ ID NO: 201164 - DNA, 3813 bp, Homo sapiens
  Payload ID: 19707
  Gene Name: zinc finger and SCAN domain containing 2
  Uniprot ID: Q7Z7L9
  ENST ID: ENST00000448803
  CDS Start-End: 293-2137
gggcctctcccgtccattgttctcggtgccccacgggcttgagccggggtgaatctggaggggccgggccgagcccgggggcgctttcgcacgcgaagcaaccgctagagcaggacctggtctcccgagaggtgagccggagaggcaggcctggagccacgcggaccccgggcagtagcccgagcgggactacttgttgatatttgaggagggaagtgtcttacctgagagcctggctggagaagactgaggtccaaggcttgaagcctaagtgattgccccaggactgtggatgatggctgcagacatcccgagagtgaccactccgctgagctccttggtccaggtgcctcaagaggaagatagacaggaggaggaggtcaccaccatgatcctggaggatgactcctgggtgcaagaagctgtgctgcaggaggatggccctgagtctgagccctttccccagagtgctggcaagggcggcccccaggaggaggtgaccaggggaccacagggtgcactcggccgcctccgagagctctgccggcgctggctgagaccagaggtacacaccaaggagcagatgttaaccatgctgccaaaggaaattcaggcttggctgcaagagcatcggcctgaaagcagtgaggaggcagcggccctggtggaagacttgacccagacccttcaggacagtgattttgagatacagagtgaaaatggggagaactgtaatcaagacatgtttgagaatgaatcacgtaagatattctcggaaatgcctgaaggtgaaagtgctcagcactccgatggggaaagtgactttgagagagatgctggcatccagaggctccagggacacagcccaggtgaggaccacggggaggtggtttctcaggacagggaagttggccagctcataggcctgcagggcacctacctaggggagaagccctacgaatgtccccagtgtgggaagaccttcagccggaaatcccacctcatcacacacgagaggacccacacaggagagaaatactacaaatgtgatgaatgtggaaaaagctttagtgatggttcaaattttagtagacaccaaaccactcacaccggggagaagccctacaaatgcagagactgtgggaagagctttagccggagtgccaacctcataacccaccagaggatccacacgggggaaaagcccttccagtgtgccgagtgtggcaagagcttcagcaggagtcccaacctcattgcacatcagcgcacccacacaggagagaaaccctactcgtgccccgagtgtggaaagagctttggcaaccgatccagccttaacacgcatcaggggatccacactggagaaaagccctacgaatgtaaagaatgcggcgaaagctttagttacaactccaatctaatcagacaccagagaatccacacaggagagaaaccctacaaatgtaccgactgtgggcagaggttcagccagagttcagccctcatcacccaccggagaacccacacaggagagaaaccctaccagtgcagcgagtgtgggaaaagcttcagccgcagctctaacctggccacacaccggagaacccacatggtggagaagccctataagtgtggggtgtgtgggaagagcttcagccagagctccagtctgattgcacaccagggcatgcacacaggggagaaaccctacgagtgcctgacatgtggggagagcttcagctggagctccaacctcctcaagcaccagaggatccacacgggagagaaaccctacaaatgcagcgagtgtgggaaatgcttcagccagcgctcccagctcgtagtgcaccagcggacccacacgggcgagaagccctacaaatgcctcatgtgcggcaagagcttcagccggggctccattctggtcatgcaccagagagcccatttgggagacaagccctacaggtgccctgagtgtgggaaaggctttagctggaactcagtcctcattatacatcagcgaatccacactggggagaagccctacaaatgccccgagtgtggcaaaggcttcagcaacagctctaactttatcacacatcagagaactcacatgaaagagaaactttattgaagtggcaaagagtgaaagtgagggactggcctggagtgggagttgccacactgccccaacagtgattccctttcaaagagctgtgcttcctaaacattctggggggttttgccagagtcttccccttgctcatcctcatttccaggacactgtcattttagtggtctgagtcaagtcccgtatacattcaagaacagggcataggcgtggaaggtctggaaagttgggtctttttcccttacattgggtgacttgattggccccctctcatgattcctctgtgcctcagtttcctctttggtaaaatggggggaaatgtttctccatgtggaatggaagacagcatggcccacaacgtgggccgagtcctcagagaaatactggaaatcattggtgtggttctggttgttttgttgttttgctgccacgttgttgggctaaggtgccttcaccccaagctgttagtgttccagggcaccccaagctgtcagttagaatctgctcttctggctttggtgtcttgggctttgatttcaggtcaagatggaggggcttctccagttctgagtcacccacgtgaaggtaaagaccctttctatttccagaaagtgtcaggagcacagaaacttgaggaagtacagcctggagccagtgtcccagtgtcctttccattggtaagagttggacagggccttcaggaaaggggtaaaccgaggacatttcagtgcttgcttttgtctctgcctactgtcctgtggtagatcagctaccaggggaacacatttgttctcgtggggttttgtcctggagagtgtagtgaagtccgagagccctagctgccaacccatggtggatggtaacttctgtctcatcaagagtaaaacagtcctgcacacagcagggtgggtttgtgcctttggcccaacaggtacatagccccataatttctgaattattctatgcacttgtttccctcttcttttattttttatttgatatatgccgagctagaatcctgtcgggtagcttttgtatactaagaacattattattattattatttttgagacggagtctcactctgtcacccaggctggagtgcagtggtgccatctcagctcactgcaagctccgcctcccgggttcacgccattctcctgcctcagcctcccgagtagctgggactacaggtgcccaccaccacacccagctaatttctttttttgtatttttagtagagacggggtttcaccgcgttagccaggatggtttcgatctcctgtcctcgtgatctgcccgccttggcctcccgaagtgctgggattacaggcgtgagccagcgcacccggccaagaacattatttttaaagaagtgttaactttgaggacatatctgttccctggagatatttgggcttgaatcaggagtttgtcctacaggtgtcgcccttgatctcaggatgctaccagggctttgttctcgggatcctcgcacctggagagtgaagacgggcatgacggcaggtgaaggggtttgctgtgaaggaagaggagataaggcatttccaggaaatgggaaactgcctcctcctacacatggggcctgtgctcagaatgggcttagttcttataggatggatgctcagtattccttaataaagtagagttccattctt

SEQ ID NO: 201165 - DNA, 581 bp, Homo sapiens
  Payload ID: 19707
  Gene Name: zinc finger and SCAN domain containing 2
  ENST ID: ENST00000502939
  CDS Start-End: 499-581
gttctcggtgccccacgggcttgagccggggtgaatctggaggggccgggccgagcccgggggcgctttcgcacgcgaagcaaccgctagagcaggacctggtctcccgagagacggagttttgcttttgttgcccaggctggagtgcaatggcctgatctccgctcaccgcatcctctgcctcccgggttcaagcgattctcctgcctcagcctccggagtagctgggattacgggcatgcgccaccacgcctggctaattttgtttttagtagagacgaggtttctccgtgttggtcaggctggtctcgatcttccgacctcaggtgatccgcccgcctcaacctgccaaagtgctaggattacaggtctgagccaccgcgcccggctcgggactacttgttgatatttgaggagggaagtgtcttacctgagagcctggctggagaagactgaggtccaaggcttgaagcctaagtgattgccccaggactgtggatgatggctgcagacatcccgagagtgaccactccgctgagctccttggtccaggtgcctcaagaggaagatagacaggagga

SEQ ID NO: 201166 - DNA, 1109 bp, Homo sapiens
  Payload ID: 19707
  Gene Name: zinc finger and SCAN domain containing 2
  ENST ID: ENST00000538076
  CDS Start-End: 28-744
gcctaagtgattgccccaggactgtggatgatggctgcagacatcccgagagtgaccactccgctgagctccttggtccaggtgcctcaagaggaagatagacaggaggaggaggtcaccaccatgatcctggaggatgactcctgggtgcaagaagctgtgctgcaggaggatggccctgagtctgagccctttccccagagtgctggcaagggcggcccccaggaggaggtgaccaggggaccacagggtgcactcggccgcctccgagagctctgccggcgctggctgagaccagaggtacacaccaaggagcagatgttaaccatgctgccaaaggaaattcaggcttggctgcaagagcatcggcctgaaagcagtgaggaggcagcggccctggtggaagacttgacccagacccttcaggacagtgattttgagatacagagtgaaaatggggagaactgtaatcaagacatgtttgagaatgaatcacgtaagatattctcggaaatgcctgaaggtgaaagtgctcagcactccgatggggaaagtgactttgagagagatgctggcatccagaggctccagggacacagcccaggtcaagatggaggggcttctccagttctgagtcacccacgtgaaggtaaagaccctttctatttccagaaagtgtcaggagcacagaaacttgaggaagtacagcctggagccagtgtcccagtgtcctttccattgtagagacggggtttcaccgcgttagccaggatggtttcgatctcctgtcctcgtgatctgcccgccttggcctcccgaagtgctgggattacaggcgtgagccagcgcacccggccaagaacattatttttaaagaagtgttaactttgaggacatatctgttccctggagatatttgggcttgaatcaggagtttgtcctacaggtgtcgcccttgatctcaggatgctaccagggctttgttctcgggatcctcgcacctggagagtgaagacgggcatgacggcaggtgaaggggtttgctgtgaaggaagaggagataaggcatttccaggaaatgggaaactgcctcctcctacacatggggc

SEQ ID NO: 201167 - DNA, 578 bp, Homo sapiens
  Payload ID: 19707
  Gene Name: zinc finger and SCAN domain containing 2
  ENST ID: ENST00000442073
  CDS Start-End: 481-578
gtccattgttctcggtgccccacgggcttgagccggggtgaatctggaggggccgggccgagcccgggggcgctttcgcacgcgaagcaaccgctagagcaggacctggtctcccgagaggctggagtgcaatggcctgatctccgctcaccgcatcctctgcctcccgggttcaagcgattctcctgcctcagcctccggagtagctgggattacgggcatgcgccaccacgcctggctaattttgtttttagtagagacgaggtttctccgtgttggtcaggctggtctcgatcttccgacctcaggtgatccgcccgcctcaacctgccaaagtgctaggattacaggtctgagccaccgcgcccggctcgggactacttgttgatatttgaggagggaagtgtcttacctgagagcctggctggagaagactgaggtccaaggcttgaagcctaagtgattgccccaggactgtggatgatggctgcagacatcccgagagtgaccactccgctgagctccttggtccaggtgcctcaagaggaagatagacaggaggaggaggtcaccaccat

SEQ ID NO: 201168 - DNA, 910 bp, Homo sapiens
  Payload ID: 19707
  Gene Name: zinc finger and SCAN domain containing 2
  ENST ID: ENST00000485222
  CDS Start-End: 28-630
gcctaagtgattgccccaggactgtggatgatggctgcagacatcccgagagtgaccactccgctgagctccttggtccaggtgcctcaagaggaagatagacaggaggaggaggtcaccaccatgatcctggaggatgactcctgggtgcaagaagctgtgctgcaggaggatggccctgagtctgagccctttccccagagtgctggcaagggcggcccccaggaggaggtgaccaggggaccacagggtgcactcggccgcctccgagagctctgccggcgctggctgagaccagaggtacacaccaaggagcagatgttaaccatgctgccaaaggaaattcaggcttggctgcaagagcatcggcctgaaagcagtgaggaggcagcggccctggtggaagacttgacccagacccttcaggacagtgattttgagatacagagtgaaaatggggagaactgtaatcaagacatgtttgagaatgaatcacgtaagatattctcggaaatgcctgaaggtgaaagtgctcagcactccgatggggaaagtgactttgagagagatgctggcatccagaggctccagggacacagcccagaaagtgtcaggagcacagaaacttgaggaagtacagcctggagccagtgtcccagtgtcctttccattggtgtcgcccttgatctcaggatgctaccagggctttgttctcgggatcctcgcacctggagagtgaagacgggcatgacggcaggtgaaggggtttgctgtgaaggaagaggagataaggcatttccaggaaatgggaaactgcctcctcctacacatggggcctgtgctcagaatgggcttagttcttataggatggatgctcagtattccttaataaagtagagttccattcttt

SEQ ID NO: 201169 - DNA, 965 bp, Homo sapiens
  Payload ID: 19707
  Gene Name: zinc finger and SCAN domain containing 2
  ENST ID: ENST00000541040
  CDS Start-End: 28-660
gcctaagtgattgccccaggactgtggatgatggctgcagacatcccgagagtgaccactccgctgagctccttggtccaggtgcctcaagaggaagatagacaggaggaggaggtcaccaccatgatcctggaggatgactcctgggtgcaagaagctgtgctgcaggaggatggccctgagtctgagccctttccccagagtgctggcaagggcggcccccaggaggaggtgaccaggggaccacagggtgcactcggccgcctccgagagctctgccggcgctggctgagaccagaggtacacaccaaggagcagatgttaaccatgctgccaaaggaaattcaggcttggctgcaagagcatcggcctgaaagcagtgaggaggcagcggccctggtggaagacttgacccagacccttcaggacagtgattttgagatacagagtgaaaatggggagaactgtaatcaagacatgtttgagaatgaatcacgtaagatattctcggaaatgcctgaaggtgaaagtgctcagcactccgatggggaaagtgactttgagagagatgctggcatccagaggctccagggacacagcccagtagagacggggtttcaccgcgttagccaggatggtttcgatctcctgtcctcgtgatctgcccgccttggcctcccgaagtgctgggattacaggcgtgagccagcgcacccggccaagaacattatttttaaagaagtgttaactttgaggacatatctgttccctggagatatttgggcttgaatcaggagtttgtcctacaggtgtcgcccttgatctcaggatgctaccagggctttgttctcgggatcctcgcacctggagagtgaagacgggcatgacggcaggtgaaggggtttgctgtgaaggaagaggagataaggcatttccaggaaatgggaaactgcctcctcctacac

SEQ ID NO: 201170 - DNA, 2914 bp, Homo sapiens
  Payload ID: 19707
  Gene Name: zinc finger and SCAN domain containing 2
  Uniprot ID: Q7Z7L9
  ENST ID: ENST00000540894
  CDS Start-End: 28-1872
gcctaagtgattgccccaggactgtggatgatggctgcagacatcccgagagtgaccactccgctgagctccttggtccaggtgcctcaagaggaagatagacaggaggaggaggtcaccaccatgatcctggaggatgactcctgggtgcaagaagctgtgctgcaggaggatggccctgagtctgagccctttccccagagtgctggcaagggcggcccccaggaggaggtgaccaggggaccacagggtgcactcggccgcctccgagagctctgccggcgctggctgagaccagaggtacacaccaaggagcagatgttaaccatgctgccaaaggaaattcaggcttggctgcaagagcatcggcctgaaagcagtgaggaggcagcggccctggtggaagacttgacccagacccttcaggacagtgattttgagatacagagtgaaaatggggagaactgtaatcaagacatgtttgagaatgaatcacgtaagatattctcggaaatgcctgaaggtgaaagtgctcagcactccgatggggaaagtgactttgagagagatgctggcatccagaggctccagggacacagcccaggtgaggaccacggggaggtggtttctcaggacagggaagttggccagctcataggcctgcagggcacctacctaggggagaagccctacgaatgtccccagtgtgggaagaccttcagccggaaatcccacctcatcacacacgagaggacccacacaggagagaaatactacaaatgtgatgaatgtggaaaaagctttagtgatggttcaaattttagtagacaccaaaccactcacaccggggagaagccctacaaatgcagagactgtgggaagagctttagccggagtgccaacctcataacccaccagaggatccacacgggggaaaagcccttccagtgtgccgagtgtggcaagagcttcagcaggagtcccaacctcattgcacatcagcgcacccacacaggagagaaaccctactcgtgccccgagtgtggaaagagctttggcaaccgatccagccttaacacgcatcaggggatccacactggagaaaagccctacgaatgtaaagaatgcggcgaaagctttagttacaactccaatctaatcagacaccagagaatccacacaggagagaaaccctacaaatgtaccgactgtgggcagaggttcagccagagttcagccctcatcacccaccggagaacccacacaggagagaaaccctaccagtgcagcgagtgtgggaaaagcttcagccgcagctctaacctggccacacaccggagaacccacatggtggagaagccctataagtgtggggtgtgtgggaagagcttcagccagagctccagtctgattgcacaccagggcatgcacacaggggagaaaccctacgagtgcctgacatgtggggagagcttcagctggagctccaacctcctcaagcaccagaggatccacacgggagagaaaccctacaaatgcagcgagtgtgggaaatgcttcagccagcgctcccagctcgtagtgcaccagcggacccacacgggcgagaagccctacaaatgcctcatgtgcggcaagagcttcagccggggctccattctggtcatgcaccagagagcccatttgggagacaagccctacaggtgccctgagtgtgggaaaggctttagctggaactcagtcctcattatacatcagcgaatccacactggggagaagccctacaaatgccccgagtgtggcaaaggcttcagcaacagctctaactttatcacacatcagagaactcacatgaaagagaaactttattgaagtggcaaagagtgaaagtgagggactggcctggagtgggagttgccacactgccccaacagtgattccctttcaaagagctgtgcttcctaaacattctggggggttttgccagagtcttccccttgctcatcctcatttccaggacactgtcattttagtggtctgagtcaagtcccgtatacattcaagaacagggcataggcgtggaaggtctggaaagttgggtctttttcccttacattgggtgacttgattggccccctctcatgattcctctgtgcctcagtttcctctttggtaaaatggggggaaatgtttctccatgtggaatggaagacagcatggcccacaacgtgggccgagtcctcagagaaatactggaaatcattggtgtggttctggttgttttgttgttttgctgccacgttgttgggctaaggtgccttcaccccaagctgttagtgttccagggcaccccaagctgtcagttagaatctgctcttctggctttggtgtcttgggctttgatttcaggtcaagatggaggggcttctccagttctgagtcacccacgtgaaggtaaagaccctttctatttccagaaagtgtcaggagcacagaaacttgaggaagtacagcctggagccagtgtcccagtgtcctttccattgtagagacggggtttcaccgcgttagccaggatggtttcgatctcctgtcctcgtgatctgcccgccttggcctcccgaagtgctgggattacaggcgtgagccagcgcacccggccaagaacattatttttaaagaagtgttaactttgaggacatatctgttccctggagatatttgggcttgaatcaggagtttgtcctacaggtgtcgcccttgatctcaggatgctaccagggctttgttctcgggatcctcgcacctggagagtgaagacgggcatgacggcaggtgaaggggtttgctgtgaaggaagaggagataaggcatttccaggaaatgggaaactgcctcctcctacacatggggc

SEQ ID NO: 201171 - DNA, 460 bp, Homo sapiens
  Payload ID: 19707
  Gene Name: zinc finger and SCAN domain containing 2
  ENST ID: ENST00000546275
  CDS Start-End: 300-460
ctctcccgtccattgttctcggtgccccacgggcttgagccggggtgaatctggaggggccgggccgagcccgggggcgctttcgcacgcgaagcaaccgctagagcaggacctggtctcccgagaggtgatccgcccgcctcaacctgccaaagtgctaggattacaggtctgagccaccgcgcccggctcgggactacttgttgatatttgaggagggaagtgtcttacctgagagcctggctggagaagactgaggtccaaggcttgaagcctaagtgattgccccaggactgtggatgatggctgcagacatcccgagagtgaccactccgctgagctccttggtccaggtgcctcaagaggaagatagacaggaggaggaggtcaccaccatgatcctggaggatgactcctgggtgcaagaagctgtgctgcaggaggatggccctgagtctga

SEQ ID NO: 201172 - DNA, 2242 bp, Homo sapiens
  Payload ID: 19707
  Gene Name: zinc finger and SCAN domain containing 2
  Uniprot ID: Q7Z7L9
  ENST ID: ENST00000546148
  CDS Start-End: 230-2074
cgtccattgttctcggtgccccacgggcttgagccggggtgaatctggaggggccgggccgagcccgggggcgctttcgcacgcgaagcaaccgctagagcaggacctggtctcccgagagcgggactacttgttgatatttgaggagggaagtgtcttacctgagagcctggctggagaagactgaggtccaaggcttgaagcctaagtgattgccccaggactgtggatgatggctgcagacatcccgagagtgaccactccgctgagctccttggtccaggtgcctcaagaggaagatagacaggaggaggaggtcaccaccatgatcctggaggatgactcctgggtgcaagaagctgtgctgcaggaggatggccctgagtctgagccctttccccagagtgctggcaagggcggcccccaggaggaggtgaccaggggaccacagggtgcactcggccgcctccgagagctctgccggcgctggctgagaccagaggtacacaccaaggagcagatgttaaccatgctgccaaaggaaattcaggcttggctgcaagagcatcggcctgaaagcagtgaggaggcagcggccctggtggaagacttgacccagacccttcaggacagtgattttgagatacagagtgaaaatggggagaactgtaatcaagacatgtttgagaatgaatcacgtaagatattctcggaaatgcctgaaggtgaaagtgctcagcactccgatggggaaagtgactttgagagagatgctggcatccagaggctccagggacacagcccaggtgaggaccacggggaggtggtttctcaggacagggaagttggccagctcataggcctgcagggcacctacctaggggagaagccctacgaatgtccccagtgtgggaagaccttcagccggaaatcccacctcatcacacacgagaggacccacacaggagagaaatactacaaatgtgatgaatgtggaaaaagctttagtgatggttcaaattttagtagacaccaaaccactcacaccggggagaagccctacaaatgcagagactgtgggaagagctttagccggagtgccaacctcataacccaccagaggatccacacgggggaaaagcccttccagtgtgccgagtgtggcaagagcttcagcaggagtcccaacctcattgcacatcagcgcacccacacaggagagaaaccctactcgtgccccgagtgtggaaagagctttggcaaccgatccagccttaacacgcatcaggggatccacactggagaaaagccctacgaatgtaaagaatgcggcgaaagctttagttacaactccaatctaatcagacaccagagaatccacacaggagagaaaccctacaaatgtaccgactgtgggcagaggttcagccagagttcagccctcatcacccaccggagaacccacacaggagagaaaccctaccagtgcagcgagtgtgggaaaagcttcagccgcagctctaacctggccacacaccggagaacccacatggtggagaagccctataagtgtggggtgtgtgggaagagcttcagccagagctccagtctgattgcacaccagggcatgcacacaggggagaaaccctacgagtgcctgacatgtggggagagcttcagctggagctccaacctcctcaagcaccagaggatccacacgggagagaaaccctacaaatgcagcgagtgtgggaaatgcttcagccagcgctcccagctcgtagtgcaccagcggacccacacgggcgagaagccctacaaatgcctcatgtgcggcaagagcttcagccggggctccattctggtcatgcaccagagagcccatttgggagacaagccctacaggtgccctgagtgtgggaaaggctttagctggaactcagtcctcattatacatcagcgaatccacactggggagaagccctacaaatgccccgagtgtggcaaaggcttcagcaacagctctaactttatcacacatcagagaactcacatgaaagagaaactttattgaagtggcaaagagtgaaagtgagggactggcctggagtgggagttgccacactgccccaacagtgattccctttcaaagagctgtgcttcctaaacattctggggggttttgccagagtcttccccttgctcatcctcatttccaggacactgtcattttagtggtctg

SEQ ID NO: 201173 - DNA, 579 bp, Homo sapiens
  Payload ID: 19707
  Gene Name: zinc finger and SCAN domain containing 2
  ENST ID: ENST00000540936
  CDS Start-End: 259-579
aatgagcgcggcggtgggcgggcctctcccgtccattgttctcggtgccccacgggcttgagccggggtgaatctggaggggccgggccgagcccgggggcgctttcgcacgcgaagcaaccgctagagcaggacctggtctcccgagagcgggactacttgttgatatttgaggagggaagtgtcttacctgagagcctggctggagaagactgaggtccaaggcttgaagcctaagtgattgccccaggactgtggatgatggctgcagacatcccgagagtgaccactccgctgagctccttggtccaggtgcctcaagaggaagatagacaggaggaggaggtcaccaccatgatcctggaggatgactcctgggtgcaagaagctgtgctgcaggaggatggccctgagtctgagccctttccccagagtgctggcaagggcggcccccaggaggaggtgaccaggggaccacagggtgcactcggccgcctccgagagctctgccggcgctggctgagaccagagattttgagatacagagtgaaaatggggagaactgtaatcaagacatgt

SEQ ID NO: 201174 - DNA, 4316 bp, Homo sapiens
  Payload ID: 19708
  Gene Name: zinc finger and SCAN domain containing 20
  Uniprot ID: P17040
  ENST ID: ENST00000361328
  CDS Start-End: 154-3285
gagcccgggagcacttccgccctgttgtgaagtgggtgtctcgagccttggggagcagtcccttttctaggagcctcttgaaggactcaccgtagatgcaggaagacattggatgaggtcagcatagctgaagtgaggtgtctgggttagacaatggctatggccctggaattgcaagcccaggcatctccgcagccagagcctgaagaactcctgattgtgaaactggaagaggactcttggggatcagaatccaaactctgggagaaggaccgtggctctgtctctggcccagaggcctcccgccagcgcttcaggcaattccaatacagggatgcagctggaccccacgaggccttcagccagctctgggctctctgctgtcgttggctgaggccggagatccgtctcaaagagcagatcctggagctgctcgtgctggagcagttcctgactatcttgcctagggaggtccagacctgggtgcaggcacgccaccctgagagtggtgaggaggctgtggccttggtggaggattggcaccgagagaccaggactgcaggacagtcgggactggaattgcatacagaagagaccaggcccttaaagacaggggaagaagctcagagcttccagctgcagccagtggatccctggcctgagggacagtcccagaagaagggggtgaagaatacatgccctgaccttcccaatcacctaaatgccgaggtggcaccacagcctttgaaagagagtgctgtcctcactccccgagtccctactctcccaaagatggggagcgttggagattgggaggtgacagctgagtcccaggaagccctgggccctggcaaacatgctgagaaggagctctgtaaagaccccccaggagacgactgtgggaacagcgtgtgcctgggagttccagtttcaaaaccaagtaatacctccgagaaagagcaaggaccagagttttggggtctaagtcttataaattctgggaaaaggagcactgcagattacagcctggataatgagccagctcaggcattgacctggagggattcaagagcctgggaggaacaataccagtgggatgtggaggacatgaaggtgtcaggtgttcactggggctatgaggagaccaagactttcctggcaattttgagtgaatctcctttctctgaaaagctccggacttgtcaccagaaccgccaggtatatcgggccattgcagagcagctaagggcaaggggcttcctgcggacactggagcaatgtcgctatagggtcaaaaacctcctacggaattaccggaaagccaagagcagccacccaccaggtacctgccccttctatgaggagctggaggccctggtcagggctcggacagccatcagagccacagatggcccaggagaggccgtggcacttcccaggctcgggtatagtgacgcagagatggatgagcaggaggaagggggctgggatcctgaagaaatggcagaagactgtaacggtgctggcctggtcaatgttgagtctacccaggggcccaggattgcaggggccccagctctgttccagagtcgtattgcaggtgtgcactggggctatgaggagaccaaggccttcctggcaattctcagtgagtccccattctcggaaaagcttcgtacctgtcaccagaacagccaggtgtaccgggccattgcagagcggctgtgtgctctgggcttcctgcggacactggagcagtgtcgctacagattcaaaaacctccttcgaagctaccggaaagccaagagcagccacccaccagggacatgccctttctatgaggaactggactcgctgatgagggctcgggctgcagtcagggccatggggactgtccgagaggctgcaggtctccctaggtgtgggcagagtagtgctgagactgatgcccaggaggcctggggtgaagtggccaatgaagatgctgtcaaaccttcaaccttgtgtcctaaagccccagacatgggttttgaaatgaggcatgaggatgaagaccagatttcagagcaggacatttttgagggtttgcctggagccttatcaaaatgtcctacagaagctgtttgccaacctcttgactggggagaagacagtgaaaatgaaaatgaagatgaagggcagtggggaaatccctcacaggaacagtggcaagaaagttcttctgaagaggacttagaaaaacttattgaccatcaaggcctgtaccttgcagagaaaccctacaagtgtgacacatgcatgaagagcttcagtcggagctcccacttcattgcccatcagcgaatccacacaggtgagaagccctacaaatgccttgaatgtggaaaaaactttagtgaccgctctaacctcaatacccatcagagaatccacactggagagaagccctataaatgccttgaatgtgggaaaagctttagtgaccattctaatctcatcactcaccagagaattcacacgggggaaaagccctataaatgtggagaatgttggaaaagcttcaaccagagctcaaaccttctgaaacatcagagaatccacttgggaggaaatcctgaccagtgtagtgagcctgggggaaactttgcccaaagcccatcttttagtgctcactggaggaattctacagaagagacagctcctgaacaacctcaaagtatcagtaaggacttgaattctcctggaccacacagcacaaactcaggggagaaactttatgagtgttctgaatgtggaagaagcttctctaagagctctgccctcattagtcaccaaagaatccatacgggagagaaaccatatgaatgtgccgaatgtgggaaaagcttcagtaagagctccaccctggccaaccaccagcgcacccacactggagagaagccgtataaatgtgtggactgtgggaagtgcttcagtgagcgctccaagctcatcacacaccagagagtgcacacaggagagaagccctacaaatgccttgagtgtggaaaattcttccgtgaccgttctaacctcattactcaccagaggattcatacgggagagaagccgtataagtgcagagagtgtgggaaatgctttaaccagagctccagtcttattattcaccagagaatccacacaggggagaaaccctacaagtgcacagagtgtggcaaagacttcaacaacagttcccacttcagtgctcaccggagaacccatgcaggagggaaggcgtcgtaggggacagtttcctcaacaacaaaggaggactcaatgtatatatcttatatcataagatgtatgctagagataaactttccaatttttaagcttggtgtgtacccagggaagttatcttggtataaaccaggtaatttggaagtgaattacaaatactaaggatccagatttgaaggcacttttaagtgtaatttgtttttcttctgtaaagacccacacagaatcctgactgtccttgtatttgctatcatgtaagagctgtgtcagtatttgagccaaactggcaacttacgagattagagttaaatcagtggtcctgagcagtgattccaaactctcactgtgccttcacaccatccatgtgtaatccaccccatcagcagtggttctcctactttctcagtgggggcatatcctcaagggagaatgttgtgactctggtgagagaggagttggcctagagcaggccactgtgagctcagcacagagtaggaagaacagtgacatcattacaaaatcatcaatagcagcaatagctggtgtttattgagctgttgctctttggcaagctctgtgctaagaactttgtatacatcatctcatttaatcttcacaacggccccaggagataagtactaactttctccccatttcctagaggcttgggaaattaagtaactcgcactggtcacacatctgtaagtgggagaggcaggattcaacagatctgtctgtcttgagtctatcgtgctcttattgctatactgaattcccattcatgttaggtaacttaggggccagaatctccatgcactttgtagaccacatttcctgttatgaaatttccacattttgaattttttaaacaaatatggaaactgagaatccctaaggattaaaggacttgggatatccagaattggtgaagtgatttgagcaaggatgagctattatcaaaatacttgatgtgagtttccatcttcgcaataatatgggtgagagatataggtgggttgagattgggaaaaata

SEQ ID NO: 201175 - DNA, 2367 bp, Homo sapiens
  Payload ID: 19708
  Gene Name: zinc finger and SCAN domain containing 20
  Uniprot ID: P17040
  ENST ID: ENST00000373413
  CDS Start-End: 152-1453
gggagcacttccgccctgttgtgaagtgggtgtctcggtggagccttggggagcagtcccttttctaggagcctcttgaaggactcaccgtagatgcaggaagacattggatgaggtcagcatagctgaagtgaggtgtctgggttagacaatggctatggccctggaattgcaagcccaggcatctccgcagccagagcctgaagaactcctgattgtgaaactggaagaggactcttggggatcagaatccaaactctgggagaaggaccgtggctctgtctctggcccagaggcctcccgccagcgcttcaggcaattccaatacagggatgcagctggaccccacgaggccttcagccagctctgggctctctgctgtcgttggctgaggccggagatccgtctcaaagagcagatcctggagctgctcgtgctggagcagttcctgactatcttgcctagggaggtccagacctgggtgcaggcacgccaccctgagagtggtgaggaggctgtggccttggtggaggattggcaccgagagaccaggactgcaggacagtcgggactggaattgcatacagaagagaccaggcccttaaagacaggggaagaagctcagagcttccagctgcagccagtggatccctggcctgagggacagtcccagaagaagggggtgaagaatacatgccctgaccttcccaatcacctaaatgccgaggtggcaccacagcctttgaaagagagtggagttccagtttcaaaaccaagtaatacctccgagaaagagcaaggaccagagttttggggtctaagtcttataaattctgggaaaaggagcactgcagattacagcctggataatgagccagctcaggcattgacctggagggattcaagagcctgggaggaacaataccagtgggatgtggaggacatgaaggtgtcaggtgttcactggggctatgaggagaccaagactttcctggcaattttgagtgaatctcctttctctgaaaagctccggacttgtcaccagaaccgccaggtatatcgggccattgcagagcagctaagggcaaggggcttcctgcggacactggagcaatgtcgctatagggtcaaaaacctcctacggaattaccggaaagccaagagcagccacccaccaggtacctgccccttctatgaggagctggaggccctggtcagggctcggacagccatcagagccacagatggcccaggagaggccgtggcacttcccaggctcgggtatagtgacgcagagatggatgagcaggaggaagggggctgggatcctgaagaaatggcagaagactgtaacggtgctggcctggtcaatgttgagtctacccaggggcccaggattgcaggggccccagctctgttccagagtcgtattggtaagaacatgggggtttagtcagattcagatttccaaccctcctaccagctagactgctattccctgaggtcagggcacaggctgcaagtctggattgaagccactagagtgaagagctacattccttaggtcatcctcaaactccaactttcttttcccatgaccaagtctctttgcaaaagtcttcttagttatagaagcaaacatttttaaagccttaaggggcctcaaagagtgaatccagtatttccaaaagtgtgtcactggtagtatgggatgatcatcgacgttacatgaatgaactttaaattcttgtatttatatatttctcttaatttgtatgagtgcatcaacctgtgatttcacagataacaaagttaggtaaagagtgatggcgagtgaaatattgaacagataatggcagaaatcccgacagtgtagacttgaataatcaatgtctgggaaacatccaatcattgtaaaggtgcaaacatggaagtccatgagatgaggcgtcttatagacgcacaggtaggagcagagcccggatcagagcctgtggctcctgcctgctggtttcacatggttttccctccaccatgttgccttcctgggctacatcactttcctgcagaggagctgagactagaccacctccttttcattcccctgcaaaggaggaaagtgtgtcctcatttggcctttcttgcaggactatttgaaactcatttatgcctctaatctttaggaattctcagctttcatgttttgttaaaaggagaatttatggccaggtgcggtggctcacgcctgtaatcccaacactttgggaggctgaggtgggcagatcacgaggtcaggagatcaagactatcctggccaacatggtgaaaccctgtctctactaaaaaaaatacaaaaattagctgggt

SEQ ID NO: 201176 - DNA, 2005 bp, Homo sapiens
  Payload ID: 19709
  Gene Name: zinc finger and SCAN domain containing 21
  Uniprot ID: Q9Y5A6
  ENST ID: ENST00000292450
  CDS Start-End: 165-1586
acttccgggtgcgcggtcccgaggtacgcggtgcggtctcccggtacccggagcggctctgattcatggtttaacttgtggccctaaagaactggaaacccaaaggaacgaatattcctgccccacagagtcccatctttggtgaggctgtttctggagtttacatgatgaccaaggtactaggcatggccccagttctgggccctaggcctccacaggagcaggtggggcctctgatggtaaaagtcgaggagaaagaagagaaaggcaagtaccttcctagcctggagatgttccgccagcgcttcaggcagtttgggtaccatgatacccctggaccccgagaggccctgagccaactccgggtgctctgctgtgagtggctgaggcccgagatccacaccaaggagcagatcctggagctactggtgctggagcagttcctgaccatcctgccccaggagctccaggcctgggtgcaggagcattgcccggagagcgctgaagaggctgtcactctcctcgaagatctggagcgggaactggatgagccaggacaccaggtctcaactcctccaaacgaacagaaaccggtgtgggagaagatatcctcctcaggaactgcaaaggaatccccgagcagcatgcagccacagcccttggagaccagtcacaaatacgagtcttgggggcccctgtacatccaagagtctggtgaggagcaggagttcgctcaagatccaagaaaggtccgagattgcagattgagtacccagcacgaggaatcagcagatgagcagaaaggttctgaagcagaggggctcaaaggggatataatttctgtgattatcgccaataaacctgaggccagcttagagaggcagtgcgtaaaccttgaaaatgaaaaaggaacaaaaccccctcttcaagaggcaggctccaagaaaggtagagaatcagttcctactaaacctaccccaggagagagacgttatatatgtgctgaatgtggcaaagcctttagtaatagctcaaatctcaccaaacacaggagaacacacactggggagaaaccttacgtgtgcaccaagtgtgggaaagctttcagccacagctcaaacctcaccctccactacagaacacacttggtggaccggccctatgactgtaagtgtggaaaagcttttgggcagagctcagaccttcttaaacatcagagaatgcacacagaagaggcgccatatcagtgcaaagattgtggcaaggctttcagcgggaaaggcagcctcattcgtcactatcggatccacactggggagaagccttatcagtgtaacgaatgtgggaagagcttcagtcagcatgcgggcctcagctcccaccagagactccacaccggagagaagccatataagtgtaaggagtgtgggaaagccttcaaccacagctccaacttcaataaacaccacagaatccacaccggggaaaagccctactggtgtcatcactgtggaaagaccttctgtagcaagtccaatctttccaaacatcagcgagtccacactggagagggagaagcaccgtaactttcaagcgctcctgttgttgtcgttgttttaaactttagaatctgaaaaccagaaagaagtcttgtcattgcagcagcatcgattccggtgatagagtttgtatcactcaacatcaggggatgcctgaggagtgcgagctccacagcaacatggcaggcaggaggtcctcagaaggtgtcaggaggttccacactcgccagttcactggagcagagtcccttcgccacacttagggtcccagtaagccatgccagcattaccttttgcgtagttaaacagacgtgtatccagtctagttaaggaagaaacattaagattgtttaatttttaacatatattcaagaattttaatttgtaaagaattgagccacattgaacacaattgaatgagattcagaataaacttataacatctt

SEQ ID NO: 201177 - DNA, 1904 bp, Homo sapiens
  Payload ID: 19709
  Gene Name: zinc finger and SCAN domain containing 21
  ENST ID: ENST00000456748
  CDS Start-End: 165-1517
acttccgggtgcgcggtcccgaggtacgcggtgcggtctcccggtacccggagcggctctgattcatggtttaacttgtggccctaaagaactggaaacccaaaggaacgaatattcctgccccacagagtcccatctttggtgaggctgtttctggagtttacatgatgaccaaggtactaggcatggccccagttctgggccctaggcctccacaggagcaggtggggcctctgatggtaaaagtcgaggagaaagaagagaaaggcaagtaccttcctagcctggagatgttccgccagcgcttcaggcagtttgggtaccatgatacccctggaccccgagaggccctgagccaactccgggtgctctgctgtgagtggctgaggcccgagatccacaccaaggagcagatcctggagctactggtgctggagcagttcctgaccatcctgccccaggagctccaggcctgggtgcaggagcattgcccggagagcgctgaagaggctgtcactctcctcgaagatctggagcgggaactggatgagccaggacaccaggtctcaactcctccaaacgaacagaaaccggtgtgggagaagatatcctcctcaggaactgcaaaggaatccccgagcagcatgcagccacagcccttggagaccagtcacaaatacgagtcttgggggcccctgtacatccaagagtctggtgaggagcaggagttcgctcaagatccaagaaaggtccgagattgcagattgagtacccagcacgaggaatcagcagatgagcagaaaggttctgaagcagaggggctcaaaggggatataatttctgtgattatcgccaataaacctgaggccagcttagagaggcagtgcgtaaaccttgaaaatgaaaaaggaacaaaaccccctcttcaagaggcaggctccaagaaaggagaacacacactggggagaaaccttacgtgtgcaccaagtgtgggaaagctttcagccacagctcaaacctcaccctccactacagaacacacttggtggaccggccctatgactgtaagtgtggaaaagcttttgggcagagctcagaccttcttaaacatcagagaatgcacacagaagaggcgccatatcagtgcaaagattgtggcaaggctttcagcgggaaaggcagcctcattcgtcactatcggatccacactggggagaagccttatcagtgtaacgaatgtgggaagagcttcagtcagcatgcgggcctcagctcccaccagagactccacaccggagagaagccatataagtgtaaggagtgtgggaaagccttcaaccacagctccaacttcaataaacaccacagaatccacaccggggaaaagccctactggtgtcatcactgtggaaagaccttctgtagcaagtccaatctttccaaacatcagcgagtccacactggagagggagaagcaccgtaactttcaagcgctcctgttgttgtcgttgttttaaactttagaatctgaaaaccagaaagaagtcttgtcattgcagcagcatcgattccggtgatagagtttgtatcactcaacatcaggggatgcctgaggagtgcgagctccacagcaacatggcaggcaggaggtcctcagaaggtgtcaggaggttccacactcgccagttcactggagcagagtcccttcgccacacttagggtcccagtaagccatgccagcattaccttttgcgtagttaaacagacgtgtatccagtctagttaaggaagaaacattaagattgtttaatttttaacatatattcaagaattttaatttgtaaagaattgagccacattgaacacaattgaatgagattcagaataaacttataacatcttgt

SEQ ID NO: 201178 - DNA, 820 bp, Homo sapiens
  Payload ID: 19709
  Gene Name: zinc finger and SCAN domain containing 21
  ENST ID: ENST00000438937
  CDS Start-End: 278-820
gaggtacgcggtgcggtctcccggtacccggagcggctctgattcatgtagagacggggtttcaccgtgttagccagaatggtctcgatctcctgacctcgtgatctgcccgcctcgggcctcccaaagtgctggaattacaggtgtgagccacggcgccgggccccctagggattttcaggtttaacttgtggccctaaagaactggaaacccaaaggaacgaatattcctgccccacagagtcccatctttggtgaggctgtttctggagtttacatgatgaccaaggtactaggcatggccccagttctgggccctaggcctccacaggagcaggtggggcctctgatggtaaaagtcgaggagaaagaagagaaaggcaagtaccttcctagcctggagatgttccgccagcgcttcaggcagtttgggtaccatgatacccctggaccccgagaggccctgagccaactccgggtgctctgctgtgagtggctgaggcccgagatccacaccaaggagcagatcctggagctactggtgctggagcagttcctgaccatcctgccccaggagctccaggcctgggtgcaggagcattgcccggagagcgctgaagaggctgtcactctcctcgaagatctggagcgggaactggatgagccaggacaccaggtctcaactcctccaaacgaacagaaaccggtgtgggagaagatatcctcctcaggaactgcaaaggaatccccgagcagcatgcagccacagcccttggagaccagtcacaaatacgagtcttgggggcccctgtacatccaa

SEQ ID NO: 201179 - DNA, 1870 bp, Homo sapiens
  Payload ID: 19709
  Gene Name: zinc finger and SCAN domain containing 21
  ENST ID: ENST00000543588
  CDS Start-End: 140-1450
acgcggtgcggtctcccggtacccggagcggctctgattcatggtttaacttgtggccctaaagaactggaaacccaaaggaacgaatattcctgccccacagagtcccatctttggtgaggctgtttctggagtttacatgatgaccaaggtactaggcatggccccagttctgggccctaggcctccacaggagcaggtggggcctctgatggtaaaagtcgaggagaaagaagagaaaggcaagtaccttcctagcctggagatgttccgccagcgcttcaggcagtttgggtaccatgatacccctggaccccgagaggccctgagccaactccgggtgctctgctgtgagtggctgaggcccgagatccacaccaaggagcagatcctggagctactggtgctggatgagccaggacaccaggtctcaactcctccaaacgaacagaaaccggtgtgggagaagatatcctcctcaggaactgcaaaggaatccccgagcagcatgcagccacagcccttggagaccagtcacaaatacgagtcttgggggcccctgtacatccaagagtctggtgaggagcaggagttcgctcaagatccaagaaaggtccgagattgcagattgagtacccagcacgaggaatcagcagatgagcagaaaggttctgaagcagaggggctcaaaggggatataatttctgtgattatcgccaataaacctgaggccagcttagagaggcagtgcgtaaaccttgaaaatgaaaaaggaacaaaaccccctcttcaagaggcaggctccaagaaaggtagagaatcagttcctactaaacctaccccaggagagagacgttatatatgtgctgaatgtggcaaagcctttagtaatagctcaaatctcaccaaacacaggagaacacacactggggagaaaccttacgtgtgcaccaagtgtgggaaagctttcagccacagctcaaacctcaccctccactacagaacacacttggtggaccggccctatgactgtaagtgtggaaaagcttttgggcagagctcagaccttcttaaacatcagagaatgcacacagaagaggcgccatatcagtgcaaagattgtggcaaggctttcagcgggaaaggcagcctcattcgtcactatcggatccacactggggagaagccttatcagtgtaacgaatgtgggaagagcttcagtcagcatgcgggcctcagctcccaccagagactccacaccggagagaagccatataagtgtaaggagtgtgggaaagccttcaaccacagctccaacttcaataaacaccacagaatccacaccggggaaaagccctactggtgtcatcactgtggaaagaccttctgtagcaagtccaatctttccaaacatcagcgagtccacactggagagggagaagcaccgtaactttcaagcgctcctgttgttgtcgttgttttaaactttagaatctgaaaaccagaaagaagtcttgtcattgcagcagcatcgattccggtgatagagtttgtatcactcaacatcaggggatgcctgaggagtgcgagctccacagcaacatggcaggcaggaggtcctcagaaggtgtcaggaggttccacactcgccagttcactggagcagagtcccttcgccacacttagggtcccagtaagccatgccagcattaccttttgcgtagttaaacagacgtgtatccagtctagttaaggaagaaacattaagattgtttaatttttaacatatattcaagaattttaatttgtaaagaattgagccacattgaacacaattgaatgagattcagaataaacttataacatcttg

SEQ ID NO: 201180 - DNA, 4629 bp, Homo sapiens
  Payload ID: 19710
  Gene Name: zinc finger and SCAN domain containing 22
  Uniprot ID: P10073
  ENST ID: ENST00000329665
  CDS Start-End: 148-1623
gaggtgtgctgggagctgtggtccgggtcggcgggcgcgcaagttggctagtctctgcggccacctccggaagggtccgccggctgtgctggtgaggcccagttccaaggctccggcatcctgtgtctcactgagcactgctgcccgatggccatccccaagcactccctgagcccagtgccgtgggaagaggacagcttccttcaagtgaaggtggaggaggaagaggaagccagcctctcccagggcggagaatccagccatgaccacattgctcactctgaggctgcacgcctgcgcttccggcacttccgctatgaggaggcatctggtccacacgaggccctggcccacctccgagcgctgtgctgtcagtggctgcagcccgaggcgcactccaaggagcagatactggagctgctggtgctggagcagttcctgggtgcgctgcccccagagatccaagcctgggtgggagcccagagtcccaagagcggagaggaagccgctgtgctggtggaggatctgactcaggtgctggacaagagaggatgggatccaggagccgagcccacagaggcaagctgcaagcagagtgacctgggagagtcagagccatcaaatgtcactgagaccctcatgggaggtgtttcccttggacccgcctttgtcaaggcatgtgaacctgagggcagctcagagaggtctggactatcaggggagatctggacaaagtctgtcacccaacagatccacttcaagaaaacttcagggccttacaaggatgtccccacagaccagcgtggccgtgaatctggtgcctcgaggaacagttctagtgcgtggccaaacctcacctcccaagagaagcctccttcagaagacaaatttgatctggtggatgcttatgggacagagcctccatacacctactcagggaagaggtcctccaagtgtcgcgagtgtaggaagatgttccagagtgcttcggcgctcgaggcacaccagaagacccattctcggaagaccccatatgcctgcagcgagtgtgggaaagccttcagccggagcactcacctcgcccagcaccaggttgtccacacaggggcgaagccccatgagtgtaaggaatgtgggaaggccttcagccgagtcacccacctgactcagcaccaaaggattcatactggagagaaaccctacaaatgtggggaatgtggtaaaaccttcagccgcagcactcacctcacccagcaccagcgggtgcacacgggggagcggccctacgagtgtgacgcgtgtgggaaagccttcagccagagcacgcacctgactcaacaccagcgcatccacaccggggagaagccctacaagtgtgacgcgtgtggccgagccttcagcgactgctcagccctgatccgacatctgagaatccactctggagagaagccatatcagtgtaaggtttgtccgaaggcctttgcacagagctcctccctcattgagcaccagaggatccacacgggagagaagccttataagtgcagcgactgtgggaaggccttcagtcgtagctcagccctgatggttcacttgcggatccacatcacggtgctgcaatgaccggaagtcgcccctgggggcgtagcacagcgtcttctcggaggctcgaggtctaagagaaacgctgagttcctgaagagccacagacagggtgggtgattgatgagttgtcaaaatgataggtgcctgagggcagactcgggctgtctaggaaccactctgcatttgaggaaccctgatgagcacaaggtgattcaggccagctggagaagcttccagaagggccctgcactgctaccctctatttcccactcagggctgtcccagagagaaggcagccgaactgaggatttagactggttctgagggccagggcaaatgaaggcgcatgtctctcagaactcagcgtcccaagacgctctgggcgggccaactgtagcttgttctcatgtggttcttcttgcctgcttttctgctgcttagcccagaacggacacctgccatgcccacctctgtgccttggcacctactatttccactccagactattttgtgcctaactgcaaggctgacttttgagactgcctcttccacgatgccttttctacactctgcctctctcatggtttcctgtcgtaatcagtggtgctgcttgacacctgcccagcatgttcctgtctctccttttccttccacatcccaccagtcaccagcgctattgttttaacctaaagcttatctgtaattcacctccttttccaccactgctaccttatgtgagccctcattgcctcttgcctggattatagccggggtctccttcctgaccacttcctgcctttattctctgcccctgtatcactctccaggggactcttgatattacttagatctgactgtgtcactccaaggtggaaagctctccaacccatcttctacagcacagcttcctgaacagggtataagtatgctgagatgcaggctgctctgggccccgagcaacctctccagttatcctcatatgcatgtatgaatactgtcatttttctgtgcgtgcagtgaaaatggcctcatctcataccatggctccaccttccatacaccagccacacggaactactgtggtccctgaaggagccatacattttcccacttatgtgcctttgtacctgtgcctggaaccctcctcttctttttctttttcttttcttttctttttttttttttgagatggagtctcgctctgtcgcccaggctggagtgcagtggcgcgatctcggctcactgcaagctctgcctcccgggttcatgccattctcctgcctcagcctcccaagtagctgggactacaggcgcctgccaccacgcccagctagtttttttttttttttgtatttttagtagagatggagtttcaccatgttagccaggatggtctcgatctcctgacctcgtgatccacccgcctcggcctcccaaagtgctgggattacaggcgtgagccaccgcacctggccctcctttttcatctaaggtgtttcaaatgttgcccaaagaaacctccctgctctccgggagcagacttcagcttgccctctctgcttccagagcacctcctagatacctctcttacaactcctgccaccttgttttacttatttgctccttgtagagctgccttttccaaggataccataaactcctgagagcaggggccatgtcttactctcagtatctacaacacacaagactcagtaggccctgactgatgtctcttacatgaatgtgactggtgcccccaggaggcagtcaccgtgctgtctctgccccacattgtccttatgtatgtttacatggatgtctccccagcagcttgaaccctggagagcaagaataatctgattttcctgggggccagcacccaaataagcctggcatgcagtggcctcaataaaatgtgactgtattgagtcattttctagggccccagatcccctggtgtcatggacttagtctttgccagcattctgtccatgtgttctctggtcttctctcacaatgctgcatccctgtcccatttttagggtccctgtctatcactggatgctgcagcttctgttcattactgttagtgtatcattcttcatgcctctgtttctgtgatggtctcatcatatgtgaaccatttgacctggcgtattgtgtactagtcaccgtcaccatctctccatatgtatctccctgtatttcgggcccattccctctatgtcaagagtaaatagaggcacagagactgatgagaaacgttcataacatgaaggtaagactcagggagacagagactttgtggaagtatctctgagggagtcccagacacaggcagagagggccacatatcgtgtgccagaggctgagagactgagagggatgacaggcttaggggaaaactcagagaggagagatgcacattcctagtgaaattgcacaggcttccagcatgctggagggaacagaaaaggcatgggcctgaattcaggctgcagagcctgactcctccctgtggctacttttgggacctaagataagtgactttcctgaacctccatgacctcctcatatgtaaaccagggacaggacccaccttgtgtagtgcctgacccaaagcctggccctgcacactgtctctgactcacagcaatcatcagcacctctctttgcctcctacttgctcagtctctgtcacaagaactggatctccatccccttgatgctctgagcatcttcacccatttggtcgttgagacatatctgtccatgtctgtctaaaaggggaggagatgagggagaaaaaagggaatctactcagagcctgtgtgtgctgcccagtctaccaaataatttatatacatctcagtcctcacacaaccatccctgttttatagaggaggaagtggcttagagaatgtaactgaccaaagtcacactgccaggaactggaagcactaggatttgacagcatatccaaatatgtcagcaatttcaataaacatgactgtactcaacaaa

SEQ ID NO: 201181 - DNA, 3126 bp, Homo sapiens
  Payload ID: 19711
  Gene Name: zinc finger and SCAN domain containing 23
  Uniprot ID: Q3MJ62
  ENST ID: ENST00000289788
  CDS Start-End: 147-1316
ctgcggttgtcaaggattcagagcagatgtgatctgcgctaggtggcatctcctctcacggatgcctcgatctcggggtttccagaagaaaagatcaagggagaattatcaagaatagattatttttctgaatagttaaacctttgatggccataaccttgacccttcagactgcagagatgcaggaaggacttctggcagtgaaggtaaaggaggaagaggaggaacattcctgtgggccagaatcaggcctgtcaagaaataaccctcataccagagagatctttcgtagacgcttcaggcagttctgctatcaggagtcccctgggccccgggaggctcttcaaagactccaggagctctgccatcagtggctgagaccagagatgcacaccaaggagcagatcctagagctgctggtgctggagcagttcctgactatcctgcctgaggagctccaggcctgggtcagacagcaccgtcctgtgagtggagaggaggcagtgactgtgctggaggatttggagagagagctggatgacccaggagagcaggtcctgagccatgctcatgaacaggaagagtttgtaaaggagaaggcaactccaggagcagctcaggagtcatcaaatgaccaattccaaaccttggaagagcaacttgggtataatttgcgagaggtgtgcccagttcaagagattgatggcaaggctgggacttggaatgtggagttagccccaaagagggagatttctcaggaagtgaaatctcttatacaagttcttggaaaacagaatggtaatattactcagattcctgagtatggagatacctgtgaccgtgagggcagattggaaaagcaaagggtgagctcttcagtggagagaccctatatctgtagtgaatgtggaaaaagcttcacccagaattccatccttatcgagcaccagagaacacacacaggtgagaagccttatgaatgtgatgagtgtgggcgggccttcagccagaggtcaggcctattccagcaccagagactccacactggggagaagcgctaccagtgcagtgtttgtggcaaagccttcagccagaatgccgggcttttccatcacctcagaattcacactggggagaagccttaccagtgcaatcagtgcaataagagttttagtcgacgttcagtcctcattaagcatcagagaattcacactggagagagaccttatgaatgtgaagaatgtggcaagaacttcatttaccattgcaacctaatccagcatcggaaagtccacccagtggctgaatcaagctagctccttggaacaggtaggggataatatttcttactttgtccctgctgtgtcctctagcatagaaaagttcaagggaaagccagtaaaaattcccttacttttatgcagagagaagcataatatcttaaatacatctgccgagttctctgatcagtgacatccacagctttgcaatactgaatgttgcctcttgtgttgatttcatcatgtatgctgtagacctagtttcacacacatctgtgcaagaagttttctatttcaggaaaacttcttcatcctagtttttaaaaactttttttaaaagtttaaaatagttatatgtaggctgagtacaaaataatctcaaatgcagttcaccgagtatttaaaaattaacttaaaaataattgtaataaaattcataatataggtttcctgacttctttccattcacataaaatatgataatttgttttgtaacctacaaaaaggggcagatgaatcctcctatataaatgtagatttatagtaagttagatttctatagattttttagttagcctttaggaaccaaggaactgaagcagccatatgttattagcagctcagtggctcctcataacaaatattgctcatgattttaaatttacgcagaggctaagaaacttagctaaaaatctgatatctcacctcagatttcttattggaaaatacaggcctctttgtatttttcccgtaacatataatgagcatttttttgtttttgcctttttctcctttattcaatattttgtatggaaaatttgaaacatattcaagattgaagagaagagtatgatcactctttcatgttgattgtttttataacctccacattttctcagcatttactattgattaccaccaagatcataaataaaaaaatttatttcccttaacattgacttagtaactctttacaaagctttacacaaggtccaggagacaaagaaatggaaaacctatggtgaaaacaatctggtttggaatacacccaaatacccaatacatagcaagtaactttagaataacagaatcactctaagggaccttagagatcacttctgcttgctcttatttgacagataagagaaaaggaagttctgggaagtaactaagatcatacagccagttaaaagcagagctggaactagaaccctgtctcctacttcctagtgtaacattctattaagccactggaggcattatatcaccaaataaaaattacaagtatatggaatttataggatttataagtcactgaagttgctcaacaaacccacccatttatatgtttcaataaagcacaactcctctatttaatttacagtggagtccaggaaagactcttctcatttattcctcattgaaagcattttatttttgtaattattatttttagcttttaaaatttaatttactcagtaggacttttttaaaaagataattcattcttcacctggttcaaaaatcaaaataatacaaaaaggtctactttccctttataagtagccattgtactagtttcttatgtatctttcagtgtttctttatgtaaatataggcaaatatgaatgtataatcttatttcttccattactcaggaagatggcatattatttatactcttctaataccttgctgttttcatgaaagaatataatctttagagatgtccacatcataacagaacttcttcattctttttataagtgaatagaattttatttgttcatactccatagtttaacaaactcctatagatgaaaaatctcactattttaaaatgtta

SEQ ID NO: 201182 - DNA, 1316 bp, Homo sapiens
  Payload ID: 19711
  Gene Name: zinc finger and SCAN domain containing 23
  ENST ID: ENST00000481983
  CDS Start-End: 160-600
atcattctttgggctgcggttgtcaaggattcagagcagatgtgatctgcgctaggtggcatctcctctcacggatgcctcgatctcggggtttccagaagaaaagatcaagggagaattatcaagaatagattatttttctgaatagttaaacctttgatggccataaccttgacccttcagactgcagagatgcaggaaggacttctggcagtgaaggtaaaggaggaagaggaggaacattcctgtgggccagaatcaggcctgtcaagaaataaccctcataccagagagatctttcgtagacgcttcaggcagttctgctatcaggagtcccctgggccccgggaggctcttcaaagactccaggagctctgccatcagtggctgagaccagagatgcacaccaaggagcagatcctagagctgctggtgctggagcagttcctgactatcctgcctgaggagctccaggcctgggtcagacagcaccgtcctgtgagtggagaggaggcagtgactgtgctggaggatttggagagagagctggatgacccaggagagcagatggcaaggctgggacttggaatgtggagttagccccaaagagggagatttctcaggaagtgaaatctcttatacaagttcttggaaaacagaatggtaatattactcagattcctgagtatggagatacctgtgaccgtgagggcagattggaaaagcaaagggtgagctcttcagtggagagaccctatatctgtagtgaatgtggaaaaagcttcacccagaattccatccttatcgagcaccagagaacacacacaggtgagaagccttatgaatgtgatgagtgtgggcgggccttcagccagaggtcaggcctattccagcaccagagactccacactggggagaagcgctaccagtgcagtgtttgtggcaaagccttcagccagaatgccgggcttttccatcacctcagaattcacactggggagaagccttaccagtgcaatcagtgcaataagagttttagtcgacgttcagtcctcattaagcatcagagaattcacactggagagagaccttatgaatgtgaagaatgtggcaagaacttcatttaccattgcaacctaatccagcatcggaaagtccacccagtggctgaatcaagctagctccttggaacagacacttacacttggagccctgagacccactgtaggcatctgcaaacaacagcaacaacaaagtgggatggaaagaaaaaagaacaaaatataagaacataaaaaagaatcagacagaaggta

SEQ ID NO: 201183 - DNA, 1652 bp, Homo sapiens
  Payload ID: 19712
  Gene Name: zinc finger and SCAN domain containing 25
  ENST ID: ENST00000262941
  CDS Start-End: 4-1401
gagatggcggaagctcctcagcagcagttgggtattcctgtggtgaaactggagaaagagttgccatggggcagaggaagggaggaccctagtccagagacttttcggctgaggtttcggcagttccgctaccaggaggcagctggaccccaggaagctcttagggagctccaggagctctgtcgtcggtggctgaggcccgagttgcacaccaaggagcagatcctggagctgctggtgctggagcagttcctcactatcctgccccgcgagttctacgcctggatccgggagcatggcccagagagtggcaaggccctggccgccatggtggaggacctgacagaaagagcactggaggccaaggcggttccatgccacaggcagggagagcaggaggaaacagcactttgcagaggcgcttgggagccaggcatccagctggggccagtggaggtcaagcctgaatgggggatgccccctggggaaggagttcaaggtccagacccaggtaccgaggagcagctcagtcaggaccctggagatgagacacgggccttccaggagcaaggcggtgggagcaaggaaaaggaggcaaaacccccacaggaagacctgaaaggggcgctggtggcactgacatcagagaggtttggggaagcctctctccagggccctgggctcggaagggtctgtgagcaggagcctggtggccctgcaggcagtgcgcctgggcttcctcctccccagcacggtgccatccccctgcctgacgaagtcaaaacccacagctccttctggaagcctttccagtgccctgagtgtgggaaaggattcagtcggagctccaatctcgtcaggcaccagcgaacccacgaagagaagtcttatggctgtgtggagtgtgggaagggctttaccctgagagaatacctgatgaagcaccagagaacccacctgggaaagaggccctacgtgtgcagcgagtgctggaaaaccttcagccagagacaccacctggaggtgcaccagcgcagccacactggggagaagccctacaagtgcggggactgctggaagagcttcagccgcaggcagcacctgcaggtgcaccggaggacgcacaccggggagaagccctacacctgcgagtgtggcaagagcttcagcaggaatgccaatctggcggtgcaccggcgtgcccacactggcgagaagccatatgggtgccaggtgtgcgggaagcggttcagcaaaggggagcggctggtccgacaccagagaatccatacaggggagaagccctaccactgtcctgcctgcgggcgaagcttcaaccagaggtccatcctcaaccggcaccagaagacccagcaccgccaggagccgctggtgcagtgagcatagcaggtggcaggcagcaccatcattcatctttctcactgcagggccttgcggggtgcaaggtgatggctgcaggaaagcactggtcccatcgccttcccacccattcgccaacgcgggaaaggcaaggcctggcttacttagagcttccagagagcatagctgcttccatctcttacccaagtggtgctaaacaatttttcttccaatgtttgagggaagcagtctcctgcggttcagttcaggct

SEQ ID NO: 201184 - DNA, 4079 bp, Homo sapiens
  Payload ID: 19712
  Gene Name: zinc finger and SCAN domain containing 25
  Uniprot ID: Q6NSZ9
  ENST ID: ENST00000334715
  CDS Start-End: 58-1692
gttctcaaaagggtcattgatgcagtcattctcagtctcctcggagggagtctgaagatgcttaaagagcatccagagatggcggaagctcctcagcagcagttgggtattcctgtggtgaaactggagaaagagttgccatggggcagaggaagggaggaccctagtccagagacttttcggctgaggtttcggcagttccgctaccaggaggcagctggaccccaggaagctcttagggagctccaggagctctgtcgtcggtggctgaggcccgagttgcacaccaaggagcagatcctggagctgctggtgctggagcagttcctcactatcctgccccgcgagttctacgcctggatccgggagcatggcccagagagtggcaaggccctggccgccatggtggaggacctgacagaaagagcactggaggccaaggcggttccatgccacaggcagggagagcaggaggaaacagcactttgcagaggcgcttgggagccaggcatccagctggggccagtggaggtcaagcctgaatgggggatgccccctggggaaggagttcaaggtccagacccaggtaccgaggagcagctcagtcaggaccctggagatgagacacgggccttccaggagcaagcactacctgttctgcaggcgggtcctggcctccccgcagtgaatcccagagaccaagagatggcagctgggttctttactgctggatcgcaggggttggggccatttaaagatatggccctggccttccctgaggaggagtggaggcatgtgaccccagcccagatagactgctttggggagtatgtggaaccgcaggactgcagggtctctccaggcggtgggagcaaggaaaaggaggcaaaacccccacaggaagacctgaaaggggcgctggtggcactgacatcagagaggtttggggaagcctctctccagggccctgggctcggaagggtctgtgagcaggagcctggtggccctgcaggcagtgcgcctgggcttcctcctccccagcacggtgccatccccctgcctgacgaagtcaaaacccacagctccttctggaagcctttccagtgccctgagtgtgggaaaggattcagtcggagctccaatctcgtcaggcaccagcgaacccacgaagagaagtcttatggctgtgtggagtgtgggaagggctttaccctgagagaatacctgatgaagcaccagagaacccacctgggaaagaggccctacgtgtgcagcgagtgctggaaaaccttcagccagagacaccacctggaggtgcaccagcgcagccacactggggagaagccctacaagtgcggggactgctggaagagcttcagccgcaggcagcacctgcaggtgcaccggaggacgcacaccggggagaagccctacacctgcgagtgtggcaagagcttcagcaggaatgccaatctggcggtgcaccggcgtgcccacactggcgagaagccatatgggtgccaggtgtgcgggaagcggttcagcaaaggggagcggctggtccgacaccagagaatccatacaggggagaagccctaccactgtcctgcctgcgggcgaagcttcaaccagaggtccatcctcaaccggcaccagaagacccagcaccgccaggagccgctggtgcagtgagcatagcaggtggcaggcagcaccatcattcatctttctcactgcagggccttgcggggtgcaaggtgatggctgcaggaaagcactggtcccatcgccttcccacccattcgccaacgcgggaaaggcaaggcctggcttacttagagcttccagagagcatagctgcttccatctcttacccaagtggtgctaaacaatttttcttccaatgtttgagggaagcagtctcctgcggttcagttcaggctgagattttctccttcagtggactgtctgtgtccccctgccgaacaaagctgggagtaaaggcaaaaccttgacacgtgttggtagctgggacctcatcttcctgagggctctgtcttgcctgcagggtcatagctcagactcttcccccaccccctctcttttccattgaacaaacatttattgaacatcctctgagcacctggccgtgggaatgccgtggtgaatgagagactagacgtgatgcctctgggggttgtgcgttggggatgcatgcgacagcccatgacccgaggcattctcagggtatctgtgctgtgtgcccgtgagaacatcttcccatgaccactcctgccctcctgccccgtgctggatcttccctccccagctgggatctgctcccaggcaactgtgtgaattttacattatttggagcctcatctgtgtcaggctataacattctatcctcatctgtaaaacttccccgtccattattccttgcactataacaactgtcaacacaccaactattaggaagttagtattttgctattgatcactgaataaacatcagagtattttaaaaaacagttctctagaaagaactgttataattaaaatgagtctgaaagatgaactctagtattaatgccctatatttgatggcactttatagttcataaaattaatttcaccccattctcattggacccatttcccaagtatttattgaggccctgtaacaaacatgtcaggaactcttctgggtgcttgagacacatccatgaataaaatagggggagaagctgttgacctcgtagagcttatgtctcgtggatgtacctgatcttcagaacccgtggatattcctgcaaatcctctgggcctgtattcattgctttgtcagcatcttgccctgaaatgcatttgtcacctacctcttgttactaaatggtctctgccctccagacccttgtcatccaaggcactaggggtcctggacacccactggggatgatgagctggtagcgacctgttttgcatgagtgccaagtcaggaaaaataaagatatttgtaggcattaaaaaaaaatacatttctttaaaaatgagaagatgcaatatttgtaaactgttgaagcttccttattgtgccatcacttaagggtttcatttctgtttaaagttctggaagctgcataactagcgtggactgactgctgtgtcattgtgctgtgcctttgaaccctggctgagtgagtgagtttgtcctttgttgatagtgtcctataattgcaaaatgtggtttgtcttctgatgcctcttaataccagattcttttactgagatttttttttttcattttccattgtaaataaggtaaatggtaatgactaacacaaagctgtattactcagcccactttgaaacgtggttttatcacctgttcttgttaggcagcatggtgtctaattttggcttagcaaatgacgctccttggtcttcctggctcattagctgtgcccacgaggctgcactgactgggtcgtaaatgtatctgagatgtccacacggggctgctgctgctcctctgtaatactgaggtccacatgcaaaatcagctttttttcccccgtaattatcagagcagctaggcagggctgacagccaggcagactcagtgggaggcttctggcctgagtgtggccttccccagagggtggttttccaaaggcaggtggggactggggaggcctcggggggctgcttgtcattacctgaatcacagatgctcttttgtcatacacagccagcattcctctgggtttcagcaagttggcatatcttaagcttcagaaggagctgggccttgctgactttcctatctggcctcttccctatctcctgtggggccaagagcttaggacagtgtctcagaaaagcctctaagtagggggtttttcccatgggattgtggtagtctgatttttcatatctattcaaatgttaagaaatattttgttttctgtatttttctattctttagaaatttttttataatagataatttcaaacctatataaataaatccttatgtatttatcatttgactttattataaactcataatcaatctt

SEQ ID NO: 201185 - DNA, 2823 bp, Homo sapiens
  Payload ID: 19712
  Gene Name: zinc finger and SCAN domain containing 25
  Uniprot ID: Q6NSZ9
  ENST ID: ENST00000394150
  CDS Start-End: 301-789
agctcacttccggaccgcggatagcactggcgaccctagcgggttgagcgcaccatcacatctaagccatcagcaagtttgttggttttaatctccaaaatacgtcttgattttgtctgactctttgccaccaccctgatctaagcccttatcatctgcttgaatcactaacttgtctccacttgcagtttttaaaagagttgcttccatttgactttttctgtctgctgtaccagcatatgagtttcaggaggggtcattgatgcagtcattctcagtctcctcggagggagtctgaagatgcttaaagagcatccagagatggcggaagctcctcagcagcagttgggtattcctgtggtgaaactggagaaagagttgccatggggcagaggaagggaggaccctagtccagagacttttcggctgaggtttcggcagttccgctaccaggaggcagctggaccccaggaagctcttagggagctccaggagctctgtcgtcggtggctgaggcccgagttgcacaccaaggagcagatcctggagctgctggtgctggagcagttcctcactatcctgccccgcgagttctacgcctggatccgggagcatggcccagagagtggcaaggccctggccgccatggtggaggacctgacagaaagagcactggaggccaaggcggtgggttccatgccacaggcagggagagcaggaggaaacagcactttgcagaggcgcttgggagccaggcatccagctggggccagtggaggtcaagcctgaatgggggatgccccctggggaaggagttcaaggtccagacccaggtaccgaggagcagctcagtcaggaccctggagatgagacacgggccttccaggagcaagcactacctgttctgcaggcgggtcctggcctccccgcagtgaatcccagagaccaagagatggcagctgggttctttactgctggatcgcaggggttggggccatttaaagatatggccctggccttccctgaggaggagtggaggcatgtgaccccagcccagatagactgctttggggagtatgtggaaccgcaggactgcagggtctctccaggcggtgggagcaaggaaaaggaggcaaaacccccacaggaagacctgaaaggggcgctggtggcactgacatcagagaggtttggggaagcctctctccagggccctgggctcggaagggtctgtgagcaggagcctggtggccctgcaggcagtgcgcctgggcttcctcctccccagcacggtgccatccccctgcctgacgaagtcaaaacccacagctccttctggaagcctttccagtgccctgagtgtgggaaaggattcagtcggagctccaatctcgtcaggcaccagcgaacccacgaagagaagtcttatggctgtgtggagtgtgggaagggctttaccctgagagaatacctgatgaagcaccagagaacccacctgggaaagaggccctacgtgtgcagcgagtgctggaaaaccttcagccagagacaccacctggaggtgcaccagcgcagccacactggggagaagccctacaagtgcggggactgctggaagagcttcagccgcaggcagcacctgcaggtgcaccggaggacgcacaccggggagaagccctacacctgcgagtgtggcaagagcttcagcaggaatgccaatctggcggtgcaccggcgtgcccacactggcgagaagccatatgggtgccaggtgtgcgggaagcggttcagcaaaggggagcggctggtccgacaccagagaatccatacaggggagaagccctaccactgtcctgcctgcgggcgaagcttcaaccagaggtccatcctcaaccggcaccagaagacccagcaccgccaggagccgctggtgcagtgagcatagcaggtggcaggcagcaccatcattcatctttctcactgcagggccttgcggggtgcaaggtgatggctgcaggaaagcactggtcccatcgccttcccacccattcgccaacgcgggaaaggcaaggcctggcttacttagagcttccagagagcatagctgcttccatctcttacccaagtggtgctaaacaatttttcttccaatgtttgagggaagcagtctcctgcggttcagttcaggctgagattttctccttcagtggactgtctgtgtccccctgccgaacaaagctgggagtaaaggcaaaaccttgacacgtgttggtagctgggacctcatcttcctgagggctctgtcttgcctgcagggtcatagctcagactcttcccccaccccctctcttttccattgaacaaacatttattgaacatcctctgagcacctggccgtgggaatgccgtggtgaatgagagactagacgtgatgcctctgggggttgtgcgttggggatgcatgcgacagcccatgacccgaggcattctcagggtatctgtgctgtgtgcccgtgagaacatcttcccatgaccactcctgccctcctgccccgtgctggatcttccctccccagctgggatctgctcccaggcaactgtgtgaattttacattatttggagcctcatctgtgtcaggctataacattctatcctcatctgtaaaacttccccgtccattattccttgcactataacaactgtcaacacaccaactattaggaagttagtattttgctattgatcactgaataaacatcagagtattttaaaaaacagttctctagaaagaactgttataattaaaatgagtctgaaagatg

SEQ ID NO: 201186 - DNA, 4349 bp, Homo sapiens
  Payload ID: 19712
  Gene Name: zinc finger and SCAN domain containing 25
  Uniprot ID: Q6NSZ9
  ENST ID: ENST00000394152
  CDS Start-End: 328-1962
agctcacttccggaccgcggatagcactggcgaccctagcgggtgagaggcccttcagggccgcggcgggttgagcgcaccatcacatctaagccatcagcaagtttgttggttttaatctccaaaatacgtcttgattttgtctgactctttgccaccaccctgatctaagcccttatcatctgcttgaatcactaacttgtctccacttgcagtttttaaaagagttgcttccatttgactttttctgtctgctgtaccagcatatgagtttcaggaggggtcattgatgcagtcattctcagtctcctcggagggagtctgaagatgcttaaagagcatccagagatggcggaagctcctcagcagcagttgggtattcctgtggtgaaactggagaaagagttgccatggggcagaggaagggaggaccctagtccagagacttttcggctgaggtttcggcagttccgctaccaggaggcagctggaccccaggaagctcttagggagctccaggagctctgtcgtcggtggctgaggcccgagttgcacaccaaggagcagatcctggagctgctggtgctggagcagttcctcactatcctgccccgcgagttctacgcctggatccgggagcatggcccagagagtggcaaggccctggccgccatggtggaggacctgacagaaagagcactggaggccaaggcggttccatgccacaggcagggagagcaggaggaaacagcactttgcagaggcgcttgggagccaggcatccagctggggccagtggaggtcaagcctgaatgggggatgccccctggggaaggagttcaaggtccagacccaggtaccgaggagcagctcagtcaggaccctggagatgagacacgggccttccaggagcaagcactacctgttctgcaggcgggtcctggcctccccgcagtgaatcccagagaccaagagatggcagctgggttctttactgctggatcgcaggggttggggccatttaaagatatggccctggccttccctgaggaggagtggaggcatgtgaccccagcccagatagactgctttggggagtatgtggaaccgcaggactgcagggtctctccaggcggtgggagcaaggaaaaggaggcaaaacccccacaggaagacctgaaaggggcgctggtggcactgacatcagagaggtttggggaagcctctctccagggccctgggctcggaagggtctgtgagcaggagcctggtggccctgcaggcagtgcgcctgggcttcctcctccccagcacggtgccatccccctgcctgacgaagtcaaaacccacagctccttctggaagcctttccagtgccctgagtgtgggaaaggattcagtcggagctccaatctcgtcaggcaccagcgaacccacgaagagaagtcttatggctgtgtggagtgtgggaagggctttaccctgagagaatacctgatgaagcaccagagaacccacctgggaaagaggccctacgtgtgcagcgagtgctggaaaaccttcagccagagacaccacctggaggtgcaccagcgcagccacactggggagaagccctacaagtgcggggactgctggaagagcttcagccgcaggcagcacctgcaggtgcaccggaggacgcacaccggggagaagccctacacctgcgagtgtggcaagagcttcagcaggaatgccaatctggcggtgcaccggcgtgcccacactggcgagaagccatatgggtgccaggtgtgcgggaagcggttcagcaaaggggagcggctggtccgacaccagagaatccatacaggggagaagccctaccactgtcctgcctgcgggcgaagcttcaaccagaggtccatcctcaaccggcaccagaagacccagcaccgccaggagccgctggtgcagtgagcatagcaggtggcaggcagcaccatcattcatctttctcactgcagggccttgcggggtgcaaggtgatggctgcaggaaagcactggtcccatcgccttcccacccattcgccaacgcgggaaaggcaaggcctggcttacttagagcttccagagagcatagctgcttccatctcttacccaagtggtgctaaacaatttttcttccaatgtttgagggaagcagtctcctgcggttcagttcaggctgagattttctccttcagtggactgtctgtgtccccctgccgaacaaagctgggagtaaaggcaaaaccttgacacgtgttggtagctgggacctcatcttcctgagggctctgtcttgcctgcagggtcatagctcagactcttcccccaccccctctcttttccattgaacaaacatttattgaacatcctctgagcacctggccgtgggaatgccgtggtgaatgagagactagacgtgatgcctctgggggttgtgcgttggggatgcatgcgacagcccatgacccgaggcattctcagggtatctgtgctgtgtgcccgtgagaacatcttcccatgaccactcctgccctcctgccccgtgctggatcttccctccccagctgggatctgctcccaggcaactgtgtgaattttacattatttggagcctcatctgtgtcaggctataacattctatcctcatctgtaaaacttccccgtccattattccttgcactataacaactgtcaacacaccaactattaggaagttagtattttgctattgatcactgaataaacatcagagtattttaaaaaacagttctctagaaagaactgttataattaaaatgagtctgaaagatgaactctagtattaatgccctatatttgatggcactttatagttcataaaattaatttcaccccattctcattggacccatttcccaagtatttattgaggccctgtaacaaacatgtcaggaactcttctgggtgcttgagacacatccatgaataaaatagggggagaagctgttgacctcgtagagcttatgtctcgtggatgtacctgatcttcagaacccgtggatattcctgcaaatcctctgggcctgtattcattgctttgtcagcatcttgccctgaaatgcatttgtcacctacctcttgttactaaatggtctctgccctccagacccttgtcatccaaggcactaggggtcctggacacccactggggatgatgagctggtagcgacctgttttgcatgagtgccaagtcaggaaaaataaagatatttgtaggcattaaaaaaaaatacatttctttaaaaatgagaagatgcaatatttgtaaactgttgaagcttccttattgtgccatcacttaagggtttcatttctgtttaaagttctggaagctgcataactagcgtggactgactgctgtgtcattgtgctgtgcctttgaaccctggctgagtgagtgagtttgtcctttgttgatagtgtcctataattgcaaaatgtggtttgtcttctgatgcctcttaataccagattcttttactgagatttttttttttcattttccattgtaaataaggtaaatggtaatgactaacacaaagctgtattactcagcccactttgaaacgtggttttatcacctgttcttgttaggcagcatggtgtctaattttggcttagcaaatgacgctccttggtcttcctggctcattagctgtgcccacgaggctgcactgactgggtcgtaaatgtatctgagatgtccacacggggctgctgctgctcctctgtaatactgaggtccacatgcaaaatcagctttttttcccccgtaattatcagagcagctaggcagggctgacagccaggcagactcagtgggaggcttctggcctgagtgtggccttccccagagggtggttttccaaaggcaggtggggactggggaggcctcggggggctgcttgtcattacctgaatcacagatgctcttttgtcatacacagccagcattcctctgggtttcagcaagttggcatatcttaagcttcagaaggagctgggccttgctgactttcctatctggcctcttccctatctcctgtggggccaagagcttaggacagtgtctcagaaaagcctctaagtagggggtttttcccatgggattgtggtagtctgatttttcatatctattcaaatgttaagaaatattttgttttctgtatttttctattctttagaaatttttttataatagataatttcaaacctatataaataaatccttatgtatttatcatttgactttattataaactcataatcaatctt

SEQ ID NO: 201187 - DNA, 594 bp, Homo sapiens
  Payload ID: 19712
  Gene Name: zinc finger and SCAN domain containing 25
  ENST ID: ENST00000431485
  CDS Start-End: 385-594
ggatagcactggcgaccctagcgggtgagaggcccttcagggccgcggcgggatctccttcccctggtgctttggacttccaagtctgtcttcccagtctaggtcttccgcataatccacttggaggttgagcgcaccatcacatctaagccatcagcaagtttgttggttttaatctccaaaatacgtcttgattttgtctgactctttgccaccaccctgatctaagcccttatcatctgcttgaatcactaacttgtctccacttgcagtttttaaaagagttgcttccatttgactttttctgtctgctgtaccagcatatgagtttcaggaggggtcattgatgcagtcattctcagtctcctcggagggagtctgaagatgcttaaagagcatccagagatggcggaagctcctcagcagcagttgggtattcctgtggtgaaactggagaaagagttgccatggggcagaggaagggaggaccctagtccagagacttttcggctgaggtttcggcagttccgctaccaggaggcagctggaccccaggaagctcttagggagctccaggagctctgtcgtcggtgg

SEQ ID NO: 201188 - DNA, 1030 bp, Homo sapiens
  Payload ID: 19713
  Gene Name: zinc finger and SCAN domain containing 26
  ENST ID: ENST00000611552
  CDS Start-End: 155-967
gacactcggcgatgagctaagacgctgtttcagagcgtttgggtcctctgaggccccttgaccaggtgaggagacaaggattgagaatgggaagcttattgtagtaacagactcttgtggaagagtagagtcatctgggaaaatatctgaacccatggaggctcataatgagggctctaacttggaaaggcatcaggccaagcccaaagagaagattgagtataaatgctcagaacgtgagcagagattcatccagcacttggacctgattgaacatgcgagtacacacacgggaaagaaactctgcgagtctgatgtgtgtcagagttccagtcttacaggacataagaaagtcctctctagagagaaaggtcatcagtgtcatgagtgtgggaaagcctttcagaggagttcacacctcgtcagacatcagaaaatccatcttggtgagaagccttatcagtgcaatgagtgtggcaaagtctttagccagaatgcaggccttttggaacatctcagaattcatactggagagaaaccttatctatgtatccattgtggaaaaaattttaggcgcagctctcaccttaatcgacatcagagaattcacagtcaggaggagccctgtgagtgcaaggagtgtggaaaaacctttagtcaggccttactcctcacccaccatcagagaatccatagtcactccaaaagccatcaatgtaacgagtgtggaaaagctttcagtttgacctcagaccttattcgacaccacagaattcatactggagaaaaacctttcaagtgtaacatatgccagaaagccttccgactaaactcacaccttgctcagcatgtaagaatccacaatgaagaaaaaccctatcagtgtagtgaatgtggagaagccttcaggcaaaggtcaggtctttttcaacatcagagatatcaccacaaagacaaactggcttgatgaggtgttctctccttgtagaacatcagagaaggcacattgactagcaaacagcactttagg

SEQ ID NO: 201189 - DNA, 2321 bp, Homo sapiens
  Payload ID: 19713
  Gene Name: zinc finger and SCAN domain containing 26
  ENST ID: ENST00000614088
  CDS Start-End: 162-1196
atgagagtgatgaagctgtggatctggtaaacagagtacaaccttctgctgcatatttttcatccattcagcgcaattttaagtagatattaaaggagtgtctctgaagatacagtccaaagaaagttctccaaaacaaggagaacagtctgaagctggggatggcaacagcattggacccagaccagccaaagaaacaaaaaatacttgtggaggagatggcccctctgaaaggagtacaggaacagcaggttcggcatgagtgtgaagttacaaagcctgagaaagagaagggtgaggagacaaggattgagaatgggaagcttattgtagtaacagactcttgtggaagagtagagtcatctgggaaaatatctgaacccatggaggctcataatgagggctctaacttggaaaggcatcaggccaagcccaaagagaagattgagtataaatgctcagaacgtgagcagagattcatccagcacttggacctgattgaacatgcgagtacacacacgggaaagaaactctgcgagtctgatgtgtgtcagagttccagtcttacaggacataagaaagtcctctctagagagaaaggtcatcagtgtcatgagtgtgggaaagcctttcagaggagttcacacctcgtcagacatcagaaaatccatcttggtgagaagccttatcagtgcaatgagtgtggcaaagtctttagccagaatgcaggccttttggaacatctcagaattcatactggagagaaaccttatctatgtatccattgtggaaaaaattttaggcgcagctctcaccttaatcgacatcagagaattcacagtcaggaggagccctgtgagtgcaaggagtgtggaaaaacctttagtcaggccttactcctcacccaccatcagagaatccatagtcactccaaaagccatcaatgtaacgagtgtggaaaagctttcagtttgacctcagaccttattcgacaccacagaattcatactggagaaaaacctttcaagtgtaacatatgccagaaagccttccgactaaactcacaccttgctcagcatgtaagaatccacaatgaagaaaaaccctatcagtgtagtgaatgtggagaagccttcaggcaaaggtcaggtctttttcaacatcagagatatcaccacaaagacaaactggcttgatgaggtgttctctccttgtagaacatcagagaaggcacattgactagcaaacagcactttaggaaaagtcaccgtagcccactgtggcatcagaaaattcttgggggctgagttggaggctccctgcctctattctctctcctttgctttccttgaagtcagctttggaccacaataatttcactgtagatgatatgctaggatcaaagttaaacagcattcttcactgcaggacatctcagagcatgtaacataactgcatgattatatactctaagcaatagagagcttcatgactgagtaagagttttgaagtcagcagtgaatcaagtgcccacagatttgcaggcttaagcagaacaagggaagattgatatttttggatatgctatagcagctttctcctatgaaataaaactgatgatgtttggaagtatactactctcaaaggtgtctttaaagtacaggttaatggtgaacattttcccccagtggcttcacctcattcctcccactggccttaccccttccttccccagtggaagcattttcaaaagcaaagataattttcgctggtgaacttcagaacttgccttcagggttagcttcatgtaattttaccatttcccatccccattccccaccacattatgtcaagattcaagttataaattaacgttttacttagactttgaaagagatttcatgagtaatttgaatgaaccttgctgaattaatctgaatagcaactgtctgacttgataactccagtgccagtatagtggctgctgcatagacactattcagtaaatgtctgatgaaagaaattggactttttccctttaatactgatgatgcaattttgaaatgttgcttgttctggaatacttcggaagttaaacaataaagtcagcttggagaggagatcatgatctttatactgtgaatagcagaatgtcacagatgaagaatattaaaattaggggcgtccactccaaaacatatcaccagagtgacaacttcagccctcagcctctgcaatccatatatatcctggtcttgggagtccatagaatactgtttccttctaataaaggtttcaaacaaatccctgcagatttattt

SEQ ID NO: 201190 - DNA, 588 bp, Homo sapiens
  Payload ID: 19713
  Gene Name: zinc finger and SCAN domain containing 26
  ENST ID: ENST00000617168
  CDS Start-End: 138-588
agagctgacactcggcgatgagctaagacgctgtttcagagcgtttgggtcctctgaggccccttgaccaggagtgtctctgaagatacagtccaaagaaagttctccaaaacaaggagaacagtctgaagctggggatggcaacagcattggtgagtgcccattccctggctcccctgaatctgaagaaggaggggcttcgggtagtgagggaggatcactactctacttgggaacagggattcaagctgcaaggaaacagtaaaggccttggacaggagccattgtgcaaacaattcaggcagttgcgttatgaagagaccacaggacctcgagaagcactaagtcggctccgggagctctgtcaacagtggctacagcccgagacccataccaaggagcagatcctggagctgctggtgctggagcagtttctgatcatcctgcctaaggagctccaggcccgggtgcaggagcatcacccagagagcagggaggacgtggttgttgttctggaggatttgcagctggatcttggagaaacaggacaacaggacccagaccagccaaagaaacaaaaaatacttg

SEQ ID NO: 201191 - DNA, 2835 bp, Homo sapiens
  Payload ID: 19713
  Gene Name: zinc finger and SCAN domain containing 26
  ENST ID: ENST00000421553
  CDS Start-End: 271-1710
gaaatgaccctcccagccgtcctcagcaggcagcacccatgttagtctccttctgcgatgcctaagcggcagcaccatcgagccaaggtcctccagcgttcctagagcggagaagaaagcgctccgaagagctagagctgacactcggcgatgagctaagacgctgtttcagagcgtttgggtcctctgaggccccttgaccaggagtgtctctgaagatacagtccaaagaaagttctccaaaacaaggagaacagtctgaagctggggatggcaacagcattggtgagtgcccattccctggctcccctgaatctgaagaaggaggggcttcgggtagtgagggaggatcactactctacttgggaacagggattcaagctgcaaggaaacagtaaaggccttggacaggagccattgtgcaaacaattcaggcagttgcgttatgaagagaccacaggacctcgagaagcactaagtcggctccgggagctctgtcaacagtggctacagcccgagacccataccaaggagcagatcctggagctgctggtgctggagcagtttctgatcatcctgcctaaggagctccaggcccgggtgcaggagcatcacccagagagcagggaggacgtggttgttgttctggaggatttgcagctggatcttggagaaacaggacaacaggtggacccagaccagccaaagaaacaaaaaatacttgtggaggagatggcccctctgaaaggagtacaggaacagcaggttcggcatgagtgtgaagttacaaagcctgagaaagagaagggtgaggagacaaggattgagaatgggaagcttattgtagtaacagactcttgtggaagagtagagtcatctgggaaaatatctgaacccatggaggctcataatgagggctctaacttggaaaggcatcaggccaagcccaaagagaagattgagtataaatgctcagaacgtgagcagagattcatccagcacttggacctgattgaacatgcgagtacacacacgggaaagaaactctgcgagtctgatgtgtgtcagagttccagtcttacaggacataagaaagtcctctctagagagaaaggtcatcagtgtcatgagtgtgggaaagcctttcagaggagttcacacctcgtcagacatcagaaaatccatcttggtgagaagccttatcagtgcaatgagtgtggcaaagtctttagccagaatgcaggccttttggaacatctcagaattcatactggagagaaaccttatctatgtatccattgtggaaaaaattttaggcgcagctctcaccttaatcgacatcagagaattcacagtcaggaggagccctgtgagtgcaaggagtgtggaaaaacctttagtcaggccttactcctcacccaccatcagagaatccatagtcactccaaaagccatcaatgtaacgagtgtggaaaagctttcagtttgacctcagaccttattcgacaccacagaattcatactggagaaaaacctttcaagtgtaacatatgccagaaagccttccgactaaactcacaccttgctcagcatgtaagaatccacaatgaagaaaaaccctatcagtgtagtgaatgtggagaagccttcaggcaaaggtcaggtctttttcaacatcagagatatcaccacaaagacaaactggcttgatgaggtgttctctccttgtagaacatcagagaaggcacattgactagcaaacagcactttaggaaaagtcaccgtagcccactgtggcatcagaaaattcttgggggctgagttggaggctccctgcctctattctctctcctttgctttccttgaagtcagctttggaccacaataatttcactgtagatgatatgctaggatcaaagttaaacagcattcttcactgcaggacatctcagagcatgtaacataactgcatgattatatactctaagcaatagagagcttcatgactgagtaagagttttgaagtcagcagtgaatcaagtgcccacagatttgcaggcttaagcagaacaagggaagattgatatttttggatatgctatagcagctttctcctatgaaataaaactgatgatgtttggaagtatactactctcaaaggtgtctttaaagtacaggttaatggtgaacattttcccccagtggcttcacctcattcctcccactggccttaccccttccttccccagtggaagcattttcaaaagcaaagataattttcgctggtgaacttcagaacttgccttcagggttagcttcatgtaattttaccatttcccatccccattccccaccacattatgtcaagattcaagttataaattaacgttttacttagactttgaaagagatttcatgagtaatttgaatgaaccttgctgaattaatctgaatagcaactgtctgacttgataactccagtgccagtatagtggctgctgcatagacactattcagtaaatgtctgatgaaagaaattggactttttccctttaatactgatgatgcaattttgaaatgttgcttgttctggaatacttcggaagttaaacaataaagtcagcttggagaggagatcatgatctttatactgtgaatagcagaatgtcacagatgaagaatattaaaattaggggcgtccactccaaaacatatcaccagagtgacaacttcagccctcagcctctgcaatccatatatatcctggtcttgggagtccatagaatactgtttccttctaataaaggtttcaaacaaatccctgcagatttattt

SEQ ID NO: 201192 - DNA, 2729 bp, Homo sapiens
  Payload ID: 19713
  Gene Name: zinc finger and SCAN domain containing 26
  ENST ID: ENST00000619937
  CDS Start-End: 162-1601
atgagagtgatgaagctgtggatctggtaaacagagtacaaccttctgctgcatatttttcatccattcagcgcaattttaagtagatattaaaggagtgtctctgaagatacagtccaaagaaagttctccaaaacaaggagaacagtctgaagctggggatggcaacagcattggtgagtgcccattccctggctcccctgaatctgaagaaggaggggcttcgggtagtgagggaggatcactactctacttgggaacagggattcaagctgcaaggaaacagtaaaggccttggacaggagccattgtgcaaacaattcaggcagttgcgttatgaagagaccacaggacctcgagaagcactaagtcggctccgggagctctgtcaacagtggctacagcccgagacccataccaaggagcagatcctggagctgctggtgctggagcagtttctgatcatcctgcctaaggagctccaggcccgggtgcaggagcatcacccagagagcagggaggacgtggttgttgttctggaggatttgcagctggatcttggagaaacaggacaacaggtggacccagaccagccaaagaaacaaaaaatacttgtggaggagatggcccctctgaaaggagtacaggaacagcaggttcggcatgagtgtgaagttacaaagcctgagaaagagaagggtgaggagacaaggattgagaatgggaagcttattgtagtaacagactcttgtggaagagtagagtcatctgggaaaatatctgaacccatggaggctcataatgagggctctaacttggaaaggcatcaggccaagcccaaagagaagattgagtataaatgctcagaacgtgagcagagattcatccagcacttggacctgattgaacatgcgagtacacacacgggaaagaaactctgcgagtctgatgtgtgtcagagttccagtcttacaggacataagaaagtcctctctagagagaaaggtcatcagtgtcatgagtgtgggaaagcctttcagaggagttcacacctcgtcagacatcagaaaatccatcttggtgagaagccttatcagtgcaatgagtgtggcaaagtctttagccagaatgcaggccttttggaacatctcagaattcatactggagagaaaccttatctatgtatccattgtggaaaaaattttaggcgcagctctcaccttaatcgacatcagagaattcacagtcaggaggagccctgtgagtgcaaggagtgtggaaaaacctttagtcaggccttactcctcacccaccatcagagaatccatagtcactccaaaagccatcaatgtaacgagtgtggaaaagctttcagtttgacctcagaccttattcgacaccacagaattcatactggagaaaaacctttcaagtgtaacatatgccagaaagccttccgactaaactcacaccttgctcagcatgtaagaatccacaatgaagaaaaaccctatcagtgtagtgaatgtggagaagccttcaggcaaaggtcaggtctttttcaacatcagagatatcaccacaaagacaaactggcttgatgaggtgttctctccttgtagaacatcagagaaggcacattgactagcaaacagcactttaggaaaagtcaccgtagcccactgtggcatcagaaaattcttgggggctgagttggaggctccctgcctctattctctctcctttgctttccttgaagtcagctttggaccacaataatttcactgtagatgatatgctaggatcaaagttaaacagcattcttcactgcaggacatctcagagcatgtaacataactgcatgattatatactctaagcaatagagagcttcatgactgagtaagagttttgaagtcagcagtgaatcaagtgcccacagatttgcaggcttaagcagaacaagggaagattgatatttttggatatgctatagcagctttctcctatgaaataaaactgatgatgtttggaagtatactactctcaaaggtgtctttaaagtacaggttaatggtgaacattttcccccagtggcttcacctcattcctcccactggccttaccccttccttccccagtggaagcattttcaaaagcaaagataattttcgctggtgaacttcagaacttgccttcagggttagcttcatgtaattttaccatttcccatccccattccccaccacattatgtcaagattcaagttataaattaacgttttacttagactttgaaagagatttcatgagtaatttgaatgaaccttgctgaattaatctgaatagcaactgtctgacttgataactccagtgccagtatagtggctgctgcatagacactattcagtaaatgtctgatgaaagaaattggactttttccctttaatactgatgatgcaattttgaaatgttgcttgttctggaatacttcggaagttaaacaataaagtcagcttggagaggagatcatgatctttatactgtgaatagcagaatgtcacagatgaagaatattaaaattaggggcgtccactccaaaacatatcaccagagtgacaacttcagccctcagcctctgcaatccatatatatcctggtcttgggagtccatagaatactgtttccttctaataaaggtttcaaacaaatccctgcagatttatttaaa

SEQ ID NO: 201193 - DNA, 2362 bp, Homo sapiens
  Payload ID: 19713
  Gene Name: zinc finger and SCAN domain containing 26
  ENST ID: ENST00000316606
  CDS Start-End: 223-1257
ccttctgcgatgcctaagcggcagcaccatcgagccaaggtcctccagcgttcctagagcggagaagaaagcgctccgaagagctagagctgacactcggcgatgagctaagacgctgtttcagagcgtttgggtcctctgaggccccttgaccaggagtgtctctgaagatacagtccaaagaaagttctccaaaacaaggagaacagtctgaagctggggatggcaacagcattggacccagaccagccaaagaaacaaaaaatacttgtggaggagatggcccctctgaaaggagtacaggaacagcaggttcggcatgagtgtgaagttacaaagcctgagaaagagaagggtgaggagacaaggattgagaatgggaagcttattgtagtaacagactcttgtggaagagtagagtcatctgggaaaatatctgaacccatggaggctcataatgagggctctaacttggaaaggcatcaggccaagcccaaagagaagattgagtataaatgctcagaacgtgagcagagattcatccagcacttggacctgattgaacatgcgagtacacacacgggaaagaaactctgcgagtctgatgtgtgtcagagttccagtcttacaggacataagaaagtcctctctagagagaaaggtcatcagtgtcatgagtgtgggaaagcctttcagaggagttcacacctcgtcagacatcagaaaatccatcttggtgagaagccttatcagtgcaatgagtgtggcaaagtctttagccagaatgcaggccttttggaacatctcagaattcatactggagagaaaccttatctatgtatccattgtggaaaaaattttaggcgcagctctcaccttaatcgacatcagagaattcacagtcaggaggagccctgtgagtgcaaggagtgtggaaaaacctttagtcaggccttactcctcacccaccatcagagaatccatagtcactccaaaagccatcaatgtaacgagtgtggaaaagctttcagtttgacctcagaccttattcgacaccacagaattcatactggagaaaaacctttcaagtgtaacatatgccagaaagccttccgactaaactcacaccttgctcagcatgtaagaatccacaatgaagaaaaaccctatcagtgtagtgaatgtggagaagccttcaggcaaaggtcaggtctttttcaacatcagagatatcaccacaaagacaaactggcttgatgaggtgttctctccttgtagaacatcagagaaggcacattgactagcaaacagcactttaggaaaagtcaccgtagcccactgtggcatcagaaaattcttgggggctgagttggaggctccctgcctctattctctctcctttgctttccttgaagtcagctttggaccacaataatttcactgtagatgatatgctaggatcaaagttaaacagcattcttcactgcaggacatctcagagcatgtaacataactgcatgattatatactctaagcaatagagagcttcatgactgagtaagagttttgaagtcagcagtgaatcaagtgcccacagatttgcaggcttaagcagaacaagggaagattgatatttttggatatgctatagcagctttctcctatgaaataaaactgatgatgtttggaagtatactactctcaaaggtgtctttaaagtacaggttaatggtgaacattttcccccagtggcttcacctcattcctcccactggccttaccccttccttccccagtggaagcattttcaaaagcaaagataattttcgctggtgaacttcagaacttgccttcagggttagcttcatgtaattttaccatttcccatccccattccccaccacattatgtcaagattcaagttataaattaacgttttacttagactttgaaagagatttcatgagtaatttgaatgaaccttgctgaattaatctgaatagcaactgtctgacttgataactccagtgccagtatagtggctgctgcatagacactattcagtaaatgtctgatgaaagaaattggactttttccctttaatactgatgatgcaattttgaaatgttgcttgttctggaatacttcggaagttaaacaataaagtcagcttggagaggagatcatgatctttatactgtgaatagcagaatgtcacagatgaagaatattaaaattaggggcgtccactccaaaacatatcaccagagtgacaacttcagccctcagcctctgcaatccatatatatcctggtcttgggagtccatagaatactgtttccttctaataaaggtttcaaac

SEQ ID NO: 201194 - DNA, 1998 bp, Homo sapiens
  Payload ID: 19713
  Gene Name: zinc finger and SCAN domain containing 26
  Uniprot ID: Q16670
  ENST ID: ENST00000623276
  CDS Start-End: 128-1564
ctcggcgatgagctaagacgctgtttcagagcgtttgggtcctctgaggccccttgaccaggagtgtctctgaagatacagtccaaagaaagttctccaaaacaaggagaacagtctgaagctggggatggcaacagcattggtgagtgcccattccctggctcccctgaatctgaagaaggaggggcttcgggtagtgagggaggatcactactctacttgggaacagggattcaagctgcaaggaaacagtaaaggccttggacaggagccattgtgcaaacaattcaggcagttgcgttatgaagagaccacaggacctcgagaagcactaagtcggctccgggagctctgtcaacagtggctacagcccgagacccataccaaggagcagatcctggagctgctggtgctggagcagtttctgatcatcctgcctaaggagctccaggcccgggtgcaggagcatcacccagagagcagggaggacgtggttgttgttctggaggatttgcagctggatcttggagaaacaggacaacaggacccagaccagccaaagaaacaaaaaatacttgtggaggagatggcccctctgaaaggagtacaggaacagcaggttcggcatgagtgtgaagttacaaagcctgagaaagagaagggtgaggagacaaggattgagaatgggaagcttattgtagtaacagactcttgtggaagagtagagtcatctgggaaaatatctgaacccatggaggctcataatgagggctctaacttggaaaggcatcaggccaagcccaaagagaagattgagtataaatgctcagaacgtgagcagagattcatccagcacttggacctgattgaacatgcgagtacacacacgggaaagaaactctgcgagtctgatgtgtgtcagagttccagtcttacaggacataagaaagtcctctctagagagaaaggtcatcagtgtcatgagtgtgggaaagcctttcagaggagttcacacctcgtcagacatcagaaaatccatcttggtgagaagccttatcagtgcaatgagtgtggcaaagtctttagccagaatgcaggccttttggaacatctcagaattcatactggagagaaaccttatctatgtatccattgtggaaaaaattttaggcgcagctctcaccttaatcgacatcagagaattcacagtcaggaggagccctgtgagtgcaaggagtgtggaaaaacctttagtcaggccttactcctcacccaccatcagagaatccatagtcactccaaaagccatcaatgtaacgagtgtggaaaagctttcagtttgacctcagaccttattcgacaccacagaattcatactggagaaaaacctttcaagtgtaacatatgccagaaagccttccgactaaactcacaccttgctcagcatgtaagaatccacaatgaagaaaaaccctatcagtgtagtgaatgtggagaagccttcaggcaaaggtcaggtctttttcaacatcagagatatcaccacaaagacaaactggcttgatgaggtgttctctccttgtagaacatcagagaaggcacattgactagcaaacagcactttaggaaaagtcaccgtagcccactgtggcatcagaaaattcttgggggctgagttggaggctccctgcctctattctctctcctttgctttccttgaagtcagctttggaccacaataatttcactgtagatgatatgctaggatcaaagttaaacagcattcttcactgcaggacatctcagagcatgtaacataactgcatgattatatactctaagcaatagagagcttcatgactgagtaagagttttgaagtcagcagtgaatcaagtgcccacagatttgcaggcttaagcagaacaagggaagattgatatttttggatatgctatagcagctttctcctatgaaataaaactgatgatgtttggaag

SEQ ID NO: 201195 - DNA, 2831 bp, Homo sapiens
  Payload ID: 19714
  Gene Name: zinc finger and SCAN domain containing 29
  ENST ID: ENST00000396972
  CDS Start-End: 392-1342
gtattccttctgatagtgccatctttctctgccctaggaagaaacacctcttacagtcatctgcaggggattctccaaggacatgggaagatagatgtaagccctggaacccagactcctaagcgaagggaagctgcattctgctattaatgatggccaaatcagctctaagagagaatggcactaactctgagaccttccgacagcgtttcaggagattccattaccaggaggtggctgggccgcgggaggctttcagccaactctgggaactttgctgtcggtggctaaggccggaggtgcgcaccaaggagcagattgtagaactgttggtgctagagcagttcctgaccgtcttacctggggagatccagaattgggtacaggaacaatgtccagaaaatggagaggaggcagtgactctcgtggaagatttagaaagagagcctggaagaccatcttcggtcacagtctctgtgaaggggcaggaagtgcgcttggagaagatgacacccccgaaatcatcacaagagttattaagtgttcggcaggagtcagtggaaccccagcccaggggtgtacccaagaaagagagggcaagaagcccagacctgggaccacaggagcagatgaacccaaaggagaagctcaaaccttttcaaaggagcggttggagcaaggagagccatggatcccagatctgctgggctctaaggagaaagaacttccaagtggcagccacataggagacagacgagtgcatgctgatctgttaccatccaagaaagatagaagaagctgggtggaacaggatcactggagctttgaagatgagaaggtggcaggtgtgcactggggctatgaagagaccagaacgctcctcgcaattctcagccagactgagttttatgaggctctcagaaactgccataggaacagccaagtgtatggggctgtggctgagcggctcagggaatatggcttcctccggaccctggaacagtgtcggaccaagttcaaaggtctccagaagagctatcggaaagtcaagagcggccacccacctgagacctgccccttctttgaagagatggaagccctgatgagtgctcaggtcattgccctgcccagtaatggcctggaagcagcagcctctcactctggcctggtaggcagcgatgctgagactgaagagccagggcagaggggctggcagcatgaggagggagcagaagaggctgtggctcaggagtctgacagtgatgacatggatctagaggcgaccccccaggaccccaactcagctgcacctgttgtgttcagaagcccaggtggagcctgagcttaggtgaattctcatgatgcagatgataggactgaggaattcaggctctaaagctctggattaagtggtgctgaaatttctcttctggtggcaggtgtacactggggctatgaagagaccaagacttaccttgcaattcttagtgagacccagttttatgaagccctccggaactgtcaccgcaacagccagctgtatggagcagtggctgagaggttatgggaatatggctttcttaggaccccagaacagtgtcggaccaagtttaaaagcctgcaaaccagctatcggaaagttaagaatggccaggcaccagagacctgtcccttctttgaagagatggatgctttggtgagtgtccgggttgctgccccacccaatgatggccaggaagagactgcttcttgccccgtccaggggaccagtgaggctgaagctcagaagcaagctgaggaagcagacgaggccacagaggaagattctgatgatgatgaagaggatactgagatacccccaggggctgtcataacccgtgctccagtgttattccaaagcccccgtggttttgaagctggatttgagaatgaagataattcaaaacgggatatttctgaggaagtacaactgcataggacattacttgcaagatctgaaaggaaaattccccggtatcttcatcagggtaaaggcaatgagagtgactgtagatcaggaagacagtgggcaaagacctcaggggagaaaagaggaaaactgacactcccggagaagagcttaagtgaagtcctaagtcaacagagaccttgcttgggagagagaccctataaatatctcaaatacagcaaaagctttggtccaaactcccttctcatgcatcaggtatcccaccaggtggaaaatccatataaatgtgctgattgtgggaaaagcttcagtcggagtgcacgactcattagacaccggagaatccacactggagagaaaccttataaatgtcttgactgtggaaaaagtttccgtgacagttcaaatttcatcacccataggagaatccacacaggagagaaaccttatcaatgtggtgagtgtgggaaatgcttcaatcagagctcaagccttatcattcaccagagaacccacacaggagaaaagccctatcaatgtgaagagtgtggaaaaagcttcaataacagttctcattttagtgcacatcggaggatacacacaggagagagaccccatgtgtgtcctgactgtggaaagagtttcagtaagagttctgacttacgtgcacatcatagaacccacacaggagagaaaccctatgggtgtcatgactgtggtaagtgcttcagtaaaagctctgcccttaataagcacggagaaatccatgcacgggaaaagcttctgacacagtcagctcccaagtaagcccctgaggatatataacggaaagaggctcaataaatgtattgtttagaaagtc

SEQ ID NO: 201196 - DNA, 5595 bp, Homo sapiens
  Payload ID: 19714
  Gene Name: zinc finger and SCAN domain containing 29
  Uniprot ID: Q8IWY8
  ENST ID: ENST00000396976
  CDS Start-End: 136-2694
agtgccatctttctctgccctaggaagaaacacctcttacagtcatctgcaggggattctccaaggacatgggaagatagatgtaagccctggaacccagactcctaagcgaagggaagctgcattctgctattaatgatggccaaatcagctctaagagagaatggcactaactctgagaccttccgacagcgtttcaggagattccattaccaggaggtggctgggccgcgggaggctttcagccaactctgggaactttgctgtcggtggctaaggccggaggtgcgcaccaaggagcagattgtagaactgttggtgctagagcagttcctgaccgtcttacctggggagatccagaattgggtacaggaacaatgtccagaaaatggagaggaggcagtgactctcgtggaagatttagaaagagagcctggaagacctagatcttcggtcacagtctctgtgaaggggcaggaagtgcgcttggagaagatgacacccccgaaatcatcacaagagttattaagtgttcggcaggagtcagtggaaccccagcccaggggtgtacccaagaaagagagggcaagaagcccagacctgggaccacaggagcagatgaacccaaaggagaagctcaaaccttttcaaaggagcggattgccatttcctaaatccggtgtggtctccaggttggagcaaggagagccatggatcccagatctgctgggctctaaggagaaagaacttccaagtggcagccacataggagacagacgagtgcatgctgatctgttaccatccaagaaagatagaagaagctgggtggaacaggatcactggagctttgaagatgagaaggtggcaggtgtgcactggggctatgaagagaccagaacgctcctcgcaattctcagccagactgagttttatgaggctctcagaaactgccataggaacagccaagtgtatggggctgtggctgagcggctcagggaatatggcttcctccggaccctggaacagtgtcggaccaagttcaaaggtctccagaagagctatcggaaagtcaagagcggccacccacctgagacctgccccttctttgaagagatggaagccctgatgagtgctcaggtcattgccctgcccagtaatggcctggaagcagcagcctctcactctggcctggtaggcagcgatgctgagactgaagagccagggcagaggggctggcagcatgaggagggagcagaagaggctgtggctcaggagtctgacagtgatgacatggatctagaggcgaccccccaggaccccaactcagctgcacctgttgtgttcagaagcccaggtggtgtacactggggctatgaagagaccaagacttaccttgcaattcttagtgagacccagttttatgaagccctccggaactgtcaccgcaacagccagctgtatggagcagtggctgagaggttatgggaatatggctttcttaggaccccagaacagtgtcggaccaagtttaaaagcctgcaaaccagctatcggaaagttaagaatggccaggcaccagagacctgtcccttctttgaagagatggatgctttggtgagtgtccgggttgctgccccacccaatgatggccaggaagagactgcttcttgccccgtccaggggaccagtgaggctgaagctcagaagcaagctgaggaagcagacgaggccacagaggaagattctgatgatgatgaagaggatactgagatacccccaggggctgtcataacccgtgctccagtgttattccaaagcccccgtggttttgaagctggatttgagaatgaagataattcaaaacgggatatttctgaggaagtacaactgcataggacattacttgcaagatctgaaaggaaaattccccggtatcttcatcagggtaaaggcaatgagagtgactgtagatcaggaagacagtgggcaaagacctcaggggagaaaagaggaaaactgacactcccggagaagagcttaagtgaagtcctaagtcaacagagaccttgcttgggagagagaccctataaatatctcaaatacagcaaaagctttggtccaaactcccttctcatgcatcaggtatcccaccaggtggaaaatccatataaatgtgctgattgtgggaaaagcttcagtcggagtgcacgactcattagacaccggagaatccacactggagagaaaccttataaatgtcttgactgtggaaaaagtttccgtgacagttcaaatttcatcacccataggagaatccacacaggagagaaaccttatcaatgtggtgagtgtgggaaatgcttcaatcagagctcaagccttatcattcaccagagaacccacacaggagaaaagccctatcaatgtgaagagtgtggaaaaagcttcaataacagttctcattttagtgcacatcggaggatacacacaggagagagaccccatgtgtgtcctgactgtggaaagagtttcagtaagagttctgacttacgtgcacatcatagaacccacacaggagagaaaccctatgggtgtcatgactgtggtaagtgcttcagtaaaagctctgcccttaataagcacggagaaatccatgcacgggaaaagcttctgacacagtcagctcccaagtaagcccctgaggatatataacggaaagaggctcaataaatgtattgtttagaaagtcttccaatagtgagattcatctactattctgtgtccagttagcttaggaaattcactttaggatttatgccactgtttgttccttgtttttcctgatctagactcaaatccccaaggcagtctaaagaatgaaaggaagatttcagtccctctctttgcctgcatctgaattgatggataacatcttttccctctcagtgcctatggtgttcccttaatataagcacagaggacaaggtaatagatcctatgaatttgataagcatccttctttactcattctgtcattcagctgcattttgacaggaaaaacccattacatttcgagaagaagttatgagactttgcccattaggtgggtctagctcttttttttttttttggagacggagttttgctcttgttgcccaggctggagtgcaatggcacgatctcagctcactgcaacctctgcttcccgggttcaagtgattctcctgcctcagcctcccaagtggctggaattacaagcatgcgccaccatgcccagctaattttatatttttagtagagatggggtttctccatgttgggcaggctggtctcaaactcccgacctcaggtgatctgcctgcctcggcctcccaaagtgctgggattacaggcatgagccactgcgccgggcttttttttttcgagatggagtctcactctgtcgtccaggctggagtgcagtggcatgatctcagctcactgcaacctctgccttctgggttcaaacaattttcctgcctcagcctcctgagtagctgggattacagccacctgccaccataccaggctaaattttgcatttttagtagagatggggtttcaccatgttggccaggctggttttgaattgacctcatgatctgcctgcctaggtctcccaaagtgctgggattacaggtgtgagccactgcacccggcccagctcttctttatacaataatggaaatgctaaaatgaatgactcttcctgctcacttaaacctgtgctcaaaatgacatatttgtcaggcaccctcttcatttaccttaaagaaggagagtttaatgtccatcttggttctgccctatgaatcatcttgtcaagaacaggtgttcttatgcagaaacaatgaaaaccttatactgaagtgtgaaccctggatttcttagtttcttctgagtcctagaagaagggttggaatagaataatacatttacaggatttaggttggttttctttctgtccagtctcatctgaatttcgtctgtctcttgtggtccagaagttccacagagcaacgcagctgcatgtggtgacaggtagagcagttaaagctgccaataggaactcgtccatattccacacacctggtatagtgttatgccctccatgggcacttacctgcaataagcagaagccactgccacattcccgtgtattgggaaaatggactactgtgtgcgaacaggccctttaccctaatggcagggaagatggattatctttggccagtggagctgccaatctagacatacacattcaactgaatacaattaaaagcagttctttaaatgcaaatataattactcatctttataatacaatagtattaactgcccatatgctcatagtatgatgagccctgtatagcacaaggtcaacaggtcctctccttgtccttacaatctaaagcagatgacactgacatggacaaacaagtgcacatgcatagttgcggcagttttagagaaatctagaaagctaggtagcaacactatgcataaatgttgtggtccaatgcattagtttgctttaacaaaaatctgggaggtattttttctctttattcaggaaggcttcatgaagcaggaagtggtcaaaggagggaaggttactggttaaattatgataggaagaactttccataactagttgcaaaattgagtgctgggtgggttgaggaatgggaaaaagggggagcaaggtgttttgtgtagatggaacaaagggcaaaggatagactgtaaggaaggccagataaagcttggagtagcatgagaacttgaggaatagtatgatatgggctgtgcagcaggcagagagaatcaccttagctgaaacatgggtgttaggagcagaccatgaggtggtagaaccatcatctatagtaaatcaggtactacgctataactattgataaggaaacagctgactgccactgaaagaataagcagttttaggggactagctcctatgggagataaaggtcagaaatcgtagtatctgatgaagatattttgatgagcaggtgagaagaaagataaacatggccagatggccaaggactgggataagtagccgtttcacattcaattagaattctgtggctggaataagatcagggagagcagtaggaagatatagtattctataattcatagcttgttgtgttagagattaattaggattctgctgttgaatcttagtacaaaaaaatctaatatttattaggaattaagggaagatggtacttctgttatgttgcctaagcagacaggaagctacaagaaacaccagtctgaagcagtgcctcaggatctcagatgatttaggaagtgtgctgtaatgtcaaaaaaaaaaaaaagtattgtctttagtatatctatgtatagtctcgtgggaaaagcattggttgtggtatcaacagatattctggttccagatgtcttgtaagttaacctgcctccatttccctttctgtaaagcaaaataatgtttacacctaatctgtctctcagggataccatattaataaaaatcatgtctataaagtg

SEQ ID NO: 201197 - DNA, 1724 bp, Homo sapiens
  Payload ID: 19714
  Gene Name: zinc finger and SCAN domain containing 29
  ENST ID: ENST00000570181
  CDS Start-End: 1-993
gaacaatgtccagaaaatggagaggaggcagtgactctcgtggaagatttagaaagagagcctggaagacctagatcttcggtcacagtctctgtgaaggggcaggaagtgcgcttggagaagatgacacccccgaaatcatcacaagagttattaagtgttcggcaggagtcagtggaaccccagcccaggggtgtacccaagaaagagagggcaagaagcccagacctgggaccacaggagcagatgaacccaaaggagaagctcaaaccttttcaaaggagcggattgccatttcctaaatccggtgtggtctccaggttggagcaaggagagccatggatcccagatctgctgggctctaaggagaaagaacttccaagtggcagccacataggagacagacgagtgcatgctgatctgttaccatccaagaaagatagaagaagctgggtggaacaggatcactggagctttgaagatgagaaggtggcaggtgtgcactggggctatgaagagaccagaacgctcctcgcaattctcagccagactgagttttatgaggctctcagaaactgccataggaacagccaagtgtatggggctgtggctgagcggctcagggaatatggcttcctccggaccctggaacagtgtcggaccaagttcaaaggtctccagaagagctatcggaaagtcaagagcggccacccacctgagacctgccccttctttgaagagatggaagccctgatgagtgctcaggtcattgccctgcccagtaatggcctggaagcagcagcctctcactctggcctggtaggcagcgatgctgagactgaagagccagggcagaggggctggcagcatgaggagggagcagaagaggctgtggctcaggagtctgacagtgatgacatggatctagaggcgaccccccaggaccccaactcagctgcacctgttgtgttcagaagcccaggtggagcctgagcttaggtgaattctcatgatgcagatgataggactgaggaattcaggctctaaagctctggattaagtggtgctgaaatttctcttctggtggcaggtgtacactggggctatgaagagaccaagacttaccttgcaattcttagtgagacccagttttatgaagccctccggaactgtcaccgcaacagccagctgtatggagcagtggctgagaggttatgggaatatggctttcttaggaccccagaacagtgtcggaccaagtttaaaagcctgcaaaccagctatcggaaagttaagaatggccaggcaccagagacctgtcccttctttgaagagatggatgctttggtgagtgtccgggttgctgccccacccaatgatggccaggaagagactgcttcttgccccgtccaggggaccagtgaggctgaagctcagaagcaagctgaggaagcagacgaggccacagaggaagattctgatgatgatgaagaggatactgagatacccccaggggctgtcataacccgtgctccagtgttattccaaagcccccgtggtaagattatttcactattatggtataaataacaaagggaagacaatgggacttaggaaaaatatcatctgattgagaactggcctctacacccagctttcatggattcttcttgtgaccacccatatttcttgtctattaaagcagctcactgaggggatataaa

SEQ ID NO: 201198 - DNA, 2345 bp, Homo sapiens
  Payload ID: 19714
  Gene Name: zinc finger and SCAN domain containing 29
  ENST ID: ENST00000562072
  CDS Start-End: 1-1671
atggccaaatcagctctaagagagaatggcactaactctgagaccttccgacagcgtttcaggagattccattaccaggaggtggctgggccgcgggaggctttcagccaactctgggaactttgctgtcggtggctaaggccggaggtgcgcaccaaggagcagattgtagaactgttggtgctagagcagttcctgaccgtcttacctggggagatccagaattgggtacaggaacaatgtccagaaaatggagaggaggcagtgactctcgtggaagatttagaaagagagcctggaagacctagatcttcggtcacagtctctgtgaaggggcaggaagtgcgcttggagaagatgacacccccgaaatcatcacaagagttattaagtgttcggcaggagtcagtggaaccccagcccaggggtgtacccaagaaagagagggcaagaagcccagacctgggaccacaggagcagatgaacccaaaggagaagctcaaaccttttcaaaggagcggattgccatttcctaaatccggtgtggtctccaggttggagcaaggagagccatggatcccagatctgctgggctctaaggagaaagaacttccaagtggcagccacataggagacagacgagtgcatgctgatctgttaccatccaagaaagatagaagaagctgggtggaacaggatcactggagctttgaagatgagaaggtggcaggtgtgcactggggctatgaagagaccagaacgctcctcgcaattctcagccagactgagttttatgaggctctcagaaactgccataggaacagccaagtgtatggggctgtggctgagcggctcagggaatatggcttcctccggaccctggaacagtgtcggaccaagttcaaaggtctccagaagagctatcggaaagtcaagagcggccacccacctgagacctgccccttctttgaagagatggaagccctgatgagtgctcaggtcattgccctgcccagtaatggcctggaagcagcagcctctcactctggcctggtaggcagcgatgctgagactgaagagccagggcagaggggctggcagcatgaggagggagcagaagaggctgtggctcaggagtctgacagtgatgacatggatctagaggcgaccccccaggaccccaactcagctgcacctgttgtgttcagaagcccaggtggtgtacactggggctatgaagagaccaagacttaccttgcaattcttagtgagacccagttttatgaagccctccggaactgtcaccgcaacagccagctgtatggagcagtggctgagaggttatgggaatatggctttcttaggaccccagaacagtgtcggaccaagtttaaaagcctgcaaaccagctatcggaaagttaagaatggccaggcaccagagacctgtcccttctttgaagagatggatgctttggttttgaagctggatttgagaatgaagataattcaaaacgggatatttctgaggaagtacaactgcataggacattacttgcaagatctgaaaggaaaattccccggtatcttcatcagggtaaaggcaatgagagtgactgtagatcaggaagacagtgggcaaagacctcaggggagaaaagaggaaaactgacactcccggagaagagcttaagtgaagtcctaagtcaacagagaccttgcttgggagagagaccctataaatatctcaaatacagcaaaagctttggtccaaactcccttctcatgcatcaggtatcccaccaggtggaaaatccatataaatgtgctgattgtgggaaaagcttcagtcggagtgcacgactcattagacaccggagaatccacactggagagaaaccttataaatgtcttgactgtggaaaaagtttccgtgacagttcaaatttcatcacccataggagaatccacacaggagagaaaccttatcaatgtggtgagtgtgggaaatgcttcaatcagagctcaagccttatcattcaccagagaacccacacaggagaaaagccctatcaatgtgaagagtgtggaaaaagcttcaataacagttctcattttagtgcacatcggaggatacacacaggagagagaccccatgtgtgtcctgactgtggaaagagtttcagtaagagttctgacttacgtgcacatcatagaacccacacaggagagaaaccctatgggtgtcatgactgtggtaagtgcttcagtaaaagctctgcccttaataagcacggagaaatccatgcacgggaaaagcttctgacacagtcagctcccaagtaa

SEQ ID NO: 201199 - DNA, 1389 bp, Homo sapiens
  Payload ID: 19714
  Gene Name: zinc finger and SCAN domain containing 29
  ENST ID: ENST00000568898
  CDS Start-End: 1-1389
atggccaaatcagctctaagagagaatggcactaactctgagaccttccgacagcgtttcaggagattccattaccaggaggtggctgggccgcgggaggctttcagccaactctgggaactttgctgtcggtggctaaggccggaggtgcgcaccaaggagcagattgtagaactgttggtgctagagcagttcctgaccgtcttacctggggagatccagaattgggtacaggaacaatgtccagaaaatggagaggaggcagtgactctcgtggaagatttagaaagagagcctggaagacctagatcttcggtcacagtctctgtgaaggggcaggaagtgcgcttggagaagatgacacccccgaaatcatcacaagagttattaagtgttcggcaggagtcagtggaaccccagcccaggggtgtacccaagaaagagagggcaagaagcccagacctgggaccacaggagcagatgaacccaaaggagaagctcaaaccttttcaaaggagcggttttgaagctggatttgagaatgaagataattcaaaacgggatatttctgaggaagtacaactgcataggacattacttgcaagatctgaaaggaaaattccccggtatcttcatcagggtaaaggcaatgagagtgactgtagatcaggaagacagtgggcaaagacctcaggggagaaaagaggaaaactgacactcccggagaagagcttaagtgaagtcctaagtcaacagagaccttgcttgggagagagaccctataaatatctcaaatacagcaaaagctttggtccaaactcccttctcatgcatcaggtatcccaccaggtggaaaatccatataaatgtgctgattgtgggaaaagcttcagtcggagtgcacgactcattagacaccggagaatccacactggagagaaaccttataaatgtcttgactgtggaaaaagtttccgtgacagttcaaatttcatcacccataggagaatccacacaggagagaaaccttatcaatgtggtgagtgtgggaaatgcttcaatcagagctcaagccttatcattcaccagagaacccacacaggagaaaagccctatcaatgtgaagagtgtggaaaaagcttcaataacagttctcattttagtgcacatcggaggatacacacaggagagagaccccatgtgtgtcctgactgtggaaagagtttcagtaagagttctgacttacgtgcacatcatagaacccacacaggagagaaaccctatgggtgtcatgactgtggtaagtgcttcagtaaaagctctgcccttaataagcacggagaaatccatgcacgggaaaagcttctgacacagtcagctcccaagtaa

SEQ ID NO: 201200 - DNA, 2834 bp, Homo sapiens
  Payload ID: 19714
  Gene Name: zinc finger and SCAN domain containing 29
  ENST ID: ENST00000566849
  CDS Start-End: 150-749
gtattccttctgatagtgccatctttctctgccctaggaagaaacacctcttacagtcatctgcaggggattctccaaggacatgggaagatagatgtaagccctggaacccagactcctaagcgaagggaagctgcattctgctattaatgatggccaaatcagctctaagagagaatggcactaactctgagaccttccgacagcgtttcaggagattccattaccaggaggtggctgggccgcgggaggctttcagccaactctgggaactttgctgtcggtggctaaggccggaggtgcgcaccaaggagcagattgtagaactgttggtgctagagcagttcctgaccgtcttacctggggagatccagaattgggtacaggaacaatgtccagaaaatggagaggaggcagtgactctcgtggaagatttagaaagagagcctggaagacctagatcttcggtcacagtctctgtgaaggggcaggaagtgcgcttggagaagatgacacccccgaaatcatcacaagagttattaagtgttcggcaggagtcagtggaaccccagcccaggggtgtacccaagaaagagagggcaagaagcccagacctgggaccacaggagcagatgaacccaaaggagaagctcaaaccttttcaaaggagcggttggagcaaggagagccatggatcccagatctgctgggctctaaggagaaagaacttccaagtggcagccacataggagacagacgagtgcatgctgatctgttaccatccaagaaagatagaagaagctgggtggaacaggatcactggagctttgaagatgagaaggtggcaggtgtgcactggggctatgaagagaccagaacgctcctcgcaattctcagccagactgagttttatgaggctctcagaaactgccataggaacagccaagtgtatggggctgtggctgagcggctcagggaatatggcttcctccggaccctggaacagtgtcggaccaagttcaaaggtctccagaagagctatcggaaagtcaagagcggccacccacctgagacctgccccttctttgaagagatggaagccctgatgagtgctcaggtcattgccctgcccagtaatggcctggaagcagcagcctctcactctggcctggtaggcagcgatgctgagactgaagagccagggcagaggggctggcagcatgaggagggagcagaagaggctgtggctcaggagtctgacagtgatgacatggatctagaggcgaccccccaggaccccaactcagctgcacctgttgtgttcagaagcccaggtggagcctgagcttaggtgaattctcatgatgcagatgataggactgaggaattcaggctctaaagctctggattaagtggtgctgaaatttctcttctggtggcaggtgtacactggggctatgaagagaccaagacttaccttgcaattcttagtgagacccagttttatgaagccctccggaactgtcaccgcaacagccagctgtatggagcagtggctgagaggttatgggaatatggctttcttaggaccccagaacagtgtcggaccaagtttaaaagcctgcaaaccagctatcggaaagttaagaatggccaggcaccagagacctgtcccttctttgaagagatggatgctttggtgagtgtccgggttgctgccccacccaatgatggccaggaagagactgcttcttgccccgtccaggggaccagtgaggctgaagctcagaagcaagctgaggaagcagacgaggccacagaggaagattctgatgatgatgaagaggatactgagatacccccaggggctgtcataacccgtgctccagtgttattccaaagcccccgtggttttgaagctggatttgagaatgaagataattcaaaacgggatatttctgaggaagtacaactgcataggacattacttgcaagatctgaaaggaaaattccccggtatcttcatcagggtaaaggcaatgagagtgactgtagatcaggaagacagtgggcaaagacctcaggggagaaaagaggaaaactgacactcccggagaagagcttaagtgaagtcctaagtcaacagagaccttgcttgggagagagaccctataaatatctcaaatacagcaaaagctttggtccaaactcccttctcatgcatcaggtatcccaccaggtggaaaatccatataaatgtgctgattgtgggaaaagcttcagtcggagtgcacgactcattagacaccggagaatccacactggagagaaaccttataaatgtcttgactgtggaaaaagtttccgtgacagttcaaatttcatcacccataggagaatccacacaggagagaaaccttatcaatgtggtgagtgtgggaaatgcttcaatcagagctcaagccttatcattcaccagagaacccacacaggagaaaagccctatcaatgtgaagagtgtggaaaaagcttcaataacagttctcattttagtgcacatcggaggatacacacaggagagagaccccatgtgtgtcctgactgtggaaagagtttcagtaagagttctgacttacgtgcacatcatagaacccacacaggagagaaaccctatgggtgtcatgactgtggtaagtgcttcagtaaaagctctgcccttaataagcacggagaaatccatgcacgggaaaagcttctgacacagtcagctcccaagtaagcccctgaggatatataacggaaagaggctcaataaatgtattgtttagaaagtc

SEQ ID NO: 201201 - DNA, 643 bp, Homo sapiens
  Payload ID: 19714
  Gene Name: zinc finger and SCAN domain containing 29
  ENST ID: ENST00000561661
  CDS Start-End: 581-643
gtacttgggaggctggagagccggggccggggccggggccggggccggggtcagggtcggaccccgagtgggtgaggctggcccggaggcaaggatgcgagggggttgaggggcagctcgagagggagacgctcccaggggtgggctggagggcgccctcagggcgccttagccgggtcagaggcctctggagggaccgcacgacggctccgggttacccggccggagggagcggagacaaaagaggccagaatcccgcagccgctgctccttgggctgagagctctgcgtccgcgaaccggcagcacctggagcctctggccgacacccgagcccgtcctcaggaagcccgttactactgctcctcggattccgtctctcctgcccaatgtgactctccccaagcccccatggtcctcgctttggagccaaaaccagcttctctccttgcgcgaggttttccgacaggaagaaacacctcttacagtcatctgcaggggattctccaaggacatgggaagatagatgtaagccctggaacccagactcctaagcgaagggaagctgcattctgctattaatgatggccaaatcagctctaagagagaatggcactaactctgagaccttccgacagcgtttc

SEQ ID NO: 201202 - DNA, 4097 bp, Homo sapiens
  Payload ID: 19715
  Gene Name: zinc finger and SCAN domain containing 30
  Uniprot ID: Q86W11
  ENST ID: ENST00000333206
  CDS Start-End: 229-1713
tgtccctagcagtgccttagccagggacctgcttggccagcgacagatcctttgctgctctgtctgccggttcttgaggtgaatgtcggaatccattatctttcgggaaagctctctggggcagggagcgtcctggggagttggaattcagaaggaatctctcagacgcaaatctccatctcctccctgcctcacctgggcagccttttcagactgtctctgcccagaatgtcaggagaggccacagtcttggcctaccatgctccagaagaacaggaaggacttctagttgtcaaggttgaagaagaaaattatgttttggaccaggactttggccttcaggaaaacccctggagccaagaggtattccggcagaagttcaggcagtttagttactctgactccactggccctcgggaggctctgagccggctgcgagagctttgctgtcagtggttgaggccggaggtgcactccaaggagcagatcctggagctgctgatgttggagcagttcctggccatccttcctgaggagctgcaagcttggctgcgagagcatcggccagagaatggagaggaagctgtgactatgctggaggagctggaaaaagaactggaggagccaaggcaacaggacacaactcatggccaagaaatgttctggcaggaaatgacatccacaggagcactgaagtctctgtctctgaatagcccggtgcagcccttagagaaccagtgcaagactgagactcaggagtcccaggctttccaggagagagatggcaggatggtggctggcaaagtgttgatggcaaagcaagaaattgttgaatgtgtagcctcagcagctatgatatcgccgggaaaacttcctggagaaacacattcccaacggatagctgaagaagctttgggaggtctggacaactctaagaagcaaaagggaaatgctgcagggaacaaaatcagtcagcttccttcccaggacagacatttcagtctggcaaccttcaacagaagaatccccacagaacacagtgtccttgaatctcatgagagtgaaggaagtttcagtatgaattcaaatgatattacacaacagagcgttgacactagggaaaagctctatgagtgctttgactgtgggaaggccttttgccagagctcaaagctgattagacatcagagaattcatactggagagagaccttatgcatgtaaagaatgtggcaaagccttcagtttgagctcagaccttgttagacatcagagaattcatagtggtgaaaaaccctatgaatgttgtgaatgtggaaaagccttcaggggcagttcagagctcatcaggcatcggagaatccacactggagagaagccttatgaatgtggagaatgtgggaaggccttcagccggagctcagcccttattcagcataagaaaattcacactggagataaaagctatgaatgtattgcatgtggtaaggcttttggtaggagttctatccttattgaacatcaaagaattcacactggagagaaaccttatgaatgtaatgaatgtggaaaatccttcaatcagagctcagccctcacccagcaccagagaattcacactggagagaagccttatgaatgtagtgaatgtagaaaaacatttaggcataggtcaggccttatgcagcatcagagaacacacaccagagtttaactctgtgggtaagagttgtacaattgtgaaatgcaaggagttcactgtaggggtgagactccacagaaaagaaaagtttcctgagagcagaacttctgtccttccctcccagttcggtactataagaagacatgcacacaaagatgtttgttatgattattgaagtgttaaatggaagaaaaatgttacccaagtcttctccaaaaagaatggtagatatttccttgaaatgcctaacccatttctggatgagactcatcaatatccccttcactccactctctgccaactcagatataatttccattgggcaccttcacagtaatgccaggattggggcagagatcctgaaagagcttcttataagatggcaaatgtgcctggcaagagcatttgtattttgtcaggtggaggcatgtgctgagagttattcaactatctgaaatgttgaatttggaggttgtgaaaatattgaattatgctattagtttaataatatctgaggcagtaaaatagtacctgaggaatggtgcctcattctgcccccttgccagttgtctcctcaatcctgagcttcctgctgaggttaattcaagtctactagtttattgagcacctgctatgtgctaggcattgaggtagacctggtcattgccctcccagagttaagggctaataggatatgcatatatactaaacagtaattacagtaaagtgtggtaagtgctttggtaggaaaaatgcgggtttccatcaaagtacatggcagggatacctaaatctggtctatgagtcactaaagacttcctggatatgatggtatctcagacataaaggtgggtagaaggtagcaagggcaggggagaagagaacaggatctggagacactccatgaagactcttctctactgcagaaattgtcatagacctaatttttaaaaaaatgaatctgaaggagtaattcaacaaatatttattgccctcaagtataatagctcagggcctgcaagcctggtaaggaggggtgtgggcagggaatggggaatagcagagcctgggaaggcagatcaccgtgttcctttatacttcccactgcctgagtcccagagtcatgggacacaaacactccagtccccactgtctctctagcctctgatatgcattctttccctgtgtatatacatgccttttcccataaaatgcaccagtctctcaccacactaattctgagtacttcagagtctcacaggtcattctgggtctagaataggctccccaactcagtgattataagtaggaagaggaaaagcaacacatggggattctgagccaggctttatgacaactaattcctgctggagagaagagtcctgatgatgggctgtctccagatcctatcttatcttcatgccattgtatgggctataacctctgcctgtaactctctctgctaatttttattttggcagttttaattaacccacaattgctgagggcaattaatacctaaaagaaagtttgattcctcttctaagatatcctaggtagtgtcatttctaaagaagacttggtgatcactgcttgtattagtccattttcacagtgctatgaagatactacctgatactgggtaatttattaaaaaaaaaaaagaggtttaattgactgacagttctgcagggctggggaggcctcaggaaacttaaatcatggtggaaggcgaaggggaagcaagcaccttcttcacaaggtggcaagagagagtgcaggggaaatgctaggcacttatcaatcagccaaatctcatgagaattcactatcatgagaacaagggggaaatctgctcccatgatctaatcacctcccaccacgaccctccctcaacacctggggattactattggagatttgggtggggacacaagagccaaaccatatcactgctgttgtgggtaataggggaggtgaaattggggggacaattcggcctctttgtgtccagaggttgtgcagttatcgagtgaggtcgatcagaagtctaaagggatctttcaaatggatagtgagttgccttttcctataggtgacaatcagagatttaatgttttaagtatcatataataggtttttctcctgattgtgaattgtaagtgttggtaatacagaaaatgagaaagtataaaccacccccaatcccaatgcccatagaaacgttgttaacattttggagtactttctattagtgtttatttttcccaatcctagtatttttagtaaaactactgtttagtaaatgatttttggtaactaatttcaaaatttatacttcaaccgtttattattagaatgtaatgcaagatgtattgcaataaaacttgagtttt

SEQ ID NO: 201203 - DNA, 4323 bp, Homo sapiens
  Payload ID: 19715
  Gene Name: zinc finger and SCAN domain containing 30
  Uniprot ID: Q86W11
  ENST ID: ENST00000420878
  CDS Start-End: 457-1941
attaacccccgaaccgccgcgagctgtccctagcagtgccttagccagggacctgcttggccagcgacagatcctttgctgctctgtctgccggttcttgaggtgaatgtcggaatccattatctttcgggaaagctctctggggcaggcgcgtcaaccgcttgtactctgcgatgcccccgccaggtctgagccggacccgcgcccctcctgcgagacacgacccgcgcctgccacagagctgcggtcctccgggctcctagaggggcactctcccacttccggcgcgcgtgcggccgggcattgttctcgctcccgggggtgggttcccgccgccgccggtagagcgaagggagcgtcctggggagttggaattcagaaggaatctctcagacgcaaatctccatctcctccctgcctcacctgggcagccttttcagactgtctctgcccagaatgtcaggagaggccacagtcttggcctaccatgctccagaagaacaggaaggacttctagttgtcaaggttgaagaagaaaattatgttttggaccaggactttggccttcaggaaaacccctggagccaagaggtattccggcagaagttcaggcagtttagttactctgactccactggccctcgggaggctctgagccggctgcgagagctttgctgtcagtggttgaggccggaggtgcactccaaggagcagatcctggagctgctgatgttggagcagttcctggccatccttcctgaggagctgcaagcttggctgcgagagcatcggccagagaatggagaggaagctgtgactatgctggaggagctggaaaaagaactggaggagccaaggcaacaggacacaactcatggccaagaaatgttctggcaggaaatgacatccacaggagcactgaagtctctgtctctgaatagcccggtgcagcccttagagaaccagtgcaagactgagactcaggagtcccaggctttccaggagagagatggcaggatggtggctggcaaagtgttgatggcaaagcaagaaattgttgaatgtgtagcctcagcagctatgatatcgccgggaaaacttcctggagaaacacattcccaacggatagctgaagaagctttgggaggtctggacaactctaagaagcaaaagggaaatgctgcagggaacaaaatcagtcagcttccttcccaggacagacatttcagtctggcaaccttcaacagaagaatccccacagaacacagtgtccttgaatctcatgagagtgaaggaagtttcagtatgaattcaaatgatattacacaacagagcgttgacactagggaaaagctctatgagtgctttgactgtgggaaggccttttgccagagctcaaagctgattagacatcagagaattcatactggagagagaccttatgcatgtaaagaatgtggcaaagccttcagtttgagctcagaccttgttagacatcagagaattcatagtggtgaaaaaccctatgaatgttgtgaatgtggaaaagccttcaggggcagttcagagctcatcaggcatcggagaatccacactggagagaagccttatgaatgtggagaatgtgggaaggccttcagccggagctcagcccttattcagcataagaaaattcacactggagataaaagctatgaatgtattgcatgtggtaaggcttttggtaggagttctatccttattgaacatcaaagaattcacactggagagaaaccttatgaatgtaatgaatgtggaaaatccttcaatcagagctcagccctcacccagcaccagagaattcacactggagagaagccttatgaatgtagtgaatgtagaaaaacatttaggcataggtcaggccttatgcagcatcagagaacacacaccagagtttaactctgtgggtaagagttgtacaattgtgaaatgcaaggagttcactgtaggggtgagactccacagaaaagaaaagtttcctgagagcagaacttctgtccttccctcccagttcggtactataagaagacatgcacacaaagatgtttgttatgattattgaagtgttaaatggaagaaaaatgttacccaagtcttctccaaaaagaatggtagatatttccttgaaatgcctaacccatttctggatgagactcatcaatatccccttcactccactctctgccaactcagatataatttccattgggcaccttcacagtaatgccaggattggggcagagatcctgaaagagcttcttataagatggcaaatgtgcctggcaagagcatttgtattttgtcaggtggaggcatgtgctgagagttattcaactatctgaaatgttgaatttggaggttgtgaaaatattgaattatgctattagtttaataatatctgaggcagtaaaatagtacctgaggaatggtgcctcattctgcccccttgccagttgtctcctcaatcctgagcttcctgctgaggttaattcaagtctactagtttattgagcacctgctatgtgctaggcattgaggtagacctggtcattgccctcccagagttaagggctaataggatatgcatatatactaaacagtaattacagtaaagtgtggtaagtgctttggtaggaaaaatgcgggtttccatcaaagtacatggcagggatacctaaatctggtctatgagtcactaaagacttcctggatatgatggtatctcagacataaaggtgggtagaaggtagcaagggcaggggagaagagaacaggatctggagacactccatgaagactcttctctactgcagaaattgtcatagacctaatttttaaaaaaatgaatctgaaggagtaattcaacaaatatttattgccctcaagtataatagctcagggcctgcaagcctggtaaggaggggtgtgggcagggaatggggaatagcagagcctgggaaggcagatcaccgtgttcctttatacttcccactgcctgagtcccagagtcatgggacacaaacactccagtccccactgtctctctagcctctgatatgcattctttccctgtgtatatacatgccttttcccataaaatgcaccagtctctcaccacactaattctgagtacttcagagtctcacaggtcattctgggtctagaataggctccccaactcagtgattataagtaggaagaggaaaagcaacacatggggattctgagccaggctttatgacaactaattcctgctggagagaagagtcctgatgatgggctgtctccagatcctatcttatcttcatgccattgtatgggctataacctctgcctgtaactctctctgctaatttttattttggcagttttaattaacccacaattgctgagggcaattaatacctaaaagaaagtttgattcctcttctaagatatcctaggtagtgtcatttctaaagaagacttggtgatcactgcttgtattagtccattttcacagtgctatgaagatactacctgatactgggtaatttattaaaaaaaaaaaagaggtttaattgactgacagttctgcagggctggggaggcctcaggaaacttaaatcatggtggaaggcgaaggggaagcaagcaccttcttcacaaggtggcaagagagagtgcaggggaaatgctaggcacttatcaatcagccaaatctcatgagaattcactatcatgagaacaagggggaaatctgctcccatgatctaatcacctcccaccacgaccctccctcaacacctggggattactattggagatttgggtggggacacaagagccaaaccatatcactgctgttgtgggtaataggggaggtgaaattggggggacaattcggcctctttgtgtccagaggttgtgcagttatcgagtgaggtcgatcagaagtctaaagggatctttcaaatggatagtgagttgccttttcctataggtgacaatcagagatttaatgttttaagtatcatataataggtttttctcctgattgtgaattgtaagtgttggtaatacagaaaatgagaaagtataaaccacccccaatcccaatgcccatagaaacgttgttaacattttggagtactttctattagtgtttatttttcccaatcctagtatttttagtaaaactactgtttagtaaatgatttttggtaactaatttcaaaatttatacttcaaccgtttattattagaatgtaatgcaagatgtattgcaataaaacttgagtt

SEQ ID NO: 201204 - DNA, 3368 bp, Homo sapiens
  Payload ID: 19715
  Gene Name: zinc finger and SCAN domain containing 30
  ENST ID: ENST00000589178
  CDS Start-End: 218-883
gtgccttagccagggacctgcttggccagcgacagatcctttgctgctctgtctgccggttcttgaggtgaatgtcggaatccattatctttcgggaaagctctctggggcagggagcgtcctggggagttggaattcagaaggaatctctcagacgcaaatctccatctcctccctgcctcacctgggcagccttttcagactgtctctgcccagaatgtcaggagaggccacagtcttggcctaccatgctccagaagaacaggaaggacttctagttgtcaaggttgaagaagaaaattatgttttggaccaggactttggccttcaggaaaacccctggagccaagaggtattccggcagaagttcaggcagtttagttactctgactccactggccctcgggaggctctgagccggctgcgagagctttgctgtcagtggttgaggccggaggtgcactccaaggagcagatcctggagctgctgatgttggagcagttcctggccatccttcctgaggagctgcaagcttggctgcgagagcatcggccagagaatggagaggaagctgtgactatgctggaggagctggaaaaagaactggaggagccaaggcaacaggacacaactcatggccaagaaatgttctggcaggaaatgacatccacaggagcactgaagtctctgtctctgaatagcccggtgcagcccttagagaaccagtgcaagactgagactcaggagtcccaggctttccaggagagagatggggtctcactctatcacccaggttggagtgcagtggtgcaaccacagctcactgcagcagccttgaacccctgggttaaagtgatcctcctgcctcagcctccagagtagctaggactacagttgtacaccaccatgcctggctaaatatccataatattcaaagctcagtattctgttatttaattttggcttcattggcaagacagtccctaagatggagatgaatacattttcagtaatagaaaccacataatcatttgaacagggaaagtttaatgttaagaattattaactactaagtgttataacaaaaagtgaaactcaaaagaatacagcaataacagatatagagtgtctctagggctgaggcagaacatcaaaggtaagaacaaatttgcaggagggtgccacaacttcccctttcctgccaggtcttagatccaggccttgttggagagggcacagccacagcccactggatggagatgccactgcagtgctgagctggcagaactcactgaggagccacactctggggtgctagaagctccccatggggagctgacctggtacagaacttgctgggaagctacccatagggatggggcctttggaactcattgggatgtgcactgctgggtgtcccatgtgctacagaaacaaacacaaagaacatgccagaaccaggaagaaaagccctttcttccagttcctctgcaaccccctctattgataaagctcacagcatgccagctggcaaatagtccagtatcacagacagggcaatgaagcgtagatttgaaactgaggcaataaattgatagctgtcacagatgccagggattagaactgaaaggactttgattatgttattggcaaaatcatccttatgggcagcagatatatcaggtataccagcttgttctcattaatcttttgttaaatctgactacccttctgattttgtcttcaccaagcaatcttattaacttcctatgaagcttagctgtaataagaaaattgcatttgttcagtctggtccatgtgatggttacattactcattaattctcattctgtttttattactgagtttcacgggcttagttattaagagtctaccccaagagataaatctattttttgtatgatgataaaattaggtatatgaggacctaagcccaaaggccagaccctggacctcggcagttcaccaaaggaatccataccatccatccactgaattcttctgggaaactgcttcccaaccttccccaggcatcataccctgatactaccattagccaagcaggccctcttaagtatcttctgcaccaagcaggtgctacattaaaacgggttttgaaaattcatctcaaggaaatcaagctgtctctatttgcagataatatgatcccatgtctagaaaaccctatcgtctcagccccaaagcttcttaagccaagaagcaactacagcaaagtctcaggatacaaaattaatgtgcaaaaatcataagcattcctatatacagagattcctatatctctgtgtctgtactgcacacctgaacaacaataagacaaccagagagccaaacatgattaactcccattcacaattgctacaaagagaataaaatacctaggaatacagctaacaagggaggtgaagggcctcttcaaggagaactacaaaccactgctcaaggaaatcagagaggacacaaacaaatggagaaacattccatgcttatggataggaagaattaatatcatgaaaatggccatactgcccaaagtaatttatagattcagtgttattcccattaaactaccattgacattcttcacagaattagaaaaaaatactttaaaattcatatggtacaaaaaaaagagcccttatagccaagacaatcctaagcaaaaagaacaaagctggaggcatcatgccacctgccttcaatctgtactacaaggctactataacccaaacagcatggtactggtacaaaaacagacacatagaccaatggaacagaatagagatctgagaaataagactgcacatctacaaccacttgatatttgacaaacctgacacaaacaagcaatggggaaaggattacctatttgataaatggtgctgggaaaactggctagccatatgcagaaaactgaaactggatccctcctttacaccttgtacaaaaataaactcaacatggactaaagacttaaatgtaaaacccaaaactataaaatccctagtaaaaaaatctaggtaataccattcaggacataggcatgggcaaagatttcatgatgaaaatgtcaaaagcaattgcaatagaagcaaaaattgacaaatgggacgtaattaaagagcttttgcacagcaaaagaacctattataagagtgaacagacaatgtacagaatgggagaaaatttttgcaatctatccatctgacaaaggtctaatatccaggatctacaagaaacttaaacaaatttacaagaaaaaaacaaccccattaaaaagtgggcaaaggacatgaacagagacctcaaaagaagacatttatgcacc

SEQ ID NO: 201205 - DNA, 549 bp, Homo sapiens
  Payload ID: 19715
  Gene Name: zinc finger and SCAN domain containing 30
  ENST ID: ENST00000592211
  CDS Start-End: 407-549
aacccccgaaccgccgcgagctgtccctagcagtgccttagccagggacctgcttggccagcgacagatcctttgctgctctgtctgccggttcttgagcgcgtcaaccgcttgtactctgcgatgcccccgccaggtctgagccggacccgcgcccctcctgcgagacacgacccgcgcctgccacagagctgcggtcctccgggctcctagaggggcactctcccacttccggcgcgcgtgcggccgggcattgttctcgctcccgggggtgggttcccgccgccgccggtagagcgaagggagcgtcctggggagttggaattcagaaggaatctctcagacgcaaatctccatctcctccctgcctcacctgggcagccttttcagactgtctctgcccagaatgtcaggagaggccacagtcttggcctaccatgctccagaagaacaggaaggacttctagttgtcaaggttgaagaagaaaattatgttttggaccaggactttggccttcaggaaaacccctggagccaagaggtattccg

SEQ ID NO: 201206 - DNA, 588 bp, Homo sapiens
  Payload ID: 19715
  Gene Name: zinc finger and SCAN domain containing 30
  ENST ID: ENST00000592598
  CDS Start-End: 382-588
gcaggacccgtccccgccccagcccttccgcagctcctaggactgtcgtcttcgcagtcagcacgtccgcgcagcgcgtcaaccgcttgtactctgcgatgcccccgccaggtctgagccggacccgcgcccctcctgcgagacacgacccgcgcctgccacagagctgcggtcctccgggctcctagaggggcactctcccacttccggcgcgcgtgcggccgggcattgttctcgctcccgggggtgggttcccgccgccgccggtagagcgaagggagcgtcctggggagttggaattcagaaggaatctctcagacgcaaatctccatctcctccctgcctcacctgggcagccttttcagactgtctctgcccagaatgtcaggagaggccacagtcttggcctaccatgctccagaagaacaggaaggacttctagttgtcaaggttgaagaagaaaattatgttttggaccaggactttggccttcaggaaaacccctggagccaagaggtattccggcagaagttcaggcagtttagttactctgactccactggccctcgggaggctctgagccggctg

SEQ ID NO: 201207 - DNA, 731 bp, Homo sapiens
  Payload ID: 19715
  Gene Name: zinc finger and SCAN domain containing 30
  ENST ID: ENST00000592278
  CDS Start-End: 195-632
aaccgccgcgagctgtccctagcagtgccttagccagggacctgcttggccagcgacagatcctttgctgctctgtctgccggttcttgaggagcgtcctggggagttggaattcagaaggaatctctcagacgcaaatctccatctcctccctgcctcacctgggcagccttttcagactgtctctgcccagaatgtcaggagaggccacagtcttggcctaccatgctccagaagaacaggaaggacttctagttgtcaaggttgaagaagaaaattatgttttggaccaggactttggccttcaggaaaacccctggagccaagaggtattccggcagaagttcaggcagtttagttactctgactccactggccctcgggaggctctgagccggctgcgagagctttgctgtcagtggttgaggccggaggtgcactccaaggagcagatcctggagctgctgatgttggagcagttcctggccatccttcctgaggagctgcaagcttggctgcgagagcatcggccagagaatggagaggaagctgtgactatgctggaggagctggaaaaagaactggaggagccaaggcaacaggagttttctgcttgtgtatcctcagaatgatagtgctggtacttgattactcctaggacacaactcatggccaagaaatgttctggcaggaaatgacatccacaggagcactgaagtctctgtctctga

SEQ ID NO: 201208 - DNA, 464 bp, Homo sapiens
  Payload ID: 19715
  Gene Name: zinc finger and SCAN domain containing 30
  ENST ID: ENST00000588448
  CDS Start-End: 1-276
gagctgcaagcttggctgcgagagcatcggccagagaatggagaggaagctgtgactatgctggaggagctggaaaaagaactggaggagccaaggcaacaggacacaactcatggccaagaaatgttctggcaggaaatgacatccacaggagcactgaagtctctgtctctgaatagcccggtgcagcccttagagaaccagtgcaagactgagactcaggagtcccaggctttccaggagagaggtgagaagccccagtccatgtggggttgaggatggaggtgagagctatcaactgtggcacggttcattttcttaacgacagccacttgtggctatcactaagtattgtggaaaggcttctttgcctagaaatattcttccttaggctctgcctagaatctgaaattccagtatcatttgtaactttgggttaagaattaaagtctttagtaaaattc

SEQ ID NO: 201209 - DNA, 510 bp, Homo sapiens
  Payload ID: 19715
  Gene Name: zinc finger and SCAN domain containing 30
  ENST ID: ENST00000601405
  CDS Start-End: 33-188
tgggcagccttttcagactgtctctgcccagaatgtcaggagaggccacagtcttggcctaccatgctccagaagaacaggaaggacttctagttgtcaaggttgaagaagaaaattatgttttggaccaggactttggccttcaggaaaacccctggagccaagagaaatgttctggcaggaaatgacatccacaggagcactgaagtctctgtctctgaatagcccggtgcagcccttagagaaccagtgcaagactgagactcaggagtcccaggctttccaggagagaggtgagaagccccagtccatgtggggttgaggatggaggtgagagctatcaactgtggcacggttcattttcttaacgacagccacttgtggctatcactaagtattgtggaaaggcttctttgcctagaaatattcttccttaggctctgcctagaatctgaaattccagtatcatttgtaactttgggttaagaattaaagtctttagtaaaattc

SEQ ID NO: 201210 - DNA, 3439 bp, Homo sapiens
  Payload ID: 19715
  Gene Name: zinc finger and SCAN domain containing 30
  ENST ID: ENST00000610712
  CDS Start-End: 124-1047
agggctgccgagaattaacccccgaaccgccgcgagctgtccctagcagtgccttagccagggacctgcttggccagcgacagatcctttgctgctctgtctgccggttcttgagatggcaggatggtggctggcaaagtgttgatggcaaagcaagaaattgttgaatgtgtagcctcagcagctatgatatcgccgggaaaacttcctggagaaacacattcccaacggatagctgaagaagctttgggaggtctggacaactctaagaagcaaaagggaaatgctgcagggaacaaaatcagtcagcttccttcccaggacagacatttcagtctggcaaccttcaacagaagaatccccacagaacacagtgtccttgaatctcatgagagtgaaggaagtttcagtatgaattcaaatgatattacacaacagagcgttgacactagggaaaagctctatgagtgctttgactgtgggaaggccttttgccagagctcaaagctgattagacatcagagaattcatactggagagagaccttatgcatgtaaagaatgtggcaaagccttcagtttgagctcagaccttgttagacatcagagaattcatagtggtgaaaaaccctatgaatgttgtgaatgtggaaaagccttcaggggcagttcagagctcatcaggcatcggagaatccacactggagagaagccttatgaatgtggagaatgtgggaaggccttcagccggagctcagcccttattcagcataagaaaattcacactggagataaaagctatgaatgtattgcatgtggtaaggcttttggtaggagttctatccttattgaacatcaaagaattcacactggagagaaaccttatgaatgtaatgaatgtggaaaatccttcaatcagagctcagccctcacccagcaccagagaattcacactggagagaagccttatgaatgtagtgaatgtagaaaaacatttaggcataggtcaggccttatgcagcatcagagaacacacaccagagtttaactctgtgggtaagagttgtacaattgtgaaatgcaaggagttcactgtaggggtgagactccacagaaaagaaaagtttcctgagagcagaacttctgtccttccctcccagttcggtactataagaagacatgcacacaaagatgtttgttatgattattgaagtgttaaatggaagaaaaatgttacccaagtcttctccaaaaagaatggtagatatttccttgaaatgcctaacccatttctggatgagactcatcaatatccccttcactccactctctgccaactcagatataatttccattgggcaccttcacagtaatgccaggattggggcagagatcctgaaagagcttcttataagatggcaaatgtgcctggcaagagcatttgtattttgtcaggtggaggcatgtgctgagagttattcaactatctgaaatgttgaatttggaggttgtgaaaatattgaattatgctattagtttaataatatctgaggcagtaaaatagtacctgaggaatggtgcctcattctgcccccttgccagttgtctcctcaatcctgagcttcctgctgaggttaattcaagtctactagtttattgagcacctgctatgtgctaggcattgaggtagacctggtcattgccctcccagagttaagggctaataggatatgcatatatactaaacagtaattacagtaaagtgtggtaagtgctttggtaggaaaaatgcgggtttccatcaaagtacatggcagggatacctaaatctggtctatgagtcactaaagacttcctggatatgatggtatctcagacataaaggtgggtagaaggtagcaagggcaggggagaagagaacaggatctggagacactccatgaagactcttctctactgcagaaattgtcatagacctaatttttaaaaaaatgaatctgaaggagtaattcaacaaatatttattgccctcaagtataatagctcagggcctgcaagcctggtaaggaggggtgtgggcagggaatggggaatagcagagcctgggaaggcagatcaccgtgttcctttatacttcccactgcctgagtcccagagtcatgggacacaaacactccagtccccactgtctctctagcctctgatatgcattctttccctgtgtatatacatgccttttcccataaaatgcaccagtctctcaccacactaattctgagtacttcagagtctcacaggtcattctgggtctagaataggctccccaactcagtgattataagtaggaagaggaaaagcaacacatggggattctgagccaggctttatgacaactaattcctgctggagagaagagtcctgatgatgggctgtctccagatcctatcttatcttcatgccattgtatgggctataacctctgcctgtaactctctctgctaatttttattttggcagttttaattaacccacaattgctgagggcaattaatacctaaaagaaagtttgattcctcttctaagatatcctaggtagtgtcatttctaaagaagacttggtgatcactgcttgtattagtccattttcacagtgctatgaagatactacctgatactgggtaatttattaaaaaaaaaaaagaggtttaattgactgacagttctgcagggctggggaggcctcaggaaacttaaatcatggtggaaggcgaaggggaagcaagcaccttcttcacaaggtggcaagagagagtgcaggggaaatgctaggcacttatcaatcagccaaatctcatgagaattcactatcatgagaacaagggggaaatctgctcccatgatctaatcacctcccaccacgaccctccctcaacacctggggattactattggagatttgggtggggacacaagagccaaaccatatcactgctgttgtgggtaataggggaggtgaaattggggggacaattcggcctctttgtgtccagaggttgtgcagttatcgagtgaggtcgatcagaagtctaaagggatctttcaaatggatagtgagttgccttttcctataggtgacaatcagagatttaatgttttaagtatcatataataggtttttctcctgattgtgaattgtaagtgttggtaatacagaaaatgagaaagtataaaccacccccaatcccaatgcccatagaaacgttgttaacattttggagtactttctattagtgtttatttttcccaatcctagtatttttagtaaaactactgtttagtaaatgatttttggtaactaatttcaaaatttatacttcaaccgtttattattagaatgtaatgcaagatgtattgcaataaaacttgagttttaaaagttt

SEQ ID NO: 201211 - DNA, 2619 bp, Homo sapiens
  Payload ID: 19716
  Gene Name: zinc finger and SCAN domain containing 31
  Uniprot ID: Q96LW9
  ENST ID: ENST00000344279
  CDS Start-End: 180-1400
acgcatttccggcctttgcggttgatcggtcattggggtgctgcagccccgccacctgttccgtagcttgccggtgccccgaaggtgtcttctcctaaggaagattaaatcagaaaattttaaatcacagttatccctttacttaaagccagagtaagccttccaaattaaccccaggaatggcttcaacagaggaacagtacgatcttaagattgtgaaagtggaggaagaccctatctgggaccaagaaacccaccttcgagggaacaacttttctggccaagaagcctcccgacaactttttaggcagttttgttaccaagagactcctggtccccgagaagctctgagccggctccgagaactctgtcatcagtggctaaggccagaaatccacaccaaagagcaaatcttggagctgctggtgctggagcaattcctgactatcctgcctgaggagctccaggcctgggtgcgggagcaccatccggagagtggggaggaggctgtggctgtagttgaagatctggaacaagagcttagtgagccagggaaccaggctccagaccatgaacatggacattctgaagtgctcttggaggatgtggaacatctgaaggtcaagcaggaaccaacagacatacagcttcagcctatggtgacacagctcagatatgaatctttttgcctccaccaatttcaagaacaagatggtgaaagtatacctgagaaccaggagttggcatcaaagcaagaaatcttaaaagaaatggaacatttgggggatagcaaactccaaagagatgtatctttggattctaagtacagagaaacttgtaaacgagacagcaaggcagaaaagcagcaggcacattccactggagagagacgccacaggtgcaatgaatgtgggaaaagcttcactaagagttcagtactcattgagcaccagagaatccacactggggagaagccatatgaatgtgaagaatgtgggaaggccttcagccggaggtcaagcctgaatgaacatcggcggagccacactggagagaaaccctatcaatgtaaggagtgtgggaaagccttcagtgccagcaatggcctcactcgacacagaagaatccacacaggggaaaaaccatatgaatgcaaagtgtgtgggaaggctttcctcctcagctcatgccttgttcagcatcagaggatacacactggagagaagcgctatcagtgtcgtgagtgtggcaaagccttcattcagaatgcagggcttttccagcatctccgagtccacactggtgagaaaccctatcagtgcagtcagtgcagtaaactctttagtaagcggacacttcttaagaaacatcagaaaatccacactggagagagaccataagggtgatgagtttgggaaagccttcagtcatcattgcaaccttattaggcattttagaatccatactgttccagcagaactggactaattctgtggaccctcagacccctaaatggggccgtcttggaaagtaagattttcaagtggcttattctgttcttataaaatttattttgtattgcattgaaccacttgtctacaaaccaggtgttggtgtctcctgtgtggatgactgtgattgtagggggttgctgggtggccttcttattccctagcctttggtccatttcttatgatttcctttaaaggcaccaaatcttatctggaaataaattgttatggaggggctgtttttgagcaatactgcatattgaacaattctaaaagaccagtatctatgtatacttttaaaaaaaagatttgctaagatcaaaggatattcagaggtgcatctttttctgtaagagtgacattttaaacaaatgtaaggttttggggaataagaatcgtccacattcccacaggaaatcattgctatggtctcccctaggaatgtgatagatagcttctataattatgcagcattatccatagtatgaaacctgtagttttaatggtttagaaatctatgtctcatttcatatctaactcatgtttttgatacgaatcaatatatatgttgatatcatgagttaatatgagtttgacatgaatcatcaacatagtatatacatatcaacataactatgttgatgattcatatcaaattctcaatgcaggtcattactgtaagttttccatttttgttacaaataataagtaagatgatactttaaaatctctgttcttcacaaggtacctctttaattcatagccttttatgtcagcattattcttcttttgggggttggtcagcaactttgagtgccattgcaagcagcatcatttaagtagttttataaagaaaagaagtctgatatcttgggcagcttgctgcttactggggagaccagcatgcttagacacttattgccagggttaaacatatgctctggcaccaagttcaaatctttcctccccatttgtgagctgtgggactttaggcaagttatctaaatgctgctatgctatagtctccccacctgtaaaacagaggatgataccaataccttcctcatagggtacataagattaaataaatacaaacttgtacttaaaa

SEQ ID NO: 201212 - DNA, 3176 bp, Homo sapiens
  Payload ID: 19716
  Gene Name: zinc finger and SCAN domain containing 31
  Uniprot ID: Q96LW9
  ENST ID: ENST00000396838
  CDS Start-End: 527-1747
cagagagagagagaaaaactgctgaccctgtaagagagaactggccatcttgcagacagacagagccccgagtgttctttcaactacctgccacccatccaacaactcccctcggacctcagtatgggctggaacctgacacttggcatgacagtgaccccaggcatccaaaccatgacagttccatcagctctccaaatgagagacagagtctcactatgtcgcccaggcttgtcttgaactcctggactcaagagatcctcccatctcggcctctcaaagtgttgggattacaggcgtgagctattacacctgacttaagtctccattttcatatctatactttgggattccagaagacagaggtttgagtgtaaaacacaaaataacaaaaccacaacaaaaacaactctgtattctcgtccccaccattaccatctctcctttgtgatgtcaaagagaccagaggaagtggacagactcggggaagaatagccagagtaagccttccaaattaaccccaggaatggcttcaacagaggaacagtacgatcttaagattgtgaaagtggaggaagaccctatctgggaccaagaaacccaccttcgagggaacaacttttctggccaagaagcctcccgacaactttttaggcagttttgttaccaagagactcctggtccccgagaagctctgagccggctccgagaactctgtcatcagtggctaaggccagaaatccacaccaaagagcaaatcttggagctgctggtgctggagcaattcctgactatcctgcctgaggagctccaggcctgggtgcgggagcaccatccggagagtggggaggaggctgtggctgtagttgaagatctggaacaagagcttagtgagccagggaaccaggctccagaccatgaacatggacattctgaagtgctcttggaggatgtggaacatctgaaggtcaagcaggaaccaacagacatacagcttcagcctatggtgacacagctcagatatgaatctttttgcctccaccaatttcaagaacaagatggtgaaagtatacctgagaaccaggagttggcatcaaagcaagaaatcttaaaagaaatggaacatttgggggatagcaaactccaaagagatgtatctttggattctaagtacagagaaacttgtaaacgagacagcaaggcagaaaagcagcaggcacattccactggagagagacgccacaggtgcaatgaatgtgggaaaagcttcactaagagttcagtactcattgagcaccagagaatccacactggggagaagccatatgaatgtgaagaatgtgggaaggccttcagccggaggtcaagcctgaatgaacatcggcggagccacactggagagaaaccctatcaatgtaaggagtgtgggaaagccttcagtgccagcaatggcctcactcgacacagaagaatccacacaggggaaaaaccatatgaatgcaaagtgtgtgggaaggctttcctcctcagctcatgccttgttcagcatcagaggatacacactggagagaagcgctatcagtgtcgtgagtgtggcaaagccttcattcagaatgcagggcttttccagcatctccgagtccacactggtgagaaaccctatcagtgcagtcagtgcagtaaactctttagtaagcggacacttcttaagaaacatcagaaaatccacactggagagagaccataagggtgatgagtttgggaaagccttcagtcatcattgcaaccttattaggcattttagaatccatactgttccagcagaactggactaattctgtggaccctcagacccctaaatggggccgtcttggaaagtaagattttcaagtggcttattctgttcttataaaatttattttgtattgcattgaaccacttgtctacaaaccaggtgttggtgtctcctgtgtggatgactgtgattgtagggggttgctgggtggccttcttattccctagcctttggtccatttcttatgatttcctttaaaggcaccaaatcttatctggaaataaattgttatggaggggctgtttttgagcaatactgcatattgaacaattctaaaagaccagtatctatgtatacttttaaaaaaaagatttgctaagatcaaaggatattcagaggtgcatctttttctgtaagagtgacattttaaacaaatgtaaggttttggggaataagaatcgtccacattcccacaggaaatcattgctatggtctcccctaggaatgtgatagatagcttctataattatgcagcattatccatagtatgaaacctgtagttttaatggtttagaaatctatgtctcatttcatatctaactcatgtttttgatacgaatcaatatatatgttgatatcatgagttaatatgagtttgacatgaatcatcaacatagtatatacatatcaacataactatgttgatgattcatatcaaattctcaatgcaggtcattactgtaagttttccatttttgttacaaataataagtaagatgatactttaaaatctctgttcttcacaaggtacctctttaattcatagccttttatgtcagcattattcttcttttgggggttggtcagcaactttgagtgccattgcaagcagcatcatttaagtagttttataaagaaaagaagtctgatatcttgggcagcttgctgcttactggggagaccagcatgcttagacacttattgccagggttaaacatatgctctggcaccaagttcaaatctttcctccccatttgtgagctgtgggactttaggcaagttatctaaatgctgctatgctatagtctccccacctgtaaaacagaggatgataccaataccttcctcatagggtacataagattaaataaatacaaacttgtacttaaaatgtagctctcaataaatatgcattatgatttacatacgaaataatagcatttaacaaatgtaggtagaattttaagtatcatgttaaaattaggatacgaaatgcctctgctgacattcttgttactcttttctccacagtcaaaacctgaatcagaatatttcaaaagagaggaaataaaagttcagcttaaaactgttctgccctaaa

SEQ ID NO: 201213 - DNA, 799 bp, Homo sapiens
  Payload ID: 19716
  Gene Name: zinc finger and SCAN domain containing 31
  ENST ID: ENST00000453745
  CDS Start-End: 149-799
gcctggcttcagccagtgggctcagaacggctgacgcatttccggcctttgcggttgatcggtcattggggtgctgcagccccgccacctgttccgtagcttgccggtgccccgaagccagagtaagccttccaaattaaccccaggaatggcttcaacagaggaacagtacgatcttaagattgtgaaagtggaggaagaccctatctgggaccaagaaacccaccttcgagggaacaacttttctggccaagaagcctcccgacaactttttaggcagttttgttaccaagagactcctggtccccgagaagctctgagccggctccgagaactctgtcatcagtggctaaggccagaaatccacaccaaagagcaaatcttggagctgctggtgctggagcaattcctgactatcctgcctgaggagctccaggcctgggtgcgggagcaccatccggagagtggggaggaggctgtggctgtagttgaagatctggaacaagagcttagtgagccagggaaccaggctccagaccatgaacatggacattctgaagtgctcttggaggatgtggaacatctgaaggtcaagcaggaaccaacagacatacagcttcagcctatggtgacacagctcagatatgaatctttttgcctccaccaatttcaagaacaagatggtgaaagtatacctgagaaccaggagttggcatcaaagcaagaaatcttaaaagaaatggaacatttgggggatagcaaactccaaagagatgtatctttggattctaagtacaga

SEQ ID NO: 201214 - DNA, 3551 bp, Homo sapiens
  Payload ID: 19716
  Gene Name: zinc finger and SCAN domain containing 31
  Uniprot ID: Q96LW9
  ENST ID: ENST00000414429
  CDS Start-End: 905-2125
attgctgggcaactaggtcccgccggagcgttccagctcaaagattacctgctgcagtcaggcagaaatgtaaagtctttcctgtttgattgggaactgacccaggtgccaggcttggggggacaccggacaaccaaaggcaatatgtggactcggcaagccactggtccctaaacctgaataagtttccgggcagagctgcatttattgacggttatgaaagctgatttagaagcagcaacgcagcctcttgcctggaattgggatgatgcggctgaaaccaccttcctggcagccaaacaggctattcagcaggcacaagccctatgggtagctgatcggggcacccatttaaacttgatgtgcatgtgaccagatagttttgactggggcttatggcatcacacagagctctttagaatgccagtagacttttggtcccaactttggaagggagctgagctccagtattcctcgacagagaagcagttactaactgcatatgctgccctttagactcgtgacagcctggcaggatgggctacagtcgtcgcgcgcatgacttacccaatagcaggccccgagtgttctttcaactacctgccacccatccaacaactcccctcggacctcagtatgggctggaacctgacacttggcatgacagtgcagaccccaggcatccaaaccatgacagttccatcagctctccaaatgagactttgggattccagaagacagaggtttgagtgtaaaacacaaaataacaaaaccacaacaaaaacaactctgtattctcgtccccaccattaccatctctcctttgtgatgtcaaagagaccagaggaagtggacagactcggggaagaatagccagagtaagccttccaaattaaccccaggaatggcttcaacagaggaacagtacgatcttaagattgtgaaagtggaggaagaccctatctgggaccaagaaacccaccttcgagggaacaacttttctggccaagaagcctcccgacaactttttaggcagttttgttaccaagagactcctggtccccgagaagctctgagccggctccgagaactctgtcatcagtggctaaggccagaaatccacaccaaagagcaaatcttggagctgctggtgctggagcaattcctgactatcctgcctgaggagctccaggcctgggtgcgggagcaccatccggagagtggggaggaggctgtggctgtagttgaagatctggaacaagagcttagtgagccagggaaccaggctccagaccatgaacatggacattctgaagtgctcttggaggatgtggaacatctgaaggtcaagcaggaaccaacagacatacagcttcagcctatggtgacacagctcagatatgaatctttttgcctccaccaatttcaagaacaagatggtgaaagtatacctgagaaccaggagttggcatcaaagcaagaaatcttaaaagaaatggaacatttgggggatagcaaactccaaagagatgtatctttggattctaagtacagagaaacttgtaaacgagacagcaaggcagaaaagcagcaggcacattccactggagagagacgccacaggtgcaatgaatgtgggaaaagcttcactaagagttcagtactcattgagcaccagagaatccacactggggagaagccatatgaatgtgaagaatgtgggaaggccttcagccggaggtcaagcctgaatgaacatcggcggagccacactggagagaaaccctatcaatgtaaggagtgtgggaaagccttcagtgccagcaatggcctcactcgacacagaagaatccacacaggggaaaaaccatatgaatgcaaagtgtgtgggaaggctttcctcctcagctcatgccttgttcagcatcagaggatacacactggagagaagcgctatcagtgtcgtgagtgtggcaaagccttcattcagaatgcagggcttttccagcatctccgagtccacactggtgagaaaccctatcagtgcagtcagtgcagtaaactctttagtaagcggacacttcttaagaaacatcagaaaatccacactggagagagaccataagggtgatgagtttgggaaagccttcagtcatcattgcaaccttattaggcattttagaatccatactgttccagcagaactggactaattctgtggaccctcagacccctaaatggggccgtcttggaaagtaagattttcaagtggcttattctgttcttataaaatttattttgtattgcattgaaccacttgtctacaaaccaggtgttggtgtctcctgtgtggatgactgtgattgtagggggttgctgggtggccttcttattccctagcctttggtccatttcttatgatttcctttaaaggcaccaaatcttatctggaaataaattgttatggaggggctgtttttgagcaatactgcatattgaacaattctaaaagaccagtatctatgtatacttttaaaaaaaagatttgctaagatcaaaggatattcagaggtgcatctttttctgtaagagtgacattttaaacaaatgtaaggttttggggaataagaatcgtccacattcccacaggaaatcattgctatggtctcccctaggaatgtgatagatagcttctataattatgcagcattatccatagtatgaaacctgtagttttaatggtttagaaatctatgtctcatttcatatctaactcatgtttttgatacgaatcaatatatatgttgatatcatgagttaatatgagtttgacatgaatcatcaacatagtatatacatatcaacataactatgttgatgattcatatcaaattctcaatgcaggtcattactgtaagttttccatttttgttacaaataataagtaagatgatactttaaaatctctgttcttcacaaggtacctctttaattcatagccttttatgtcagcattattcttcttttgggggttggtcagcaactttgagtgccattgcaagcagcatcatttaagtagttttataaagaaaagaagtctgatatcttgggcagcttgctgcttactggggagaccagcatgcttagacacttattgccagggttaaacatatgctctggcaccaagttcaaatctttcctccccatttgtgagctgtgggactttaggcaagttatctaaatgctgctatgctatagtctccccacctgtaaaacagaggatgataccaataccttcctcatagggtacataagattaaataaatacaaacttgtacttaaaatgtagctctcaataaatatgcattatgatttacatacgaaataatagcatttaacaaatgtaggtagaattttaagtatcatgttaaaattaggatacgaaatgcctctgctgacattcttgttactcttttctccacagtcaaaacctgaatcagaatatttcaaaagagaggaaataaaagttcagcttaaaactgttctgccct

SEQ ID NO: 201215 - DNA, 1005 bp, Homo sapiens
  Payload ID: 19716
  Gene Name: zinc finger and SCAN domain containing 31
  ENST ID: ENST00000435857
  CDS Start-End: 391-1005
gttttgggtctcgatgaccatctaactcctaaatgctgggggccgctccccatagaaatgcctcgccggatttctccgcctcgcacccagtgggactgggatttttggccccggggtttgcaataagggagtcaccaagcagcagccacctctggaattcctagaaaggaaagagttgcctggcttcagccagtgggctcagaacggctgacgcatttccggcctttgcggttgatcggtcattggggtgctgcagccccgccacctgttccgtagcttgccggtgccccgaaggctccagaccatgaacatggacattctgaagtgctcttggaggatgtggaacatctgaaggtcaagcaggaaccaacagacatacagcttcagcctatggtgacacagctcagatatgaatctttttgcctccaccaatttcaagaacaagatggtgaaagtatacctgagaaccaggagttggcatcaaagcaagaaatcttaaaagaaatggaacatttgggggatagcaaactccaaagagatgtatctttggattctaagtacagagaaacttgtaaacgagacagcaaggcagaaaagcagcaggcacattccactggagagagacgccacaggtgcaatgaatgtgggaaaagcttcactaagagttcagtactcattgagcaccagagaatccacactggggagaagccatatgaatgtgaagaatgtgggaaggccttcagccggaggtcaagcctgaatgaacatcggcggagccacactggagagaaaccctatcaatgtaaggagtgtgggaaagccttcagtgccagcaatggcctcactcgacacagaagaatccacacaggggaaaaaccatatgaatgcaaagtgtgtgggaaggctttcctcctcagctcatgccttgttcagcatcagaggatacacactggagagaagcgctatcagtgtcgtgagtgtggcaaagccttcattcagaatgca

SEQ ID NO: 201216 - DNA, 580 bp, Homo sapiens
  Payload ID: 19716
  Gene Name: zinc finger and SCAN domain containing 31
  ENST ID: ENST00000439628
  CDS Start-End: 529-580
acttgtgcccagagagagagagaaaaactgctgaccctgtaagagagaactggccatcttgcagacagacagaggtgagccaggaattaacaagcatgccaaggagtacagctgtaagtgtgggagcggcaggagccacagagccgtttgctgagaagggctgcggtcggaggaggcagccgagacagaggcagacagtgtgagagctgcagcagctgctgctgaataaaatcatattttacctgcctacagccccgagtgttctttcaactacctgccacccatccaacaactcccctcggacctcagtatgggctggaacctgacacttggcatgacagtgactttgggattccagaagacagaggtttgagtgtaaaacacaaaataacaaaaccacaacaaaaacaactctgtattctcgtccccaccattaccatctctcctttgtgatgtcaaagagaccagaggaagtggacagactcggggaagaatagccagagtaagccttccaaattaaccccaggaatggcttcaacagaggaacagtacgatcttaagattgtgaaagtggaggaag

SEQ ID NO: 201217 - DNA, 574 bp, Homo sapiens
  Payload ID: 19716
  Gene Name: zinc finger and SCAN domain containing 31
  ENST ID: ENST00000426434
  CDS Start-End: 311-574
acttgtgcccagagagagagagaaaaactgctgaccctgtaagagagaactggccatcttgcagacagacagaggtgagccaggaattaacaagcatgccaaggagtacagctgtaagtgtgggagcggcaggagccacagagccgtttgctgagaagggctgcggtcggaggaggcagccgagacagaggcagacagtgtgagagctgcagcagctgctgctgaataaaatcatattttacctgcctacagccccgagtgttctttcaactacctgccacccatccaacaactcccctcggacctcagtatgggctggaacctgacacttggcatgacagtggctccagaccatgaacatggacattctgaagtgctcttggaggatgtggaacatctgaaggtcaagcaggaaccaacagacatacagcttcagcctatggtgacacagctcagatatgaatctttttgcctccaccaatttcaagaacaagatggtgaaagtatacctgagaaccaggagttggcatcaaagcaagaaatcttaaaagaaatggaacatttgggggatagc

SEQ ID NO: 201218 - DNA, 2562 bp, Homo sapiens
  Payload ID: 19716
  Gene Name: zinc finger and SCAN domain containing 31
  Uniprot ID: Q96LW9
  ENST ID: ENST00000446474
  CDS Start-End: 402-1145
attggggtgctgcagccccgccacctgttccgtagcttgccggtgccccgaaggtgagtcttggccccttgtcgcgacccgccaggttcccagaagatttcaggtctgtgccttggagtaggcggggagggaacgtctgcgcaggcgtgacccccgcccctacacattcactggcctgaagcccccgtggagtaggtggaggtcccgccccttatcctgaagattaaacagcctttctttgtctgagataacgcccggagttctttgtcctgcctccaagacgataaaggagcgcagacacaaaggctccagaccatgaacatggacattctgaagtgctcttggaggatgtggaacatctgaaggtcaagcaggaaccaacagacatacagcttcagcctatggtgacacagctcagatatgaatctttttgcctccaccaatttcaagaacaagatggtgaaagtatacctgagaaccaggagttggcatcaaagcaagaaatcttaaaagaaatggaacatttgggggatagcaaactccaaagagatgtatctttggattctaagtacagagaaacttgtaaacgagacagcaaggcagaaaagcagcaggcacattccactggagagagacgccacaggtgcaatgaatgtgggaaaagcttcactaagagttcagtactcattgagcaccagagaatccacactggggagaagccatatgaatgtgaagaatgtgggaaggccttcagccggaggtcaagcctgaatgaacatcggcggagccacactggagagaaaccctatcaatgtaaggagtgtgggaaagccttcagtgccagcaatggcctcactcgacacagaagaatccacacaggggaaaaaccatatgaatgcaaagtgtgtgggaaggctttcctcctcagctcatgccttgttcagcatcagaggatacacactggagagaagcgctatcagtgtcgtgagtgtggcaaagccttcattcagaatgcagggcttttccagcatctccgagtccacactggtgagaaaccctatcagtgcagtcagtgcagtaaactctttagtaagcggacacttcttaagaaacatcagaaaatccacactggagagagaccataagggtgatgagtttgggaaagccttcagtcatcattgcaaccttattaggcattttagaatccatactgttccagcagaactggactaattctgtggaccctcagacccctaaatggggccgtcttggaaagtaagattttcaagtggcttattctgttcttataaaatttattttgtattgcattgaaccacttgtctacaaaccaggtgttggtgtctcctgtgtggatgactgtgattgtagggggttgctgggtggccttcttattccctagcctttggtccatttcttatgatttcctttaaaggcaccaaatcttatctggaaataaattgttatggaggggctgtttttgagcaatactgcatattgaacaattctaaaagaccagtatctatgtatacttttaaaaaaaagatttgctaagatcaaaggatattcagaggtgcatctttttctgtaagagtgacattttaaacaaatgtaaggttttggggaataagaatcgtccacattcccacaggaaatcattgctatggtctcccctaggaatgtgatagatagcttctataattatgcagcattatccatagtatgaaacctgtagttttaatggtttagaaatctatgtctcatttcatatctaactcatgtttttgatacgaatcaatatatatgttgatatcatgagttaatatgagtttgacatgaatcatcaacatagtatatacatatcaacataactatgttgatgattcatatcaaattctcaatgcaggtcattactgtaagttttccatttttgttacaaataataagtaagatgatactttaaaatctctgttcttcacaaggtacctctttaattcatagccttttatgtcagcattattcttcttttgggggttggtcagcaactttgagtgccattgcaagcagcatcatttaagtagttttataaagaaaagaagtctgatatcttgggcagcttgctgcttactggggagaccagcatgcttagacacttattgccagggttaaacatatgctctggcaccaagttcaaatctttcctccccatttgtgagctgtgggactttaggcaagttatctaaatgctgctatgctatagtctccccacctgtaaaacagaggatgataccaataccttcctcatagggtacataagattaaataaatacaaacttgtacttaaaatgtagctctcaataaatatgcattatgatttacatacgaaataatagcatttaacaaatgtaggtagaattttaagtatcatgttaaaattaggatacgaaatgcctctgctgacattcttgttactcttttctccacagtcaaaacctgaatcagaatatttcaaaagagaggaaataaaagttcagcttaaaactg

SEQ ID NO: 201219 - DNA, 575 bp, Homo sapiens
  Payload ID: 19716
  Gene Name: zinc finger and SCAN domain containing 31
  ENST ID: ENST00000426756
  CDS Start-End: 256-575
aatgagactttgggattccagaagacagaggtttgagtgtaaaacacaaaataacaaaaccacaacaaaaacaactctgtattctcgtccccaccattaccatctctcctttgtgatgtcaaagagaccagaggaagtggacagactcggggaagaataggtgtcttctcctaaggaagattaaatcagaaaattttaaatcacagttatccctttacttaaagccagagtaagccttccaaattaaccccaggaatggcttcaacagaggaacagtacgatcttaagattgtgaaagtggaggaagaccctatctgggaccaagaaacccaccttcgagggaacaacttttctggccaagaagcctcccgacaactttttaggcagttttgttaccaagagactcctggtccccgagaagctctgagccggctccgagaactctgtcatcagtggctaaggccagaaatccacaccaaagagcaaatcttggagctgctggtgctggagcaattcctgactatcctgcctgaggagctccaggcctgggtgcgggagcaccatccggagagtgg

SEQ ID NO: 201220 - DNA, 571 bp, Homo sapiens
  Payload ID: 19716
  Gene Name: zinc finger and SCAN domain containing 31
  ENST ID: ENST00000414431
  CDS Start-End: 259-571
attggggtgctgcagccccgccacctgttccgtagcttgccggtgccccgaagatgtctatcaagtatttgttccctgctaggatatcagatgacaccaaatttgcatttaatcgaataaatcaggtaaacaaaacattgaagatgcgttcataattttgtggctccagaccatgaacatggacattctgaagtgctcttggaggatgtggaacatctgaaggtcaagcaggaaccaacagacatacagcttcagcctatggtgacacagctcagatatgaatctttttgcctccaccaatttcaagaacaagatggtgaaagtatacctgagaaccaggagttggcatcaaagcaagaaatcttaaaagaaatggaacatttgggggatagcaaactccaaagagatgtatctttggattctaagtacagagaaacttgtaaacgagacagcaaggcagaaaagcagcaggcacattccactggagagagacgccacaggtgcaatgaatgtgggaaaagcttcactaagagttcagtactcattgagcaccagagaatccacactgggg

SEQ ID NO: 201221 - DNA, 706 bp, Homo sapiens
  Payload ID: 19716
  Gene Name: zinc finger and SCAN domain containing 31
  ENST ID: ENST00000446222
  CDS Start-End: 397-706
agagaaaaactgctgaccctgtaagagagaactggccatcttgcagacagacagagccccgagtgttctttcaactacctgccacccatccaacaactcccctcggacctcagtatgggctggaacctgacacttggcatgacagtgactttgggattccagaagacagaggtttgagtgtaaaacacaaaataacaaaaccacaacaaaaacaactctgtattctcgtccccaccattaccatctctcctttgtgatgtcaaagagaccagaggaagtggacagactcggggaagaataggtgtcttctcctaaggaagattaaatcagaaaattttaaatcacagttatccctttacttaaagccagagtaagccttccaaattaaccccaggaatggcttcaacagaggaacagtacgatcttaagattgtgaaagtggaggaagaccctatctgggaccaagaaacccaccttcgagggaacaacttttctggccaagaagcctcccgacaactttttaggcagttttgttaccaagagactcctggtccccgagaagctctgagccggctccgagaactctgtcatcagtggctaaggccagaaatccacaccaaagagcaaatcttggagctgctggtgctggagcaattcctgactatcctgcctgaggagctccaggcctgggtgcgggagcaccatc

SEQ ID NO: 201222 - DNA, 583 bp, Homo sapiens
  Payload ID: 19716
  Gene Name: zinc finger and SCAN domain containing 31
  ENST ID: ENST00000439636
  CDS Start-End: 117-583
aaaaggagaagaaacttttcctgggaacctgctgactatacaaaggacaaaggcattatgtgtcaggccttgttcccttatctgaccagagtaagccttccaaattaaccccaggaatggcttcaacagaggaacagtacgatcttaagattgtgaaagtggaggaagaccctatctgggaccaagaaacccaccttcgagggaacaacttttctggccaagaagcctcccgacaactttttaggcagttttgttaccaagagactcctggtccccgagaagctctgagccggctccgagaactctgtcatcagtggctaaggccagaaatccacaccaaagagcaaatcttggagctgctggtgctggagcaattcctgactatcctgcctgaggagctccaggcctgggtgcgggagcaccatccggagagtggggaggaggctgtggctgtagttgaagatctggaacaagagcttagtgagccagggaaccaggctccagaccatgaacatggacattctgaagtgctcttggaggatgtggaacatctgaaggtcaagcaggaaccaacagacataca

SEQ ID NO: 201223 - DNA, 3050 bp, Homo sapiens
  Payload ID: 19716
  Gene Name: zinc finger and SCAN domain containing 31
  Uniprot ID: Q96LW9
  ENST ID: ENST00000439158
  CDS Start-End: 401-1621
attggggtgctgcagccccgccacctgttccgtagcttgccggtgccccgaaggtgagtcttggccccttgtcgcgacccgccaggttcccagaagatttcaggtctgtgccttggagtaggcggggagggaacgtctgcgcaggcgtgacccccgcccctacacattcactggcctgaagcccccgtggagtaggtggaggtcccgccccttatcctgaagattaaacagcctttctttgtctgagataacgcccggagttctttgtcctgcctccaagacgataaaggagcgcagacacaaaggtgtcttctcctaaggaagattaaatcagaaaattttaaatcacagttatccctttacttaaagccagagtaagccttccaaattaaccccaggaatggcttcaacagaggaacagtacgatcttaagattgtgaaagtggaggaagaccctatctgggaccaagaaacccaccttcgagggaacaacttttctggccaagaagcctcccgacaactttttaggcagttttgttaccaagagactcctggtccccgagaagctctgagccggctccgagaactctgtcatcagtggctaaggccagaaatccacaccaaagagcaaatcttggagctgctggtgctggagcaattcctgactatcctgcctgaggagctccaggcctgggtgcgggagcaccatccggagagtggggaggaggctgtggctgtagttgaagatctggaacaagagcttagtgagccagggaaccaggctccagaccatgaacatggacattctgaagtgctcttggaggatgtggaacatctgaaggtcaagcaggaaccaacagacatacagcttcagcctatggtgacacagctcagatatgaatctttttgcctccaccaatttcaagaacaagatggtgaaagtatacctgagaaccaggagttggcatcaaagcaagaaatcttaaaagaaatggaacatttgggggatagcaaactccaaagagatgtatctttggattctaagtacagagaaacttgtaaacgagacagcaaggcagaaaagcagcaggcacattccactggagagagacgccacaggtgcaatgaatgtgggaaaagcttcactaagagttcagtactcattgagcaccagagaatccacactggggagaagccatatgaatgtgaagaatgtgggaaggccttcagccggaggtcaagcctgaatgaacatcggcggagccacactggagagaaaccctatcaatgtaaggagtgtgggaaagccttcagtgccagcaatggcctcactcgacacagaagaatccacacaggggaaaaaccatatgaatgcaaagtgtgtgggaaggctttcctcctcagctcatgccttgttcagcatcagaggatacacactggagagaagcgctatcagtgtcgtgagtgtggcaaagccttcattcagaatgcagggcttttccagcatctccgagtccacactggtgagaaaccctatcagtgcagtcagtgcagtaaactctttagtaagcggacacttcttaagaaacatcagaaaatccacactggagagagaccataagggtgatgagtttgggaaagccttcagtcatcattgcaaccttattaggcattttagaatccatactgttccagcagaactggactaattctgtggaccctcagacccctaaatggggccgtcttggaaagtaagattttcaagtggcttattctgttcttataaaatttattttgtattgcattgaaccacttgtctacaaaccaggtgttggtgtctcctgtgtggatgactgtgattgtagggggttgctgggtggccttcttattccctagcctttggtccatttcttatgatttcctttaaaggcaccaaatcttatctggaaataaattgttatggaggggctgtttttgagcaatactgcatattgaacaattctaaaagaccagtatctatgtatacttttaaaaaaaagatttgctaagatcaaaggatattcagaggtgcatctttttctgtaagagtgacattttaaacaaatgtaaggttttggggaataagaatcgtccacattcccacaggaaatcattgctatggtctcccctaggaatgtgatagatagcttctataattatgcagcattatccatagtatgaaacctgtagttttaatggtttagaaatctatgtctcatttcatatctaactcatgtttttgatacgaatcaatatatatgttgatatcatgagttaatatgagtttgacatgaatcatcaacatagtatatacatatcaacataactatgttgatgattcatatcaaattctcaatgcaggtcattactgtaagttttccatttttgttacaaataataagtaagatgatactttaaaatctctgttcttcacaaggtacctctttaattcatagccttttatgtcagcattattcttcttttgggggttggtcagcaactttgagtgccattgcaagcagcatcatttaagtagttttataaagaaaagaagtctgatatcttgggcagcttgctgcttactggggagaccagcatgcttagacacttattgccagggttaaacatatgctctggcaccaagttcaaatctttcctccccatttgtgagctgtgggactttaggcaagttatctaaatgctgctatgctatagtctccccacctgtaaaacagaggatgataccaataccttcctcatagggtacataagattaaataaatacaaacttgtacttaaaatgtagctctcaataaatatgcattatgatttacatacgaaataatagcatttaacaaatgtaggtagaattttaagtatcatgttaaaattaggatacgaaatgcctctgctgacattcttgttactcttttctccacagtcaaaacctgaatcagaatatttcaaaagagaggaaataaaagttcagcttaaaactgttctgccctaaa

SEQ ID NO: 201224 - DNA, 557 bp, Homo sapiens
  Payload ID: 19716
  Gene Name: zinc finger and SCAN domain containing 31
  ENST ID: ENST00000444081
  CDS Start-End: 485-557
agagccgtttgctgagaagggctgcggtcggaggaggcagccgagacagaggcagacagtgtgagagctgcagcagctgctgctgaataaaatcatattttacctgcctacagccccgagtgttctttcaactacctgccacccatccaacaactcccctcggacctcagtatgggctggaacctgacacttggcatgacagtgagacagagtctcactatgtcgcccaggcttgtcttgaactcctggactcaagagatcctcccatctcggcctctcaaagtgttgggattacaggcactttgggattccagaagacagaggtttgagtgtaaaacacaaaataacaaaaccacaacaaaaacaactctgtattctcgtccccaccattaccatctctcctttgtgatgtcaaagagaccagaggaagtggacagactcggggaagaatagccagagtaagccttccaaattaaccccaggaatggcttcaacagaggaacagtacgatcttaagattgtgaaagtggaggaagaccctatctgggaccaagaaa

SEQ ID NO: 201225 - DNA, 581 bp, Homo sapiens
  Payload ID: 19716
  Gene Name: zinc finger and SCAN domain containing 31
  ENST ID: ENST00000447021
  CDS Start-End: 139-581
gaggtcccgccccttatcctgaagattaaacagcctttctttgtctgagataacgcccggagttctttgtcctgcctccaagacgataaaggagcgcagacacaaagccagagtaagccttccaaattaaccccaggaatggcttcaacagaggaacagtacgatcttaagattgtgaaagtggaggaagaccctatctgggaccaagaaacccaccttcgagggaacaacttttctggccaagaagcctcccgacaactttttaggcagttttgttaccaagagactcctggtccccgagaagctctgagccggctccgagaactctgtcatcagtggctaaggccagaaatccacaccaaagagcaaatcttggagctgctggtgctggagcaattcctgactatcctgcctgaggagctccaggcctgggtgcgggagcaccatccggagagtggggaggaggctgtggctgtagttgaagatctggaacaagagcttagtgagccagggaaccaggctccagaccatgaacatggacattctgaagtgctcttggaggatgtggaacatctgaaggt

SEQ ID NO: 201226 - DNA, 584 bp, Homo sapiens
  Payload ID: 19716
  Gene Name: zinc finger and SCAN domain containing 31
  ENST ID: ENST00000434036
  CDS Start-End: 351-584
acttgtgcccagagagagagagaaaaactgctgaccctgtaagagagaactggccatcttgcagacagacagagccccgagtgttctttcaactacctgccacccatccaacaactcccctcggacctcagtatgggctggaacctgacacttggcatgacagtgactttgggattccagaagacagaggtttgagtgtaaaacacaaaataacaaaaccacaacaaaaacaactctgtattctcgtccccaccattaccatctctcctttgtgatgtcaaagagaccagaggaagtggacagactcggggaagaatagccagagtaagccttccaaattaaccccaggaatggcttcaacagaggaacagtacgatcttaagattgtgaaagtggaggaagaccctatctgggaccaagaaacccaccttcgagggaacaacttttctggccaagaagcctcccgacaactttttaggcagttttgttaccaagagactcctggtccccgagaagctctgagccggctccgagaactctgtcatcagtggctaaggccagaaatccacaccaaagagcaaatc

SEQ ID NO: 201227 - DNA, 2669 bp, Homo sapiens
  Payload ID: 19716
  Gene Name: zinc finger and SCAN domain containing 31
  Uniprot ID: Q96LW9
  ENST ID: ENST00000611469
  CDS Start-End: 500-1243
gttttgggtctcgatgaccatctaactcctaaatgctgggggccgctccccatagaaatgcctcgccggatttctccgcctcgcacccagtgggactgggatttttggccccggggtttgcaataagggagtcaccaagcagcagccacctctggaattcctagaaaggaaagagttgcctggcttcagccagtgggctcagaacggctgacgcatttccggcctttgcggttgatcggtcattggggtgctgcagccccgccacctgttccgtagcttgccggtgccccgaagatgtctatcaagtatttgttccctgctaggatatcagatgacaccaaatttgcatttaatcgaataaatcaggtaaacaaaacattgaagatgcgttcataattttgtggctccagaccatgaacatggacattctgaagtgctcttggaggatgtggaacatctgaaggtcaagcaggaaccaacagacatacagcttcagcctatggtgacacagctcagatatgaatctttttgcctccaccaatttcaagaacaagatggtgaaagtatacctgagaaccaggagttggcatcaaagcaagaaatcttaaaagaaatggaacatttgggggatagcaaactccaaagagatgtatctttggattctaagtacagagaaacttgtaaacgagacagcaaggcagaaaagcagcaggcacattccactggagagagacgccacaggtgcaatgaatgtgggaaaagcttcactaagagttcagtactcattgagcaccagagaatccacactggggagaagccatatgaatgtgaagaatgtgggaaggccttcagccggaggtcaagcctgaatgaacatcggcggagccacactggagagaaaccctatcaatgtaaggagtgtgggaaagccttcagtgccagcaatggcctcactcgacacagaagaatccacacaggggaaaaaccatatgaatgcaaagtgtgtgggaaggctttcctcctcagctcatgccttgttcagcatcagaggatacacactggagagaagcgctatcagtgtcgtgagtgtggcaaagccttcattcagaatgcagggcttttccagcatctccgagtccacactggtgagaaaccctatcagtgcagtcagtgcagtaaactctttagtaagcggacacttcttaagaaacatcagaaaatccacactggagagagaccataagggtgatgagtttgggaaagccttcagtcatcattgcaaccttattaggcattttagaatccatactgttccagcagaactggactaattctgtggaccctcagacccctaaatggggccgtcttggaaagtaagattttcaagtggcttattctgttcttataaaatttattttgtattgcattgaaccacttgtctacaaaccaggtgttggtgtctcctgtgtggatgactgtgattgtagggggttgctgggtggccttcttattccctagcctttggtccatttcttatgatttcctttaaaggcaccaaatcttatctggaaataaattgttatggaggggctgtttttgagcaatactgcatattgaacaattctaaaagaccagtatctatgtatacttttaaaaaaaagatttgctaagatcaaaggatattcagaggtgcatctttttctgtaagagtgacattttaaacaaatgtaaggttttggggaataagaatcgtccacattcccacaggaaatcattgctatggtctcccctaggaatgtgatagatagcttctataattatgcagcattatccatagtatgaaacctgtagttttaatggtttagaaatctatgtctcatttcatatctaactcatgtttttgatacgaatcaatatatatgttgatatcatgagttaatatgagtttgacatgaatcatcaacatagtatatacatatcaacataactatgttgatgattcatatcaaattctcaatgcaggtcattactgtaagttttccatttttgttacaaataataagtaagatgatactttaaaatctctgttcttcacaaggtacctctttaattcatagccttttatgtcagcattattcttcttttgggggttggtcagcaactttgagtgccattgcaagcagcatcatttaagtagttttataaagaaaagaagtctgatatcttgggcagcttgctgcttactggggagaccagcatgcttagacacttattgccagggttaaacatatgctctggcaccaagttcaaatctttcctccccatttgtgagctgtgggactttaggcaagttatctaaatgctgctatgctatagtctccccacctgtaaaacagaggatgataccaataccttcctcatagggtacataagattaaataaatacaaacttgtacttaaaatgtagctctcaataaatatgcattatgatttacatacgaaataatagcatttaacaaatgtaggtagaattttaagtatcatgttaaaattaggatacgaaatgcctctgctgacattcttgttactcttttctccacagtcaaaacctgaatcagaatatttcaaaagagaggaaataaaagttcagcttaaaactgttctgccct

SEQ ID NO: 201228 - DNA, 3027 bp, Homo sapiens
  Payload ID: 19717
  Gene Name: zinc finger and SCAN domain containing 32
  Uniprot ID: Q9NX65
  ENST ID: ENST00000304926
  CDS Start-End: 803-2260
gtaatgggcggagcgaatcgcgccgctgacttccggcccggaggctgagggagaatgtttgataggtttatattgtctttttccatcctcttcagacatccttcaaagttgagccctttttttccgctgtgagtctctacacatgtctgacactctcatgtcccacggattacagaaagacattccttgcaggagaacatggcttcccagtgatgtgggaaagatggactctgatctccagggtagaagtggcaaccagagtaagccagttcgttgaagcaaatgatggctgcagtgaagagtaccgaggcacacccatcctcaaacaaggatcccacacagggccagaaatcagccctccagggtaacagccctgactccgaggcctcccgtcagcgcttcaggcagttttgctaccaggaggtaactggcccacatgaagcttttagcaaactctgggaactctgttgtcagtggctgaggccgaagacccactcaaaagaggaaatcctggagctgctggttttggagcagtttctgactatcttgccagaggagatccagacctgggtgagggagcagcatccagaaaacggcgaggaagctgtggctctggttgaggatgtacagagagctcctggacaacagcctggcttgctcctcaggctcccaggaacctgcctcaaaacacaggtctccacgaccaggagacaggtgctgtggtctggacagctgggtcccaggctagagtggtgctattttatcggtagcagcagctccagtgttgttacagggaccagccatgcgtgacaacagagctgtatccctctgtcagcaagaatggatgtgcccaggccctgcacaaagggccctctacaggggtgccacccagaggaaggacagtcacgtctcgctggcaacaggtgtgccctggggctatgaagagaccaagacgctcctggctattcttagtagttctcaattttatggaaaactccagacctgtcagcagaacagccagatctacagggccatggcggaaggactctgggagcagggttttctgcggaccccagaacagtgtcgcaccaagttcaaaagcctacagttgagttaccgcaaagtgaggagaggccgtgtgcctgagccttgtatcttttatgaggaaatgaatgctctttcaggctcctgggcctctgcacctcctatggcaagcgatgctgttcctggccaagaaggaagtgatattgaggctggagagctgaatcaccagaatggggaacccacggaggtagaagatggcactgtggatggtgcagacagggatgaaaaggacttcaggaatcctggccaggaagtcaggaaactagacctgccagtgctgttcccaaacagacttggttttgagttcaagaacgagattaaaaaagaaaatctaaaatgggatgattcagaggaagtagaaataaacaaggctttacagagaaagtccagaggagtttattggcactctgagctacaaaaaggcttggagagtgagccaacatcaagaaggcaatgtagaaattctccaggggagagtgaggagaaaaccccatcccaggagaagatgagtcaccagagtttttgtgccagggacaaagcctgtacacatatcctctgtgggaaaaactgctctcagagtgtgcactctccccacaagccagcgctcaaactggaaaaagtatctcaatgtcctgaatgtgggaaaacctttagccgaagttcttatcttgttcggcatcaaagaatccacacaggcgagaagcctcacaagtgcagtgagtgcgggaagggctttagtgagcgctccaacctcactgcccacctacgaactcacacaggggagaggccctatcagtgtgggcaatgtgggaaaagcttcaaccagagttccagcctcattgtccaccagaggacccataccggggaaaagccttaccagtgcattgtctgtggaaagagattcaacaacagttcccagttcagtgctcaccggcgcatccacactggggagagcccatacaagtgtgcagtgtgtgggaaaatcttcaacaatagctcccacttcagtgcccaccgaaaaacccacactggtgaaaagccttacaggtgttctcactgtgagagaggcttcactaagaactctgccctcacccgtcatcagacagtacacatgaaagcagtactctcatcacaggaaggaagagatgcgttatgagtgtgtcggtaaactgtcagattaagttcctcaggtcagcatgtatgagctttcttctgctgtggagagatctagccagtccctgactttgcaacagacctactgactactggatcttaagacccatgtctaggaccaggagtcagcataaggacgctgacctctcctggctgtgcctgtgactccagagtcctatcttactgtgacttaaagtttgatggagagaaagctgtaggatccataaattctaccaggaaaccagggtcttcctgttcctagcactgagaatgggcacccagtggtccaagaacactttctgggctaacatagtcctcacacagggctgagaaagaaagtgtctcctttcctggaaagcacatgtaaaagttaagggcctgaatctcttctaaaccaataattgacctctaggcacccaccgtaatactgctaccttcagggcagaagacactgctctttgtaacccagccaccaccaaaaagcaaacagaaagaaggaaggatggttaagccattggataatactgaatctgtttccctaagtgacttaaccttagagcaagcacaacatccaggttaattttttgtaagatttctccttttattattgccctcatcatagttcctgattgtctcttaaagtaagtggtttatagacattactatttctgataataatttacaaactactataaacaaatttataaacattactaatttctgatgaaaataaagttgtttctccctcca

SEQ ID NO: 201229 - DNA, 3173 bp, Homo sapiens
  Payload ID: 19717
  Gene Name: zinc finger and SCAN domain containing 32
  Uniprot ID: Q9NX65
  ENST ID: ENST00000396846
  CDS Start-End: 309-2402
agtccggcaattcggcttgcgggcctgcgcaggggcgtgcgtaatgggcggagcgaatcgcgccgctgacttccggcccggaggctgagggagtttgtggagtcgcgagtgctggtgtccgacatccttcaaagttgagccctttttttccgctgtgagtctctacacatgtctgacactctcatgtcccacggattacagaaagacattccttgcaggagaacatggcttcccagtgatgtgggaaagatggactctgatctccagggtagaagtggcaaccagagtaagccagttcgttgaagcaaatgatggctgcagtgaagagtaccgaggcacacccatcctcaaacaaggatcccacacagggccagaaatcagccctccagggtaacagccctgactccgaggcctcccgtcagcgcttcaggcagttttgctaccaggaggtaactggcccacatgaagcttttagcaaactctgggaactctgttgtcagtggctgaggccgaagacccactcaaaagaggaaatcctggagctgctggttttggagcagtttctgactatcttgccagaggagatccagacctgggtgagggagcagcatccagaaaacggcgaggaagctgtggctctggttgaggatgtacagagagctcctggacaacaggttctagattctgagaaggacttgaaagtactcatgaaggagatggcccctttgggagcaaccagagaatcactgagatcccaatggaaacaggaggttcagccagaggaaccgacttttaagggatcacagagctcacaccaaagaccaggggaacagtcagaagcctggcttgctcctcaggctcccaggaacctgcctcaaaacacaggtctccacgaccaggagacaggtgctgtggtctggacagctgggtcccagggaccagccatgcgtgacaacagagctgtatccctctgtcagcaagaatggatgtgcccaggccctgcacaaagggccctctacaggggtgccacccagaggaaggacagtcacgtctcgctggcaacaggtgtgccctggggctatgaagagaccaagacgctcctggctattcttagtagttctcaattttatggaaaactccagacctgtcagcagaacagccagatctacagggccatggcggaaggactctgggagcagggttttctgcggaccccagaacagtgtcgcaccaagttcaaaagcctacagttgagttaccgcaaagtgaggagaggccgtgtgcctgagccttgtatcttttatgaggaaatgaatgctctttcaggctcctgggcctctgcacctcctatggcaagcgatgctgttcctggccaagaaggaagtgatattgaggctggagagctgaatcaccagaatggggaacccacggaggtagaagatggcactgtggatggtgcagacagggatgaaaaggacttcaggaatcctggccaggaagtcaggaaactagacctgccagtgctgttcccaaacagacttggttttgagttcaagaacgagattaaaaaagaaaatctaaaatgggatgattcagaggaagtagaaataaacaaggctttacagagaaagtccagaggagtttattggcactctgagctacaaaaaggcttggagagtgagccaacatcaagaaggcaatgtagaaattctccaggggagagtgaggagaaaaccccatcccaggagaagatgagtcaccagagtttttgtgccagggacaaagcctgtacacatatcctctgtgggaaaaactgctctcagagtgtgcactctccccacaagccagcgctcaaactggaaaaagtatctcaatgtcctgaatgtgggaaaacctttagccgaagttcttatcttgttcggcatcaaagaatccacacaggcgagaagcctcacaagtgcagtgagtgcgggaagggctttagtgagcgctccaacctcactgcccacctacgaactcacacaggggagaggccctatcagtgtgggcaatgtgggaaaagcttcaaccagagttccagcctcattgtccaccagaggacccataccggggaaaagccttaccagtgcattgtctgtggaaagagattcaacaacagttcccagttcagtgctcaccggcgcatccacactggggagagcccatacaagtgtgcagtgtgtgggaaaatcttcaacaatagctcccacttcagtgcccaccgaaaaacccacactggtgaaaagccttacaggtgttctcactgtgagagaggcttcactaagaactctgccctcacccgtcatcagacagtacacatgaaagcagtactctcatcacaggaaggaagagatgcgttatgagtgtgtcggtaaactgtcagattaagttcctcaggtcagcatgtatgagctttcttctgctgtggagagatctagccagtccctgactttgcaacagacctactgactactggatcttaagacccatgtctaggaccaggagtcagcataaggacgctgacctctcctggctgtgcctgtgactccagagtcctatcttactgtgacttaaagtttgatggagagaaagctgtaggatccataaattctaccaggaaaccagggtcttcctgttcctagcactgagaatgggcacccagtggtccaagaacactttctgggctaacatagtcctcacacagggctgagaaagaaagtgtctcctttcctggaaagcacatgtaaaagttaagggcctgaatctcttctaaaccaataattgacctctaggcacccaccgtaatactgctaccttcagggcagaagacactgctctttgtaacccagccaccaccaaaaagcaaacagaaagaaggaaggatggttaagccattggataatactgaatctgtttccctaagtgacttaaccttagagcaagcacaacatccaggttaattttttgtaagatttctccttttattattgccctcatcatagttcctgattgtctcttaaagtaagtggtttatagacattactatttctgataataatttacaaactactataaacaaatttataaacattactaatttctgatgaaaataaagttgtttctccctccacttc

SEQ ID NO: 201230 - DNA, 3169 bp, Homo sapiens
  Payload ID: 19717
  Gene Name: zinc finger and SCAN domain containing 32
  Uniprot ID: Q9NX65
  ENST ID: ENST00000396852
  CDS Start-End: 309-2402
agtccggcaattcggcttgcgggcctgcgcaggggcgtgcgtaatgggcggagcgaatcgcgccgctgacttccggcccggaggctgagggagtttgtggagtcgcgagtgctggtgtccgacatccttcaaagttgagccctttttttccgctgtgagtctctacacatgtctgacactctcatgtcccacggattacagaaagacattccttgcaggagaacatggcttcccagtgatgtgggaaagatggactctgatctccagggtagaagtggcaaccagagtaagccagttcgttgaagcaaatgatggctgcagtgaagagtaccgaggcacacccatcctcaaacaaggatcccacacagggccagaaatcagccctccagggtaacagccctgactccgaggcctcccgtcagcgcttcaggcagttttgctaccaggaggtaactggcccacatgaagcttttagcaaactctgggaactctgttgtcagtggctgaggccgaagacccactcaaaagaggaaatcctggagctgctggttttggagcagtttctgactatcttgccagaggagatccagacctgggtgagggagcagcatccagaaaacggcgaggaagctgtggctctggttgaggatgtacagagagctcctggacaacaggttctagattctgagaaggacttgaaagtactcatgaaggagatggcccctttgggagcaaccagagaatcactgagatcccaatggaaacaggaggttcagccagaggaaccgacttttaagggatcacagagctcacaccaaagaccaggggaacagtcagaagcctggcttgctcctcaggctcccaggaacctgcctcaaaacacaggtctccacgaccaggagacaggtgctgtggtctggacagctgggtcccagggaccagccatgcgtgacaacagagctgtatccctctgtcagcaagaatggatgtgcccaggccctgcacaaagggccctctacaggggtgccacccagaggaaggacagtcacgtctcgctggcaacaggtgtgccctggggctatgaagagaccaagacgctcctggctattcttagtagttctcaattttatggaaaactccagacctgtcagcagaacagccagatctacagggccatggcggaaggactctgggagcagggttttctgcggaccccagaacagtgtcgcaccaagttcaaaagcctacagttgagttaccgcaaagtgaggagaggccgtgtgcctgagccttgtatcttttatgaggaaatgaatgctctttcaggctcctgggcctctgcacctcctatggcaagcgatgctgttcctggccaagaaggaagtgatattgaggctggagagctgaatcaccagaatggggaacccacggaggtagaagatggcactgtggatggtgcagacagggatgaaaaggacttcaggaatcctggccaggaagtcaggaaactagacctgccagtgctgttcccaaacagacttggttttgagttcaagaacgagattaaaaaagaaaatctaaaatgggatgattcagaggaagtagaaataaacaaggctttacagagaaagtccagaggagtttattggcactctgagctacaaaaaggcttggagagtgagccaacatcaagaaggcaatgtagaaattctccaggggagagtgaggagaaaaccccatcccaggagaagatgagtcaccagagtttttgtgccagggacaaagcctgtacacatatcctctgtgggaaaaactgctctcagagtgtgcactctccccacaagccagcgctcaaactggaaaaagtatctcaatgtcctgaatgtgggaaaacctttagccgaagttcttatcttgttcggcatcaaagaatccacacaggcgagaagcctcacaagtgcagtgagtgcgggaagggctttagtgagcgctccaacctcactgcccacctacgaactcacacaggggagaggccctatcagtgtgggcaatgtgggaaaagcttcaaccagagttccagcctcattgtccaccagaggacccataccggggaaaagccttaccagtgcattgtctgtggaaagagattcaacaacagttcccagttcagtgctcaccggcgcatccacactggggagagcccatacaagtgtgcagtgtgtgggaaaatcttcaacaatagctcccacttcagtgcccaccgaaaaacccacactggtgaaaagccttacaggtgttctcactgtgagagaggcttcactaagaactctgccctcacccgtcatcagacagtacacatgaaagcagtactctcatcacaggaaggaagagatgcgttatgagtgtgtcggtaaactgtcagattaagttcctcaggtcagcatgtatgagctttcttctgctgtggagagatctagccagtccctgactttgcaacagacctactgactactggatcttaagacccatgtctaggaccaggagtcagcataaggacgctgacctctcctggctgtgcctgtgactccagagtcctatcttactgtgacttaaagtttgatggagagaaagctgtaggatccataaattctaccaggaaaccagggtcttcctgttcctagcactgagaatgggcacccagtggtccaagaacactttctgggctaacatagtcctcacacagggctgagaaagaaagtgtctcctttcctggaaagcacatgtaaaagttaagggcctgaatctcttctaaaccaataattgacctctaggcacccaccgtaatactgctaccttcagggcagaagacactgctctttgtaacccagccaccaccaaaaagcaaacagaaagaaggaaggatggttaagccattggataatactgaatctgtttccctaagtgacttaaccttagagcaagcacaacatccaggttaattttttgtaagatttctccttttattattgccctcatcatagttcctgattgtctcttaaagtaagtggtttatagacattactatttctgataataatttacaaactactataaacaaatttataaacattactaatttctgatgaaaataaagttgtttctccctcca

SEQ ID NO: 201231 - DNA, 1746 bp, Homo sapiens
  Payload ID: 19717
  Gene Name: zinc finger and SCAN domain containing 32
  Uniprot ID: Q9NX65
  ENST ID: ENST00000439568
  CDS Start-End: 167-1393
tccggcccggaggctgagggagtttgtggagtcgcgagtgctggtgtccgcaacaggtgtgccctggggctatgaagagaccaagacgctcctggctattcttagtagttctcaattttatggaaaactccagacctgtcagcagaacagccagatctacagggccatggcggaaggactctgggagcagggttttctgcggaccccagaacagtgtcgcaccaagttcaaaagcctacagttgagttaccgcaaagtgaggagaggccgtgtgcctgagccttgtatcttttatgaggaaatgaatgctctttcaggctcctgggcctctgcacctcctatggcaagcgatgctgttcctggccaagaaggaagtgatattgaggctggagagctgaatcaccagaatggggaacccacggaggtagaagatggcactgtggatggtgcagacagggatgaaaaggacttcaggaatcctggccaggaagtcaggaaactagacctgccagtgctgttcccaaacagacttggttttgagttcaagaacgagattaaaaaagaaaatctaaaatgggatgattcagaggaagtagaaataaacaaggctttacagagaaagtccagaggagtttattggcactctgagctacaaaaaggcttggagagtgagccaacatcaagaaggcaatgtagaaattctccaggggagagtgaggagaaaaccccatcccaggagaagatgagtcaccagagtttttgtgccagggacaaagcctgtacacatatcctctgtgggaaaaactgctctcagagtgtgcactctccccacaagccagcgctcaaactggaaaaagtatctcaatgtcctgaatgtgggaaaacctttagccgaagttcttatcttgttcggcatcaaagaatccacacaggcgagaagcctcacaagtgcagtgagtgcgggaagggctttagtgagcgctccaacctcactgcccacctacgaactcacacaggggagaggccctatcagtgtgggcaatgtgggaaaagcttcaaccagagttccagcctcattgtccaccagaggacccataccggggaaaagccttaccagtgcattgtctgtggaaagagattcaacaacagttcccagttcagtgctcaccggcgcatccacactggggagagcccatacaagtgtgcagtgtgtgggaaaatcttcaacaatagctcccacttcagtgcccaccgaaaaacccacactggtgaaaagccttacaggtgttctcactgtgagagaggcttcactaagaactctgccctcacccgtcatcagacagtacacatgaaagcagtactctcatcacaggaaggaagagatgcgttatgagtgtgtcggtaaactgtcagattaagttcctcaggtcagcatgtatgagctttcttctgctgtggagagatctagccagtccctgactttgcaacagacctactgactactggatcttaagacccatgtctaggaccaggagtcagcataaggacgctgacctctcctggctgtgcctgtgactccagagtcctatcttactgtgacttaaagtttgatggagagaaagctgtaggatccataaattctaccaggaaaccagggtcttcctgttcctagcactgagaatgggcacccagtggtccaagaacactttctgggctaacatagtcctcacacagggctgagaaaga

SEQ ID NO: 201232 - DNA, 1267 bp, Homo sapiens
  Payload ID: 19717
  Gene Name: zinc finger and SCAN domain containing 32
  ENST ID: ENST00000422427
  CDS Start-End: 295-942
gcgaatcgcgccgctgacttccggcccggaggctgagggagtttgtggagtcgcgagtgctggtgtccggttctagattctgagaaggacttgaaagtactcatgaaggagatggcccctttgggagcaaccagagaatcactgagatcccaatggaaacaggaggttcagccagaggaaccgacttttaagggatcacagagctcacaccaaagaccaggggaacagtcagaaggctagagtggtgctattttatcggtagcagcagctccagtgttgttacagggaccagccatgcgtgacaacagagctgtatccctctgtcagcaagaatggatgtgcccaggccctgcacaaagggccctctacaggggtgccacccagaggaaggacagtcacgtctcgctggcaacaggtgtgccctggggctatgaagagaccaagacgctcctggctattcttagtagttctcaattttatggaaaactccagacctgtcagcagaacagccagatctacagggccatggcggaaggactctgggagcagggttttctgcggaccccagaacagtgtcgcaccaagttcaaaagcctacagttgagttaccgcaaagtgaggagaggccgtgtgcctgagccttgtatcttttatgaggaaatgaatgctctttcaggctcctgggcctctgcacctcctatggcaagcgatgctgttcctggccaagaaggaagtgatattgaggctggagagctgaatcaccagaatggggaacccacggaggtagaagatggcactgtggatggtgcagacagggatgaaaaggacttcaggaatcctggccaggaagtcaggaaactagacctgccagtgctgttcccaaacagacttggtaagactcccttggctctgatggtcaaaggatggcaaagtccactttagaggccattagcctagcagttgagtaggagctgtcactgatcctggcatcatcatcatcttgatgtgtgaccctatccaagttttggttttcatggagttaaaggttattccccttgcattttacagccctgattttgcatttgccaacctctttcaactaagttcatgtcatcttttcccatggagtttcactatgcattgtcagactgctggttaggcctccagaccaggtccatcttctccctttttctctagcatggccttgcctttcacagcctgagcctatgctggctgggtacttagcaccttgctttcttcctgtttg

SEQ ID NO: 201233 - DNA, 879 bp, Homo sapiens
  Payload ID: 19717
  Gene Name: zinc finger and SCAN domain containing 32
  ENST ID: ENST00000575350
  CDS Start-End: 321-879
gttctagattctgagaaggacttgaaagtactcatgaaggagatggcccctttgggagcaaccagagaatcactgagatcccaatggaaacaggaggttcagccagaggaaccgacttttaagggatcacagagctcacaccaaagaccaggggaacagtcagaagcctggcttgctcctcaggctcccaggaacctgcctcaaaacacaggtctccacgaccaggagacaggtgctgtggtctggacagctgggtcccaggctagagtggtgctattttatcggtagcagcagctccagtgttgttacagggaccagccatgcgtgacaacagagctgtatccctctgtcagcaagaatggatgtgcccaggccctgcacaaagggccctctacaggggtgccacccagaggaaggacagtcacgtctcgctggcaacaggtgtgccctggggctatgaagagaccaagacgctcctggctattcttagtagttctcaattttatggaaaactccagacctgtcagcagaacagccagatctacagggccatggcggaaggactctgggagcagggttttctgcggaccccagaacagtgtcgcaccaagttcaaaagcctacagttgagttaccgcaaagtgaggagaggccgtgtgcctgagccttgtatcttttatgaggaaatgaatgctctttcaggctcctgggcctctgcacctcctatggcaagcgatgctgttcctggccaagaaggaagtgatattgaggctggagagctgaatcaccagaatggggaacccacggaggtagaagatggcactgtggatggtgcagacagggatgaaaaggacttcaggaatcctggccaggaagtca

SEQ ID NO: 201234 - DNA, 2441 bp, Homo sapiens
  Payload ID: 19717
  Gene Name: zinc finger and SCAN domain containing 32
  ENST ID: ENST00000576500
  CDS Start-End: 239-799
ttccggcccggaggctgagggagtttgtggagtcgcgagtgctggtgtccgacatccttcaaagttgagccctttttttccgctgtgagtctctacacatgtctgacactctcatgtcccacggattacagaaagacattccttgcaggagaacatggcttcccagtgatgtgggaaagatggactctgatctccagggtagaagtggcaaccagagtaagccagttcgttgaagcaaatgatggctgcagtgaagagtaccgaggcacacccatcctcaaacaaggatcccacacagggccagaaatcagccctccagggtaacagccctgactccgaggcctcccgtcagcgcttcaggcagttttgctaccaggaggtaactggcccacatgaagcttttagcaaactctgggaactctgttgtcagtggctgaggccgaagacccactcaaaagaggaaatcctggagctgctggttttggagcagtttctgactatcttgccagaggagatccagacctgggtgagggagcagcatccagaaaacggcgaggaagctgtggctctggttgaggatgtacagagagctcctggacaacagcaacaggtgtgccctggggctatgaagagaccaagacgctcctggctattcttagtagttctcaattttatggaaaactccagacctgtcagcagaacagccagatctacagggccatggcggaaggactctgggagcagggttttctgcggaccccagaacagtgtcgcaccaagttcaaaagcctacagttgagttaccgcaaagtgaggagaggccgtgtgcctgagccttgtatcttttatgaggaaatgaatgctctttcaggctcctgggcctctgcacctcctatggcaagcgatgctgttcctggccaagaaggaagtgatattgaggctggagagctgaatcaccagaatggggaacccacggaggtagaagatggcactgtggatggtgcagacagggatgaaaaggacttcaggaatcctggccaggaagtcaggaaactagacctgccagtgctgttcccaaacagacttggttttgagttcaagaacgagattaaaaaagaaaatctaaaatgggatgattcagaggaagtagaaataaacaaggctttacagagaaagtccagaggagtttattggcactctgagctacaaaaaggcttggagagtgagccaacatcaagaaggcaatgtagaaattctccaggggagagtgaggagaaaaccccatcccaggagaagatgagtcaccagagtttttgtgccagggacaaagcctgtacacatatcctctgtgggaaaaactgctctcagagtgtgcactctccccacaagccagcgctcaaactggaaaaagtatctcaatgtcctgaatgtgggaaaacctttagccgaagttcttatcttgttcggcatcaaagaatccacacaggcgagaagcctcacaagtgcagtgagtgcgggaagggctttagtgagcgctccaacctcactgcccacctacgaactcacacaggggagaggccctatcagtgtgggcaatgtgggaaaagcttcaaccagagttccagcctcattgtccaccagaggacccataccggggaaaagccttaccagtgcattgtctgtggaaagagattcaacaacagttcccagttcagtgctcaccggcgcatccacactggggagagcccatacaagtgtgcagtgtgtgggaaaatcttcaacaatagctcccacttcagtgcccaccgaaaaacccacactggtgaaaagccttacaggtgttctcactgtgagagaggcttcactaagaactctgccctcacccgtcatcagacagtacacatgaaagcagtactctcatcacaggaaggaagagatgcgttatgagtgtgtcggtaaactgtcagattaagttcctcaggtcagcatgtatgagctttcttctgctgtggagagatctagccagtccctgactttgcaacagacctactgactactggatcttaagacccatgtctaggaccaggagtcagcataaggacgctgacctctcctggctgtgcctgtgactccagagtcctatcttactgtgacttaaagtttgatggagagaaagctgtaggatccataaattctaccaggaaaccagggtcttcctgttcctagcactgagaatgggcacccagtggtccaagaacactttctgggctaacatagtcctcacacagggctgagaaagaaagtgtctcctttcctggaaagcacatgtaaaagttaagggcctgaatctcttctaaaccaataattgacctctaggcacccaccgtaatactgctaccttcagggcagaagacactgctctttgtaacccagccaccacc

SEQ ID NO: 201235 - DNA, 2180 bp, Homo sapiens
  Payload ID: 19717
  Gene Name: zinc finger and SCAN domain containing 32
  ENST ID: ENST00000574940
  CDS Start-End: 189-1472
gacatccttcaaagttgagccctttttttccgctgtgagtctctacacatgtctgacactctcatgtcccacggattacagaaagacattccttgcaggagaacatggcttcccagtgatgtgggaaagatggactctgatctccagggtagaagtggcaaccagagtaagccagttcgttgaagcaaatgatggctgcagtgaagagtaccgaggcacacccatcctcaaacaaggatcccacacagggccagaaatcagccctccagggtaacagccctgactccgaggcctcccgtcagcgcttcaggcagttttgctaccaggaggtaactggcccacatgaagcttttagcaaactctgggaactctgttgtcagtggctgaggccgaagacccactcaaaagaggaaatcctggagctgctggttttggagcagtttctgactatcttgccagaggagatccagacctgggtgagggagcagcatccagaaaacggcgaggaagctgtggctctggttgaggatgtacagagagctcctggacaacaggttctagattctgagaaggacttgaaagtactcatgaaggagatggcccctttgggagcaaccagagaatcactgagatcccaatggaaacaggaggttcagccagaggaaccgacttttaagggatcacagagctcacaccaaagaccaggggaacagtcagaagcctggcttgctcctcaggctcccaggaacctgcctcaaaacacaggtctccacgaccaggagacaggtgctgtggtctggacagctgggtcccagggaccagccatgcgtgacaacagagctgtatccctctgtcagcaagaatggatgtgcccaggccctgcacaaagggccctctacaggggtgccacccagaggaaggacagtcacgtctcgctggcaacaggtgtgccctggggctatgaagagaccaagacgctcctggctattcttagtagttctcaattttatggaaaactccagacctgtcagcagaacagccagatctacagggccatggcggaaggactctgggagcagggttttctgcggaccccagaacagtgtcgcaccaagttcaaaagcctacagttgagttaccgcaaagtgaggagaggccgtgtgcctgagccttgtatcttttatgaggaaatgaatgctctttcaggctcctgggcctctgcacctcctatggcaagcgatgctgttcctggccaagaaggaagtgatattgaggctggagagctgaatcaccagaatggggaacccacggaggtagaagatggcactgtggatggtgcagacagggatgaaaaggacttcaggaatcctggccaggaagtcaggaaactagacctgccagtgctgttcccaaacagacttggtaagactcccttggctctgatggtcaaaggatggcaaagtccactttagaggccattagcctagcagttgagtaggagctgtcactgatcctggcatcatcatcatcttgatgtgtgaccctatccaagttttggttttcatggagttaaaggttattccccttgcattttacagccctgattttgcatttgccaacctctttcaactaagttcatgtcatcttttcccatggagtttcactatgcattgtcagactgctggttaggcctccagaccaggtccatcttctccctttttctctagcatggccttgcctttcacagcctgagcctatgctggctgggtacttagcaccttgctttcttcctgtttgagctggccaagcccagggttgccttttgttattctgctgctagaagttagaacattcaagaattgagggtacacctataaacagactggcagatgatatagtgcttaatgtcttgcctcagtttgtcattgtgtcagaacatccgaaaaaagataggagaaaagttggagtttagggcataattttcctgtaataatttggagctcaaaaatattacaatgagaaaataaaaagctattaattagcaggagacttaatcacatgaagaatttcaattagatatttcttctacgtagtatagttataactttgcattccattgttttccttctctatagtccattgtatttctgtggggtttttttttttcaggttttgagttc

SEQ ID NO: 201236 - DNA, 668 bp, Homo sapiens
  Payload ID: 19717
  Gene Name: zinc finger and SCAN domain containing 32
  ENST ID: ENST00000573830
  CDS Start-End: 162-578
cccggaggctgagggagtttgtggagtcgcgagtgctggtgtccgcaacaggtgtgccctggggctatgaagagaccaagacgctcctggctattcttagtagttctcaattttatggaaaactccagacctgtcagcagaacagccagatctacagggccatggcggaaggactctgggagcagggttttctgcggaccccagaacagtgtcgcaccaagttcaaaagcctacagttgagttaccgcaaagtgaggagaggccgtgtgcctgagccttgtatcttttatgaggaaatgaatgctctttcaggctcctgggcctctgcacctcctatggcaagcgatgctgttcctggccaagaaggaagtgatattgaggctggagagctgaatcaccagaatggggaacccacggaggtagaagatggcactgtggatggtgcagacagggatgaaaaggacttcaggaatcctggccaggaagtcaggaaactagacctgccagtgctgttcccaaacagacttggtaagactcccttggctctgatggtcaaaggatggcaaagtccactttagaggccattagcctagcagttgagtaggagctgtcactgatcctggcatcatcatcatcttgatgtgtgaccctatccaagttttggtttt

SEQ ID NO: 201237 - DNA, 1482 bp, Homo sapiens
  Payload ID: 19717
  Gene Name: zinc finger and SCAN domain containing 32
  ENST ID: ENST00000573327
  CDS Start-End: 208-1482
gtcgcgagtgctggtgtccgacatccttcaaagttgagccctttttttccgctgtgagtctctacacatgtctgacactctcatgtcccacggattacagaaagacattccttgcaggagaacatggcttcccagtgatgtgggaaagatggactctgatctccagggtagaagtggcaaccagagtaagccagttcgttgaagcaaatgatggctgcagtgaagagtaccgaggcacacccatcctcaaacaaggatcccacacagggccagaaatcagccctccagggtaacagccctgactccgaggcctcccgtcagcgcttcaggcagttttgctaccaggaggtaactggcccacatgaagcttttagcaaactctgggaactctgttgtcagtggctgaggccgaagacccactcaaaagaggaaatcctggagctgctggttttggagcagtttctgactatcttgccagaggagatccagacctgggtgagggagcagcatccagaaaacggcgaggaagctgtggctctggttgaggatgtacagagagctcctggacaacaggttctagattctgagaaggacttgaaagtactcatgaaggagatggcccctttgggagcaaccagagaatcactgagatcccaatggaaacaggaggttcagccagaggaaccgacttttaagggatcacagagctcacaccaaagaccaggggaacagtcagaagcctggcttgctcctcaggctcccaggaacctgcctcaaaacacaggtctccacgaccaggagacaggtgctgtggtctggacagctgggtcccagggaccagccatgcgtgacaacagagctgtatccctctgtcagcaagaatggatgtgcccaggccctgcacaaagggccctctacaggggtgccacccagaggaaggacagtcacgtctcgctggcaacaggtgtgccctggggctatgaagagaccaagacgctcctggctattcttagtagttctcaattttatggaaaactccagacctgtcagcagaacagccagatctacagggccatggcggaaggactctgggagcagggttttctgcggaccccagaacagtgtcgcaccaagttcaaaagcctacagttgagttaccgcaaagtgaggagaggccgtgtgcctgagccttgtatcttttatgaggaaatgaatgctctttcaggctcctgggcctctgcacctcctatggcaagcgatgctgttcctggccaagaaggaagtgatattgaggctggagagctgaatcaccagaatggggaacccacggaggtagaagatggcactgtggatggtgcagacagggatgaaaaggacttcaggaatcctggccaggaagtcaggaaactagacctgccagtgctgttcccaaacagacttggttttgagttcaagaacgagattaaaaaagaaaatctaaaa

SEQ ID NO: 201238 - DNA, 841 bp, Homo sapiens
  Payload ID: 19717
  Gene Name: zinc finger and SCAN domain containing 32
  ENST ID: ENST00000573719
  CDS Start-End: 189-841
gacatccttcaaagttgagccctttttttccgctgtgagtctctacacatgtctgacactctcatgtcccacggattacagaaagacattccttgcaggagaacatggcttcccagtgatgtgggaaagatggactctgatctccagggtagaagtggcaaccagagtaagccagttcgttgaagcaaatgatggctgcagtgaagagtaccgaggcacacccatcctcaaacaaggatcccacacagggccagaaatcagccctccagggtaacagccctgactccgaggcctcccgtcagcgcttcaggcagttttgctaccaggaggtaactggcccacatgaagcttttagcaaactctgggaactctgttgtcagtggctgaggccgaagacccactcaaaagaggaaatcctggagctgctggttttggagcagtttctgactatcttgccagaggagatccagacctgggtgagggagcagcatccagaaaacggcgaggaagctgtggctctggttgaggatgtacagagagctcctggacaacaggttctagattctgagaaggacttgaaagtactcatgaaggagatggcccctttgggagcaaccagagaatcactgagatcccaatggaaacaggaggttcagccagaggaaccgacttttaagggatcacagagctcacaccaaagaccaggggaacagtcagaagcaacaggtgtgccctggggctatgaagagaccaagacgctcctggctattcttagtagttctcaattttatggaaaactccagacctgtcagcagaacagccagatctacagggccatggc

SEQ ID NO: 201239 - DNA, 906 bp, Homo sapiens
  Payload ID: 19717
  Gene Name: zinc finger and SCAN domain containing 32
  ENST ID: ENST00000571906
  CDS Start-End: 220-906
ggagtttgtggagtcgcgagtgctggtgtccgacatccttcaaagttgagccctttttttccgctgtgagtctctacacatgtctgacactctcatgtcccacggattacagaaagacattccttgcaggagaacatggcttcccagtgatgtgggaaagatggactctgatctccagggtagaagtggcaaccagagtaagccagttcgttgaagcaaatgatggctgcagtgaagagtaccgaggcacacccatcctcaaacaaggatcccacacagggccagaaatcagccctccagggtaacagccctgactccgaggcctcccgtcagcgcttcaggcagttttgctaccaggaggtaactggcccacatgaagcttttagcaaactctgggaactctgttgtcagtggctgaggccgaagacccactcaaaagaggaaatcctggagctgctggttttggagcagtttctgactatcttgccagaggagatccagacctgggtgagggagcagcatccagaaaacggcgaggaagctgtggctctggttgaggatgtacagagagctcctggacaacagcctggcttgctcctcaggctcccaggaacctgcctcaaaacacaggtctccacgaccaggagacaggtgctgtggtctggacagctgggtcccagggaccagccatgcgtgacaacagagctgtatccctctgtcagcaagaatggatgtgcccaggccctgcacaaagggccctctacaggggtgccacccagaggaaggacagtcacgtctcgctggcaacaggtgtgccctggggctatgaagagaccaagacgctcctggctattcttagtagttctcaattttatggaaaactccagacctgtcagcagaacagcc

SEQ ID NO: 201240 - DNA, 2788 bp, Homo sapiens
  Payload ID: 19717
  Gene Name: zinc finger and SCAN domain containing 32
  Uniprot ID: Q9NX65
  ENST ID: ENST00000618425
  CDS Start-End: 791-2017
agtccggcaattcggcttgcgggcctgcgcaggggcgtgcgtaatgggcggagcgaatcgcgccgctgacttccggcccggaggctgagggagtttgtggagtcgcgagtgctggtgtccgacatccttcaaagttgagccctttttttccgctgtgagtctctacacatgtctgacactctcatgtcccacggattacagaaagacattccttgcaggagaacatggcttcccagtgatgtgggaaagatggactctgatctccagggtagaagtggcaaccagagtaagccagttcgttgaagcaaatgatggctgcagtgaagagtaccgaggcacacccatcctcaaacaaggatcccacacagggccagaaatcagccctccagggtaacagccctgactccgaggcctcccgtcagcgcttcaggcagttttgctaccaggaggtaactggcccacatgaagcttttagcaaactctgggaactctgttgtcagtggctgaggccgaagacccactcaaaagaggaaatcctggagctgctggttttggagcagtttctgactatcttgccagaggagatccagacctgggtgagggagcagcatccagaaaacggcgaggaagctgtggctctggttgaggatgtacagagagctcctggacaacagcaacaggtgtgccctggggctatgaagagaccaagacgctcctggctattcttagtagttctcaattttatggaaaactccagacctgtcagcagaacagccagatctacagggccatggcggaaggactctgggagcagggttttctgcggaccccagaacagtgtcgcaccaagttcaaaagcctacagttgagttaccgcaaagtgaggagaggccgtgtgcctgagccttgtatcttttatgaggaaatgaatgctctttcaggctcctgggcctctgcacctcctatggcaagcgatgctgttcctggccaagaaggaagtgatattgaggctggagagctgaatcaccagaatggggaacccacggaggtagaagatggcactgtggatggtgcagacagggatgaaaaggacttcaggaatcctggccaggaagtcaggaaactagacctgccagtgctgttcccaaacagacttggttttgagttcaagaacgagattaaaaaagaaaatctaaaatgggatgattcagaggaagtagaaataaacaaggctttacagagaaagtccagaggagtttattggcactctgagctacaaaaaggcttggagagtgagccaacatcaagaaggcaatgtagaaattctccaggggagagtgaggagaaaaccccatcccaggagaagatgagtcaccagagtttttgtgccagggacaaagcctgtacacatatcctctgtgggaaaaactgctctcagagtgtgcactctccccacaagccagcgctcaaactggaaaaagtatctcaatgtcctgaatgtgggaaaacctttagccgaagttcttatcttgttcggcatcaaagaatccacacaggcgagaagcctcacaagtgcagtgagtgcgggaagggctttagtgagcgctccaacctcactgcccacctacgaactcacacaggggagaggccctatcagtgtgggcaatgtgggaaaagcttcaaccagagttccagcctcattgtccaccagaggacccataccggggaaaagccttaccagtgcattgtctgtggaaagagattcaacaacagttcccagttcagtgctcaccggcgcatccacactggggagagcccatacaagtgtgcagtgtgtgggaaaatcttcaacaatagctcccacttcagtgcccaccgaaaaacccacactggtgaaaagccttacaggtgttctcactgtgagagaggcttcactaagaactctgccctcacccgtcatcagacagtacacatgaaagcagtactctcatcacaggaaggaagagatgcgttatgagtgtgtcggtaaactgtcagattaagttcctcaggtcagcatgtatgagctttcttctgctgtggagagatctagccagtccctgactttgcaacagacctactgactactggatcttaagacccatgtctaggaccaggagtcagcataaggacgctgacctctcctggctgtgcctgtgactccagagtcctatcttactgtgacttaaagtttgatggagagaaagctgtaggatccataaattctaccaggaaaccagggtcttcctgttcctagcactgagaatgggcacccagtggtccaagaacactttctgggctaacatagtcctcacacagggctgagaaagaaagtgtctcctttcctggaaagcacatgtaaaagttaagggcctgaatctcttctaaaccaataattgacctctaggcacccaccgtaatactgctaccttcagggcagaagacactgctctttgtaacccagccaccaccaaaaagcaaacagaaagaaggaaggatggttaagccattggataatactgaatctgtttccctaagtgacttaaccttagagcaagcacaacatccaggttaattttttgtaagatttctccttttattattgccctcatcatagttcctgattgtctcttaaagtaagtggtttatagacattactatttctgataataatttacaaactactataaacaaatttataaacattactaatttctgatgaaaataaagttgtttctccctccacttc

SEQ ID NO: 201241 - DNA, 2246 bp, Homo sapiens
  Payload ID: 19718
  Gene Name: zinc finger and SCAN domain containing 4
  Uniprot ID: Q8NAM6
  ENST ID: ENST00000318203
  CDS Start-End: 698-1999
ccttgtaattcataaatctctgaaaacttaaaagtttgagcaaaagtttgtcatgtttctatgagtaatttataataaaacttgatcagaatttgtgagactaacgtttgtctttatattttccttttttttttttttttttttgagacacagtctcgctctgtcgtccaggctggagtgccgtggcgtaatctcggctcactgcaacctctgcctcctggattcaaacaattcttctgcctcagcctcctgagtagctgggattacaggaccagtgatggtatagaacactgtattagagacatggagctggggctggatgaagattccatcagtaattcaatcaacagacaagtgttatccaatcacgtctttaaatcaatcactgacatggagctggggctggatgaagattccatcagtaattcaatcaacagacaagtgttatccaatcacgtctttaaatcaatcactgatcccagcccctataaaagggagcagccttaggaggcacatcagataaacccagtgtggaaagctagtcacacatcagctcagtgttcggcccgggattacccagtcaaccaaggagcttgcagttttaaagaatccaccaactgttgaaacaaatccctagagacacaaggcaagagactgaatcatcaaagtaaagtctctctgagaattattgctaagaatggctttagatctaagaaccatatttcagtgtgaaccatccgagaataatcttggatcagaaaattcagcgtttcaacaaagccaaggacctgctgttcagagagaagaagggatttctgagttctcaagaatggtgctcaattcatttcaagacagcaataattcatatgcaaggcaggaattgcaaagactttataggatctttcactcatggctgcaaccagaaaagcacagcaaggatgaaattatttctctattagtcctggagcagtttatgattggtggccactgcaatgacaaagccagtgtgaaagagaaatggaaatcaagtggcaaaaacttggagagattcatagaagacctgactgatgacagcataaatccacctgccttagtccacgtccacatgcagggacaggaagctctcttttctgaggatatgcccttaagagatgtcattgttcatctcacaaaacaagtgaatgcccaaaccacaagagaagcaaacatggggacaccctcccagacttcccaagatacttccttagaaacaggacaaggatatgaagatgaacaagatggctggaacagttcttcgaaaactactcgagtaaatgaaaatattactaatcaaggcaatcaaatagtttccctaatcatcatccaggaagagaacggtcctaggcctgaagagggaggtgtttcttctgacaacccatacaactcaaaaagagcagagctagtcactgctagatctcaggaagggtccataaatggaatcactttccaaggtgtccctatggtgatgggagcagggtgtatctctcaaccagagcagtcctcccctgagtctgcccttacccaccagagcaatgagggaaattccacatgtgaggtacatcagaaaggatcccatggagtccaaaaatcatacaaatgtgaagaatgccccaaggtctttaagtatctctgtcacttattagctcaccagagaagacacaggaatgagaggccatttgtttgtcccgagtgtcaaaaaggcttcttccagatatcagacctacgggtgcatcagataattcacacaggaaagaagcctttcacatgcagcatgtgtaaaaagtccttcagccacaaaaccaacctgcggtctcatgagagaatccacacaggagaaaagccttatacatgtcccttttgtaagacaagctaccgccagtcatccacataccaccgccatatgaggactcatgagaaaattaccctgccaagtgttccctccacaccagaagcttcctaagctgctggtctgataatgtgtataaatatgtatgcaagtatgtatattcctatagtatttatctacttaggatataagatataatctcctgattatgctttcaatttattgtcttgcttcattaaaatgtaaggctaaggagagcatggaatttgtcagttttgttcactaaagtattccaagtggttgggaaagtggaacatttccaagaaccaataaatttctgttgaataaatgaatgaatcca

SEQ ID NO: 201242 - DNA, 1979 bp, Homo sapiens
  Payload ID: 19718
  Gene Name: zinc finger and SCAN domain containing 4
  Uniprot ID: Q8NAM6
  ENST ID: ENST00000612521
  CDS Start-End: 432-1733
caggaccagtgatggtatagaacactgtattagagacatggagctggggctggatgaagattccatcagtaattcaatcaacagacaagtgttatccaatcacgtctttaaatcaatcactgacatggagctggggctggatgaagattccatcagtaattcaatcaacagacaagtgttatccaatcacgtctttaaatcaatcactgatcccagcccctataaaagggagcagccttaggaggcacatcagataaacccagtgtggaaagctagtcacacatcagctcagtgttcggcccgggattacccagtcaaccaaggagcttgcagttttaaagaatccaccaactgttgaaacaaatccctagagacacaaggcaagagactgaatcatcaaagtaaagtctctctgagaattattgctaagaatggctttagatctaagaaccatatttcagtgtgaaccatccgagaataatcttggatcagaaaattcagcgtttcaacaaagccaaggacctgctgttcagagagaagaagggatttctgagttctcaagaatggtgctcaattcatttcaagacagcaataattcatatgcaaggcaggaattgcaaagactttataggatctttcactcatggctgcaaccagaaaagcacagcaaggatgaaattatttctctattagtcctggagcagtttatgattggtggccactgcaatgacaaagccagtgtgaaagagaaatggaaatcaagtggcaaaaacttggagagattcatagaagacctgactgatgacagcataaatccacctgccttagtccacgtccacatgcagggacaggaagctctcttttctgaggatatgcccttaagagatgtcattgttcatctcacaaaacaagtgaatgcccaaaccacaagagaagcaaacatggggacaccctcccagacttcccaagatacttccttagaaacaggacaaggatatgaagatgaacaagatggctggaacagttcttcgaaaactactcgagtaaatgaaaatattactaatcaaggcaatcaaatagtttccctaatcatcatccaggaagagaacggtcctaggcctgaagagggaggtgtttcttctgacaacccatacaactcaaaaagagcagagctagtcactgctagatctcaggaagggtccataaatggaatcactttccaaggtgtccctatggtgatgggagcagggtgtatctctcaaccagagcagtcctcccctgagtctgcccttacccaccagagcaatgagggaaattccacatgtgaggtacatcagaaaggatcccatggagtccaaaaatcatacaaatgtgaagaatgccccaaggtctttaagtatctctgtcacttattagctcaccagagaagacacaggaatgagaggccatttgtttgtcccgagtgtcaaaaaggcttcttccagatatcagacctacgggtgcatcagataattcacacaggaaagaagcctttcacatgcagcatgtgtaaaaagtccttcagccacaaaaccaacctgcggtctcatgagagaatccacacaggagaaaagccttatacatgtcccttttgtaagacaagctaccgccagtcatccacataccaccgccatatgaggactcatgagaaaattaccctgccaagtgttccctccacaccagaagcttcctaagctgctggtctgataatgtgtataaatatgtatgcaagtatgtatattcctatagtatttatctacttaggatataagatataatctcctgattatgctttcaatttattgtcttgcttcattaaaatgtaaggctaaggagagcatggaatttgtcagttttgttcactaaagtattccaagtggttgggaaagtggaacatttccaagaaccaataaatttctgttgaataaatgaatgaatcc

SEQ ID NO: 201243 - DNA, 3562 bp, Homo sapiens
  Payload ID: 19719
  Gene Name: zinc finger and SCAN domain containing 5A
  Uniprot ID: Q9BUG6
  ENST ID: ENST00000391713
  CDS Start-End: 167-1657
cccagaccgagaaggtcggaggcagaagccgggaaggagacttctgaatgaacagtgaatctattactgaggaaaaccagaggaagcctgtgtagataggtatcaattagataccagctactggaagagctttctcagagactgattaaaaaattctccactagatatggctgcaaattgcacatcctcatggagtctaggagaatcctgcaacagacctgggttggagctgccacggtctatggcatcctcagaaactcaacttggaaatcacgacgtggaccctgagatttctcacgtgaacttcaggatgttcagctgcccgaaggagtcggaccccatccaggctctgaggaaactcactgagctgtgccatctgtggctgaggcccgacctccacaccaaagagcagatcctggacatgctggtgatggagcagttcatgatctccatgccccaggagctccaggtcttagtcatgatgaacggtgtgcagagctgcaaagacctggaggacctgctacgaaataacagaagacccaagaaatggtctgtggtcaccttccacggaaaggaatatattgtgcaggactcagatatcgagatggctgaagccccctccagtgtcagagatgatctgaaagacgtgtccagccaacgggcctcctcggtgaaccagatgcgtccaggggaaggccaggcccaccgagagctgcagatcctgcccagggtccctgcattgtccaggaggcagggagaggactttctgctacacaagagtattgacgtaacaggtgacccaaagtctctgagacccaagcagaccttggagaaggatctgaaggaaaacagggaagagaacccaggactgacatccccagagcctcagcttccaaagagtcccacagatctggtgagagcaaaggaggggaaggaccccccaaaaatagcctctgtggaaaatgtggatgctgacacaccttctgcctgcgttgtggagagagaagcttcgactcacagcgggaacagaggagacgctctgaatctgagcagtcccaaaagaagcaaaccagatgcctcctccatttcccaagaagagcctcaaggagaagccacacctgtgggcaacagagaatccccgggacaagctgggatgaattcaattcattccccaggccctgcgagcccagtcagtcacccggatggccaagaagccaaggcactgccgccctttgcatgtgacgtgtgcgagaagaggtttacgtgtaattccaagctagtcatccacaagagatcacacacaggcgagagactctttcaatgtaatctctgtgggaagcgcttcatgcagcttattagcctccaatttcaccagcgaacccacactggcgagaggccctacacgtgtgacgtctgccagaagcagttcacccagaagtcctacttgaagtgtcacaagagaagccacacaggggagaagcccttcgaatgtaaagactgcaagaaagttttcacctacagggggagcctgaaggagcaccagcgcatccactccggagagaaaccctacaaatgttccaagtgtccaagagccttcagtcggctgaaattgttaagacgccaccagaaaacacatccagaagctacttctcagtgattgcataatccggtctatgccttctgcaccaagaagaagtgaatgatatttttcatcaatgttatcagatgacatttgacacatgcaagggcgtctgacacacagagggagtgccctagatatgaattgccaggatgtttgagtaaatatgtgtcctccccactgagctttgttttctgtttcattatgtccattgttttcttataggtttattttggtttgtgttgctgttcttccaataaacgatcatcttattagttttcaatattgtataacggaaaactgagtttcctgattgacatggggttacccactgttttgctgtaaagtacagttgtccaaggagggtggccatataaaatacataatgcctgatgaaatttgagtttcagataaacaattttctttagtatcagcatgttctaaattatttatttatctgaaactcagcttttattgggtatcctgtagagttttcgttttcttttttctttctttctttttttttttttttgagatggcgtctccctctgtcacgcaggctgaggttcagtggcataatcaccgctcactgcagccgcgaccttccaggctcaagcaatcctcccatctaagcctcccgagcagccgagactacaggagcacgccaccaacttggctaatttttgtggtttttgtagagatggaattttgatatgttgcccaggctggtcttgaactccgaagtacaagtgatccaactgcctcggcctccttaagtgctggcattacaggcatgagccgctgtgccctgtattgtttttattagactttattataattatgatattcaaatttttgaaataattttttgtagtgatgggatttcttgttgcccaggctggtgtggggtgagccaccacgcctggctctagactttctttttcagagctgtttaggttcacagggaaattcagtggacagcacagagttcccctagactccctcctcacacaacacagcctctccctgcccagcatccccagcagagtggtgcacctgttccatcagtgaggctgcctggacatatcaccaccacccagagtccatagtgttcattagggctcgctctgggtgttgtacgtgctgtgggtttggacaaaggcctcatgagtacacaccactggagtatcctggggggtattttcactgcccccggaatcctctctgctctgcatatttatctccctgccccagatggtgtattttgtggcctaaatttggcaacctctaaattcccgatttgactcttgaactacagaggcattgggagtctctggtgactagttggtcttagtgatactaccatcccctgaaggcgtggttaatcctcaggtgggtgggccccagactcagcttctgattgagcagaccgggcatggggcctgagagtgtgcattaaaatatataattcattttagaatagctttctaaagtccatggagctccctaatgccccacatggcttcccccattgccaacatggttcattaggatggcacctttgaactgactggagcgatgaactgactggatatattgccgtgatctaaggcccataccttattgaggcctccttagtgtttacacaatgccctcctcttccttcctccccatccaagacaccacattgccttgagttgtcacgtctccctaggatcctcttggtgacaatttctcagattttacttgtttgggattacctgagaatgtacattttaggtggtgctcatgctgctggtcttgggaggacattttatggatggctgattgagctgacgggcagagtcctgcaatctgcagaggtctggaaaggtcccttcccaaataggctggattcatttattaaagactacttttgtaaga

SEQ ID NO: 201244 - DNA, 849 bp, Homo sapiens
  Payload ID: 19719
  Gene Name: zinc finger and SCAN domain containing 5A
  ENST ID: ENST00000593106
  CDS Start-End: 280-849
gccaatgtgaatgcgacaagttcccgatccaggcgtcccgctctccccggccccactcgccaggtcctaccacgatgcctgactcgtttgcggctttgggaccggttgtaggtggcttgaccgtcactagtagacgtttctgagtgtgtcgcggtcaccatggggaggttccctgctcaagctctcttctcttgtctgctgccatgtgagacgtgcctttgaccttctgccatgattgtgaggcctccccagccacgtgaaactgactcagatatcgagatggctgaagccccctccagtgtcagagatgatctgaaagacgtgtccagccaacgggcctcctcggtgaaccagatgcgtccaggggaaggccaggcccaccgagagctgcagatcctgcccagggtccctgcattgtccaggaggcagggagaggactttctgctacacaagagtattgacgtaacaggtgacccaaagtctctgagacccaagcagaccttggagaaggatctgaaggaaaacagggaagagaacccaggactgacatccccagagcctcagcttccaaagagtcccacagatctggtgagagcaaaggaggggaaggaccccccaaaaatagcctctgtggaaaatgtggatgctgacacaccttctgcctgcgttgtggagagagaagcttcgactcacagcgggaacagaggagacgctctgaatctgagcagtcccaaaagaagcaaaccagatgcctcctccatttcccaagaagagcctcaaggagaagccacacctgtgggcaacagagaatccccgggacaagctgggatgaattcaattcattcccca

SEQ ID NO: 201245 - DNA, 1542 bp, Homo sapiens
  Payload ID: 19719
  Gene Name: zinc finger and SCAN domain containing 5A
  ENST ID: ENST00000587492
  CDS Start-End: 402-1454
attctagttcagccctctgagcaagggctgggagttgcgacccccgccccggatccggaagtggtcgccgaggcctcctagcagccaatgtgaatgcgacaagttcccgatccaggcgtcccgctctccccggccccactcgccaggtcctaccacgatgcctgactcgtttgcggctttgggaccggttgtaggtggcttgaccgtcactagtagacgtttctgagtgtgtcgcggtcaccatggggaggttccctgctcaagctctcttctcttgtctgctgccatgtgagacgtgcctttgaccttctgccatgattgtgaggcctccccagccacgtgaaacttctgtggtcaccttccacggaaaggaatatattgtgcaggactcagatatcgagatggctgaagccccctccagtgtcagagatgatctgaaagacgtgtccagccaacgggcctcctcggtgaaccagatgcgtccaggggaaggccaggcccaccgagagctgcagatcctgcccagggtccctgcattgtccaggaggcagggagaggactttctgctacacaagagtattgacgtaacaggtgacccaaagtctctgagacccaagcagaccttggagaaggatctgaaggaaaacagggaagagaacccaggactgacatccccagagcctcagcttccaaagagtcccacagatctggtgagagcaaaggaggggaaggaccccccaaaaatagcctctgtggaaaatgtggatgctgacacaccttctgcctgcgttgtggagagagaagcttcgactcacagcgggaacagaggagacgctctgaatctgagcagtcccaaaagaagcaaaccagatgcctcctccatttcccaagaagagcctcaaggagaagccacacctgtgggcaacagagaatccccgggacaagctgggatgaattcaattcattccccaggccctgcgagcccagtcagtcacccggatggccaagaagccaaggcactgccgccctttgcatgtgacgtgtgcgagaagaggtttacgtgtaattccaagctagtcatccacaagagatcacacacaggcgagagactctttcaatgtaatctctgtgggaagcgcttcatgcagcttattagcctccaatttcaccagcgaacccacactggcgagaggccctacacgtgtgacgtctgccagaagcagttcacccagaagtcctacttgaagtgtcacaagagaagccacacaggggagaagcccttcgaatgtaaagactgcaagaaagttttcacctacagggggagcctgaaggagcaccagcgcatccactccggagagaaaccctacaaatgttccaagtgtccaagagccttcagtcggctgaaattgttaagacgccaccagaaaacacatccagaagctacttctcagtgattgcataatccggtctatgccttctgcaccaagaagaagtgaatgatatttttcatcaatgttatcagatgacatttgacacatgcaa

SEQ ID NO: 201246 - DNA, 923 bp, Homo sapiens
  Payload ID: 19719
  Gene Name: zinc finger and SCAN domain containing 5A
  ENST ID: ENST00000592679
  CDS Start-End: 809-923
gacaagttcccgatccaggcgtcccgctctccccggccccactcgccaggtcctaccacgatgcctgactcgtttgcggctttgggaccggttgtaggtggcttgaccgtcactagtagacgtttctgagtgtgtcgcggtcaccatggtaacgactttagcttcccttccgcccttgcggtgacgtcactggcggaggccggactggggtgggttggggagagggagggcgcatgcgcctggggcggggacgtgggaggagggggagattcgtgggaggaccgagcccggggatgggactggaggagtttccgtgaccttgcgggctgtttgtgctgagggacagctttatttaaataataatatgcgtgcaggcgccctgcatgattcctggccgcgtgctttctagtaagtgcgcagagacttttcgcaagaattgattcactcttttttccttccctcccgatttttgattggaaacccagacttcctttcacgcctgtcgccaggttaactaggtcactgtttgctctcaggagcaaccctgcctcccgcagttcgcttggtccttgattacaggggaggttccctgctcaagctctcttctcttgtctgctgccatgtgagacgtgcctttgaccttctgccatgattgtgaggcctccccagccacgtgaaactacttctgaatgaacagtgaatctattactgaggaaaaccagaggaagcctgtgtagataggtatcaattagataccagctactggaagagctttctcagagactgattaaaaaattctccactagatatggctgcaaattgcacatcctcatggagtctaggagaatcctgcaacagacctgggttggagctgccacggtctatggcatcctcagaaactcaacttggaaatcacgacgtgg

SEQ ID NO: 201247 - DNA, 1813 bp, Homo sapiens
  Payload ID: 19719
  Gene Name: zinc finger and SCAN domain containing 5A
  ENST ID: ENST00000592355
  CDS Start-End: 63-1550
caggccggttggagagcgcatcccagaccgagaaggtcggaggcagaagccgggaaggagatatggctgcaaattgcacatcctcatggagtctaggagaatcctgcaacagacctgggttggagctgccacggtctatggcatcctcagaaactcaacttggaaatcacgacgtggaccctgagatttctcacgtgaacttcaggatgttcagctgcccgaaggagtcggaccccatccaggctctgaggaaactcactgagctgtgccatctgtggctgaggcccgacctccacaccaaagagcagatcctggacatgctggtgatggagcagttcatgatctccatgccccaggagctccaggtcttagtcatgatgaacggtgtgcagagctgcaaagacctggaggacctgctacgaaataacagaagacccaagaaatggtctgtggtcaccttccacggaaaggaatatattgtgcaggactcagatatcgagatggctgaagccccctccagtgtcagagatgatctgaaagacgtgtccagccaacgggcctcctcggtgaaccagatgcgtccaggggaaggccaggcccaccgagagctgcagatcctgcccagggtccctgcattgtccaggaggcagggagaggactttctgctacacaagagtattgacgtaacaggtgacccaaagtctctgagacccaagcagaccttggagaaggatctgaaggaaaacagggaagagaacccaggactgacatccccagagcctcagcttccaaagagtcccaatctggtgagagcaaaggaggggaaggaccccccaaaaatagcctctgtggaaaatgtggatgctgacacaccttctgcctgcgttgtggagagagaagcttcgactcacagcgggaacagaggagacgctctgaatctgagcagtcccaaaagaagcaaaccagatgcctcctccatttcccaagaagagcctcaaggagaagccacacctgtgggcaacagagaatccccgggacaagctgggatgaattcaattcattccccaggccctgcgagcccagtcagtcacccggatggccaagaagccaaggcactgccgccctttgcatgtgacgtgtgcgagaagaggtttacgtgtaattccaagctagtcatccacaagagatcacacacaggcgagagactctttcaatgtaatctctgtgggaagcgcttcatgcagcttattagcctccaatttcaccagcgaacccacactggcgagaggccctacacgtgtgacgtctgccagaagcagttcacccagaagtcctacttgaagtgtcacaagagaagccacacaggggagaagcccttcgaatgtaaagactgcaagaaagttttcacctacagggggagcctgaaggagcaccagcgcatccactccggagagaaaccctacaaatgttccaagtgtccaagagccttcagtcggctgaaattgttaagacgccaccagaaaacacatccagaagctacttctcagtgattgcataatccggtctatgccttctgcaccaagaagaagtgaatgatatttttcatcaatgttatcagatgacatttgacacatgcaagggcgtctgacacacagagggagtgccctagatatgaattgccaggatgtttgagtaaatatgtgtcctccccactgagctttgttttctgtttcattatgtccattgttttcttataggtttattttggtttgtgttgctgttcttccaataaacgatcatcttattagttttc

SEQ ID NO: 201248 - DNA, 2450 bp, Homo sapiens
  Payload ID: 19719
  Gene Name: zinc finger and SCAN domain containing 5A
  Uniprot ID: Q9BUG6
  ENST ID: ENST00000587340
  CDS Start-End: 697-2187
aggtctccctggagcccgccgacctgaagcagcggccgcaccgcgtatgcgcccgggtggtttctgggagtaggcgaggactcgcagtgcgcatgtgcagcccccacggccccgctcccagtgaccggaatgcagaggcgtacatggctaagagacgagctacctgggacacaaagatgagaaccacaagcatgagaacatgaggataaatacactttggggaaaaagaaaacagacagaggcagcagagaaggaagacgagaagaagagaaaaagagaagtaggaagaggatgaattcatttcgcttatctggcaaatgtgtaatctgagtaatagagatggtgcaatgctgggccacagagcttgccccaggtccccaagcaaagtcagtggcactgcctggactggaagttcatccccatccattttcacgtgcggagtctcagggctcagtaaagaaccatgattgacggaggtcacacagcaactggtatgacagggacaggtttccggaattccagtgtcttaacaccaaagcctgtagtatttctcagagagaacaacaccactgctcgtgtgtgctcagaagaaagtttagtggtcgtaacatccaatacatccaacctgcagatcaatacacaaagaccctggaggaaggtggggcggtaacttgtccaaatctccaaagaaaagatatggctgcaaattgcacatcctcatggagtctaggagaatcctgcaacagacctgggttggagctgccacggtctatggcatcctcagaaactcaacttggaaatcacgacgtggaccctgagatttctcacgtgaacttcaggatgttcagctgcccgaaggagtcggaccccatccaggctctgaggaaactcactgagctgtgccatctgtggctgaggcccgacctccacaccaaagagcagatcctggacatgctggtgatggagcagttcatgatctccatgccccaggagctccaggtcttagtcatgatgaacggtgtgcagagctgcaaagacctggaggacctgctacgaaataacagaagacccaagaaatggtctgtggtcaccttccacggaaaggaatatattgtgcaggactcagatatcgagatggctgaagccccctccagtgtcagagatgatctgaaagacgtgtccagccaacgggcctcctcggtgaaccagatgcgtccaggggaaggccaggcccaccgagagctgcagatcctgcccagggtccctgcattgtccaggaggcagggagaggactttctgctacacaagagtattgacgtaacaggtgacccaaagtctctgagacccaagcagaccttggagaaggatctgaaggaaaacagggaagagaacccaggactgacatccccagagcctcagcttccaaagagtcccacagatctggtgagagcaaaggaggggaaggaccccccaaaaatagcctctgtggaaaatgtggatgctgacacaccttctgcctgcgttgtggagagagaagcttcgactcacagcgggaacagaggagacgctctgaatctgagcagtcccaaaagaagcaaaccagatgcctcctccatttcccaagaagagcctcaaggagaagccacacctgtgggcaacagagaatccccgggacaagctgggatgaattcaattcattccccaggccctgcgagcccagtcagtcacccggatggccaagaagccaaggcactgccgccctttgcatgtgacgtgtgcgagaagaggtttacgtgtaattccaagctagtcatccacaagagatcacacacaggcgagagactctttcaatgtaatctctgtgggaagcgcttcatgcagcttattagcctccaatttcaccagcgaacccacactggcgagaggccctacacgtgtgacgtctgccagaagcagttcacccagaagtcctacttgaagtgtcacaagagaagccacacaggggagaagcccttcgaatgtaaagactgcaagaaagttttcacctacagggggagcctgaaggagcaccagcgcatccactccggagagaaaccctacaaatgttccaagtgtccaagagccttcagtcggctgaaattgttaagacgccaccagaaaacacatccagaagctacttctcagtgattgcataatccggtctatgccttctgcaccaagaagaagtgaatgatatttttcatcaatgttatcagatgacatttgacacatgcaagggcgtctgacacacagagggagtgccctagatatgaattgccaggatgtttgagtaaatatgtgtcctccccactgagctttgttttctgtttcattatgtccattgttttcttataggtttattttggtttgtgttgctgttcttccaataaacgatcatcttattagttttc

SEQ ID NO: 201249 - DNA, 576 bp, Homo sapiens
  Payload ID: 19719
  Gene Name: zinc finger and SCAN domain containing 5A
  ENST ID: ENST00000588955
  CDS Start-End: 323-576
gaccttgcgggctgtttgtgctgagggacagctttatttaaataataatatgcgtgcaggcgccctgcatgattcctggccgcgtgctttctagggaggttccctgctcaagctctcttctcttgtctgctgccatgtgagacgtgcctttgaccttctgccatgattgtgaggcctccccagccacgtgaaactacttctgaatgaacagtgaatctattactgaggaaaaccagaggaagcctgtgtagataggtatcaattagataccagctactggaagagctttctcagagactgattaaaaaattctccactagatatggctgcaaattgcacatcctcatggagtctaggagaatcctgcaacagacctgggttggagctgccacggtctatggcatcctcagaaactcaacttggaaatcacgacgtggaccctgagatttctcacgtgaacttcaggatgttcagctgcccgaaggagtcggaccccatccaggctctgaggaaactcactgagctgtgccatctgtggctgaggcccgacctccacaccaaagagcagatcctgga

SEQ ID NO: 201250 - DNA, 576 bp, Homo sapiens
  Payload ID: 19719
  Gene Name: zinc finger and SCAN domain containing 5A
  ENST ID: ENST00000588442
  CDS Start-End: 450-576
aatgtgaatgcgacaagttcccgatccaggcgtcccgctctccccggccccactcgccaggtcctaccacgatgcctgactcgtttgcggctttgggaccggttgtaggtggcttgaccgtcactagtagacgtttctgagtgtgtcgcggtcaccatggtaacgactttagcttcccttccgcccttgcggtgacgtcactggcggaggccggactggggggaggttccctgctcaagctctcttctcttgtctgctgccatgtgagacgtgcctttgaccttctgccatgattgtgaggcctccccagccacgtgaaactacttctgaatgaacagtgaatctattactgaggaaaaccagaggaagcctgtgtagataggtatcaattagataccagctactggaagagctttctcagagactgattaaaaaattctccactagatatggctgcaaattgcacatcctcatggagtctaggagaatcctgcaacagacctgggttggagctgccacggtctatggcatcctcagaaactcaacttggaaatcacgacgtggaccctgagattt

SEQ ID NO: 201251 - DNA, 589 bp, Homo sapiens
  Payload ID: 19719
  Gene Name: zinc finger and SCAN domain containing 5A
  ENST ID: ENST00000592509
  CDS Start-End: 274-589
actcgccaggtcctaccacgatgcctgactcgtttgcggctttgggaccggttgtaggtggcttgaccgtcactagtagacgtttctgagtgtgtcgcggtcaccatggtaacgactttagcttcccttccgcccttgcggtgacgtcactggcggaggccggactggggggaggttccctgctcaagctctcttctcttgtctgctgccatgtgagacgtgcctttgaccttctgccatgattgtgaggcctccccagccacgtgaaactatatggctgcaaattgcacatcctcatggagtctaggagaatcctgcaacagacctgggttggagctgccacggtctatggcatcctcagaaactcaacttggaaatcacgacgtggaccctgagatttctcacgtgaacttcaggatgttcagctgcccgaaggagtcggaccccatccaggctctgaggaaactcactgagctgtgccatctgtggctgaggcccgacctccacaccaaagagcagatcctggacatgctggtgatggagcagttcatgatctccatgccccaggagctccaggtcttagtcatga

SEQ ID NO: 201252 - DNA, 1626 bp, Homo sapiens
  Payload ID: 19720
  Gene Name: zinc finger and SCAN domain containing 5B
  Uniprot ID: A6NJL1
  ENST ID: ENST00000358992
  CDS Start-End: 1-1488
atggctgcaaattggacactctcatggggtcagggaggaccctgcaacagccctgggtcagacactccacggtctgtggcgtccccagaaactcaacttggaaatcacgacaggaaccctgagacttggcacatgaatttcaggatgttcagctgcccagaggagtcggaccccatccaggctctgaggaaactcactgagctgtgccatctgtggctgaggcccgacctccacaccaaagagcagatcctggacatgctggtgatggagcagttcatgatctccatgccccaggagctccaggtcttagtcaaggtgaacggtgtgcagagctgcaaagacctggaggacctgctacgaaataacagaagacccaagaaatggtctatagtcaacttgctcggcaaagaatatcttatgctgaactcagatgtcgagatggctgaagcccccgccagtgtcagagatgatccgagagacgtgtccagccagtgggcctcctctgtgaaccagatgcatccggggacaggccaggcccgccgagagcagcagatcctgcccagggtcgctgcactgtccaggaggcagggagaggactttctgctacacaagagtattgacgtaacaggtgacccaaactctccgagacccaagcagaccttggagaaggatctgaaggaaaacagggaagagaacccaggactgtcatccccagagcctcagcttccaaagagtcccaatctggtgagagcaaaggaggggaaggaaccccagaaaagagcctctgtggaaaatgtggatgctgacacaccttctgcctgcgttgtggagagagaagctttgactcacagcgggaacagaggagatgctctgaatctgagcagtcccaaaagaagcaaaccagatgcctcctccatttcccaagaagagcctcaaggagaagccacacctgtgggcaacagagaatccccaggacaagctgagatcaatccagttcattccccaggccctgcgggcccggtcagtcacccagatggccaagaagccaaggccctgccgccctttgcatgtgacgtgtgcaataaatcatttaagtatttttcccagctaagcatccacaggaggtcacacacaggagacagaccctttcaatgtgatctctgtcggaagcgcttcttgcagccctcagacctccgagttcaccagcgagtccacactggcgagaggccctacatgtgtgacgtctgccaaaagcggttcgcccacgagtccaccttacagggccacaagaggatccacaccggggagaggccgtttaaatgtaaatactgcagcaaagttttcagccacaaggggaacctgaacgttcaccagcgcacccactccggagagaagccctacaaatgtcccacctgtcaaaaggccttccgtcagctggggacattcaagcgtcacctgaaaacacaccgggaaaccacctcccagtgattccagagtcaggtccacatcctccaccccaagagacagtgaatgatggtttttctccaatgttaccagatgacatatacacataaagcacttggtaggaattgcccggatgtttgaataaatatttatcctccccca

SEQ ID NO: 201253 - DNA, 570 bp, Homo sapiens
  Payload ID: 19720
  Gene Name: zinc finger and SCAN domain containing 5B
  ENST ID: ENST00000589938
  CDS Start-End: 63-570
caggccggttggagagcgcatcccagaccgagaaggtcggaggcagaagccgggaaggagatatggctgcaaattggacactctcatggggtcagggaggaccctgcaacagccctgggtcagacactccacggtctgtggcgtccccagaaactcaacttggaaatcacgacaggaaccctgagacttggcacatgaatttcaggatgttcagctgcccagaggagtcggaccccatccaggctctgaggaaactcactgagctgtgccatctgtggctgaggcccgacctccacaccaaagagcagatcctggacatgctggtgatggagcagttcatgatctccatgccccaggagctccaggtcttagtcaaggtgaacggtgtgcagagctgcaaagacctggaggacctgctacgaaataacagaagacccaagaaatggtctatagtcaacttgctcggcaaagaatatcttatgctgaactcagatgtcgagatggctgaagcccccgccagtgtcagagatgatccgagagacgtgtccagccagtgggcctcctctgtga

SEQ ID NO: 201254 - DNA, 2059 bp, Homo sapiens
  Payload ID: 19720
  Gene Name: zinc finger and SCAN domain containing 5B
  Uniprot ID: A6NJL1
  ENST ID: ENST00000586855
  CDS Start-End: 315-1802
tgggaaatgtaatcaacgccgattacgaaaatggactctgtggccctaaaccaatcacggcgcggcgcagggaaccggaaacgcggcctggagtcccgcttctccataaatagacgcagttcagctccaggccggttggagagcgcatcccagaccgagaaggtcggaggcagaagccgggaaggagacttctgaacaaactgtgaatatattactgagaagaaacaggggcagcctgtgtaaataggtctcaatttgatactggctactggaagagcttgctcagaggctgattgaaatattctccagtagatatggctgcaaattggacactctcatggggtcagggaggaccctgcaacagccctgggtcagacactccacggtctgtggcgtccccagaaactcaacttggaaatcacgacaggaaccctgagacttggcacatgaatttcaggatgttcagctgcccagaggagtcggaccccatccaggctctgaggaaactcactgagctgtgccatctgtggctgaggcccgacctccacaccaaagagcagatcctggacatgctggtgatggagcagttcatgatctccatgccccaggagctccaggtcttagtcaaggtgaacggtgtgcagagctgcaaagacctggaggacctgctacgaaataacagaagacccaagaaatggtctatagtcaacttgctcggcaaagaatatcttatgctgaactcagatgtcgagatggctgaagcccccgccagtgtcagagatgatccgagagacgtgtccagccagtgggcctcctctgtgaaccagatgcatccggggacaggccaggcccgccgagagcagcagatcctgcccagggtcgctgcactgtccaggaggcagggagaggactttctgctacacaagagtattgacgtaacaggtgacccaaactctccgagacccaagcagaccttggagaaggatctgaaggaaaacagggaagagaacccaggactgtcatccccagagcctcagcttccaaagagtcccaatctggtgagagcaaaggaggggaaggaaccccagaaaagagcctctgtggaaaatgtggatgctgacacaccttctgcctgcgttgtggagagagaagctttgactcacagcgggaacagaggagatgctctgaatctgagcagtcccaaaagaagcaaaccagatgcctcctccatttcccaagaagagcctcaaggagaagccacacctgtgggcaacagagaatccccaggacaagctgagatcaatccagttcattccccaggccctgcgggcccggtcagtcacccagatggccaagaagccaaggccctgccgccctttgcatgtgacgtgtgcaataaatcatttaagtatttttcccagctaagcatccacaggaggtcacacacaggagacagaccctttcaatgtgatctctgtcggaagcgcttcttgcagccctcagacctccgagttcaccagcgagtccacactggcgagaggccctacatgtgtgacgtctgccaaaagcggttcgcccacgagtccaccttacagggccacaagaggatccacaccggggagaggccgtttaaatgtaaatactgcagcaaagttttcagccacaaggggaacctgaacgttcaccagcgcacccactccggagagaagccctacaaatgtcccacctgtcaaaaggccttccgtcagctggggacattcaagcgtcacctgaaaacacaccgggaaaccacctcccagtgattccagagtcaggtccacatcctccaccccaagagacagtgaatgatggtttttctccaatgttaccagatgacatatacacataaagcacttggtaggaattgcccggatgtttgaataaatatttatcctcccccatgagttttgttttctgtttgattatgtctgttgctttcttacagatttattttagtgtctgttgctgtttctcttccaatgagcaaagtctcatcattttccaatatctcataagaaaa

SEQ ID NO: 201255 - DNA, 555 bp, Homo sapiens
  Payload ID: 19720
  Gene Name: zinc finger and SCAN domain containing 5B
  ENST ID: ENST00000587032
  CDS Start-End: 145-555
ataaatagacgcagttcagctccaggccggttggagagcgcatcccagaccgagaaggtcggaggcagaagccgggaaggagacttctgaacaaactgtgaatatattactgagaagaaacaggggcagcctgtgtaaatagatatggctgcaaattggacactctcatggggtcagggaggaccctgcaacagccctgggtcagacactccacggtctgtggcgtccccagaaactcaacttggaaatcacgacaggaaccctgagacttggcacatgaatttcaggatgttcagctgcccagaggagtcggaccccatccaggctctgaggaaactcactgagctgtgccatctgtggctgaggcccgacctccacaccaaagagcagatcctggacatgctggtgatggagcagttcatgatctccatgccccaggagctccaggtcttagtcaaggtgaacggtgtgcagagctgcaaagacctggaggacctgctacgaaataacagaagacccaagaaatggtctatagtcaacttgctcggcaaagaa

SEQ ID NO: 201256 - DNA, 1491 bp, Homo sapiens
  Payload ID: 19721
  Gene Name: zinc finger and SCAN domain containing 5C, pseudogene
  Uniprot ID: A6NGD5
  ENST ID: ENST00000376267
  CDS Start-End: 1-1491
atggctgcaaattgcacatcctcatggagtctaggagaatcctgcaacagccctgggtcagagccaccacagtccatgccatccccagcaactcaacttggaaatcatgacagtgatcctgagacttgtcacgtgaacttcaggatgttcagctgcccgaaggagtcggaccccatccaggctctgaggaaactcactgagctgtgccatctgtggctgaggcccgacctccacaccaaagagcagatcctggacatgctggtgatggagcagttcatgatctccatgccccaggagctccaggtcttagtcatgatgaacggtgtgcagagctgcaaagacctggaggacctgctacgaaataacagaagacccaagaaatggtctgtagtcagttttcttggcaaggaatatcttatgcaggaatcagatgtggagatggctgaagcccccgccagtgtcagagatgatccgagacacgtgtccagccagcggacctcctctgtgaaccagatgtgtccggaggaaggccaggccagccaagagctgcagaccctgcccagggtccctgcactgttcaggaggcaggaagaggacttcctgctgccagagactactgtcatgaaaggtgacccaaaggctctgagacccaagccgaccttggagaaggacctggaggaagacagggaggagaacccaggacttacatccccagagcctcagcttccaaacagtcccacaggggtggtgggagcaaaggaggggaaggaaccccaaaaaagagcctctgtggaaaatgtggatgctgacacaccttctgcctgcgttgtggagagagaagcttcgactcacagcgggagcagaggagacgctctgaatctgagaggtctcaaaagaagcaaaccagacgccacctccatttcccaagaagagcctcaaggagaagccacacctgtgggcaacagagaatccccgggacaagctgagatcaatccagttcattccccaggccctgcgggcccagtcagtcaccccagtggccaagaagtcaaggaactgctgccctttgcatgtgaggtgtgcggcaagaggtttaagtatcgcggcaagttagccgtccacacgagatcacacacaggcgagagactctttcagtgtaatctctgcgggaagcgcttcatgcagcgcataggcctgcaatttcaccagcgaacccacactggcgagaggccctacacgtgtgacatctgccagaagcagttcacccagaagtcctacttgaagtgtcacaagagaagccacacaggggagaagcccttcgaatgtaaagactgcaagaaagttttcacctacaaggcaaatctgaaggagcaccagcgcatccactctggagagaaaccccacaaatgttccaagtgtccaagagccttcggtcggccggcgaccttaagacgccaccagaaaacacatcgagaagccacttcacagtga

SEQ ID NO: 201257 - DNA, 1892 bp, Homo sapiens
  Payload ID: 19721
  Gene Name: zinc finger and SCAN domain containing 5C, pseudogene
  Uniprot ID: A6NGD5
  ENST ID: ENST00000534327
  CDS Start-End: 150-1640
ggaggcagaagtcaggaaggagacttctgaatgaacagtgaatctattactgagaaaaaccaggggtggcctgtgtatataggtcgcaattagacaccggcttctggaagagctttcccagagacagattgaaatattccccagtagacatggctgcaaattgcacatcctcatggagtctaggagaatcctgcaacagccctgggtcagagccaccacagtccatgccatccccagcaactcaacttggaaatcatgacagtgatcctgagacttgtcacgtgaacttcaggatgttcagctgcccgaaggagtcggaccccatccaggctctgaggaaactcactgagctgtgccatctgtggctgaggcccgacctccacaccaaagagcagatcctggacatgctggtgatggagcagttcatgatctccatgccccaggagctccaggtcttagtcatgatgaacggtgtgcagagctgcaaagacctggaggacctgctacgaaataacagaagacccaagaaatggtctgtagtcagttttcttggcaaggaatatcttatgcaggaatcagatgtggagatggctgaagcccccgccagtgtcagagatgatccgagacacgtgtccagccagcggacctcctctgtgaaccagatgtgtccggaggaaggccaggccagccaagagctgcagaccctgcccagggtccctgcactgttcaggaggcaggaagaggacttcctgctgccagagactactgtcatgaaaggtgacccaaaggctctgagacccaagccgaccttggagaaggacctggaggaagacagggaggagaacccaggacttacatccccagagcctcagcttccaaacagtcccacaggggtggtgggagcaaaggaggggaaggaaccccaaaaaagagcctctgtggaaaatgtggatgctgacacaccttctgcctgcgttgtggagagagaagcttcgactcacagcgggagcagaggagacgctctgaatctgagaggtctcaaaagaagcaaaccagacgccacctccatttcccaagaagagcctcaaggagaagccacacctgtgggcaacagagaatccccgggacaagctgagatcaatccagttcattccccaggccctgcgggcccagtcagtcaccccagtggccaagaagtcaaggaactgctgccctttgcatgtgaggtgtgcggcaagaggtttaagtatcgcggcaagttagccgtccacacgagatcacacacaggcgagagactctttcagtgtaatctctgcgggaagcgcttcatgcagcgcataggcctgcaatttcaccagcgaacccacactggcgagaggccctacacgtgtgacatctgccagaagcagttcacccagaagtcctacttgaagtgtcacaagagaagccacacaggggagaagcccttcgaatgtaaagactgcaagaaagttttcacctacaaggcaaatctgaaggagcaccagcgcatccactctggagagaaaccccacaaatgttccaagtgtccaagagccttcggtcggccggcgaccttaagacgccaccagaaaacacatcgagaagccacttcacagtgacttcaccatcgggtctgtcttctgcaccaagaaagtgtgaatgaagatttttcaccgatgttgtcagatgacgtttgacagatgaagggcgcctggcacgcagaggagtgccctagataggaattcctaggatgtttgtttaaatctttttcctccccgggggaattttggtttttgtttcattatttctattgttttaggtttattttggtttgtgttgctgttctttcaataaacatcttattagttttc

SEQ ID NO: 201258 - DNA, 1621 bp, Homo sapiens
  Payload ID: 19722
  Gene Name: zinc finger and SCAN domain containing 9
  Uniprot ID: O15535
  ENST ID: ENST00000252207
  CDS Start-End: 149-1333
ggccattgttcgtgccgcgcttctagcaacgccgggccggtaaccccctctccctccttgcgcgttccgggtctcgcaagcgcctccaaggtttgtcttgaagcatagctccagctggagggtaccttttaagctgttcaaggtcaagatgaatacaaactcaaaggaggttttatccctgggtgttcaagttcccgaggcatgggaagaacttctgacaatgaaagtggaagcaaaaagtcaccttcaatggcaggaatccagactgaaacgcagtaatccactggcaagggaaatcttccgaaggcactttcgacagctgtgctaccaagagacccctggaccaagggaggctcttactcgactccaggaactttgctaccagtggttgaggccacatgtgagcacaaaggagcagattttggatctgctggtgctggagcagtttctatccattctgcccaaggagctccagggctgggtgagggaacactgtccagagagtggagaagaggctgtgattttgctggaggatctggagagagagctcgatgaaccacaacatgagatggtggcccacagacacagacaagaagtcctctgtaaagagatggtgcctctagcagagcagacaccactgacccttcagtcccagcctaaggagccacagctcacatgtgactctgctcagaagtgccattctattggagagacagatgaagtaaccaagactgaggacagagagttggtgctaaggaaagactgtcctaagatagtggaaccacatgggaaaatgtttaatgagcagacctgggaggtatcacagcaggatccctcacatggagaagttggtgaacataaggataggatagagaggcagtggggaaacctcttaggagaggggcaacacaaatgtgatgaatgtgggaagagctttactcagagctcaggtctcattcgacatcaaagaattcatactggagaaagaccttatgaatgtaatgaatgtgggaaagccttcagtcgaagttctggtctttttaatcaccgaggaatccacaatatacagaaacggtaccactgcaaggagtgtgggaaggtcttcagtcagagtgcgggtcttatccagcatcagagaatccacaaaggagaaaagccgtatcagtgcagccagtgcagtaagagctacagtcggcgttcatttctcattgaacatcagagaagccacacaggggagcgacctcaccagtgcattgaatgtgggaaaagctttaatcgacactgcaacctcattcgccatcagaagatccacacagtggctgagctggtctagggcttggctatgagcaagttttccagatcaccacccaagttgtgtggggcaggttgagactagaaaatgcctctttcttcctttctccatgaaatgtgtttgaaacaaatcctgacttaaggcccagggacttccttaaaggaaagttgggtgtttgaagctactgttttctcttttgttcattttacctctttcttactcttactagctgtgtccctcttatttataatttatttatttttttgagatggctgctaaacccttctaataatataataaatggcactg

SEQ ID NO: 201259 - DNA, 1791 bp, Homo sapiens
  Payload ID: 19722
  Gene Name: zinc finger and SCAN domain containing 9
  Uniprot ID: O15535
  ENST ID: ENST00000425468
  CDS Start-End: 166-1503
atctttgttccctgcccggccattgttcgtgccgcgcttctagcaacgccgggccggtaaccccctctccctccttgcgcgttccgggtctcgcaagcgcctccaaggtttgtcttgaagcatagctccagctggagggtaccttttaagctgttcaaggtcaagatgaatacaaactcaaaggaggttttatccctgggtgttcaagttcccgaggcatgggaagaacttctgacaatgaaagtggaagcaaaaagtcaccttcaatggcaggaatccagactgaaacgcagtaatccactggcaagggaaatcttccgaaggcactttcgacagctgtgctaccaagagacccctggaccaagggaggctcttactcgactccaggaactttgctaccagtggttgaggccacatgtgagcacaaaggagcagattttggatctgctggtgctggagcagtttctatccattctgcccaaggagctccagggctgggtgagggaacactgtccagagagtggagaagaggctgtgattttgctggaggatctggagagagagctcgatgaaccacaacatgagatggtggcccacagacacagacaagaagtcctctgtaaagagatggtgcctctagcagagcagacaccactgacccttcagtcccagcctaaggagccacagctcacatgtgactctgctcagaagtgccattctattggagagacagatttaatacgaagtttgaggagaagggcagtactgatcccacttggggcccatctgttctctacagacacatttttattttccaaacctgttgtgatcccccagctaaaaggaggaggagaaacatggcctaacaacagaggagtcctaagagatgaagtaaccaagactgaggacagagagttggtgctaaggaaagactgtcctaagatagtggaaccacatgggaaaatgtttaatgagcagacctgggaggtatcacagcaggatccctcacatggagaagttggtgaacataaggataggatagagaggcagtggggaaacctcttaggagaggggcaacacaaatgtgatgaatgtgggaagagctttactcagagctcaggtctcattcgacatcaaagaattcatactggagaaagaccttatgaatgtaatgaatgtgggaaagccttcagtcgaagttctggtctttttaatcaccgaggaatccacaatatacagaaacggtaccactgcaaggagtgtgggaaggtcttcagtcagagtgcgggtcttatccagcatcagagaatccacaaaggagaaaagccgtatcagtgcagccagtgcagtaagagctacagtcggcgttcatttctcattgaacatcagagaagccacacaggggagcgacctcaccagtgcattgaatgtgggaaaagctttaatcgacactgcaacctcattcgccatcagaagatccacacagtggctgagctggtctagggcttggctatgagcaagttttccagatcaccacccaagttgtgtggggcaggttgagactagaaaatgcctctttcttcctttctccatgaaatgtgtttgaaacaaatcctgacttaaggcccagggacttccttaaaggaaagttgggtgtttgaagctactgttttctcttttgttcattttacctctttcttactcttactagctgtgtccctcttatttataatttatttatttttttgagatggctgctaaacccttctaataatataataaatggcactg

SEQ ID NO: 201260 - DNA, 579 bp, Homo sapiens
  Payload ID: 19722
  Gene Name: zinc finger and SCAN domain containing 9
  ENST ID: ENST00000531941
  CDS Start-End: 457-579
atacaaattccaggctaacggtgacagtggctgcctcggggagtgggactaaggaggggtaggtggggtttgacattttactttattaattttggtattgtctgagggtttttaaaccataaataatgtattaattttaaaaatgcttttaaaaatcatcattttcaatagttaacggtctatgcttcatcaacgttttccgtttaaaacctgtgtgcggcccacacacgtatgacattctgattatgtgattcactgctgaaaaagaactggacgccaggaaattgggggttgagtccgaagcaaggtgaacgccggacatcgagacatggaatcctagaccggcccggaagtgcctctgctccgtccgccttcgaggagaggcaagcgcctccaaggtttgtcttgaagcatagctccagctggagggtaccttttaagctgttcaaggtcaagatgaatacaaactcaaaggaggttttatccctgggtgttcaagttcccgaggcatgggaagaacttctgacaatgaaagtggaagcaaaaagtcaccttcaatggcaggaatccagactgaaa

SEQ ID NO: 201261 - DNA, 1601 bp, Homo sapiens
  Payload ID: 19722
  Gene Name: zinc finger and SCAN domain containing 9
  Uniprot ID: O15535
  ENST ID: ENST00000531979
  CDS Start-End: 113-1297
ggccattgttcgtgccgcgcttctagcaacgccgggccggcaagcgcctccaaggtttgtcttgaagcatagctccagctggagggtaccttttaagctgttcaaggtcaagatgaatacaaactcaaaggaggttttatccctgggtgttcaagttcccgaggcatgggaagaacttctgacaatgaaagtggaagcaaaaagtcaccttcaatggcaggaatccagactgaaacgcagtaatccactggcaagggaaatcttccgaaggcactttcgacagctgtgctaccaagagacccctggaccaagggaggctcttactcgactccaggaactttgctaccagtggttgaggccacatgtgagcacaaaggagcagattttggatctgctggtgctggagcagtttctatccattctgcccaaggagctccagggctgggtgagggaacactgtccagagagtggagaagaggctgtgattttgctggaggatctggagagagagctcgatgaaccacaacatgagatggtggcccacagacacagacaagaagtcctctgtaaagagatggtgcctctagcagagcagacaccactgacccttcagtcccagcctaaggagccacagctcacatgtgactctgctcagaagtgccattctattggagagacagatgaagtaaccaagactgaggacagagagttggtgctaaggaaagactgtcctaagatagtggaaccacatgggaaaatgtttaatgagcagacctgggaggtatcacagcaggatccctcacatggagaagttggtgaacataaggataggatagagaggcagtggggaaacctcttaggagaggggcaacacaaatgtgatgaatgtgggaagagctttactcagagctcaggtctcattcgacatcaaagaattcatactggagaaagaccttatgaatgtaatgaatgtgggaaagccttcagtcgaagttctggtctttttaatcaccgaggaatccacaatatacagaaacggtaccactgcaaggagtgtgggaaggtcttcagtcagagtgcgggtcttatccagcatcagagaatccacaaaggagaaaagccgtatcagtgcagccagtgcagtaagagctacagtcggcgttcatttctcattgaacatcagagaagccacacaggggagcgacctcaccagtgcattgaatgtgggaaaagctttaatcgacactgcaacctcattcgccatcagaagatccacacagtggctgagctggtctagggcttggctatgagcaagttttccagatcaccacccaagttgtgtggggcaggttgagactagaaaatgcctctttcttcctttctccatgaaatgtgtttgaaacaaatcctgacttaaggcccagggacttccttaaaggaaagttgggtgtttgaagctactgttttctcttttgttcattttacctctttcttactcttactagctgtgtccctcttatttataatttatttatttttttgagatggctgctaaacccttctaataatataataaatggcactgccacagccaacatgcc

SEQ ID NO: 201262 - DNA, 2062 bp, Homo sapiens
  Payload ID: 19722
  Gene Name: zinc finger and SCAN domain containing 9
  ENST ID: ENST00000527436
  CDS Start-End: 102-887
ctctccctccttgcgcgttccgggtctcgcaagcgcctccaaggtttgtcttgaagcatagctccagctggagggtaccttttaagctgttcaaggtcaagatgaatacaaactcaaaggaggttttatccctgggtgttcaagttcccgaggcatgggaagaacttctgacaatgaaagtggaagcaaaaagtcaccttcaatggcaggaatccagactgaaacgcagtaatccactggcaagggaaatcttccgaaggcactttcgacagctgtgctaccaagagacccctggaccaagggaggctcttactcgactccaggaactttgctaccagtggttgaggccacatgtgagcacaaaggagcagattttggatctgctggtgctggagcagtttctatccattctgcccaaggagctccagggctgggtgagggaacactgtccagagagtggagaagaggctgtgattttgctggaggatctggagagagagctcgatgaaccacaacatgagatggtggcccacagacacagacaagaagtcctctgtaaagagatggtgcctctagcagagcagacaccactgacccttcagtcccagcctaaggagccacagctcacatgtgactctgctcagaagtgccattctattggagagacaggtgagggacagcatttatttgatgttgaacgaatcccacctggtcaagcaaaaacaaacaataaacccagagctgggaaaacaggagacccaaagactccttaccagatagcagtaatggtcagttcttctgagagcctagtgtgctcatctttgacccttctccctgcgtgcagacttctccctgagtaccaccctggaagctttctggacttctgatgcatggtacatgaggaaggctttcagggatcgctgtggagcacagcttcagagaatggacttcaaggtttgacagacaggttcagatcctggcatcgcctcatggaagctgcttgtattgggcagattacttaaccacttgacctcagatccctcatctacaaaatggggttgataatagctttggtttagtctacttgcgctgccttaagagaataccacagactggttgtctttaacagaaatttattttctcacattttcaaaggctagtagtccaagatcaagataccatcaggtttggtttctggtgaggcctcttcctggcttatagatggccatcttcttgctgtatcctcacatggcctttcttctgtatgcatacagagagagagcaagctctctcatcttataaggacagataccattcctacccgatagggcccttccttataacctcatttaacttttaataccttcctcaaggccctatctccaaatataatcatattgaggggttaggacctcagcatatgtgagggaatacaatttagtccgtaaccagtatgtacctcagaaagtcattgtgagtatcaaatacaatttatgaaaagcacttggcatgcattatgcttaatacatggtcactattgtcacaaatcaccagtgccacccttgctgatttgggttcatacttggagtagaaagatatcagatatgcttagtaagtggcagaactgtatgggagaatccagtgaaatcagactttgccatttccttctctgtaatcttctgagtggtggcagtgaccacccttgtggatatagtactgagcacttgggactgagtcagctgctttcccattctagccctccctgcaggaattggctctagcttgtctgatttcccacacataaaatcatgccctcttactgactttttgttaatgttctgacaatcaatctgtagcaaggttctactgttttcagtttcatattacccctatatgcatcaaagctgcaacttcccttgcctctttgtccctaggttctgtttatttcatttaccctagcaattatggatttctattacatggaactcatctcttgatttaaattaaagtgtatgtgttgagtaaattctgtgcagaccttcttatagcttctgtgacttta

SEQ ID NO: 201263 - DNA, 1182 bp, Homo sapiens
  Payload ID: 19722
  Gene Name: zinc finger and SCAN domain containing 9
  ENST ID: ENST00000527844
  CDS Start-End: 74-1182
gcaagcgcctccaaggtttgtcttgaagcatagctccagctggagggtaccttttaagctgttcaaggtcaagatgaatacaaactcaaaggaggttttatccctgggtgttcaagttcccgaggcatgggaagaacttctgacaatgaaagtggaagcaaaaagtcaccttcaatggcaggaatccagactgaaacgcagtaatccactggcaagggaaatcttccgaaggcactttcgacagctgtgctaccaagagacccctggaccaagggaggctcttactcgactccaggaactttgctaccagtggttgaggccacatgtgagcacaaaggagcagattttggatctgctggtgctggagcagtttctatccattctgcccaaggagctccagggctgggtgagggaacactgtccagagagtggagaagaggctgtgattttgctggaggatctggagagagagctcgatgaaccacaacatgagatggtggcccacagacacagacaagaagtcctctgtaaagagatggtgcctctagcagagcagacaccactgacccttcagtcccagcctaaggagccacagctcacatgtgactctgctcagaagtgccattctattggagagacagacacatttttattttccaaacctgttgtgatcccccagctaaaaggaggaggagaaacatggcctaacaacagaggagtcctaagagatgaagtaaccaagactgaggacagagagttggtgctaaggaaagactgtcctaagatagtggaaccacatgggaaaatgtttaatgagcagacctgggaggtatcacagcaggatccctcacatggagaagttggtgaacataaggataggatagagaggcagtggggaaacctcttaggagaggggcaacacaaatgtgatgaatgtgggaagagctttactcagagctcaggtctcattcgacatcaaagaattcatactggagaaagaccttatgaatgtaatgaatgtgggaaagccttcagtcgaagttctggtctttttaatcaccgaggaatccacaatatacagaaacggtaccactgcaaggagtgtgggaaggtcttcagtcagagtgcgggtcttatccagcatcagagaatccacaaaggagaaaagccgtatcagtgcag

SEQ ID NO: 201264 - DNA, 854 bp, Homo sapiens
  Payload ID: 19722
  Gene Name: zinc finger and SCAN domain containing 9
  ENST ID: ENST00000531981
  CDS Start-End: 141-623
gagaggtcggcatctttgttccctgcccggccattgttcgtgccgcgcttctagcaacgccgggccggcaagcgcctccaaggtttgtcttgaagcatagctccagctggagggtaccttttaagctgttcaaggtcaagatgaatacaaactcaaaggaggttttatccctgggtgttcaagttcccgaggcatgggaagaacttctgacaatgaaagtggaagcaaaaagtcaccttcaatggcaggaatccagactgaaacgcagtaatccactggcaagggaaatcttccgaaggcactttcgacagctgtgctaccaagagacccctggaccaagggaggctcttactcgactccaggaactttgctaccagtggttgaggccacatgtgagcacaaaggagcagattttggatctgctggtgctggagcagtttctatccattctgcccaaggagctccagggctgggtgagggaacactgtccagagagtggagaagaggctgtgattttgctggaggatctggagagagagctcgatgaaccacaacatgagtcaaatcttgtctttttgtccccagatggtggcccacagacacagacaagaagtcctctgtaaagagatggtgcctctagcagagcagacaccactgacccttcagtcccagcctaaggagccacagctcacatgtgactctgctcagaagtgccattctattggagagacaggtgagggacagcatttatttgatgttgaacgaatcccacctggtcaagcaaaaacaaacaataaacccagagctgggaaaacaggagacccaaagactccttaccagatagcagtaatggt

SEQ ID NO: 201265 - DNA, 757 bp, Homo sapiens
  Payload ID: 19722
  Gene Name: zinc finger and SCAN domain containing 9
  ENST ID: ENST00000526391
  CDS Start-End: 165-757
ctttagggcctatgataattgcttgtattatcagtttctgtcatcagctattatcatttttctatataaataatttatttttactgcttaggcaagcgcctccaaggtttgtcttgaagcatagctccagctggagggtaccttttaagctgttcaaggtcaagatgaatacaaactcaaaggaggttttatccctgggtgttcaagttcccgaggcatgggaagaacttctgacaatgaaagtggaagcaaaaagtcaccttcaatggcaggaatccagactgaaacgcagtaatccactggcaagggaaatcttccgaaggcactttcgacagctgtgctaccaagagacccctggaccaagggaggctcttactcgactccaggaactttgctaccagtggttgaggccacatgtgagcacaaaggagcagattttggatctgctggtgctggagcagtttctatccattctgcccaaggagctccagggctgggtgagggaacactgtccagagagtggagaagaggctgtgattttgctggaggatctggagagagagctcgatgaaccacaacatgagatggtggcccacagacacagacaagaagtcctctgtaaagagatggtgcctctagcagagcagacaccactgacccttcagtcccagcctaaggagccacagctcacatgtgactctgctcagaagtgccattctattggagagacagatgaagtaaccaagactgaggacag

SEQ ID NO: 201266 - DNA, 7228 bp, Homo sapiens
  Payload ID: 19723
  Gene Name: zinc finger CCCH-type containing 10
  Uniprot ID: Q96K80
  ENST ID: ENST00000257940
  CDS Start-End: 277-1581
atgtcgcacgcgtacttcatacaccatagagtatggttccgggtctgctggctagagcgtcacttcttccgcaggaagcggaagagcgatcgggtaggcggctctttgtcgaagctagaggaccggcaggcggcagcagcaactacggcggcggcggcagaacccagcagtgatgtggaggtggagacccacaggagccccggacttcacctgagctacctcagtggtcaccaagagtggcaagataaagaaaaccctgagttgggcgggaccaggatgcctgaccgggacagctatgccaacggtaccgggagcagcggtggaggccctggaggtggtggcagcgaggaggccagtggggcaggggtaggcagtggcggggccagctcagatgccatctgtagagacttcttgaggaatgtgtgcaagcgaggcaagcgttgccgatatcgccacccagacatgagcgaggtgtccaacttgggggtgagcaaaaacgagttcatcttctgccatgacttccagaacaaggagtgtagccgcccaaattgccgtttcatccatggctccaaggaggatgaggatggctataagaagacaggagagcttcccccacggctgaggcagaaagtagcagctggccttggcctttcaccggctgacctaccaaatggcaaggaggaggtccctatctgccgtgactttctcaagggtgactgtcagagaggagccaagtgcaagttccgtcacctgcaacgggattttgagtttgatgctcggggtggaggaggcactggtgggggctcaacaggctcagtcctcccaggacgacgtcatgatctctatgatatctatgaccttcctgacaggggctttgaggaccatgagccaggcccaaaacgccggcgaggtggatgctgcccccctgatggccctcattttgagtcatatgaatatagtttggctccaccgcgaggggtggagtgcagactgctagaggaggagaatgccatgctcaggaagcgggtagaggagttaaagaagcaggtcagcaacctgctggccaccaatgaggtactactggaacaaaatgctcagttccgcaatcaggccaaggtcataaccctgagctccactgcaccagcgactgagcagactctggcccccactgtgggcactgttgccacttttaaccatggcattgcccagactcacactactctcagcagccaggctctacagcctcgtccagtgtcccagcaagaactggtggcccctgctggagctccagctgctcccccaactaatgctgcacctcctgctgctccaccacccccacccccacacttgaccccagagatcacgccactgtcagctgccctggctcaaacaattgcccagggaatggcacctccacctgtctccatggctcctgtggctgtatctgtggctcctgtggcccctgtggctgtatcgatggcccaacccttggcaggaatcacaatgagccacaccaccactcccatggtgacttaccctatcgcttcccagagcatgcgcatcacggccatgccacactgatggggctaatggacactcccctggtatagcctcgcagggctggggtcagggggcccttgcccactcacctagccttccccatccctgtctgaagggctcccttgagaactaggacaagagactacaaggagtatgtcctgaggaggggttgggatggtgtgttttctctcacctcccttttatgagggtcctcttgtccatcttcaagcctcacagtgggggcttgcagaggagtgcagactgaagccagcagagaggaaggactgactgaggggctgtgtcctcttatgggaatttgggaacatccctcgtcttgtcctctcttctgcacagcacaggttccagcactggttttagaagaaaaaaataccctgcccagagggaaagccaggaaagattgggaagtgggtggtcaggagagaaggcctgataggagccttcagacaatttgggtcctagttgcttgggttggacaatacaggaattgcttctgggccctgggaaagctgggaccatagtgctccagcccaaagactaggggagcattcattaccctagtttgacctgaaaatccatagggcagggcccactactttccaaagaaataaaagaacaattatttttaacaaatggaggcagtgaaaacttgcttagctattctgtgtggaagatgggagcagtaaatagatctcatgccaaaatgggataaagaccccagcctcacatagctttggtaagatggatagaagccagtgaagaagggtagggacccagaacaagaccaaatggggctttggggaaggcactttatggggtaaaagctttggagccacccagtctagttttaaaaatagtcccatctgtttctggtctctgtctgtatgtgctattcccaggttgcctcagtaaccagggctcctagggtcatttagcagggcaggcagtaaggagagtgtatttgctgaaatgcggatgggatgttacatagttgacagatccttattcaaacagagcaggacaggtggagttgatggccattgagttgatggcagttgccgctcagttgatggcagttaatgtccctcctaccccaccccttcagtggccagttcctgaagccttcaaggcttgggaggtctgggaaaagagagtccttctagggacacaagcctcagggtccatccctttcctctgtctccacataggaccagaagttttaaatctacttaagtcagtaaggccaggggccccaatagtcaaacctcagttcctcctcagctcacggctgatgtagggaaaacaactcaggtgtctagtctaatgggacagtagatttgggggtagagagtgatcctggattgtgttccccctcatcatgtctcctgctacctcttgctttcttgtctggttgatcactcaggtcacatctgggattggagatggtgggctaggtcaaggccagtcattaaaaaaaaaagcctaaagactaaaagtgggctaacattgtggattttagaaacaacacattgataagcttaatgttttttgggacacaatttttttttttttttttgagatggagtcttgcccagtcaccagaccggagtgcagtggcgcaatctcggttcactgtaacctgcgcctcctgggttcaagcgattctcttgcgtcagcctcccgagtagctgagactacaggcgcccgccaccacgcccggctaatttttttatttttagtagagacggggtttcatcgtgttggccagaatggtctctatctctcgtgatccgcccgcctcagcctcccaaagtgctgggattacaggcatgaaccaccgtgcccggcaattctagactattaaaagagatggtttaagagcatttagagaagaatgtaaccatagataccaacatgaattctcagtcaaatcctgactgactttatttcctccttgccaggttatctccaaagaggtagatttgggaaattttagacattgtatgtcttgtatgtatttactccagctgaagaccaccaagaatacacctggtaattgagcaagttgggtttaatgctcattgcagtgagggggagggctcaccattggggataacgtggtgtgtctcagcatgagggtgttaggaacgacttagagaacttagactttggttaagtgattttggggaagattcaagaaagtgggtgttcttttggattgggtgctgttaagggaatccaggataattgggtagcttgtctagaagaagggcagacaagtgaacctaagcacagtcgatgatgaagtcactcactagctgggaaaggggatgtttgctgttttgtggtttgcacactgaccttgttttgtgcttaaacaaaattgtgtagtgattttgttttttgtctcacttcatcgcagtcactgagtgaccttgtctgatgctggtgttttgtgagattgtttgtgtccaagagaactcattggctacctgtgagcaccaggtcagccctaacagctctgaagcctggctgtgtcaggccagttcccagattacaggagctactttcctctctctcacctgctaagtcatcacagataagaggaaaattacgggtcagttaatcgtagcattttttccatgcaaatggctctggttaaaaaataatgagaaaaaaatagtagcatttggtagaatcaaactgaacacttgtacttagtgttggttagcgcatttatgttagagaaatctctgttctctagtgataagcccaagggctatgttttattgtaaaaagaaaaaacccaactcgggtaaacatgtaaaaaacccatttatcaacagtaacacaggaagagctaaataatattcaaagtgtctgtaacttgaattgactaaaacactggagcactctcacactaaaaaattgcttagatcttgaactagtttgaggaacaatgttagagatttatattagcaataattcacatgagaacaaactgggacttccagttggctgcaaaaaaatagaatcttagccctcaagatgtccatttataaatatttattaagagcctgctatgttctaggcatctttctaggagctccataagggtagtagaaccttggtaatagattacaaatacagcagttctatgttctgcctaagtgtaaccacttagtagtgtgttgttctaaatgtaatttttaaagagggccattgacaaaccagtgtgttgctagaaaaaaaaggctggcaagagaaagcttcaaatagaagtcttcaaatatttgaagggctgcccagtggaggaagatcctgtttgctacacaggaagtaaaaagggatttctagaataatggctaactttttttttttttttttttttgagacggagtctagctgtgtggcccaggcttcagtgcagtggcacgatctctgctcactgcaaactctgcctccagggtttacgccattctgctgcctcagcctccagagtagctgggactataggtgcccagctaattttctttttgtatttttagtagagacggggtttcaccgtgttagccaggacggtctccatatcctgacctcgtgatccgcccacctcggcctcccaaagtgctgggattacaggcgttgagccaccgcacccagccggctagcatttgttgactgcttaatataagccaaggctctgtgctaggcactttacatgcaacatctcattgacacaatgggtaatattattgtacccattttacagaggagaaagcaggcttaaaaagtaacctgcccagggttctgcaagtaaggaatggggccaggaatctattcaggcagtctcactccagacgacaaaagaaagttctaatgatatagccatccaacaaagcgatcactacttggcagtaattttttttttttttttttgagacggagtatcactctgttgcccaggctggagtgtagtggcgtgatctcggcccactgcagcctccgcctctcgggttcaagtgattctcctgcctcagcctcccaagtagagtaactgggattacaggtacatgccaccatgctcggctaatttttgtatttttagtagagacggggtttcgccatgttggccaggctggtcttgaactcctgacctcaggtgatccaactgcctcggccttccaaagtgctgggattacaggcatgagccaccgcgactggcttggcagtaacttttgaggaataaagaatacagaaggagtttcctcaaatcttgttgcccttcccatctttgtgagctgagatcagagtaccgtatctcaccctctgcctcttggaggtgattatggtttacatataaatgcagattgcaagtccaggaagtttactctctctcctcctgtaggcctcatcctgtaagacacttcctctaacaaatgggcatcccttcctgttgtccacttactgcttatcaccaccaggtggcacctgggcagcagaattgtcagtgggcggggacccaccctgtttacttgtgttggtaactgcattgcagctgctgatcctgtggctcctgggccccagctgggacaagaacttcctgaggatgaagttttatcccctatataatttctgatgatctggatgaggtgaggaagggagaagtttggaaaagaacctccataggtcaccctctccattcccccattctcaggaacctccttgcctactccagtgcttggcaaatttcagtttatagagaggtttctctctaaggttcatccatgttccttctgtagttctgctttatcagttggtgagcaggtcactcataattcctccaatttccttgtttcccttttctacctgcttacctctgggaatatggaggatataggagacagaatattgtttcttaaatagttctgcaaactgaatgaagcagtcaagatactgctagccctagggaagtagagaaaaggaagtgaaaaaatttaagtgatagaggctgagcagggacaggttttaagcagctttggtaaacacaggctgatgaaatctatgccctgcagaaccagataaaatttatcagctgcaggcctcatcctgtaagacacttcctctaagaaatggctagtttcttcccagtgatcaaccccagttcttctgctgcatctgacagatttacataatatgccccatatatactgcattaaaaggtaatcatcttatgaccaacacttccctcatcaacttccaattagtctagttcctagatcctaggacaacactccacctctaacgccagttaactagtaacaatagtcatcggtgtaccctgcactttttccttcctaaacctacaccgtacactgtgggactgcactagttctgcacctgactgtatggcaaaccttccttctaactcaggcaaatgtgaaaaggaattgtctttcccttactcttgatccctcattttagtgtcctagaagttcttcagggtcagaaaattattggaaaatgtaataatttgcgctgcctccctcccttttggagccaactagtcttacatccatcctctaagatagagatgacttactaactcttggaaatttccaaaaagaaataaagcctcactttctattca

SEQ ID NO: 201267 - DNA, 1019 bp, Homo sapiens
  Payload ID: 19723
  Gene Name: zinc finger CCCH-type containing 10
  ENST ID: ENST00000551880
  CDS Start-End: 884-1019
gagggaggcgggagacttaggtggaggccgcgcccggaggggaggagtcggggccggcccagcggctgggctcggccaggccacagaaggccccccagaaccgagctggctcgtcctcacaccccagggcagtgccccttttctgagtgaccccgcatcgcgagcaaacgccagcttcgtgacgtcacaaccctgcccatcccctcagcttgatgacacctggagctccagctccccgcttcacttcgcgcgcccttagtgtcccattcacgtagcccacggctgagcgccggcggcactgcacggaacctgccaagctagaagacttgctgcgggaaaactcctaggacttctttcgcaaactctagggtgttgggaagcgtcacaatcactgccttcaagtctaatcggccatcccaatgcactgtcagacgctgcctttttgaggttcctcactagccattactaactccagcccttggcggtgctctgaccctcacatcctctttcatcttgaggcagggcgccccgcactctttgttcactcagggctggttttccaacccctcctcccagtccctccgaattagttttactcttcttactggcaacttctcccttggacaggtgaagttcagtttgaaccctgaggaaatcctcacgttctcgaagctttgccgttttgtcagatttcttgtgacaaccaccccatagtcctccactcttactccttcttccacccaagtctctgtttttttcctgctcagaacccagcagtgatgtggaggtggagacccacaggagccccggacttcacctgagctacctcagtggtcaccaagagtggcaagataaagaaaaccctgagttgggcgggaccaggatgcctgaccgggacagctatgccaacggtaccgggagcagcggtggaggccctggaggtggtggcagcgaggaggccagtggggcaggggtaggcagtggcggggccagctcagatgccatctgtagagacttct

SEQ ID NO: 201268 - DNA, 743 bp, Homo sapiens
  Payload ID: 19723
  Gene Name: zinc finger CCCH-type containing 10
  ENST ID: ENST00000546903
  CDS Start-End: 478-743
aaggccccccagaaccgagctggctcgtcctcacaccccagggcagtgccccttttctgagtgaccccgcatcgcgagcaaacgccagcttcgtgacgtcacaaccctgcccatcccctcagcttgatgacacctggagctccagctccccgcttcacttcgcgcgcccttagtgtcccattcacgtagcccacggctgagcgccggcggcactgcacggaacctgccaagctagaagacttgctgcgggaaaactcctaggacttctttcgcaaactctagggtgttgggaagcgtcacaatcactgccttcaagtctaatcggccatcccaatgcactgtcagacgctgcctttttgagaacccagcagtgatgtggaggtggagacccacaggagccccggacttcacctgagctacctcagtggtcaccaagagtggcaagataaagaaaaccctgagttgggcgggaccaggatgcctgaccgggacagctatgccaacggtaccgggagcagcggtggaggccctggaggtggtggcagcgaggaggccagtggggcaggggtaggcagtggcggggccagctcagatgccatctgtagagacttcttgaggaatgtgtgcaagcgaggcaagcgttgccgatatcgccacccagacatgagcgaggtgtccaacttgggggtgagcaaaaacgagttcatcttctgccatgacttccagaacaaggagtgtagccg

SEQ ID NO: 201269 - DNA, 552 bp, Homo sapiens
  Payload ID: 19723
  Gene Name: zinc finger CCCH-type containing 10
  ENST ID: ENST00000552345
  CDS Start-End: 316-552
ctctttgtcgaagctagaggaccggcaggcggcagcagcaactacggcggcggcggcaggtgaagttcagtttgaaccctgaggaaatcctcacgttctcgaagctttgccgttttgtcagatttcttgtgacaaccaccccatagtcctccactcttactccttcttccacccaagtctctgtttttttcctgctcagaacccagcagtgatgtggaggtggagacccacaggagccccggacttcacctgagctacctcagtggtcaccaagagtggcaagataaagaaaaccctgagttgggcgggaccaggatgcctgaccgggacagctatgccaacggtaccgggagcagcggtggaggccctggaggtggtggcagcgaggaggccagtggggcaggggtaggcagtggcggggccagctcagatgccatctgtagagacttcttgaggaatgtgtgcaagcgaggcaagcgttgccgatatcgccacccagacatgagcgaggtgtccaacttgggggtgagcaaaaacgagttcatcttctgc

SEQ ID NO: 201270 - DNA, 5015 bp, Homo sapiens
  Payload ID: 19724
  Gene Name: zinc finger CCCH-type containing 11A
  Uniprot ID: O75152
  ENST ID: ENST00000332127
  CDS Start-End: 858-3290
ggacggcagcggccaagcaagaagaaagacgtggcagcaagcgggagtcggggatagtgtcatcggttcggtaaagtttctgttctctgggtcccggtactttggagcttgtctcaaactccacatacagaaagccaccgaccttattccggtatcctacacccattccccactctcattacactcccacccctggccctcagcgtcggagtcaagagcaacagggacacttccgttctccttgtaggactggtgaaaccgtaatgaagaacacccctaaactcccataatcgatttggggatattccctgcccaaaaaattcctggaaaattgactagtattaagtctatggaagatggagttttttttcatgatcctttaactctcaagttcatctttaaatgaactctttttttttgttttttttttgttttgttttgttttgtttttgaggagataactaaccctagctgtctccagtctgacaaaggttatttgaatggacttaatctcccagtagttgggagatgttttaaaaacacatgctgtgtttgaattgtggctgagaggttttcttggcaatgtgaggaggaaatttttttctgcctcattattattaattcatggattgagtgttggttcgacctacaggcgtaatagattggaactcagtgaagacacagatgttcctgttcagagcaaccagctaatgattacagtttaaagacaatttctgtgatcaagttgtcatttggaagattaaacccatttcacgaggacttggagcctggtccttgctttgaggaagcagtggcttgtttcaagaagccacttctgatctaagaatctacccagcatgcctaatcaaggagaagactgctatttttttttctattccacatgtaccaaaggtgacagctgcccattccgtcactgtgaagctgcaataggaaatgaaactgtttgcacattatggcaagaagggcgctgttttcgacaggtgtgcaggtttcggcacatggagattgataaaaaacgcagtgaaattccttgttattgggaaaatcagccaacaggatgtcaaaaattaaactgcgctttccatcacaatagaggacgatatgttgatggccttttcctacctccgagcaaaactgtgttgcccactgtgcctgagtcaccagaagaggaagtgaaggctagccaactttcagttcagcagaacaaattgtctgtccagtccaatccttcccctcagctgcggagcgttatgaaagtagaaagttccgaaaatgttcctagccccacgcatccaccagttgtaattaatgctgcagatgatgatgaagatgatgatgatcagttttctgaggaaggtgatgaaaccaaaacacctaccctgcaaccaactcctgaagttcacaatggattacgagtgacttctgtccggaaacctgcagtcaatataaagcaaggtgaatgtttgaattttggaataaaaactcttgaggaaattaagtcaaagaaaatgaaggaaaaatctaagaagcaaggtgagggttcttcaggagtttccagtcttttactccaccctgagcccgttccaggtcctgaaaaagaaaatgtcaggactgtggtgaggacagtaactctctccaccaaacaaggagaagaacccttggttagattgagtcttactgagagactggggaaacgaaaattttcagcaggcggtgacagtgatcctccattaaagcgtagcctggcacagaggctagggaagaaagttgaagctccagaaactaacattgacaaaacaccaaagaaagctcaagtttccaagtctcttaaggagcgattaggcatgtcagctgatccagataatgaggatgcaacagataaagttaataaagttggtgagatccatgtgaagacattagaagaaattcttcttgaaagagccagtcagaaacgtggagaattgcaaactaaactcaagacagaaggaccttcaaaaactgatgattctacttcaggagcaagaagctcctccactatccgtatcaaaaccttctctgaggtcctggctgaaaaaaaacatcggcagcaggaagcagagagacaaaaaagcaaaaaggatacaacttgcatcaagctaaagattgatagtgaaattaaaaaaacagtagttttgccacccattgttgccagcagaggacaatcagaggagcctgcaggtaaaacaaagtctatgcaggaggtgcacatcaagacgctggaagaaattaaactggagaaggcactgagggtgcagcagagctctgagagcagcaccagctccccgtctcaacacgaggccactccaggggcaaggcggctgctgcgaatcaccaaaagaacagggatgaaagaagagaagaaccttcaggaaggaaatgaagttgattctcagagcagtattagaacagaagctaaagaggcttcaggtgagaccacaggagttgacatcactaaaattcaagtcaagagatgtgagaccatgagagagaagcacatgcagaaacagcaggagagggaaaaatcagtcttgacacctcttcggggagatgtagcctcttgcaatacccaagtggcagagaaaccagtgctcactgctgtgccaggaatcacacggcacctgaccaagcggcttcccacaaagtcatcccagaaggtggaggtagaaacctcagggattggagactcattattgaatgtgaaatgtgcagcacagaccttggaaaaaaggggtaaagctaaacccaaagtgaacgtgaagccatctgtggttaaagttgtgtcatcccccaaattggccccaaaacgtaaggcagtggagatgcacgctgctgtcattgccgctgtgaagccactcagctccagcagtgtcctacaggaacccccagccaaaaaggcagctgtggctgttgtcccgcttgtctctgaggacaaatcagtcactgtgcctgaagcagaaaatcctagagacagtcttgtgctgcctccaacccagtcctcttcagattcctcacccccggaggtgtctggcccttcctcatcccaaatgagcatgaaaactcgccgactcagctctgcctcaacaggaaagcccccactctctgtggaggatgattttgagaaactaatatgggagatttcaggaggcaaattggaagctgagattgacctggatcctgggaaagatgaagatgaccttctgcttgagctatcagaaatgattgatagctgaaggtggtagtgaggacactttaaaaaaaaaatcgccaaaaaactggacttagtttcatctattgtaacatttacctgagatgatcatttctttagtctagaatttgccccaaatcagaagtatacctctgaattatctgtatgtgtcctggattccttggggtcagatttttaaagttactttataaccattttgtccatttgatgccattgtttatcatcttttgagaaaaaagttctgtcatacccttctctccacaaaaaagagactgagagggagatcaagtgaaagggtgcaagcgaacttagtgactccttgaggtgtttgtcagttttggcttttttcttctttgttgtattctttatgtattgtcttgatgtacttaatattacctgagtttgaaatggatgaagacagctgctaccattaaggaccaaattttatgctaccactaaacaaaaatacccactcagtctgtgttaaattgtatgtctttttaaaggtatttaaagattcaactaagctttaaagagggctgagcagctcaggaagcctgtaatgtgggcataactctttggacctgatcttgatgcttctgctgctctgttagcctctgaagagcaatatctaatttattattactgtaattttttaaaaggctttaaagtgcctcaggggtcccctgaaactaattttctatttctgggattccctggattcattatatgagatggtgacatgattagaggaattcttttttagtatgaaaattgtcctttttcttcttcagtacttgcctccttgctggcattgaattaacacagggacaaaatttggttaattttttatttctaactctcccaacaaacccctgttgcccagtatttgtttggtggcctttaaccacctgagggaaaaaatgagcttattcaagctgccaatatttatctatgggctgtagcagtacactgaattgtactgtgccagggatattgagatgctctgggggtgtattgtatacctgccagttttcttcatttctgaattgagttttcttttcttgatgttggtttccttcatatcacctcaaggtttagatttgtgaaggaataagcatgatggaaataatagtcttgaaaggagatatgttgtatataatcaggaggaagaggaaggaaggacttacccattttgatattttgctgtaggtggccagttttgtttctcatagggaaatctgacccacctgtcatgttggctcctaaggaactgctgttgtaagcggctcatcaagagttgaacttcacgtagccttgttgggaatatggaaaaggaagaaagccacaggactgcccattcagtcttgggaagattgggatgattctgcacaagcaaaaatgactgaagtttatgtatagacacacctctaccaatccatcttcagctgactgaatgttgtatgatagcccttctccaaagcagaggtagaatgttcaggtttcaccatggattttctacttatttcgtttttggaatcagcttacagattccaggtcccttttgtatatattctttattcttttgcttttttaaaaaataattttgtttcatatttaaagcacttgtattagtcaatgtttcgtgttccgcattatttgaaccatttgcccttacagaaagagaaatacttgtttgtgttttaaataaaactgatgtaggaaagtc

SEQ ID NO: 201271 - DNA, 4365 bp, Homo sapiens
  Payload ID: 19724
  Gene Name: zinc finger CCCH-type containing 11A
  Uniprot ID: O75152
  ENST ID: ENST00000367210
  CDS Start-End: 214-2646
ctgcaacctccacctcccgggttcaagaagtttccctaccttaggctcctgagtagctgggactacaggattacagtttaaagacaatttctgtgatcaagttgtcatttggaagattaaacccatttcacgaggacttggagcctggtccttgctttgaggaagcagtggcttgtttcaagaagccacttctgatctaagaatctacccagcatgcctaatcaaggagaagactgctatttttttttctattccacatgtaccaaaggtgacagctgcccattccgtcactgtgaagctgcaataggaaatgaaactgtttgcacattatggcaagaagggcgctgttttcgacaggtgtgcaggtttcggcacatggagattgataaaaaacgcagtgaaattccttgttattgggaaaatcagccaacaggatgtcaaaaattaaactgcgctttccatcacaatagaggacgatatgttgatggccttttcctacctccgagcaaaactgtgttgcccactgtgcctgagtcaccagaagaggaagtgaaggctagccaactttcagttcagcagaacaaattgtctgtccagtccaatccttcccctcagctgcggagcgttatgaaagtagaaagttccgaaaatgttcctagccccacgcatccaccagttgtaattaatgctgcagatgatgatgaagatgatgatgatcagttttctgaggaaggtgatgaaaccaaaacacctaccctgcaaccaactcctgaagttcacaatggattacgagtgacttctgtccggaaacctgcagtcaatataaagcaaggtgaatgtttgaattttggaataaaaactcttgaggaaattaagtcaaagaaaatgaaggaaaaatctaagaagcaaggtgagggttcttcaggagtttccagtcttttactccaccctgagcccgttccaggtcctgaaaaagaaaatgtcaggactgtggtgaggacagtaactctctccaccaaacaaggagaagaacccttggttagattgagtcttactgagagactggggaaacgaaaattttcagcaggcggtgacagtgatcctccattaaagcgtagcctggcacagaggctagggaagaaagttgaagctccagaaactaacattgacaaaacaccaaagaaagctcaagtttccaagtctcttaaggagcgattaggcatgtcagctgatccagataatgaggatgcaacagataaagttaataaagttggtgagatccatgtgaagacattagaagaaattcttcttgaaagagccagtcagaaacgtggagaattgcaaactaaactcaagacagaaggaccttcaaaaactgatgattctacttcaggagcaagaagctcctccactatccgtatcaaaaccttctctgaggtcctggctgaaaaaaaacatcggcagcaggaagcagagagacaaaaaagcaaaaaggatacaacttgcatcaagctaaagattgatagtgaaattaaaaaaacagtagttttgccacccattgttgccagcagaggacaatcagaggagcctgcaggtaaaacaaagtctatgcaggaggtgcacatcaagacgctggaagaaattaaactggagaaggcactgagggtgcagcagagctctgagagcagcaccagctccccgtctcaacacgaggccactccaggggcaaggcggctgctgcgaatcaccaaaagaacagggatgaaagaagagaagaaccttcaggaaggaaatgaagttgattctcagagcagtattagaacagaagctaaagaggcttcaggtgagaccacaggagttgacatcactaaaattcaagtcaagagatgtgagaccatgagagagaagcacatgcagaaacagcaggagagggaaaaatcagtcttgacacctcttcggggagatgtagcctcttgcaatacccaagtggcagagaaaccagtgctcactgctgtgccaggaatcacacggcacctgaccaagcggcttcccacaaagtcatcccagaaggtggaggtagaaacctcagggattggagactcattattgaatgtgaaatgtgcagcacagaccttggaaaaaaggggtaaagctaaacccaaagtgaacgtgaagccatctgtggttaaagttgtgtcatcccccaaattggccccaaaacgtaaggcagtggagatgcacgctgctgtcattgccgctgtgaagccactcagctccagcagtgtcctacaggaacccccagccaaaaaggcagctgtggctgttgtcccgcttgtctctgaggacaaatcagtcactgtgcctgaagcagaaaatcctagagacagtcttgtgctgcctccaacccagtcctcttcagattcctcacccccggaggtgtctggcccttcctcatcccaaatgagcatgaaaactcgccgactcagctctgcctcaacaggaaagcccccactctctgtggaggatgattttgagaaactaatatgggagatttcaggaggcaaattggaagctgagattgacctggatcctgggaaagatgaagatgaccttctgcttgagctatcagaaatgattgatagctgaaggtggtagtgaggacactttaaaaaaaaaatcgccaaaaaactggacttagtttcatctattgtaacatttacctgagatgatcatttctttagtctagaatttgccccaaatcagaagtatacctctgaattatctgtatgtgtcctggattccttggggtcagatttttaaagttactttataaccattttgtccatttgatgccattgtttatcatcttttgagaaaaaagttctgtcatacccttctctccacaaaaaagagactgagagggagatcaagtgaaagggtgcaagcgaacttagtgactccttgaggtgtttgtcagttttggcttttttcttctttgttgtattctttatgtattgtcttgatgtacttaatattacctgagtttgaaatggatgaagacagctgctaccattaaggaccaaattttatgctaccactaaacaaaaatacccactcagtctgtgttaaattgtatgtctttttaaaggtatttaaagattcaactaagctttaaagagggctgagcagctcaggaagcctgtaatgtgggcataactctttggacctgatcttgatgcttctgctgctctgttagcctctgaagagcaatatctaatttattattactgtaattttttaaaaggctttaaagtgcctcaggggtcccctgaaactaattttctatttctgggattccctggattcattatatgagatggtgacatgattagaggaattcttttttagtatgaaaattgtcctttttcttcttcagtacttgcctccttgctggcattgaattaacacagggacaaaatttggttaattttttatttctaactctcccaacaaacccctgttgcccagtatttgtttggtggcctttaaccacctgagggaaaaaatgagcttattcaagctgccaatatttatctatgggctgtagcagtacactgaattgtactgtgccagggatattgagatgctctgggggtgtattgtatacctgccagttttcttcatttctgaattgagttttcttttcttgatgttggtttccttcatatcacctcaaggtttagatttgtgaaggaataagcatgatggaaataatagtcttgaaaggagatatgttgtatataatcaggaggaagaggaaggaaggacttacccattttgatattttgctgtaggtggccagttttgtttctcatagggaaatctgacccacctgtcatgttggctcctaaggaactgctgttgtaagcggctcatcaagagttgaacttcacgtagccttgttgggaatatggaaaaggaagaaagccacaggactgcccattcagtcttgggaagattgggatgattctgcacaagcaaaaatgactgaagtttatgtatagacacacctctaccaatccatcttcagctgactgaatgttgtatgatagcccttctccaaagcagaggtagaatgttcaggtttcaccatggattttctacttatttcgtttttggaatcagcttacagattccaggtcccttttgtatatattctttattcttttgcttttttaaaaaataattttgtttcatatttaaagcacttgtattagtcaatgtttcgtgttccgcattatttgaaccatttgcccttacagaaagagaaatacttgtttgtgttttaaataaaactgatgtagg

SEQ ID NO: 201272 - DNA, 3004 bp, Homo sapiens
  Payload ID: 19724
  Gene Name: zinc finger CCCH-type containing 11A
  Uniprot ID: O75152
  ENST ID: ENST00000367212
  CDS Start-End: 541-2973
ggacgacggacggcagcggccaagcaagaagaaagacgtggcagcaagcgggagtcggggatagtgtcatcggttcgggtcccggtactttggagcttgtctcaaactccacatacagaaagccaccgaccttattccggtatcctacacccattccccactctcattacactcccacccctggccctcagcgtcggagtcaagagcaacagggacacttccgttctccttgtaggactggtgaaaccgtaatgaagaacacccctaaactcccataatcgatttggggatattccctgcccaaaaaattcctggaaaattgactagtattaagtgcgtaatagattggaactcagtgaagacacagatgttcctgttcagagcaaccagctaatgattacagtttaaagacaatttctgtgatcaagttgtcatttggaagattaaacccatttcacgaggacttggagcctggtccttgctttgaggaagcagtggcttgtttcaagaagccacttctgatctaagaatctacccagcatgcctaatcaaggagaagactgctatttttttttctattccacatgtaccaaaggtgacagctgcccattccgtcactgtgaagctgcaataggaaatgaaactgtttgcacattatggcaagaagggcgctgttttcgacaggtgtgcaggtttcggcacatggagattgataaaaaacgcagtgaaattccttgttattgggaaaatcagccaacaggatgtcaaaaattaaactgcgctttccatcacaatagaggacgatatgttgatggccttttcctacctccgagcaaaactgtgttgcccactgtgcctgagtcaccagaagaggaagtgaaggctagccaactttcagttcagcagaacaaattgtctgtccagtccaatccttcccctcagctgcggagcgttatgaaagtagaaagttccgaaaatgttcctagccccacgcatccaccagttgtaattaatgctgcagatgatgatgaagatgatgatgatcagttttctgaggaaggtgatgaaaccaaaacacctaccctgcaaccaactcctgaagttcacaatggattacgagtgacttctgtccggaaacctgcagtcaatataaagcaaggtgaatgtttgaattttggaataaaaactcttgaggaaattaagtcaaagaaaatgaaggaaaaatctaagaagcaaggtgagggttcttcaggagtttccagtcttttactccaccctgagcccgttccaggtcctgaaaaagaaaatgtcaggactgtggtgaggacagtaactctctccaccaaacaaggagaagaacccttggttagattgagtcttactgagagactggggaaacgaaaattttcagcaggcggtgacagtgatcctccattaaagcgtagcctggcacagaggctagggaagaaagttgaagctccagaaactaacattgacaaaacaccaaagaaagctcaagtttccaagtctcttaaggagcgattaggcatgtcagctgatccagataatgaggatgcaacagataaagttaataaagttggtgagatccatgtgaagacattagaagaaattcttcttgaaagagccagtcagaaacgtggagaattgcaaactaaactcaagacagaaggaccttcaaaaactgatgattctacttcaggagcaagaagctcctccactatccgtatcaaaaccttctctgaggtcctggctgaaaaaaaacatcggcagcaggaagcagagagacaaaaaagcaaaaaggatacaacttgcatcaagctaaagattgatagtgaaattaaaaaaacagtagttttgccacccattgttgccagcagaggacaatcagaggagcctgcaggtaaaacaaagtctatgcaggaggtgcacatcaagacgctggaagaaattaaactggagaaggcactgagggtgcagcagagctctgagagcagcaccagctccccgtctcaacacgaggccactccaggggcaaggcggctgctgcgaatcaccaaaagaacagggatgaaagaagagaagaaccttcaggaaggaaatgaagttgattctcagagcagtattagaacagaagctaaagaggcttcaggtgagaccacaggagttgacatcactaaaattcaagtcaagagatgtgagaccatgagagagaagcacatgcagaaacagcaggagagggaaaaatcagtcttgacacctcttcggggagatgtagcctcttgcaatacccaagtggcagagaaaccagtgctcactgctgtgccaggaatcacacggcacctgaccaagcggcttcccacaaagtcatcccagaaggtggaggtagaaacctcagggattggagactcattattgaatgtgaaatgtgcagcacagaccttggaaaaaaggggtaaagctaaacccaaagtgaacgtgaagccatctgtggttaaagttgtgtcatcccccaaattggccccaaaacgtaaggcagtggagatgcacgctgctgtcattgccgctgtgaagccactcagctccagcagtgtcctacaggaacccccagccaaaaaggcagctgtggctgttgtcccgcttgtctctgaggacaaatcagtcactgtgcctgaagcagaaaatcctagagacagtcttgtgctgcctccaacccagtcctcttcagattcctcacccccggaggtgtctggcccttcctcatcccaaatgagcatgaaaactcgccgactcagctctgcctcaacaggaaagcccccactctctgtggaggatgattttgagaaactaatatgggagatttcaggaggcaaattggaagctgagattgacctggatcctgggaaagatgaagatgaccttctgcttgagctatcagaaatgattgatagctgaaggtggtagtgaggacactttaaaaaaaaaa

SEQ ID NO: 201273 - DNA, 3451 bp, Homo sapiens
  Payload ID: 19724
  Gene Name: zinc finger CCCH-type containing 11A
  Uniprot ID: O75152
  ENST ID: ENST00000367214
  CDS Start-End: 998-3430
ttttctgctagtgctgctgctgctgggaggacgacggacggcagcggccaagcaagaagaaagacgtggcagcaagcgggagtcggggatagtgtcatcggttcggtaaagtttctgttctctgggtcccggtactttggagcttgtctcaaactccacatacagaaagccaccgaccttattccggtatcctacacccattccccactctcattacactcccacccctggccctcagcgtcggagtcaagagcaacagggacacttccgttctccttgtaggactggtgaaaccgtaatgaagaacacccctaaactcccataatcggtgcggattcctatggggaaggcctatattgttgacatcttccaggccttggttctggaccttgagaaagaggctgtggaactagagatagcgatgctttttaggatttggggatattccctgcccaaaaaattcctggaaaattgactagtattaagtctatggaagatggagttttttttcatgatcctttaactctcaagttcatctttaaatgaactctttttttttgttttttttttgttttgttttgttttgtttttgaggagataactaaccctagctgtctccagtctgacaaaggttatttgaatggacttaatctcccagtagttgggagatgttttaaaaacacatgctgtgtttgaattgtggctgagaggttttcttggcaatgtgaggaggaaatttttttctgcctcattattattaattcatggattgagtgttggttcgacctacaggcgtaatagattggaactcagtgaagacacagatgttcctgttcagagcaaccagctaatgattacagtttaaagacaatttctgtgatcaagttgtcatttggaagattaaacccatttcacgaggacttggagcctggtccttgctttgaggaagcagtggcttgtttcaagaagccacttctgatctaagaatctacccagcatgcctaatcaaggagaagactgctatttttttttctattccacatgtaccaaaggtgacagctgcccattccgtcactgtgaagctgcaataggaaatgaaactgtttgcacattatggcaagaagggcgctgttttcgacaggtgtgcaggtttcggcacatggagattgataaaaaacgcagtgaaattccttgttattgggaaaatcagccaacaggatgtcaaaaattaaactgcgctttccatcacaatagaggacgatatgttgatggccttttcctacctccgagcaaaactgtgttgcccactgtgcctgagtcaccagaagaggaagtgaaggctagccaactttcagttcagcagaacaaattgtctgtccagtccaatccttcccctcagctgcggagcgttatgaaagtagaaagttccgaaaatgttcctagccccacgcatccaccagttgtaattaatgctgcagatgatgatgaagatgatgatgatcagttttctgaggaaggtgatgaaaccaaaacacctaccctgcaaccaactcctgaagttcacaatggattacgagtgacttctgtccggaaacctgcagtcaatataaagcaaggtgaatgtttgaattttggaataaaaactcttgaggaaattaagtcaaagaaaatgaaggaaaaatctaagaagcaaggtgagggttcttcaggagtttccagtcttttactccaccctgagcccgttccaggtcctgaaaaagaaaatgtcaggactgtggtgaggacagtaactctctccaccaaacaaggagaagaacccttggttagattgagtcttactgagagactggggaaacgaaaattttcagcaggcggtgacagtgatcctccattaaagcgtagcctggcacagaggctagggaagaaagttgaagctccagaaactaacattgacaaaacaccaaagaaagctcaagtttccaagtctcttaaggagcgattaggcatgtcagctgatccagataatgaggatgcaacagataaagttaataaagttggtgagatccatgtgaagacattagaagaaattcttcttgaaagagccagtcagaaacgtggagaattgcaaactaaactcaagacagaaggaccttcaaaaactgatgattctacttcaggagcaagaagctcctccactatccgtatcaaaaccttctctgaggtcctggctgaaaaaaaacatcggcagcaggaagcagagagacaaaaaagcaaaaaggatacaacttgcatcaagctaaagattgatagtgaaattaaaaaaacagtagttttgccacccattgttgccagcagaggacaatcagaggagcctgcaggtaaaacaaagtctatgcaggaggtgcacatcaagacgctggaagaaattaaactggagaaggcactgagggtgcagcagagctctgagagcagcaccagctccccgtctcaacacgaggccactccaggggcaaggcggctgctgcgaatcaccaaaagaacagggatgaaagaagagaagaaccttcaggaaggaaatgaagttgattctcagagcagtattagaacagaagctaaagaggcttcaggtgagaccacaggagttgacatcactaaaattcaagtcaagagatgtgagaccatgagagagaagcacatgcagaaacagcaggagagggaaaaatcagtcttgacacctcttcggggagatgtagcctcttgcaatacccaagtggcagagaaaccagtgctcactgctgtgccaggaatcacacggcacctgaccaagcggcttcccacaaagtcatcccagaaggtggaggtagaaacctcagggattggagactcattattgaatgtgaaatgtgcagcacagaccttggaaaaaaggggtaaagctaaacccaaagtgaacgtgaagccatctgtggttaaagttgtgtcatcccccaaattggccccaaaacgtaaggcagtggagatgcacgctgctgtcattgccgctgtgaagccactcagctccagcagtgtcctacaggaacccccagccaaaaaggcagctgtggctgttgtcccgcttgtctctgaggacaaatcagtcactgtgcctgaagcagaaaatcctagagacagtcttgtgctgcctccaacccagtcctcttcagattcctcacccccggaggtgtctggcccttcctcatcccaaatgagcatgaaaactcgccgactcagctctgcctcaacaggaaagcccccactctctgtggaggatgattttgagaaactaatatgggagatttcaggaggcaaattggaagctgagattgacctggatcctgggaaagatgaagatgaccttctgcttgagctatcagaaatgattgatagctgaaggtggtagtgaggacacttt

SEQ ID NO: 201274 - DNA, 682 bp, Homo sapiens
  Payload ID: 19724
  Gene Name: zinc finger CCCH-type containing 11A
  ENST ID: ENST00000432282
  CDS Start-End: 533-682
gacgctggcagtcttggttttctgctagtgctgctgctgctgggaggacgacggacggcagcggccaagcaagaagaaagacgtggcagcaagcgggagtcggggatagtgtcatcggttcggactggtgaaaccgtaatgaagaacacccctaaactcccataatcggtgcggattcctatggggaaggcctatattgttgacatcttccaggccttggttctggaccttgagaaagaggctgtggaactagagatagcgatgctttttaggatttggggatattccctgcccaaaaaattcctggaaaattgactagtattaagtgcgtaatagattggaactcagtgaagacacagatgttcctgttcagagcaaccagctaatgattacagtttaaagacaatttctgtgatcaagttgtcatttggaagattaaacccatttcacgaggacttggagcctggtccttgctttgaggaagcagtggcttgtttcaagaagccacttctgatctaagaatctacccagcatgcctaatcaaggagaagactgctatttttttttctattccacatgtaccaaaggtgacagctgcccattccgtcactgtgaagctgcaataggaaatgaaactgtttgcacattatggcaagaagggcgctgttttcgacaggtgtgc

SEQ ID NO: 201275 - DNA, 1892 bp, Homo sapiens
  Payload ID: 19724
  Gene Name: zinc finger CCCH-type containing 11A
  ENST ID: ENST00000453771
  CDS Start-End: 347-1892
gacgctggcagtcttggttttctgctagtgctgctgctgctgggaggacgacggacggcagcggccaagcaagaagaaagacgtggcagcaagcgggagtcggggatagtgtcatcggttcggtaaagtttctgttctctggcgtaatagattggaactcagtgaagacacagatgttcctgttcagagcaaccagctaatgattacagtttaaagacaatttctgtgatcaagttgtcatttggaagattaaacccatttcacgaggacttggagcctggtccttgctttgaggaagcagtggcttgtttcaagaagccacttctgatctaagaatctacccagcatgcctaatcaaggagaagactgctatttttttttctattccacatgtaccaaaggtgacagctgcccattccgtcactgtgaagctgcaataggaaatgaaactgtttgcacattatggcaagaagggcgctgttttcgacaggtgtgcaggtttcggcacatggagattgataaaaaacgcagtgaaattccttgttattgggaaaatcagccaacaggatgtcaaaaattaaactgcgctttccatcacaatagaggacgatatgttgatggccttttcctacctccgagcaaaactgtgttgcccactgtgcctgagtcaccagaagaggaagtgaaggctagccaactttcagttcagcagaacaaattgtctgtccagtccaatccttcccctcagctgcggagcgttatgaaagtagaaagttccgaaaatgttcctagccccacgcatccaccagttgtaattaatgctgcagatgatgatgaagatgatgatgatcagttttctgaggaaggtgatgaaaccaaaacacctaccctgcaaccaactcctgaagttcacaatggattacgagtgacttctgtccggaaacctgcagtcaatataaagcaaggtgaatgtttgaattttggaataaaaactcttgaggaaattaagtcaaagaaaatgaaggaaaaatctaagaagcaaggtgagggttcttcaggagtttccagtcttttactccaccctgagcccgttccaggtcctgaaaaagaaaatgtcaggactgtggtgaggacagtaactctctccaccaaacaaggagaagaacccttggttagattgagtcttactgagagactggggaaacgaaaattttcagcaggcggtgacagtgatcctccattaaagcgtagcctggcacagaggctagggaagaaagttgaagctccagaaactaacattgacaaaacaccaaagaaagctcaagtttccaagtctcttaaggagcgattaggcatgtcagctgatccagataatgaggatgcaacagataaagttaataaagttggtgagatccatgtgaagacattagaagaaattcttcttgaaagagccagtcagaaacgtggagaattgcaaactaaactcaagacagaaggaccttcaaaaactgatgattctacttcaggagcaagaagctcctccactatccgtatcaaaaccttctctgaggtcctggctgaaaaaaaacatcggcagcaggaagcagagagacaaaaaagcaaaaaggatacaacttgcatcaagctaaagattgatagtgaaattaaaaaaacagtagttttgccacccattgttgccagcagaggacaatcagaggagcctgcaggtaaaacaaagtctatgcaggaggtgcacatcaagacgctggaagaaattaaactggagaaggcactgagggtgcagcagagctctgagagcagcaccagctccccgtctcaacacgaggccactccaggggcaaggcggctgctgcgaatcaccaaaagaacag

SEQ ID NO: 201276 - DNA, 8404 bp, Homo sapiens
  Payload ID: 19724
  Gene Name: zinc finger CCCH-type containing 11A
  ENST ID: ENST00000495527
  CDS Start-End: 4317-6275
cctgattataggttgccatcagagacttactttttcactaaggctgtacctcagttatatgattgtgtcagagaaaaaattttcttaactttagagaatgttcaaagccaaaagatacacctgactgttgacatatggacccatgacccatccactgactattttattgtgactgtacactgggtttctttggaaactgcgtcttttctcaataatggcaggatccccgattttagaaagtgggcagtgctttgtgttacaggtttggctaaagactgtttgataaccaatattttacaagaattaaatgaccagattggtctgtggctttctccaaatttccttatccctagcttcattgtttctgacaattcctctaatgtggtacatgcaatcaaagatggtggttttacccatgtgccatgcttcctgcattgtttaaatatggtcattcaggactttttctgcgagcacaaaagcattgagaatatgttagtggctgccaggaaaacttgtcatcattttagtcattcggtcaaggcccgtcagatactgcaagagttccaaaatgatcaccaacttccatggaagaatttgaagcaggacgaaactggccattggatttctactttttatatgttaaaatggctcttggagcattgctactcagttcaccatagtcttggtagagccagtggagttgtgctcacctcccttcagtggactctaatgacttatgtttgtgatattcttaagccatttgaggaggctacccagaaagtgagcgtgaagaccgcaggattgaatcaggtgctacccctaatccatcatctactcctttccctgcagaaactcagagaagattttcaagtcagaggtattactcaggccctcaatctggtggatagtttatctctgaaacttgaaacagataccctactaagtgccatgcttaaatccaagccctgtatcttggctactttgttagatccttgctttaaaaacagtttggaagacttttttcctcaaggtgctgatttagaaacttataagcagttccttgcagaagaggtctgtaattatatggaatcttcaccagagatctgccaaattccaacttcagaagcttcttgtccctcagttacagtgggagctgattcatttacctcatctctaaaagaaggcacctccagttcaggttctgttgatagctcagctgtagacaatgttgcccttggaagcaaaagcttcatgttcccttctgctgtagcagttgtggatgagtacttcaaagagaagtattcagagttctcaggaggtgatgaccctttaatttactggcagaggaagataagcatatggccggctttgacccaggttgccatccagtatctaagttgccccatgtgtagttggcaatctgaatgtatctttactaaaaatagccactttcatccaaaacagatcatgagcctggactttgacaatatagaacaactgatgtttctgaaaatgaacttgaaaaatgttaactacgattattctacgttggttctgagctgggatcctgagcagaatgaagttgttcaaagcagtgaaaaagaaatactgccttaatttctttttctccatttaaaatgggcaactttttgctgtgttactgtatcttaatagctgtagttgttaaatataatcattatctttataaacacatctggggaaacctgaaatcacacaagggctgaaaattcctcagaggcaatataattttgataaaatgaagattaaagatttcatagctataactgtggcgctagcacttgaaaattttgcttataccaatgagagagaagatatttttaattaaaaaaaatatagtgcagcattgaaaggccttaggctttcttcctggtagattgaactagtaattggttttaagtaaaacttcccccaccatgggaaattttattgctctgaaatcaacgaaatgagaaaaaagtacactggctggcattcctcctgcccctgtttttctgtttccttaaaaaccctgatgcttaattacaacttggcaaaaagaaaacccgtgaaattgttttatatttggaaatttctaattgcctcctcatactggtcagctttataatttcaaattgttgagtgtgatagtgttaccctttagaattggatcttatataaaagggaaatattagaaaacaattaggaaaatatacttttagtctttgaaatgcctgttttaacctttataaaatattataaaaatagattgtgtaggtactttcaaataatttatgggtaaaaacagactaaaatgtttgcaagaattggaaaaggttgaatgggaattgtaatgagagccctttgaacatgcttggaaaaacccagtagacatttcccaaagattgtttctgtaattttaggtaatctttttaaaaacatacttaatgacccattatactgtattaactgtgcggttgttttggccactgaattcttaatgaaaactaagcagtcggtatttttatgtgttaggaatcattggtgaaatgagtgaattgatctcattttaagatccctttctactctgaaagtatgtttctgagattgagtaggaggccagaaaatgatgacttttagtaaaagtctattaaaagtttcagactgaataactaatgtgagatcccaatttttcctttttttcattttagatttggggatattccctgcccaaaaaattcctggaaaattgactagtattaagtgtgagtaaaaggtgtccacttttttttaagttttgattttagttttgtcttggatagtatttggcaagatttagcctagaaattatgtagtatttattacataagaatcaaaattgctttgttactgggctggtttcaaagtttagaactcatttctatgtatcaaaatcgggttttttttggttttgattttttttttttttaaattcttaaatggtaaatatgccattgtgaaatgaaatctcaactccaaaagtttacccttttactaactggagtaaatgtatacttacaaagtctttagctgtagccattagtagtaaagaatttggacctaggctgcgtaagcaagcctttccagggccactatttaatggcaaaccagtgatactggtgttgatacaaaataagaaataaattttcccttagataaagctttctgtgttttgacagtgccagtttagaatggctataatgctgctctgccttctacagcttgctgcaccactctgtagttactctattaccatacgtttctatcttttttggttaaacactccctgatgacgatgatggatatatatacatacatccatattatacataatgatatatgtgtaaggatttaccttcgtctttattttgtgggctgggcaaaatttagtgtaacaataacttcatgatactttggtataagagtaagttctttatttttataatgaacccaaatctaaagtcttttatagtgcattttaaaaggggaaacttatccaaatgttatatttctatacatttttgtgtatatgtgtgtgtgtataagccagttagtatatatctgtatgtatattatatacataaaacactatatttttacatacaagtatgcttttattatacagataataaagatgggggaaggtttctgtttttttcttaataggtgaagaaatcttgaagaccagaaattggatcttactgaaaaactgatgtttttttgttttttttttaaattatattgttcagctatggaagatggagttttttttcatgatcctttaactctcaagttcatctttaaatgaactctttttttttgttttttttttgttttgttttgttttgtttttgaggagataactaaccctagctgtctccagtctgacaaaggttatttgaatggacttaatctcccagtagttgggagatgttttaaaaacacatgctgtgtttgaattgtggctgagaggttttcttggcaatgtgaggaggaaatttttttctgcctcattattattaattcatggattgagtgttggttcgacctacaggcgtaatagattggaactcagtgaagacacagatgttcctgttcagagcaaccagctaatgattacagtttaaagacaatttctgtgatcaagttgtcatttggaagattaaacccatttcacgaggacttggagcctggtccttgctttgaggaagcagtggcttgtttcaagaagccacttctgatctaagaatctacccagcatgcctaatcaaggagaagactgctatttttttttctattccacatgtaccaaaggtgacagctgcccattccgtcactgtgaagctgcaataggaaatgaaactgtttgcacattatggcaagaagggcgctgttttcgacaggtgtgcaggtttcggcacatggagattgataaaaaacgcagtgaaattccttgttattgggaaaatcagccaacaggatgtcaaaaattaaactgcgctttccatcacaatagaggacgatatgttgatggccttttcctacctccgagcaaaactgtgttgcccactgtgcctgagtcaccagaagaggaagtgaaggctagccaactttcagttcagcagaacaaattgtctgtccagtccaatccttcccctcagctgcggagcgttatgaaagtagaaagttccgaaaatgttcctagccccacgcatccaccagttgtaattaatgctgcagatgatgatgaagatgatgatgatcagttttctgaggaaggtgatgaaaccaaaacacctaccctgcaaccaactcctgaagttcacaatggattacgagtgacttctgtccggaaacctgcagtcaatataaagcaaggtgaatgtttgaattttggaataaaaactcttgaggaaattaagtcaaagaaaatgaaggaaaaatctaagaagcaaggtgagggttcttcaggagtttccagtcttttactccaccctgagcccgttccaggtcctgaaaaagaaaatgtcaggactgtggtgaggacagtaactctctccaccaaacaaggagaagaacccttggttagattgagtcttactgagagactggggaaacgaaaattttcagcaggcggtgacagtgatcctccattaaagcgtagcctggcacagaggctagggaagaaagttgaagctccagaaactaacattgacaaaacaccaaagaaagctcaagtttccaagtctcttaaggagcgattaggcatgtcagctgatccagataatgaggatgcaacagataaagttaataaagttggtgagatccatgtgaagacattagaagaaattcttcttgaaagagccagtcagaaacgtggagaattgcaaactaaactcaagacagaaggaccttcaaaaactgatgattctacttcaggagcaagaagctcctccactatccgtatcaaaaccttctctgaggtcctggctgaaaaaaaacatcggcagcaggaagcagagagacaaaaaagcaaaaaggatacaacttgcatcaagctaaagattgatagtgaaattaaaaaaacagtagttttgccacccattgttgccagcagaggacaatcagaggagcctgcaggtaaaacaaagtctatgcaggaggtgcacatcaagacgctggaagaaattaaactggagaaggcactgagggtgcagcagagctctgagagcagcaccagctccccgtctcaacacgaggccactccaggggcaaggcggctgctgcgaatcaccaaaagaacagggatgaaagaagagaagaaccttcaggaaggaaatgaagttgattctcagagcagtattagaacagaagctaaagaggcttcaggtgagaccacaggagttgacatcactaaaattcaagtcaagagatgtgagaccatgagagagaagcacatgcagaaacagcaggagagggaaaaatcagtcttgacacctcttcggggagatgtagcctcttgcaatacccaagtggcagagaaaccagtgctcactgctgtgccaggaatcacacggcacctgaccaagcggcttcccacaaagtcatcccagaaggtggaggtagaaacctcagggattggagactcattattgaatgtgaaatgtgcagcacagaccttggaaaaaaggggtaaagatattttctgccctttgtagctaaacccaaagtgaacgtgaagccatctgtggttaaagttgtgtcatcccccaaattggccccaaaacgtaaggcagtggagatgcacgctgctgtcattgccgctgtgaagccactcagctccagcagtgtcctacaggaacccccagccaaaaaggcagctgtggctgttgtcccgcttgtctctgaggacaaatcagtcactgtgcctgaagcagaaaatcctagagacagtcttgtgctgcctccaacccagtcctcttcagattcctcacccccggaggtgtctggcccttcctcatcccaaatgagcatgaaaactcgccgactcagctctgcctcaacaggaaagcccccactctctgtggaggatgattttgagaaactaatatgggagatttcaggaggcaaattggaagctgagattgacctggatcctgggaaagatgaagatgaccttctgcttgagctatcagaaatgattgatagctgaaggtggtagtgaggacactttaaaaaaaaaatcgccaaaaaactggacttagtttcatctattgtaacatttacctgagatgatcatttctttagtctagaatttgccccaaatcagaagtatacctctgaattatctgtatgtgtcctggattccttggggtcagatttttaaagttactttataaccattttgtccatttgatgccattgtttatcatcttttgagaaaaaagttctgtcatacccttctctccacaaaaaagagactgagagggagatcaagtgaaagggtgcaagcgaacttagtgactccttgaggtgtttgtcagttttggcttttttcttctttgttgtattctttatgtattgtcttgatgtacttaatattacctgagtttgaaatggatgaagacagctgctaccattaaggaccaaattttatgctaccactaaacaaaaatacccactcagtctgtgttaaattgtatgtctttttaaaggtatttaaagattcaactaagctttaaagagggctgagcagctcaggaagcctgtaatgtgggcataactctttggacctgatcttgatgcttctgctgctctgttagcctctgaagagcaatatctaatttattattactgtaattttttaaaaggctttaaagtgcctcaggggtcccctgaaactaattttctatttctgggattccctggattcattatatgagatggtgacatgattagaggaattcttttttagtatgaaaattgtcctttttcttcttcagtacttgcctccttgctggcattgaattaacacagggacaaaatttggttaattttttatttctaactctcccaacaaacccctgttgcccagtatttgtttggtggcctttaaccacctgagggaaaaaatgagcttattcaagctgccaatatttatctatgggctgtagcagtacactgaattgtactgtgccagggatattgagatgctctgggggtgtattgtatacctgccagttttcttcatttctgaattgagttttcttttcttgatgttggtttccttcatatcacctcaaggtttagatttgtgaaggaataagcatgatggaaataatagtcttgaaaggagatatgttgtatataatcaggaggaagaggaaggaaggacttacccattttgatattttgctgtaggtggccagttttgtttctcatagggaaatctgacccacctgtcatgttggctcctaaggaactgctgttgtaagcggctcatcaagagttgaacttcacgtagccttgttgggaatatggaaaaggaagaaagccacaggactgcccattcagtcttgggaagattgggatgattctgcacaagcaaaaatgactgaagtttatgtatagacacacctctaccaatccatcttcagctgactgaatgttgtatgatagcccttctccaaagcagaggtagaatgttcaggtttcaccatggattttctacttatttcgtttttggaatcagcttacagattccaggtcccttttgtatatattctttattcttttgcttttttaaaaaataattttgtttcatatttaaagcacttgtattagtcaa

SEQ ID NO: 201277 - DNA, 7979 bp, Homo sapiens
  Payload ID: 19724
  Gene Name: zinc finger CCCH-type containing 11A
  Uniprot ID: O75152
  ENST ID: ENST00000545588
  CDS Start-End: 3828-6260
atgttagtggctgccaggaaaacttgtcatcattttagtcattcggtcaaggcccgtcagatactgcaagagttccaaaatgatcaccaacttccatggaagaatttgaagcaggacgaaactggccattggatttctactttttatatgttaaaatggctcttggagcattgctactcagttcaccatagtcttggtagagccagtggagttgtgctcacctcccttcagtggactctaatgacttatgtttgtgatattcttaagccatttgaggaggctacccagaaagtgagcgtgaagaccgcaggattgaatcaggtgctacccctaatccatcatctactcctttccctgcagaaactcagagaagattttcaagtcagaggtattactcaggccctcaatctggtggatagtttatctctgaaacttgaaacagataccctactaagtgccatgcttaaatccaagccctgtatcttggctactttgttagatccttgctttaaaaacagtttggaagacttttttcctcaaggtgctgatttagaaacttataagcagttccttgcagaagaggtctgtaattatatggaatcttcaccagagatctgccaaattccaacttcagaagcttcttgtccctcagttacagtgggagctgattcatttacctcatctctaaaagaaggcacctccagttcaggttctgttgatagctcagctgtagacaatgttgcccttggaagcaaaagcttcatgttcccttctgctgtagcagttgtggatgagtacttcaaagagaagtattcagagttctcaggaggtgatgaccctttaatttactggcagaggaagataagcatatggccggctttgacccaggttgccatccagtatctaagttgccccatgtgtagttggcaatctgaatgtatctttactaaaaatagccactttcatccaaaacagatcatgagcctggactttgacaatatagaacaactgatgtttctgaaaatgaacttgaaaaatgttaactacgattattctacgttggttctgagctgggatcctgagcagaatgaagttgttcaaagcagtgaaaaagaaatactgccttaatttctttttctccatttaaaatgggcaactttttgctgtgttactgtatcttaatagctgtagttgttaaatataatcattatctttataaacacatctggggaaacctgaaatcacacaagggctgaaaattcctcagaggcaatataattttgataaaatgaagattaaagatttcatagctataactgtggcgctagcacttgaaaattttgcttataccaatgagagagaagatatttttaattaaaaaaaatatagtgcagcattgaaaggccttaggctttcttcctggtagattgaactagtaattggttttaagtaaaacttcccccaccatgggaaattttattgctctgaaatcaacgaaatgagaaaaaagtacactggctggcattcctcctgcccctgtttttctgtttccttaaaaaccctgatgcttaattacaacttggcaaaaagaaaacccgtgaaattgttttatatttggaaatttctaattgcctcctcatactggtcagctttataatttcaaattgttgagtgtgatagtgttaccctttagaattggatcttatataaaagggaaatattagaaaacaattaggaaaatatacttttagtctttgaaatgcctgttttaacctttataaaatattataaaaatagattgtgtaggtactttcaaataatttatgggtaaaaacagactaaaatgtttgcaagaattggaaaaggttgaatgggaattgtaatgagagccctttgaacatgcttggaaaaacccagtagacatttcccaaagattgtttctgtaattttaggtaatctttttaaaaacatacttaatgacccattatactgtattaactgtgcggttgttttggccactgaattcttaatgaaaactaagcagtcggtatttttatgtgttaggaatcattggtgaaatgagtgaattgatctcattttaagatccctttctactctgaaagtatgtttctgagattgagtaggaggccagaaaatgatgacttttagtaaaagtctattaaaagtttcagactgaataactaatgtgagatcccaatttttcctttttttcattttagatttggggatattccctgcccaaaaaattcctggaaaattgactagtattaagtgtgagtaaaaggtgtccacttttttttaagttttgattttagttttgtcttggatagtatttggcaagatttagcctagaaattatgtagtatttattacataagaatcaaaattgctttgttactgggctggtttcaaagtttagaactcatttctatgtatcaaaatcgggttttttttggttttgattttttttttttttaaattcttaaatggtaaatatgccattgtgaaatgaaatctcaactccaaaagtttacccttttactaactggagtaaatgtatacttacaaagtctttagctgtagccattagtagtaaagaatttggacctaggctgcgtaagcaagcctttccagggccactatttaatggcaaaccagtgatactggtgttgatacaaaataagaaataaattttcccttagataaagctttctgtgttttgacagtgccagtttagaatggctataatgctgctctgccttctacagcttgctgcaccactctgtagttactctattaccatacgtttctatcttttttggttaaacactccctgatgacgatgatggatatatatacatacatccatattatacataatgatatatgtgtaaggatttaccttcgtctttattttgtgggctgggcaaaatttagtgtaacaataacttcatgatactttggtataagagtaagttctttatttttataatgaacccaaatctaaagtcttttatagtgcattttaaaaggggaaacttatccaaatgttatatttctatacatttttgtgtatatgtgtgtgtgtataagccagttagtatatatctgtatgtatattatatacataaaacactatatttttacatacaagtatgcttttattatacagataataaagatgggggaaggtttctgtttttttcttaataggtgaagaaatcttgaagaccagaaattggatcttactgaaaaactgatgtttttttgttttttttttaaattatattgttcagctatggaagatggagttttttttcatgatcctttaactctcaagttcatctttaaatgaactctttttttttgttttttttttgttttgttttgttttgtttttgaggagataactaaccctagctgtctccagtctgacaaaggttatttgaatggacttaatctcccagtagttgggagatgttttaaaaacacatgctgtgtttgaattgtggctgagaggttttcttggcaatgtgaggaggaaatttttttctgcctcattattattaattcatggattgagtgttggttcgacctacaggcgtaatagattggaactcagtgaagacacagatgttcctgttcagagcaaccagctaatgattacagtttaaagacaatttctgtgatcaagttgtcatttggaagattaaacccatttcacgaggacttggagcctggtccttgctttgaggaagcagtggcttgtttcaagaagccacttctgatctaagaatctacccagcatgcctaatcaaggagaagactgctatttttttttctattccacatgtaccaaaggtgacagctgcccattccgtcactgtgaagctgcaataggaaatgaaactgtttgcacattatggcaagaagggcgctgttttcgacaggtgtgcaggtttcggcacatggagattgataaaaaacgcagtgaaattccttgttattgggaaaatcagccaacaggatgtcaaaaattaaactgcgctttccatcacaatagaggacgatatgttgatggccttttcctacctccgagcaaaactgtgttgcccactgtgcctgagtcaccagaagaggaagtgaaggctagccaactttcagttcagcagaacaaattgtctgtccagtccaatccttcccctcagctgcggagcgttatgaaagtagaaagttccgaaaatgttcctagccccacgcatccaccagttgtaattaatgctgcagatgatgatgaagatgatgatgatcagttttctgaggaaggtgatgaaaccaaaacacctaccctgcaaccaactcctgaagttcacaatggattacgagtgacttctgtccggaaacctgcagtcaatataaagcaaggtgaatgtttgaattttggaataaaaactcttgaggaaattaagtcaaagaaaatgaaggaaaaatctaagaagcaaggtgagggttcttcaggagtttccagtcttttactccaccctgagcccgttccaggtcctgaaaaagaaaatgtcaggactgtggtgaggacagtaactctctccaccaaacaaggagaagaacccttggttagattgagtcttactgagagactggggaaacgaaaattttcagcaggcggtgacagtgatcctccattaaagcgtagcctggcacagaggctagggaagaaagttgaagctccagaaactaacattgacaaaacaccaaagaaagctcaagtttccaagtctcttaaggagcgattaggcatgtcagctgatccagataatgaggatgcaacagataaagttaataaagttggtgagatccatgtgaagacattagaagaaattcttcttgaaagagccagtcagaaacgtggagaattgcaaactaaactcaagacagaaggaccttcaaaaactgatgattctacttcaggagcaagaagctcctccactatccgtatcaaaaccttctctgaggtcctggctgaaaaaaaacatcggcagcaggaagcagagagacaaaaaagcaaaaaggatacaacttgcatcaagctaaagattgatagtgaaattaaaaaaacagtagttttgccacccattgttgccagcagaggacaatcagaggagcctgcaggtaaaacaaagtctatgcaggaggtgcacatcaagacgctggaagaaattaaactggagaaggcactgagggtgcagcagagctctgagagcagcaccagctccccgtctcaacacgaggccactccaggggcaaggcggctgctgcgaatcaccaaaagaacagggatgaaagaagagaagaaccttcaggaaggaaatgaagttgattctcagagcagtattagaacagaagctaaagaggcttcaggtgagaccacaggagttgacatcactaaaattcaagtcaagagatgtgagaccatgagagagaagcacatgcagaaacagcaggagagggaaaaatcagtcttgacacctcttcggggagatgtagcctcttgcaatacccaagtggcagagaaaccagtgctcactgctgtgccaggaatcacacggcacctgaccaagcggcttcccacaaagtcatcccagaaggtggaggtagaaacctcagggattggagactcattattgaatgtgaaatgtgcagcacagaccttggaaaaaaggggtaaagctaaacccaaagtgaacgtgaagccatctgtggttaaagttgtgtcatcccccaaattggccccaaaacgtaaggcagtggagatgcacgctgctgtcattgccgctgtgaagccactcagctccagcagtgtcctacaggaacccccagccaaaaaggcagctgtggctgttgtcccgcttgtctctgaggacaaatcagtcactgtgcctgaagcagaaaatcctagagacagtcttgtgctgcctccaacccagtcctcttcagattcctcacccccggaggtgtctggcccttcctcatcccaaatgagcatgaaaactcgccgactcagctctgcctcaacaggaaagcccccactctctgtggaggatgattttgagaaactaatatgggagatttcaggaggcaaattggaagctgagattgacctggatcctgggaaagatgaagatgaccttctgcttgagctatcagaaatgattgatagctgaaggtggtagtgaggacactttaaaaaaaaaatcgccaaaaaactggacttagtttcatctattgtaacatttacctgagatgatcatttctttagtctagaatttgccccaaatcagaagtatacctctgaattatctgtatgtgtcctggattccttggggtcagatttttaaagttactttataaccattttgtccatttgatgccattgtttatcatcttttgagaaaaaagttctgtcatacccttctctccacaaaaaagagactgagagggagatcaagtgaaagggtgcaagcgaacttagtgactccttgaggtgtttgtcagttttggcttttttcttctttgttgtattctttatgtattgtcttgatgtacttaatattacctgagtttgaaatggatgaagacagctgctaccattaaggaccaaattttatgctaccactaaacaaaaatacccactcagtctgtgttaaattgtatgtctttttaaaggtatttaaagattcaactaagctttaaagagggctgagcagctcaggaagcctgtaatgtgggcataactctttggacctgatcttgatgcttctgctgctctgttagcctctgaagagcaatatctaatttattattactgtaattttttaaaaggctttaaagtgcctcaggggtcccctgaaactaattttctatttctgggattccctggattcattatatgagatggtgacatgattagaggaattcttttttagtatgaaaattgtcctttttcttcttcagtacttgcctccttgctggcattgaattaacacagggacaaaatttggttaattttttatttctaactctcccaacaaacccctgttgcccagtatttgtttggtggcctttaaccacctgagggaaaaaatgagcttattcaagctgccaatatttatctatgggctgtagcagtacactgaattgtactgtgccagggatattgagatgctctgggggtgtattgtatacctgccagttttcttcatttctgaattgagttttcttttcttgatgttggtttccttcatatcacctcaaggtttagatttgtgaaggaataagcatgatggaaataatagtcttgaaaggagatatgttgtatataatcaggaggaagaggaaggaaggacttacccattttgatattttgctgtaggtggccagttttgtttctcatagggaaatctgacccacctgtcatgttggctcctaaggaactgctgttgtaagcggctcatcaagagttgaacttcacgtagccttgttgggaatatggaaaaggaagaaagccacaggactgcccattcagtcttgggaagattgggatgattctgcacaagcaaaaatgactgaagtttatgtatagacacacctctaccaatccatcttcagctgactgaatgttgtatgatagcccttctccaaagcagaggtagaatgttcaggtttcaccatggattttctacttatttcgtttttggaatcagcttacagattccaggtcccttttgtatatattctttattcttttgcttttttaaaaaataattttgtttcatatttaaagcacttgtattagtcaatgtttcgtgttccgcattatttgaaccatttgcccttacagaaagagaaatacttgtttgtgttttaaataaaactgatgtagg

SEQ ID NO: 201278 - DNA, 2684 bp, Homo sapiens
  Payload ID: 19725
  Gene Name: zinc finger CCCH-type containing 12A
  Uniprot ID: Q5D1E8
  ENST ID: ENST00000373087
  CDS Start-End: 117-1916
atataaaggcgccgccgtccttacccccaggactcggccccatggagacgccgccggccgccgctggcgcatggcgggtaggagctgtggcgcggggccttccaggagtctgagctatgagtggcccctgtggagagaagcctgtcctggaagccagccccaccatgagtctgtgggaatttgaggacagccacagccgtcagggcaccccaaggccgggtcaagagctggccgctgaggaggcctcggccctggaactgcagatgaaggtggacttcttccggaagctgggctattcatccacggagatccacagcgtcctgcagaagctgggcgtccaggcagacaccaacacggtgctgggtgagctggtgaaacacgggacagccaccgagcgggagcgccagacctcaccggacccctgccctcagctccctctagtcccgcggggtggtggcacccctaaggctcccaacctggagcctccactcccagaagaggaaaaggagggcagcgacctgagaccagtggtcatcgatgggagcaacgtggccatgagccatgggaacaaggaggtcttctcctgccggggcatcctgctggcagtgaactggtttctggagcggggccacacagacatcacagtgtttgtgccatcctggaggaaggagcagcctcggcccgacgtgcccatcacagaccagcacatcctgcgggaactggagaagaagaagatcctggtgttcacaccatcacgacgcgtgggtggcaagcgggtggtgtgctatgacgacagattcattgtgaagctggcctacgagtctgacgggatcgtggtttccaacgacacataccgtgacctccaaggcgagcggcaggagtggaagcgcttcatcgaggagcggctgctcatgtactccttcgtcaatgacaagtttatgccccctgatgacccactgggccggcacgggcccagcctggacaacttcctgcgtaagaagccactcactttggagcacaggaagcagccgtgtccctatggaaggaaatgcacctatgggatcaagtgccgattcttccacccagagcggccaagctgcccccagcgctctgtggcagatgagctccgtgccaatgctctcctctcaccccccagagccccaagcaaggacaaaaatggccggcggccttcaccttcatcccagtccagctctctgctaacagagagtgagcagtgcagcctggatgggaagaagctgggggcccaggcatccccagggtcccgccaagagggtctaacacagacctatgccccatcaggcaggagcctcgcacctagcgggggcagtggcagcagctttgggcccacagactggctcccacagacgctggactcactcccgtacgtctcccaggattgcctggactcgggcattggctccctggagagccagatgtcggaactttggggggttcgaggaggaggccctggtgagccgggcccaccccgagccccttacacgggctacagtccctatggatctgagctcccagccaccgcagccttctctgcctttggccgggccatgggtgctggccacttcagtgtccctgccgactacccacccgcgccccctgcctttccacctcgagagtactggtctgaaccatacccactgcccccacccacatcagtccttcaggagcccccagtgcagagcccaggggctggcaggagcccgtggggcagggcaggcagcctggccaaggagcaggccagcgtgtatactaagctgtgtggtgtgtttcccccgcacctggtggaggctgtgatggggcgcttcccacagctcctggacccccagcagctggctgccgagatcctctcctacaagtcccagcaccccagtgagtaagctgcctgtggctggcaagggcagcacccccagcctccaagggccgtcaggctgggctttgggccattgagcagcccattcccagccctgaggcccaccccagaggctggacagagggaggattcaagtcgggaaggaaacccacaaaccaaagatactgtaggattggttctggcccatgcagcacctctagctgtctgcctcagtgggtcagaagcgatcaccctgttgatacacattgtatctctgtagtttaaggagacgctgccggtaacggcgtcggtccgtggctgaggcccaaaccgtcttttctctcagagggtggggagggaggtgggggcagcagaggcctgggctgggtgccctgtgcacgccaccccacttccgccctacccctgggacgttggccttggctggctagttgggcaccgtgtgcctgccctccaagggcctcctctacgccaatgaggcctcatctgtgctctcgctgggcacgtggcttcatgtcagtaagcaagatgcttcttaataacccaccttctgccccactctattccttatcctgctgcccctgtaggggtcaagggccctccgtctacaccctcttcttctcctccatcctttattcagagtcatctcgcccttccccatgggtgggggaacctgtgtttgtttgtgtgcacatgtaaattttaaatattttaagcagaaagtccttacctcctgtaacacatcaataaagtacaatcattgtgagccctttcaaga

SEQ ID NO: 201279 - DNA, 395 bp, Homo sapiens
  Payload ID: 19725
  Gene Name: zinc finger CCCH-type containing 12A
  ENST ID: ENST00000471012
  CDS Start-End: 1-395
gacgacagattcattgtgaagctggcctacgagtctgacgggatcgtggtttccaacgacacataccgtgacctccaaggcgagcggcaggagtggaagcgcttcatcgaggagcggctgctcatgtactccttcgtcaatgacaagcttgccatcggccccttctcagcaattagaagtccctgcatggctcccacctccagagagttctttgcaccctctgcaggtttatgccccctgatgacccactgggccggcacgggcccagcctggacaacttcctgcgtaagaagccactcactttggagcacaggaagcagccgtgtccctatggtatggaacccagcctgccctccccggccctcctcactcctgcccttcctctcacctgtctg

SEQ ID NO: 201280 - DNA, 7256 bp, Homo sapiens
  Payload ID: 19726
  Gene Name: zinc finger CCCH-type containing 12B
  Uniprot ID: Q5HYM0
  ENST ID: ENST00000338957
  CDS Start-End: 68-2578
catgtggattccaagcaggctaaaaagaaaaagaactgattagacctcagacgacccactaaacgggatgacggccacagctgaggtagagacaccaaaaatggagaagagtgcctccaaggaagagaagcagcagcctaagcaggacagcacagagcagggcaatgctgattctgaagagtggatgagctctgagagtgaccctgaacagataagccttaagagtagcgacaacagcaagagctgccaacctagggatggtcagttgaagaaaaaggagatgcactccaagccacaccgccagctctgtcgatcaccctgcctagatcgtccaagtttctcccagagcagcattttacaggatggtaaacttgacttggagaaggaataccaagctaagatggagtttgcgctaaagctgggctatgcagaggaacagattcaatcagtgctaaacaagctgggcccagaatcacttattaatgatgtattggcagagcttgtcagacttgggaacaaaggtgattcagaagggcagatcaacttgagtctgttagtgcctcgtgggcccagctccagagagattgcaagccctgaattgtctcttgaagatgaaatagataacagtgacaatttgaggccagttgtcattgatggaagtaatgtggcaatgagccatgggaataaagaagaattctcctgcagaggaatacaacttgctgtggattggtttctagataaaggccataaagatattactgtatttgtgcctgcatggagaaaggagcaatcccgccctgatgcaccaattacagatcaagatattctacgaaaactggagaaggaaaagattcttgtcttcacaccatcccgaagagtccaaggcaggagggttgtctgctatgatgaccggttcatagtcaaactggcttttgattctgatggcatcattgtgtccaatgataactaccgagaccttcaagttgaaaagccagaatggaagaagtttatagaggagcggttgctgatgtattcttttgtgaatgacaaatttatgcctccagatgatccattaggacgccacggcccaagccttgaaaatttcttaagaaagagacccattgttcctgagcataagaagcaaccatgtccttatggcaaaaaatgcacctacggccacaagtgcaaatactaccatccggagcgggccaaccaaccccagcgttcggtggctgatgagctccgcatcagtgccaaactgtccacagtgaaaactatgagtgaaggcaccctggccaagtgtggcacagggatgtctagtgccaaaggtgagataacctcagaggtcaaacgtgtggcccccaagcgccaatcagatcccagcatccggtctgtggctatggagcctgaggaatggctgtccattgcccgtaagcctgaggctagttctgtcccctcgcttgtgactgccctaagtgttcccacaatcccaccccccaaaagccatgcagtgggtgcactcaacacccgttcggccagcagcccagtgccaggatcctcccatttcccccaccagaaggcctctttggagcatatggccagcatgcagtatcctcccatcttggttaccaacagccatgggacccctattagctatgctgagcaatacccaaagtttgaatccatgggggaccatggctactattcaatgttaggtgacttctccaaactgaacatcaacagcatgcataaccgagagtattacatggctgaagtagaccggggggtgtatgcccggaatcctaacctctgttctgacagccgtgtgagccataccaggaatgacaactattcctcttacaacaacgtgtatttggctgtagctgatacccatcctgaaggcaatttgaagctgcaccgctcagcatcccagaaccgacttcagccttttcctcatggttaccatgaagccttaacacgagtgcagagctatggcccagaggattctaagcaaggcccccacaaacagtcagtcccccacttagctctgcatgcccagcacccatcaactggaacacgttccagctgtcctgcagactaccccatgcctcccaatatccatcctggggcaaccccccagccaggccgtgccctggtgatgactcggatggatagcatttccgactcccgcctctatgagagcaaccccgtgaggcaaagacgacctcccctgtgccgggaacagcatgccagctgggacccgctgccctgtacaactgactcctatggctaccactcctatcccttgagtaacagcctcatgcaaccatgttatgagccagtcatggtacggagcgtgcctgaaaagatggagcagctttggaggaatccttgggttggaatgtgcaatgattccagggagcatatgatcccagaacaccagtatcagacctacaagaacctctgcaatattttcccttctaacatcgtccttgcagtgatggagaagaatccccacacagcagatgcccagcaactggcagccttgattgttgctaagcttagggctgcacgttgatatgacatagtacttatttctttatacaaatatgaatattaatactaataatacactaatacaataattatagtaactaataatttgtgttgcgctttacaagttagagtgtttatatcatttaagcgcttaacaaccctgtgaggtacgtcttactaacatcctcttttatagagaaggaaggtgaaggtcagtgaaattaagtggctagccagggtcacactgctagcaaatgactaagtcaagacacacacccaagtcctctaaatccaagtcccatgcccctttgcactgcaccatgcaggtaatggaggacaaaacccagggggagaggtctagatgtaagaaatcccagaggattccattaccagagttttcctttttctcttttcgtttctttctttctttctttattttttttttttgagacagaatctcactctgttacacaggctggagtgcagtggcactatctctgctcactgcaacctccacctccagggttcaagtgattctatggcctcagcctcccaggtagctgggattacaggcgtgcaccaccatgcccagctaatttttgtatttttagtagagacgtggtttcaccgtgttggccaggctggtctcaaactcctggcctcaagtgatccgcccaccttggcctcctaaagtgctgggattacaggtgtgagccactgcgcccagcctaccagagttttcgtagtcacatattctatattacaaagtatggatgatatatccaatttagagagcaaaagcatcaggatcagatcatatgttgaattaaccttttaggttttttctaatagaaatatttaaagctatttaaaagtaaatgcatactttattgcatggatatctgatcactcaatctatattaatgaaactatagggtcacattgaagcttctagaactatattttaaagctattattagcaattatattgcatgtatgaatatatatatttggtttgagatgtgtgtgtatctctgtataaccttttatatagtgataatgagagggtaggctctacacagtccttcgtctatagctgtataggtcactaatctgacttgatgattttaagtcacatttcatagttttaactagttatgagagagaaattatatggcaatatttgaacattgctttcttaggcaccagagcaaagcaactctgtttcctttgcacattttacctgccaacatttattaacagttcttaccttccaagtctcttcaccttagcaaattagggatcaggttgcagtcttctgcagagaaactgatggttaagctcaagttccaagcatagtatgtgtgtgctacacaagctcagaagagtttgacaaggaccaggggacttactaccacaatccacttcccttatcccaggagagatggccaaacccatgtggcattaaatggtgaataaaaaagcttcactcaaggagggactattggatgctctttggacttctgacctatgcagtattcaacatcattggatgaaatgtaatggaggacagtgcacagccatgtatccactttctcttcctgtccaccctttgggtaataaggtcaatcattggtggaacagaatttctctaggaaacaaaaccaggggattttatttgtggaaaaaggaagtttccaaaaggggatactgcatctttactaatagctggctcagttactcactttaaatccatgcaaagagtgcacttgctgttaaataattgttaaatgagttattagaaggcaggacttttggtttgggcgacaccatttgcgcaacttgtatcttgctcagggtggaaaacttcatagctaaatgcctctagaagaggtgtttattgttttttttaagctgcactaaatgaattccctttttgaatccattgtatatttcaatatttcgaaccatgatcagctcactatttcctgagctggaacttgctaacttctatgatcgttttttcatgaaagttgagaaggccgggccttggccttttgtttcttcatgagaaggtgtgacactgcctataaatgtttcttactgtgaaacactctgaatgtgaggctgtagtcagggttgtttctggtggtttgacaatggcttgcatgctgctttctggctttctgtctctgtccaagttgatcaatactgcatcttaaccaatgtttcacttgagttaaccacagctttacattctatctcctatcttctgatcttcgtataccccagcatattgaaaaagagtaaaagtattttctatcaatcaggtagatccacagagtgacagttgccactgcagtgcttgctatttcacacaaacaccatttcataccttcaacttcttggactttctaaatcggactcgtgtctaaatcagggtatttgacaatctcagatgatgctactgcctatgtgccagttagttcatcttcctaccaagatcatgaatggcaccacactatccactagctgtacaatttacagagaagcacaagattcatcttgtcacctacaattcgtcttgaacatgttcatatttagtactcagaaactgtgtaagctcctcccaatacagaaaatattttttaaggcagcatatgtatttctgatttactaaaaacgattgtcattctcctctcattcttctttttggtatgaaccaaaagcggctaggagcaatgcctcaaataaccagaaatgaccttttgttgatacaaattgtatctctttttttcctgattgtatagaaacaaatgtacaaaactcatctgaagctaggtttggcactgaattttcaccatgaggtttgtggcactgtgtgtcacagggaagtagctcaggggttgtgagggagcttttatttctaaagggcagtagtaatttatagacaaaaacaatttttcaaggcctctttattaccactgcacagctatcatgtgtaaaatttcaagcattatattgcataagttctctttagcctattaaatttaatatgtccttgcaaaagggattttgtgtaaaaagtgtcagtgttagtgactcatctgcaagaatctacaaatggagctatacaactatgaatacataaatacagcatggttcctagttattagagaaacattttctttatattgaggtctacgcacttcttgactttccattttgtctgtaattataaaacagcaaataacaaagaagcattgggaccccctcggctgccttgataataaaatcaagcttccttcatgggactaagcatgtgtccttcaggatacttacctctaagcactcagcaggggttactacaaagcgttttgtgtggttttcaaaaaacagtgtattttgcaagaggtgctttgtaattttaattatttcactgattttctgacctcataggaagtctgtgcctgttgaggccttcaattttgtagcttttctgattttttttcttctttttgtgattttgttgttgttttcattttgatctaaaggagaagtgtgaccccggagtggcatggtcaatccagggcaccctttctgtaagacaactcaaaggaaaagaagccttttcaaaggtaatatcgagccattgcactctctcttaaggtgccaggtatgggagaatgacagatgccttatggaaatggtctacaaaacttttcttcttctaagtaataaaacacatagcatgattctctctccctctctctctctctctctgcccaccccctgctagtttccaggagaatacttctctaaaattcatttttttctattttggaataaattatctttatacagtaattcaaacactgatttccattaacctttggccctgagttttcttctaacatagaagagttcattttgagaggcactcagttaccattcaatctgtgctgtaagtatgggactttgtacaaatgccctttttgagggccaaaaatttcaatacactttgttctactttgtgaaccaggtctggatctgcacagagaaagtaatgctgagctgtccaaagagtccgctcaggtctccctcctaaccctcctctgccttcccctagtttgcttatcctcacgtctgacactgaggagtgcatagtcttcaactgaaatggcactacagttagttctcattggaaacaaacaagtgtatttctggaacctgctcgtctaaaatagtcaatgcctttgtaaagactcagcatattcaatatctattgtatggtagctagctatatacatagattgactatttttagtcctggtttgtgtattgttgagctatagtagtttgctttatccatttgtgggattaaacaatactgtttaatggttgtaaacttttataaaatctctttgggttttttgtttgacccaaacataatgtaagtcttaatgacaaaatacacaaagttaaccagaggtgagtgaaaatatagcccttccccagttttgtctgcccctataatgcacgtgcattgctttgtaatatgctctcgctagcatgaatgtgctatgactacttcatgaggttttgtttcacctataattgtgatggaaaatgctgtattgctgacaacaatgaactgtaaccacagttatttactgcataaactatttgtgtactaacca

SEQ ID NO: 201281 - DNA, 8807 bp, Homo sapiens
  Payload ID: 19727
  Gene Name: zinc finger CCCH-type containing 12C
  Uniprot ID: Q9C0D7
  ENST ID: ENST00000278590
  CDS Start-End: 52-2703
gcttctccgcgggccccgccgcccgctcgccgctttctcgcggggctggctatgccgggtggcggctcccaggaatacggggtgctttgcattcaggaatacagaaaaaacagcaaagtggagtcaagtacacgtaacaacttcatgggcttgaaggatcacctagggcatgacctcggccacctttatgtggagagcactgacccacagttaagtccagctgtaccttggtcaacagtagaaaacccaagtatggataccgttaatgtggggaaggatgaaaaagaggcgtctgaagagaatgcaagctctggtgactctgaagaaaacacaaattctgatcatgagtcagaacaattgggtagcatttcagtagagccaggcttgataactaagactcacagacagctctgcaggtctccctgtttagagcctcacatactcaagcgcaatgaaattttgcaagactttaaacctgaagagtcccagactacatccaaggaagcaaagaaaccacctgatgtggtgcgagaataccaaacaaaactggagtttgcacttaagttaggttattctgaagaacaggttcagcttgtactaaacaaacttggtactgatgctttaatcaatgatattttgggagaacttgtcaaacttggaaataaaagtgaggctgatcaaacggttagtacaattaacactataacacgggaaacttcttccctggaatctcagaggtctgaatctccaatgcaagagattgtaacagatgatggtgaaaatctgagaccaatagttattgatggcagcaatgtggcaatgagccatggaaacaaagaagtattttcctgcagaggaataaaattggcagtggattggtttttggaaagaggccacaaagacattacagtttttgttcctgcttggaggaaagagcaatcccgacctgatgctctcattacagatcaggaaattttacgtaaattagagaaggagaaaatcctggtgttcacgccatcccggcgagtccaggggaggagagtggtgtgctatgacgacaggttcatcgtgaagctggcttttgagtcggacggtatcattgtgtccaatgataactacagggacttggctaatgagaagccagaatggaagaagttcatagatgaacgattattaatgtattcatttgtcaatgacaagttcatgccccctgatgaccctcttggcagacatggccccagtctggataattttctgaggaagaaacctattgttcctgaacacaaaaagcagccttgtccatatggaaagaagtgtacctatggacacaagtgcaaatattaccatcccgaaaggggcagtcagccacagcggtcagtggctgatgaactccgtgccatgtctagaaatacggcagccaaaactgcaaacgaaggaggactggtgaaaagcaacagtgttccttgtagcaccaaggctgatagcacttctgatgtcaaacgaggtgctccaaagaggcaatcagatccaagcataaggacacaagtctaccaagacctagaagaaaagcttcccaccaaaaacaaattggaaaccaggtctgtaccttccttagttagcatcccagctacttctactgcaaaaccccaaagcactacatctttaagcaatggccttccatctggagttcatttcccacctcaggatcaaagaccacagggacaatatccttcaatgatgatggcaaccaaaaatcatggaacgccaatgccttatgaacagtatccaaaatgtgactcacctgtcgacatcggatattattccatgttgaatgcatactcaaatctgagtctctcaggcccacgaagccctgaaaggcgtttctccttagacacagattatagaataagttccgtagcttctgactgcagcagtgaagggagcatgagctgtgggagcagtgactcctacgtgggttacaatgaccggtcctatgtcagctcccccgacccacagctagaggagaatttgaagtgtcaacacatgcaccctcacagccgccttaatcctcaaccgttcctgcagaatttccacgaccccttaaccagagggcaaagttacagtcacgaagaaccaaagttccatcacaagcctcctcttccgcacctggctctgcacctgccgcactccgctgtgggcgcccggtccagctgtcctggcgactacccctctcctccaagttcagcacactctaaggcaccacacctagggaggtccttggtggccacgagaatagacagcatctctgactctcgactttatgacagttctccttcacgacaaagaaagccttattcccgccaggaaggcctgggaagctgggagaggccaggctatgggatcgacgcctatgggtaccggcagacttattccttgcccgataactccacacagccgtgttatgagcagttcaccttccagagcctccctgagcaacaggagccagcctggcggatcccatactgtggaatgccgcaagatcccccgaggtatcaagacaaccgagaaaagatttatatcaatttgtgcaacatcttcccccctgaccttgtgagaattgtcatgaaaaggaatcctcacatgacagacgcccagcagctcgccgcagccattttagtggagaaatcccagctgggttattgaaagatgatgcatctttgtggtgtttagtagttttttgttcagctcaaatgctgagggaggtttgctacaatagcacatgtgatctccttctcagcaaggaggttatatagtatccatttatgtgaaatactgtatcatggaatctgtatgtatagccccacatggtggaagtatcacgggattgctttacatttaaactttttttttttaacatttcctttttaaagctatatccttggctggaaatttttccagtttgatttaatagatgtatctgtgatctttgatattaatctttggtgcatcaggggtttatatgcagcactttttatccttgttttgtgttttattaacttggtgtttgtctatcaattgcaagcaattacaataccttcagaatgtgggacatttgactagacctagcaaactgttttttcgagccaagcttagttagactcttttacagctttttaagttatttttatttggggaaagtgggcttctttgtgctataatcattatttatagaaacaaagttatactacagcactgactttatattttaaacagaatgtaagttaccagttttatgttgaaatgtgttacagtatatatatattagaatgatttacaatatggcacttttcgatgtgttatttttgtttggatttttttttctgttaagaaattagttaatttaatatggtcaatttaaaagaaagcagatgcaatcaatggaaaaatgtttccattttttaaaaatgaataaggcaaaagctgtaactgttacaggttagagctttgttatccagctatgatgtgcttcttgacagtagaagtggaattgaattcctagatttccattaacctgtatttttaatatgtctgtctttttgttttggggcacaacaatactggataaaataaccctttcacagcacttgcctgtttttaatgaatctaattattcacaatgcaacttttatatttaacatactctttagctttcctgctatttatcaaggctggcctgaggtgggtttatgtgttgaggttatgcaacatttcttgatactgcactatagagaaatggtgatggaggagttgtaaatggtaacttaaaatttttgtaagatattgtatattttccattttcctgaaggtagttttcttgggggggcctgttatattattaaggccagactcttgccacaaatagtgtagttttagatacagactaaggtctgttctagtattagtaagggatatttctggtttcaaagtcatgggttttgctagtggtgaatacatttctgcggagtagaagatagattttgcagtcagtggcagacagttgtgtgattgacatcacttgactgttgcgtccaggttttgaattgtacttcacgtaacagatgcattcagatctttttctgtagtctgcttagatgccctggctattctgattatcctacatgctacagtttgaagtgaagccctgaaaaaccagaaagtaccttttactgttgatacaaattgtatctttttaactataagaactattttgatttgtagatctagttaaaacacaagtatgtaactatgattagacttttgggcaacattttatcccttatttaaatacaaatttttaaagtaaaattgaggtctagaatagattagaaaataaaaataacaatttagataaatagaaatgtctgtcttagttttatataatatattaaaacacagtaaataaatttattggcattttctttctcctaaaacttacctagtgtgaacttaaaataaaggtaaaatgctgcctgaaaataatgtccaagcacctttgactaggataacattttcactacttgtgtgacactgtgtgttgcacgaagtaggatttgggtatacagtaaatgcttctaaaaggcattgtgcatattgacataaccaataatctgaaccgtgttcagcaaacttaattcaggaaagtggtattctacacaattattgctgttgtgtttgaaatgagtgtggcactcatctgtatccagaaataatatgggtgaggccacacaacccattctgagtggtgtctgtctgaaagcaaccctactcgcatgtgaaattgttctccttgatttggtcactataaagcaagtttaaatgtagaggctaactcagtgccaaaaacagggttacaaatgtgtagtatcttttattttagtcatattctaagacttctttttagtatgaaatcacttttaaattatacatgtaggttttgcttccattttcttcattttaccattttaattatttgaacattcgccaaattttacatttatttaaatgagatcttaggtgagatgtgtgtgacactttgaatttgaccttcttgtgttattagctgactatttgtcattgcctcatggattttaaattatgggaaaatagtgtagccagctgccacctctactgaagtgagtagctctgaactacccacactaaatccttcagtgtaattaattatgagtttaaaaatagcagttttcttatgtgaagaggacagtttgtcccctttttttgaagcaccgatgttgcgttcagagctgtagaatgagataattggcagactttaggtacagcaaattcttacttatctaaagcaataagtcaaaggagtccatcattaaattaaatccatagctgatcacaagccttcattttagccaaaactttctctctaaccaaatcttttaccagacttgctaataaataaccagagagatgtgttaataagtgaagttgccagaaatggtcaactgatcggaaaaaaaaggattcagactggagtattttgcccctgaataattgacagttgactgtgctttacacagtaactagccagtctgttgtctctgtgtcttagtccagagggaatagtacccaattggccaaatactggcccttagtatctcctcctttcttgcatgggatacagacgttttcagtcttgtttttatgatctctctctatatcctgataagagtttgtcattgacttacacatttggaagaaatgcacaccagtgtaatatatttgatactggtggaaacttgaactttgtgtttttatgaaaattcatttatgagaatatgtaatataactgaagagtattttatgtatatctatatacacaaatatgtatttgttatgaggtattaaaaacaggggttggggggagtgcttctgatggctaacttttctctaattaaactatgtttctttgagttgtgaacgaccgagtctggggtctggacggccaatgataagatttagaaccacttggatggaaagcagttcttcactggttttattcttggtattttcaaagaattattttgatatttttaatagaatgtgtaattttaaaatacacaaaaaacttaaagtagtattgattatacaaataattatttaacatgtcttatggatgtatctatatgtatatagacagtaatatatttataaaacaaatatactttgcttatgttatagctcttagtttgtgacaggtgggaggatggctctgggtgtgtgtgtgtgtgtgtgtgtgtgtgtgtgtgtgtgtgtgttttgaaaactctcaagctgttttccctctgatttacaatggtatttactttaaagtatgtttggttttcattattctttttgctctccaacttccttattcaagataaaataagacatacagttttctggccattctgttggtgtgtggtgcacccattttattgtcatctaactcctggagaattcccacgtgacctgaaatcaaacagattctggctggacatatgcttatgttccaaatatattaaagatgttaattcagctaacagttaagtttccaaggtatacaccaacaaataaaatgaggtattaaaaagagatggattacacacatgcattagaataagagaaaacagtagtgttaataaaagtaaagaaacatacactatcttagccccctagggcaggggttgactttttctgtaaaggatcagatagtaaataatacaggaatcatatggacttcaaatgccattgtaaaaactactcagctctgcctttagagcataagaacagccacagataacatgtaaattagtgtggctgtgttccaataaaactttatttacagaaacgggaagccggtcagattgggcctgtgggccataatttgctgatctcaagcagtaaatcctggtatatgttaatagaagaaatcataattgcatttcagttgacattaaaagaaaatctggtagtttttgatgtccttcaaaagaggattgttagacattgatgttaaagcatcttaattcatttgagttttcttacctgtttacacccattatttattagagatatttcttgtgtttaaccacaaaaaaaagcactctgttaaaatgttttaatatgtattgaatttctttcataaacttttcatttctgttgataaatgggaatcccttaccaaccttttgttttttaaaagtctcatagaccaaaaaaaatctgttgcagcatttaattagccacagatacattttggctgcatttaccagttacatttttccattggttttggcttctaataaataacatatctgccattctttaaaaatgattttaaagaagataaatatattgtaatttcacatgctatagctttattctgtaagattaaaaattgtgactagtataattgtagctataatgtgagtggcatgttacaatgtaactctttatgagaaataaaatgtatctctgctttgtctgtccagatctttaggatttttagatgccttgggactgtccttggtgaatgatattcttcatatgatcatatgtaattttgaattcgttggaagtacacgctgctgagcatgtttattcacagtgctttataccgggtgttgcatcagtaatcattttcataagaacatttaaacagcatgaacatcatcatccacttaaatagttaaactttcttttaaaattggaatgcaactgtaggttttaacaatgtttattgttttttaagtggttactttgtttttccttaatactttctgttaacttaattattactcctgttgcagtgttactgttatgtattagaagtggcttttccccctaagatccttagtcttttaaagacaatttaaggtattggccatttggcagtagaaaatgtgcatgttttaacttggttttataaaatctgtaatgtttcacttcttgaaccatgtaccaaatttgccaattttctgtccaagtgtttcagatgaataacaaaacgctgttcattgaagctttcgccacctttcttaaagcagcgtatgttccaagggaaaaaggcattgaaaagcaatcgtttgtttttatgaagaataggtgttcagattccttcagtttttttgaaattagaaatttcttaccttatgtgaaatattcacaaacgtgcacacttctgcagagacaaagcatttcactgcacgtgtaccaggttattgattttatcttttcctttcagggttttgtcctcccaaaccagagtcatatgctgctagtagaattttttatttgatcctgcgaacttttcttataggaaaagtaaggcaaaggatgtgtagtgcaaccatctgataaactagtgtgattgtatttatcctctgttctgtgtatttctgtaatggaatctttacaattcccaaaacggtattttagacctactggaaatctgtatcgaaacagctatgtgattctgccactgagaaaaaaaaaatttttaattcgtttttcttatgctggtttgtttttctttaatgaagaaattgatctcatatggcatcatagatgctaaataaataaaagcatcatacttctctagtttgcctgcattcagtggctaacattatgagcattgtgtaagataaacacatggtcagtatcaatgtaaatgttagagccatgattaattcctatgaaaattgaaattaaatgtcaaagacaactagacataa

SEQ ID NO: 201282 - DNA, 9542 bp, Homo sapiens
  Payload ID: 19727
  Gene Name: zinc finger CCCH-type containing 12C
  ENST ID: ENST00000453089
  CDS Start-End: 882-3440
aagtgcagatagaataaaacttttaccttttcctggaatgaaatagactgttgtttccctggcacttaataaggatagcataatgctagaaattatattgtgttactatgttccatagtcaaaaaatcatgattactagggcaaaaccctgttcatctcttaagaagaatttaactcactttgtaattatttaattcccttctgtctatcttagaatatgtgctctttcattgcagtatctatgttatttttgaaagttctttagattgctgttaagcttcatccagattaataatgatttttcaagtataagttaatggtttctttctatgtggctttctttttaaaagaatatttatagatacttatgaattctgttagagaaaaatgtaaattttaacctgtcatgcatattaaaaacatactttttgatgatattctatgtgtcactctagaattataagccgtcctaaaagtagaaaaatctgatccatcgagattgagaaggagcatgatatagtgggaaaagcatgggttttagaatcagacgaaactgggtaaaaaaatacagttctactacttatttactttgttgccttggaggaattacatggcctttctaatttatgacttcttcatctgaaaaatggcagatgatactctcttggcaagggtgttaggagggaggagaggatgtagacaaaatacaaagtattttgagtagttgagtaattctcttctgacttctccattgagacagaaatctagccataactatgaaattctaaatattttacatttttctctaggaatacggggtgctttgcattcaggaatacagaaaaaacagcaaagtggagtcaagtacacgtaacaacttcatgggcttgaaggatcacctagggcatgacctcggccacctttatgtggagagcactgacccacagttaagtccagctgtaccttggtcaacagtagaaaacccaagtatggataccgttaatgtggggaaggatgaaaaagaggcgtctgaagagaatgcaagctctggtgactctgaagaaaacacaaattctgatcatgagtcagaacaattgggtagcatttcagtagagccaggcttgataactaagactcacagacagctctgcaggtctccctgtttagagcctcacatactcaagcgcaatgaaattttgcaagactttaaacctgaagagtcccagactacatccaaggaagcaaagaaaccacctgatgtggtgcgagaataccaaacaaaactggagtttgcacttaagttaggttattctgaagaacaggttcagcttgtactaaacaaacttggtactgatgctttaatcaatgatattttgggagaacttgtcaaacttggaaataaaagtgaggctgatcaaacggttagtacaattaacactataacacgggaaacttcttccctggaatctcagaggtctgaatctccaatgcaagagattgtaacagatgatggtgaaaatctgagaccaatagttattgatggcagcaatgtggcaatgagccatggaaacaaagaagtattttcctgcagaggaataaaattggcagtggattggtttttggaaagaggccacaaagacattacagtttttgttcctgcttggaggaaagagcaatcccgacctgatgctctcattacagatcaggaaattttacgtaaattagagaaggagaaaatcctggtgttcacgccatcccggcgagtccaggggaggagagtggtgtgctatgacgacaggttcatcgtgaagctggcttttgagtcggacggtatcattgtgtccaatgataactacagggacttggctaatgagaagccagaatggaagaagttcatagatgaacgattattaatgtattcatttgtcaatgacaagttcatgccccctgatgaccctcttggcagacatggccccagtctggataattttctgaggaagaaacctattgttcctgaacacaaaaagcagccttgtccatatggaaagaagtgtacctatggacacaagtgcaaatattaccatcccgaaaggggcagtcagccacagcggtcagtggctgatgaactccgtgccatgtctagaaatacggcagccaaaactgcaaacgaaggaggactggtgaaaagcaacagtgttccttgtagcaccaaggctgatagcacttctgatgtcaaacgaggtgctccaaagaggcaatcagatccaagcataaggacacaagtctaccaagacctagaagaaaagcttcccaccaaaaacaaattggaaaccaggtctgtaccttccttagttagcatcccagctacttctactgcaaaaccccaaagcactacatctttaagcaatggccttccatctggagttcatttcccacctcaggatcaaagaccacagggacaatatccttcaatgatgatggcaaccaaaaatcatggaacgccaatgccttatgaacagtatccaaaatgtgactcacctgtcgacatcggatattattccatgttgaatgcatactcaaatctgagtctctcaggcccacgaagccctgaaaggcgtttctccttagacacagattatagaataagttccgtagcttctgactgcagcagtgaagggagcatgagctgtgggagcagtgactcctacgtgggttacaatgaccggtcctatgtcagctcccccgacccacagctagaggagaatttgaagtgtcaacacatgcaccctcacagccgccttaatcctcaaccgttcctgcagaatttccacgaccccttaaccagagggcaaagttacagtcacgaagaaccaaagttccatcacaagcctcctcttccgcacctggctctgcacctgccgcactccgctgtgggcgcccggtccagctgtcctggcgactacccctctcctccaagttcagcacactctaaggcaccacacctagggaggtccttggtggccacgagaatagacagcatctctgactctcgactttatgacagttctccttcacgacaaagaaagccttattcccgccaggaaggcctgggaagctgggagaggccaggctatgggatcgacgcctatgggtaccggcagacttattccttgcccgataactccacacagccgtgttatgagcagttcaccttccagagcctccctgagcaacaggagccagcctggcggatcccatactgtggaatgccgcaagatcccccgaggtatcaagacaaccgagaaaagatttatatcaatttgtgcaacatcttcccccctgaccttgtgagaattgtcatgaaaaggaatcctcacatgacagacgcccagcagctcgccgcagccattttagtggagaaatcccagctgggttattgaaagatgatgcatctttgtggtgtttagtagttttttgttcagctcaaatgctgagggaggtttgctacaatagcacatgtgatctccttctcagcaaggaggttatatagtatccatttatgtgaaatactgtatcatggaatctgtatgtatagccccacatggtggaagtatcacgggattgctttacatttaaactttttttttttaacatttcctttttaaagctatatccttggctggaaatttttccagtttgatttaatagatgtatctgtgatctttgatattaatctttggtgcatcaggggtttatatgcagcactttttatccttgttttgtgttttattaacttggtgtttgtctatcaattgcaagcaattacaataccttcagaatgtgggacatttgactagacctagcaaactgttttttcgagccaagcttagttagactcttttacagctttttaagttatttttatttggggaaagtgggcttctttgtgctataatcattatttatagaaacaaagttatactacagcactgactttatattttaaacagaatgtaagttaccagttttatgttgaaatgtgttacagtatatatatattagaatgatttacaatatggcacttttcgatgtgttatttttgtttggatttttttttctgttaagaaattagttaatttaatatggtcaatttaaaagaaagcagatgcaatcaatggaaaaatgtttccattttttaaaaatgaataaggcaaaagctgtaactgttacaggttagagctttgttatccagctatgatgtgcttcttgacagtagaagtggaattgaattcctagatttccattaacctgtatttttaatatgtctgtctttttgttttggggcacaacaatactggataaaataaccctttcacagcacttgcctgtttttaatgaatctaattattcacaatgcaacttttatatttaacatactctttagctttcctgctatttatcaaggctggcctgaggtgggtttatgtgttgaggttatgcaacatttcttgatactgcactatagagaaatggtgatggaggagttgtaaatggtaacttaaaatttttgtaagatattgtatattttccattttcctgaaggtagttttcttgggggggcctgttatattattaaggccagactcttgccacaaatagtgtagttttagatacagactaaggtctgttctagtattagtaagggatatttctggtttcaaagtcatgggttttgctagtggtgaatacatttctgcggagtagaagatagattttgcagtcagtggcagacagttgtgtgattgacatcacttgactgttgcgtccaggttttgaattgtacttcacgtaacagatgcattcagatctttttctgtagtctgcttagatgccctggctattctgattatcctacatgctacagtttgaagtgaagccctgaaaaaccagaaagtaccttttactgttgatacaaattgtatctttttaactataagaactattttgatttgtagatctagttaaaacacaagtatgtaactatgattagacttttgggcaacattttatcccttatttaaatacaaatttttaaagtaaaattgaggtctagaatagattagaaaataaaaataacaatttagataaatagaaatgtctgtcttagttttatataatatattaaaacacagtaaataaatttattggcattttctttctcctaaaacttacctagtgtgaacttaaaataaaggtaaaatgctgcctgaaaataatgtccaagcacctttgactaggataacattttcactacttgtgtgacactgtgtgttgcacgaagtaggatttgggtatacagtaaatgcttctaaaaggcattgtgcatattgacataaccaataatctgaaccgtgttcagcaaacttaattcaggaaagtggtattctacacaattattgctgttgtgtttgaaatgagtgtggcactcatctgtatccagaaataatatgggtgaggccacacaacccattctgagtggtgtctgtctgaaagcaaccctactcgcatgtgaaattgttctccttgatttggtcactataaagcaagtttaaatgtagaggctaactcagtgccaaaaacagggttacaaatgtgtagtatcttttattttagtcatattctaagacttctttttagtatgaaatcacttttaaattatacatgtaggttttgcttccattttcttcattttaccattttaattatttgaacattcgccaaattttacatttatttaaatgagatcttaggtgagatgtgtgtgacactttgaatttgaccttcttgtgttattagctgactatttgtcattgcctcatggattttaaattatgggaaaatagtgtagccagctgccacctctactgaagtgagtagctctgaactacccacactaaatccttcagtgtaattaattatgagtttaaaaatagcagttttcttatgtgaagaggacagtttgtcccctttttttgaagcaccgatgttgcgttcagagctgtagaatgagataattggcagactttaggtacagcaaattcttacttatctaaagcaataagtcaaaggagtccatcattaaattaaatccatagctgatcacaagccttcattttagccaaaactttctctctaaccaaatcttttaccagacttgctaataaataaccagagagatgtgttaataagtgaagttgccagaaatggtcaactgatcggaaaaaaaaggattcagactggagtattttgcccctgaataattgacagttgactgtgctttacacagtaactagccagtctgttgtctctgtgtcttagtccagagggaatagtacccaattggccaaatactggcccttagtatctcctcctttcttgcatgggatacagacgttttcagtcttgtttttatgatctctctctatatcctgataagagtttgtcattgacttacacatttggaagaaatgcacaccagtgtaatatatttgatactggtggaaacttgaactttgtgtttttatgaaaattcatttatgagaatatgtaatataactgaagagtattttatgtatatctatatacacaaatatgtatttgttatgaggtattaaaaacaggggttggggggagtgcttctgatggctaacttttctctaattaaactatgtttctttgagttgtgaacgaccgagtctggggtctggacggccaatgataagatttagaaccacttggatggaaagcagttcttcactggttttattcttggtattttcaaagaattattttgatatttttaatagaatgtgtaattttaaaatacacaaaaaacttaaagtagtattgattatacaaataattatttaacatgtcttatggatgtatctatatgtatatagacagtaatatatttataaaacaaatatactttgcttatgttatagctcttagtttgtgacaggtgggaggatggctctgggtgtgtgtgtgtgtgtgtgtgtgtgtgtgtgtgtgtgtgtgttttgaaaactctcaagctgttttccctctgatttacaatggtatttactttaaagtatgtttggttttcattattctttttgctctccaacttccttattcaagataaaataagacatacagttttctggccattctgttggtgtgtggtgcacccattttattgtcatctaactcctggagaattcccacgtgacctgaaatcaaacagattctggctggacatatgcttatgttccaaatatattaaagatgttaattcagctaacagttaagtttccaaggtatacaccaacaaataaaatgaggtattaaaaagagatggattacacacatgcattagaataagagaaaacagtagtgttaataaaagtaaagaaacatacactatcttagccccctagggcaggggttgactttttctgtaaaggatcagatagtaaataatacaggaatcatatggacttcaaatgccattgtaaaaactactcagctctgcctttagagcataagaacagccacagataacatgtaaattagtgtggctgtgttccaataaaactttatttacagaaacgggaagccggtcagattgggcctgtgggccataatttgctgatctcaagcagtaaatcctggtatatgttaatagaagaaatcataattgcatttcagttgacattaaaagaaaatctggtagtttttgatgtccttcaaaagaggattgttagacattgatgttaaagcatcttaattcatttgagttttcttacctgtttacacccattatttattagagatatttcttgtgtttaaccacaaaaaaaagcactctgttaaaatgttttaatatgtattgaatttctttcataaacttttcatttctgttgataaatgggaatcccttaccaaccttttgttttttaaaagtctcatagaccaaaaaaaatctgttgcagcatttaattagccacagatacattttggctgcatttaccagttacatttttccattggttttggcttctaataaataacatatctgccattctttaaaaatgattttaaagaagataaatatattgtaatttcacatgctatagctttattctgtaagattaaaaattgtgactagtataattgtagctataatgtgagtggcatgttacaatgtaactctttatgagaaataaaatgtatctctgctttgtctgtccagatctttaggatttttagatgccttgggactgtccttggtgaatgatattcttcatatgatcatatgtaattttgaattcgttggaagtacacgctgctgagcatgtttattcacagtgctttataccgggtgttgcatcagtaatcattttcataagaacatttaaacagcatgaacatcatcatccacttaaatagttaaactttcttttaaaattggaatgcaactgtaggttttaacaatgtttattgttttttaagtggttactttgtttttccttaatactttctgttaacttaattattactcctgttgcagtgttactgttatgtattagaagtggcttttccccctaagatccttagtcttttaaagacaatttaaggtattggccatttggcagtagaaaatgtgcatgttttaacttggttttataaaatctgtaatgtttcacttcttgaaccatgtaccaaatttgccaattttctgtccaagtgtttcagatgaataacaaaacgctgttcattgaagctttcgccacctttcttaaagcagcgtatgttccaagggaaaaaggcattgaaaagcaatcgtttgtttttatgaagaataggtgttcagattccttcagtttttttgaaattagaaatttcttaccttatgtgaaatattcacaaacgtgcacacttctgcagagacaaagcatttcactgcacgtgtaccaggttattgattttatcttttcctttcagggttttgtcctcccaaaccagagtcatatgctgctagtagaattttttatttgatcctgcgaacttttcttataggaaaagtaaggcaaaggatgtgtagtgcaaccatctgataaactagtgtgattgtatttatcctctgttctgtgtatttctgtaatggaatctttacaattcccaaaacggtattttagacctactggaaatctgtatcgaaacagctatgtgattctgccactgagaaaaaaaaaatttttaattcgtttttcttatgctggtttgtttttctttaatgaagaaattgatctcatatggcatcatagatgctaaataaataaaagcatcatacttctctagtttgcctgcattcagtggctaacattatgagcattgtgtaagataaacacatggtcagtatcaatgtaaatgttagagccatgattaattcctatgaaaattgaaattaaatgtcaaagacaactagacat

SEQ ID NO: 201283 - DNA, 2931 bp, Homo sapiens
  Payload ID: 19727
  Gene Name: zinc finger CCCH-type containing 12C
  Uniprot ID: Q9C0D7
  ENST ID: ENST00000528673
  CDS Start-End: 80-2734
attgttcttcttgcctgcctggaagtctgcagctaaaattgtgttaaggagtttactgctgaagctgctacagaaaccaatgtctttgtattttcctgctaacgaatacggggtgctttgcattcaggaatacagaaaaaacagcaaagtggagtcaagtacacgtaacaacttcatgggcttgaaggatcacctagggcatgacctcggccacctttatgtggagagcactgacccacagttaagtccagctgtaccttggtcaacagtagaaaacccaagtatggataccgttaatgtggggaaggatgaaaaagaggcgtctgaagagaatgcaagctctggtgactctgaagaaaacacaaattctgatcatgagtcagaacaattgggtagcatttcagtagagccaggcttgataactaagactcacagacagctctgcaggtctccctgtttagagcctcacatactcaagcgcaatgaaattttgcaagactttaaacctgaagagtcccagactacatccaaggaagcaaagaaaccacctgatgtggtgcgagaataccaaacaaaactggagtttgcacttaagttaggttattctgaagaacaggttcagcttgtactaaacaaacttggtactgatgctttaatcaatgatattttgggagaacttgtcaaacttggaaataaaagtgaggctgatcaaacggttagtacaattaacactataacacgggaaacttcttccctggaatctcagaggtctgaatctccaatgcaagagattgtaacagatgatggtgaaaatctgagaccaatagttattgatggcagcaatgtggcaatgagccatggaaacaaagaagtattttcctgcagaggaataaaattggcagtggattggtttttggaaagaggccacaaagacattacagtttttgttcctgcttggaggaaagagcaatcccgacctgatgctctcattacagatcaggaaattttacgtaaattagagaaggagaaaatcctggtgttcacgccatcccggcgagtccaggggaggagagtggtgtgctatgacgacaggttcatcgtgaagctggcttttgagtcggacggtatcattgtgtccaatgataactacagggacttggctaatgagaagccagaatggaagaagttcatagatgaacgattattaatgtattcatttgtcaatgacaagttcatgccccctgatgaccctcttggcagacatggccccagtctggataattttctgaggaagaaacctattgttcctgaacacaaaaagcagccttgtccatatggaaagaagtgtacctatggacacaagtgcaaatattaccatcccgaaaggggcagtcagccacagcggtcagtggctgatgaactccgtgccatgtctagaaatacggcagccaaaactgcaaacgaaggaggactggtgaaaagcaacagtgttccttgtagcaccaaggctgatagcacttctgatgtcaaacgaggtgctccaaagaggcaatcagatccaagcataaggacacaagtctaccaagacctagaagaaaagcttcccaccaaaaacaaattggaaaccaggtctgtaccttccttagttagcatcccagctacttctactgcaaaaccccaaagcactacatctttaagcaatggccttccatctggagttcatttcccacctcaggatcaaagaccacagggacaatatccttcaatgatgatggcaaccaaaaatcatggaacgccaatgccttatgaacagtatccaaaatgtgactcacctgtcgacatcggatattattccatgttgaatgcatactcaaatctgagtctctcaggcccacgaagccctgaaaggcgtttctccttagacacagattatagaataagttccgtagcttctgactgcagcagtgaagggagcatgagctgtgggagcagtgactcctacgtgggttacaatgaccggtcctatgtcagctcccccgacccacagctagaggagaatttgaagtgtcaacacatgcaccctcacagccgccttaatcctcaaccgttcctgcagaatttccacgaccccttaaccagagggcaaagttacagtcacgaagaaccaaagttccatcacaagcctcctcttccgcacctggctctgcacctgccgcactccgctgtgggcgcccggtccagctgtcctggcgactacccctctcctccaagttcagcacactctaaggcaccacacctagggaggtccttggtggccacgagaatagacagcatctctgactctcgactttatgacagttctccttcacgacaaagaaagccttattcccgccaggaaggcctgggaagctgggagaggccaggctatgggatcgacgcctatgggtaccggcagacttattccttgcccgataactccacacagccgtgttatgagcagttcaccttccagagcctccctgagcaacaggagccagcctggcggatcccatactgtggaatgccgcaagatcccccgaggtatcaagacaaccgagaaaagatttatatcaatttgtgcaacatcttcccccctgaccttgtgagaattgtcatgaaaaggaatcctcacatgacagacgcccagcagctcgccgcagccattttagtggagaaatcccagctgggttattgaaagatgatgcatctttgtggtgtttagtagttttttgttcagctcaaatgctgagggaggtttgctacaatagcacatgtgatctccttctcagcaaggaggttatatagtatccatttatgtgaaatactgtatcatggaatctgtatgtatagccccacatggtggaagtatcacgggattgctttacatttaaa

SEQ ID NO: 201284 - DNA, 5791 bp, Homo sapiens
  Payload ID: 19728
  Gene Name: zinc finger CCCH-type containing 12D
  Uniprot ID: A2A288
  ENST ID: ENST00000409806
  CDS Start-End: 320-1903
cttaaaaaaaaaaaaaccaaaaaaacccaaagcataactacttttgcagctgaacgtgactgtggcgtgcaggaagtggagcattggcatgaagtggctcctagtggctgcttggcgcacgccagctgccctcctctgactccagtggcacctgggggcctggcctcactgacgggagaacattggcgtgaaggctgctggcgactgggccagcattcattgtgaagaccggagggacacaccctgctgctcatgtctgcagggctctgagaggaggaagcctggggcaggacctgcgccagtggccgctgggcacagcatggagcaccccagcaagatggaattcttccagaagctgggctatgaccgggaggatgtgctccgggtgttgggcaagctgggcgagggcgccctggtcaacgacgtgctgcaggagcttatccgcacgggcagccgcccgggtgccctggagcacccggctgcacccaggctagtgcctcggggctcctgtggggtcccggactctgcccagcgtggcccggggacagccctggaagaggacttcagaaccctggccagttctctgcgacccatagtgattgatggcagcaacgtggcgatgagccatggaaataaagaaaccttctcttgccggggaatcaagctggctgttgactggttcagggacagaggacacacctacatcaaagtttttgttccatcctggaggaaggacccaccaagagctgacacccctatcagagagcagcacgtgctggcggagctggagcggcaggcggtgctggtgtacacgccgtcccgcaaggtgcacggcaagcgcctggtctgctacgacgaccgctacatcgtgaaggtggcctacgagcaggacggcgtcatcgtctccaacgacaactaccgggacctgcagagcgagaaccccgagtggaagtggttcatcgagcagaggctgctcatgttctccttcgtcaacgaccggttcatgccgcctgatgaccccctgggccgccatggaccctccctgagcaacttcctgagcaggaagccgaagcccccagagccatcctggcagcattgtccttatggcaagaaatgcacctatggcatcaagtgcaagttctaccacccggagaggccgcaccacgcgcaactggcggtggccgacgagctccgcgccaagacaggggcccggcctggcgcgggcgccgaggagcagcggccaccgagagccccgggcggctccgcaggagcccgggcggccccccgggaaccatttgcgcacagcctcccgccggcgcgggggtccccggacctggccgccctgcgagggagcttctctcggctggccttcagcgacgacctggggcccctggggccgcctctcccggtccccgcctgcagcctcacgccccgactgggcgggcccgactgggtgtccgcgggcggccgggtgccaggcccgctcagcctccctagcccggagagccagttctccccgggcgacctcccgcctccgcccggcctgcagctccagccgcggggcgaacaccgccctagggacctgcacggcgacttgctttccccgcgcaggccacccgacgacccgtgggcccgtccaccccgctccgaccgcttccctgggcgctccgtctgggcggagccggcctggggcgacggcgccactgggggactttcagtgtacgcgaccgaggacgacgagggggacgcgcgcgcccgggctcgcatcgcgctctacagcgtcttcccgcgtgaccaggtggaccgcgtgatggccgcgttcccggagctctcagacctcgccaggctcatcctcctggtacagagatgccagagcgcgggggcgcccctgggcaagccctaagggaccaacacgcacttgcagggaatggcccagcctcgccttgcgtcttggacgggtggacctgtggttgccagcctggacctgagtgggcccatcatggtgcccccttttctttaaagatggtcagggaagcctgcttcctcctcctgagcggggttgtgggggcctggtggcacttggtgatcctcactgaggccggggcctgctgcggggaggtccacccacttccgtggagggaatgattttccatgtgcacggagactgcgggtccaagctgcagtagaacccacaagtgggtcacaaaatcaatttagtgggtcaccaccacaaacacagtggactgggacagggcaaagcgcaccctgtgccatcaggctgagtctgaactcttgttacctatcctgtgtccccacccccttggcagccatgtaactaacctcaatgtgggtcgtagtcagaagtttaaaaaagactatgaatgctcttgaatttcattgcttcaggtaatgtttgaaatatgtagtcaggtggccaggggaggtttgctatctggaagttttcatgttagctattgctaaccccacccgcaagggcagcccagcctccaggtgtgggctctcctgtgctctgaattgtgtggctgtcctatgctggggacaagtggtaggagcgctttgtcccagggccaccttctggggccttcacacacatacccccaccacacaaacacacacacacacacacacacacacacacagtctatcatacatgtacatactcacacacaccacacagacacatactgtttggctaagggttaagtatctccaatattttattagccatccatcatggcagtttccagaataggctttctactgtaccagctgagctgccttcttttacttcttcttcttcttctttttttaaacagacagagtctcggcccggcatggtggctcatgcctgtaatcccagcactttggaaggctgaggcaggcagatcacttgaggtcaggagttcgagaccagcctggccaacatggtgaaaccctgtctctactaaaaatacaaaaatttagccaggcatggtggcatacacctgtagtcccagctactcaggaggctgaggcaggagaatcacttgaacctgggaggcggaggttgcagtgagttgagatcatgccactgcactccagcctgggcagcagagcgagactccgtcttaaaaaaaaaaaaaagacagagtctcactctgtcactctgtctggagtatagtagtgtgatcatagctcactgcagcctcaaactcctggattcaagtgatccccctgcctcagcctcctgagtaactgggactgtaaacatgacagccgcacttcacagttacactggggctggatgagtcaggacttttgctctcaaatctacaggtgggttaggagaaaactgacatgagctcagtcagagtttattgccaccttcctggtgccgtttcttctagccagctactgctctgggtttgaggagaaagggcctactcatttgcaatggctaagaagtgagatggtgctgccagagtgccgacccccgaatcctcaggggccctggcctctcctggcagcatccacccattctggttaccatgccagccctccagactatggctcatttgttcactagagggcttggtagcttggcagtttggggaaagcgggaggcacttcccaggggaagaccagagaagaccagcccccagccccacaaacttcctgcagcctgctggtgcagagggaactcttgccagtttactaccagatttcatgagatgttggcaggcctggggggcacctcagggagagtgcgttcccagccctttcattcatggtaaatgacacccctggggcatacagtgatgttaggtttttctctgaaacttctttgatcttttaaaaccagattcttagcatggattgagccagatctgttccttaccccctttttccaaagaggacggtgcacccacaattttaccataacatattgggatctcaggcctgaagatgacccattctttgtaaataagttggattttcctcataatatgtgtgggtttttttggtgggggaggagggggcagggttccgctctgtcatctgtcacccaggctggagtgcagtagtgcaatcagggctcactgcagctttgacttcccaggctcaagcaatccttgtgcctcagcctcctgagtagctgggactacagttgtgccaccacgtccagctaattttttctattttttgtaaagacccaaagcgttgggattacaggcatgagccacctcaacgggcctttattttttttattttaatttttattattattatttttgaaacggagtctcgctctgtcacccaggctggagtgcagtggcgcaatcttggctcactacatgctccactgcctcccaggttcatgccattctcctgcctcagcctcccaagtagctgggactacaggcgcccgccaccacatctggctaactttttgtatttttagtagagatggggtttcaccgtgttagccaggatggtctcgatctcctgaccttgtgatccccgcctcagcctcccaaagtgctgggattataggcgtgagccaccgcgcctggccccgggcctttatttttatttttaaccttttgacaagacacgctttctattagagctgctttttgtctccctggttcgatttcctgatgtagaatcattgtgttgctgatttttcagttgaaaatgtttaaactgcttcctttgagaacaagtttgagttttagtaagctgtaaagctgttttatttgattcactgtgaataagacaagtacaaaaaaaaaagtgaaaacacagcacatttcaagtgtaatcccctttggaatttttccaaagtcttagtatatgtctttgtgacagaaaaacatagatgggacaggtaaatgaaatgttcctagttgcatagctgttaaccatgcttcaaaaataaatcattttttaccacacctggattctttattgtcaaattgtctattagtttctcctactggctttcccctagattggtctgttctgttaaaaattgtgggtttagactgggcacgatggctcatgtctgtaatcccagcactttggtgggcttcatgagttcaggagttcgagaccagcctggtcaacctggtgagaccctgtctctactaaaaatacaaaaattagctgggtccgtggtggggcacacctgtaatcccagttgctcgggaggctgaggcaggagaatcaccttgaacccaggaggcagaggttgtagtgagctgagactgtgccactgcgctctgcactccagcctgagcgacagagtgagactctgtctcaaaaaacaaaaaaaagtaggcgtgaagaagactgaggttgtggccagtctcagcagccgcagttctgtgttgttccacctggggggatgtgaggggctcaaatccaccttttccaggagaagcagtgaggccatggcaaggacctccctttgctggatgtgcagcaggcagttcccaaggacacaggctgcttgcccatttcctagacttctaaaatcctcattatagaactatgaagccatctcatagaagctgctcttcttgttcaaacatgcagcagagctctcctcgactgatcaaaccagaggctgttgccatcttgggtttgccctgaggcagccttcccagaggcctctggaagggggtttggggtagaactgtagaatgtcaggggttgaggagtagaagcaagacaagccactctaattggcattcttccaaataaaatggatccagctttggtttga

SEQ ID NO: 201285 - DNA, 753 bp, Homo sapiens
  Payload ID: 19728
  Gene Name: zinc finger CCCH-type containing 12D
  ENST ID: ENST00000409948
  CDS Start-End: 154-657
tcaggacaagacaactttctcctcaccatggtggctgagttctggaggctgtaatttcgtggatttctgtggagctggcagagctcatgtctgcagggctctgagaggaggaagcctggggcaggacctgcgccagtggccgctgggcacagcatggagcaccccagcaagatggaattcttccagaagctgggctatgaccgggaggatgtgctccgggtgttgggcaagctgggcgagggcgccctggtcaacgacgtgctgcaggagcttatccgcacgggcagccgcccgggtgccctggagcacccggctgcacccaggctagtgcctcggggctcctgtggggtcccggactctgcccagcgtggcccggggacagccctggaagaggacttcagaaccctggccagttctctgcgacccatagtgattgatggcagcaacgtggcgatgagccatggaaataaagaaaccttctcttgccggggaatcaagctggctgttgactggttcagggacagaggacacacctacatcaaagtttttgttccatcctggaggaaggacccaccaagagctgacacccctatcagagggatagggatgggaaatgagtggaggtccattctcctgggagcagctgccagggagtagctcagctcacctgttagtcatcccgattttgcccgacttccactccatctccaccaccagaagtgctccaagactgcagggcaatggctcccacct

SEQ ID NO: 201286 - DNA, 810 bp, Homo sapiens
  Payload ID: 19728
  Gene Name: zinc finger CCCH-type containing 12D
  ENST ID: ENST00000458251
  CDS Start-End: 1-319
ggcggtgctggtgtacacgccgtcccgcaaggtgcacggcaagcgcctggtctgctacgacgaccgctacatcgtgaaggtggcctacgagcaggacggcgtcatcgtctccaacgacaactaccgggacctgcagagcgagaaccccgagtggaagtggttcatcgagcagaggctgctcatgttctccttcgtcaacgaccggttcatgccgcctgatgaccccctgggccgccatggaccctccctgagcaacttcctgagcaggaagccgaagcccccagagccatcctggcagcattgtccttatggtgggtagggcccagtgcttcgcaggccctgttcagggccttgtgtgggggcagtacaggagcacagtcaaaaagcgctggcctggtgctcagcggcctgggctcttgcccaagttctgccctccagctgtgctacctggagagttaactttcctgacagggttattgtagaactgacatcctggccggtgatttcatgggagccaggatcccatgccagggtcggatgcaggggtcatgcacacagcaaagctgtgtctgagaagccgggagcctggacacaaacccagctgcgggtctcagtcccttcacctggcccctggcagcttctgtcctcaccctaccctgctctccacccctccaccctatggactttggtcactgctatccatgaagagttaagaattttatcccagcaccctgggggatgccagccttctagccagctctttcactgacttgcttcgtcaagttatttgatgtttccaagttcagtaaa

SEQ ID NO: 201287 - DNA, 8018 bp, Homo sapiens
  Payload ID: 19729
  Gene Name: zinc finger CCCH-type containing 13
  Uniprot ID: Q5T200
  ENST ID: ENST00000242848
  CDS Start-End: 350-5356
aaacctctgacttccggcggcattttgaggcggtcctcctagcggcctggtagtgtttttgttgccttttcttaatctacaatctcttcgttatttttcttcctgcgacccagtttcgcttgaccctggagaggcggcgggcgggttggttctgcttctcagccatcccgggggctcctcgctagccaagagccggttcccgggagccgcgcgcgcatcgctttctcctcgtcgtcgtcctcctgggtccaggcgcggggacagagtcgcctcccccgctcctcggagcggcggcggcggtggtgcctccggactgcacttgcgaagggagcttggggaggaatacaaaatgtcaaaaattagaaggaaggtcacagtggaaaataccaagactatatctgatagcacatcccgaagacccagtgtatttgagaggcttggacccagcactggcagtacagcagagacacagtgccgtaactggctgaagactggcaactgcctctatggaaacacatgtagattcgtacatggcccttcacctcgtggtaaaggttatagcagcaattatagaaggtcaccagaaagacctacaggggatcttagagaaagaatgaagaacaagcgccaagacgtggacactgagccccagaaacgaaatacagaggagtcatcctcacctgttaggaaagaatcttcaagagggagacatagggaaaaggaagacataaaaatcactaaggaaagaactccagaaagtgaagaagaaaatgtagaatgggaaactaatagagatgattctgacaatggagatattaattatgattatgttcatgaattgtcattggaaatgaagcgtcagaagatacagagggaattaatgaagctggaacaagaaaacatggagaagagagaagaaattatcattaaaaaggaggtttcaccagaagtggttagatcaaaattgtccccgtcaccttctctaagaaagtctagcaaatctccgaagcgaaaatcaagcccgaagtcgtcttcagctagcaagaaagataggaagacatctgcagtatcttctcccctgttggaccagcagagaaattcaaaaaccaaccaaagtaaaaagaaaggaccacgtactcctagtccaccccctcctataccagaagatatcgctctggggaaaaaatacaaagaaaaatataaagtaaaagacaggatagaagaaaaaacaagagatggaaaggacagaggacgagattttgaacgacaaagagaaaagagagacaagccaaggtctacttccccagcaggacagcatcattctcctatatcttctagacatcactcatcttcctcacaatcaggatcatctattcaaagacattctccttctcctcgtcgaaaaagaactccttcaccatcttatcagcggacactaactccacctttacgacgctctgcctctccttatccttcacattctttgtcgtctccccagagaaagcagagtcctccaagacatcgctctccaatgcgagagaaagggagacatgatcatgaacgaacttcacagtctcatgatcgacgccatgaaaggagggaagatactaggggcaaacgagacagagaaaaggactcaagagaagaacgagaatatgaacaggatcagagctcttctagagaccacagagatgacagagaacctcgagatggtcgggatcggagagatgccagagatactagggaccgaagggaactaagagactccagagacatgcgggactcaagggagatgagagattatagcagagataccaaagagagccgtgatcccagagattctcggtccactcgtgatgcccatgactacagggaccgtgaaggtcgagatactcatcgaaaggaggatacatatccagaagaatcccggagttatggccgaaaccatttgagagaagaaagttctcgtacggaaataaggaatgagtccagaaatgagtctcgaagtgaaattagaaatgaccgaatgggccgaagtagggggagggttcctgagttacctgaaaagggaagtcgaggctcaagaggttctcaaattgatagtcacagtagtaatagcaactatcatgacagctgggaaactcgaagtagctatcctgaaagagatagatatcctgaaagagacaacagagatcaagcaagggattcttcctttgagagaagacatggagagcgagaccgtcgtgacaacagagagagagatcaaagaccaagctcaccaattcgacatcagggaaggaatgacgagcttgagcgtgatgaaagaagagaggaacgaagagtagacagagtggatgataggagagatgaaagggctagagagagagatcgggaacgagaacgagacagggagcgggagagagagagggaacgtgaacgggatcgggaaagagaaaaagagagagaactagaaagagagcgtgctagggaacgggagagagaaagagaaaaagagagagatcgtgaaagggatagagaccgagaccacgatcgagagcgggaaagagagagggaacgagacagggaaaaagaacgggaacgagaaagagaagagagagagagggagagagagcgagaacgggagagagagcgagagcgagaacgggaacgagaaagagcgagagaaagggataaagaacgagaacgccaaagggattgggaagacaaagacaaaggacgagatgaccgcagagaaaagcgagaagagatccgagaagataggaatccaagagatggacatgatgaaagaaaatcaaagaagcgctatagaaatgaagggagtcccagccctagacagtccccgaagcgccggcgtgaacattctccggacagtgatgcctacaacagtggagatgataaaaatgaaaaacacagactcttgagccaagttgtacgacctcaagaatctcgttctcttagtccctcgcacctcacagaagacagacagggtagatggaaagaggaggatcgtaaaccagaaaggaaagagagttcaaggcgctacgaagaacaggaactcaaggagaaagtttcttctgtagataaacagagagaacagacagaaatcctggaaagctcaagaatgcgtgcacaggacattataggacaccaccagtctgaagatcgagagacatctgatcgagctcatgatgaaaacaagaagaaagcaaaaattcaaaagaaaccaattaagaaaaagaaagaggatgatgttggaatagagaggggtaacatagagacaacatctgaagatggtcaagtattttcaccaaaaaaaggacagaaaaagaaaagcattgaaaaaaaacgtaaaaaatccaaaggtgattctgatatttctgatgaagaagcagcccagcaaagtaagaagaaaagaggcccacggactccccctataacaactaaagaggaattggttgaaatgtgcaatggtaagaatggtattctagaggactcccagaaaaaagaagatacagcattcagtgactggtctgatgaggatgtccctgaccgtacagaggtgacagaagcagagcatactgccaccgccacgactcctggtagtaccccttctcctctatcttctcttcttcctcctccaccgcctgtggctactgccactgctacaactgtgcctgcaactcttgctgccactactgctgctgccgccacctctttcagcacatctgccatcactatttccacctctgccacccccaccaataccaccaataatacttttgccaatgaagactcacacagaaaatgccacagaacacgagtagaaaaagtagagacgcctcacgtgactatagaagatgcacagcatcgcaagcctatggatcaaaagaggagcagcagcctcgggagcaatcggagtaaccgtagtcatacgtctggtcgtcttcgctccccatccaatgattcagcccatcgaagtggagatgaccaaagtggtcgaaagagagtactgcacagtggctcaagagatagagaaaaaacaaaaagcctggaaatcacaggagagagaaaatctaggattgatcagttaaagcgtggagaacccagtcgaagtacttcttcagatcgccaggattcaagaagccatagttcaagaagaagttctccagagtcagatcgacaggtccattcaagatctgggtcatttgatagcagagacaggcttcaagaacgagatcgatatgaacacgacagagagcgcgagagagagaggagagatacgaggcagagagaatgggaccgagatgctgataaagattggccacgcaacagggatcgagatagattgcgagaacgagaacgagagagagaacgagacaaaaggagagacttggatagggaaagagagagactaatttctgattctgttgaaagggacagggacagagacagagacagaacttttgagagttctcaaatagagtctgtgaaacgctgtgaagcaaaactggaaggtgaacatgaaagggatctagaaagcacttcccgagactctctagccttggataaagagagaatggataaagatctgggatctgtgcagggatttgaagaaacaaataaatccgagagaactgagagtctggaaggagatgacgagtccaagttagatgatgcacattcattaggctctggtgctggagaaggatacgagccaatcagtgatgacgaactagatgaaattctggcaggtgatgcagaaaagagggaggaccaacaggatgaggagaagatgccagatcccttagatgtgatagatgtggattggtctggtcttatgccaaagcatccaaaagaaccacgagagcctggggctgcactcttaaaattcacacctggagctgttatgctaagagttgggatttctaaaaagttggcaggttctgaactctttgccaaagtcaaagaaacatgtcagagacttttagaaaaacccaaagatgcagacaatctctttgaacatgaattgggggctctcaatatggctgcattactacgaaaagaagaaagagcaagtcttcttagtaatcttggcccatgttgtaaggcgttgtgcttcagacgggattctgcaattcgaaagcagcttgttaaaaatgagaagggcaccataaaacaagcttacacgagtgctccaatggtagacaatgaattacttcgattgagtcttcggttatttaagcggaagactacttgccatgctccaggacatgaaaagactgaagataataaactttcacagtccagtatccaacaggaactgtgtgtgtcttaagaccgaagttcaatatggtatttttggtactgtcttccttcagcagtgcatattcttttgcaaagttctttggtttgacaagcattagtgacaaaggcagaaaagatttatcagccatgctaaaagagtgaagaattttgatctttagagacactagttttggccaacttaagattttacgttaatttttacatagtatttgacactcatgcaaaataatgtgaaaacatctagatttagtagtttattctgcgccttttgttaaaactgaagattttggaaaatggttgtcactgctcttccagcctatgaatatttttgtgaaatggaaccatggatttatgtctggatcatccatacagaaccaacaattttattcaaaaacaatgtgttcatcaaagtaattgctcacattgtgcagtactatgttgtacagaccacgtgaaagggaatgctggtctagctggcgtggtatgtttataggcgaatttcagcagaaggaagccaaaatagttttttccttttgaaagttttttaaaaattatttcatgggtcttttttttaattaatatgtgtgcattgttacaatgtatgttggatgtcttttgaccctaaatgctttttttgttatcagagattgtgtactatttttatttttaataaatgtatcttccctttccttgttttagatttactttgctcttcgttaatcttattcctgatgatctagaacattagtcatcaacattacatgtttcatgcttcagatattttactgcttgtgtccttattgttggacagctttaaacagagttgatgtacttcaaatatagctcattgatacttaaggcatcttcttggaatgtggcttttgaagaaaaaaattactcaaagcaaatcaagagttaacaaacctaacgtaacctgaggtttaatattctactatcatattttttagagctataacttttgattatattaaactgcctccagctgtactatgtaaaacagatttacttttaaaaattacagtatacctgctttgttctatatgtatatgtttaactcatgaagtggactcttagaaggatttgaaatggactctggccacagaatttgtgagcagacagtagtagtgataataataaaagaaggcaatcaaaatttaattttatcatgccctctcacaggtttgtgttataattgtaagcccatattacttgtgttagtagttttgtctctataggtaacataatgacagtggtgtaaagtttctgttcaagaaacatatgttgtaaagttactttatacaagatacctgccaaaggaaatggtcttactttcaaatgactttgaaagcatgtataattgcaaacagagcaggagaagactttaatcagaatttccttgtgtccttttcctttactaagtgttttgaataaagaaaaaaaaaatgtatgacctcagagaatgaatacccttcaggaagccacttcctgattttagtggataatattgttctctgtagcacaaagatttaaagtcctagaatttctaatcctagttctcagaattgtagaatatgacaaaaataatggtttccccatttgtccactgacttcagggatatttcacaagttatttatttatagaatgaaaactatgtagttaaatctgtcattcagttaaacctgttgtctttcagtttgaaatctttttgttatgtatgttgcaaaagaaaatttagaactattcctttgttcactcagtcacagcattcagagctttatgtttccagtggaaatgtactgttcagtctcaatttcttttaattcaaccattctcagtattagtaacatatacctataaaatttttctaaagcaaaatttttgattgaatttctcataaaagctcttggaccataattaaagtctcagttaaactggtattcccgaaaaacaatcttccagtctataaattgtttgctagtacaattaaaaggtcatctatctcataactgacggctcaggtctgtccagttgccataattgcacaactggattccagctgctggtaataaggaattgtgtagatagataaagggcaagagtatgtctgcaatccaaaataaatgagagttaacacataattagccttttgattattttggcagctatcctcaccatttagtaaagggtatactaacaatacccaactttatttaacaaagttttgtaagcatacctaagtagtaacttgatatgctgaaaaatctgacctgtcacttcgcttcactctgaccagtaattgcagattgtcgtcaccatcctagcctatgactacattaggattttatgacttattaacttgaaaatctgttctgtaagtggcattggtagaatctcccactttgctcctcactgtccaattgtgtaaagattaaggtacatactattgttggtgatgcttttacacctcaacttgctattttaaaaggttatatgaacccctcccacttttaaggatattcccttttactgattttcctagctaaaattatatagccatctttctaaatattgtatttaaatctgatctaggacttgccttattttatcatttttctttaataatctccaataaactttctttattcattaa

SEQ ID NO: 201288 - DNA, 6412 bp, Homo sapiens
  Payload ID: 19729
  Gene Name: zinc finger CCCH-type containing 13
  Uniprot ID: Q5T200
  ENST ID: ENST00000282007
  CDS Start-End: 72-4766
agaggaacagggcaaacctctgacttccggcggcattttgaggcggtcctcctagcggcctgtagtacaaaatgtcaaaaattagaaggaaggtcacagtggaaaataccaagactatatctgatagcacatcccgaagacccagtgtatttgagaggcttggacccagcactggcagtacagcagagacacagtgccgtaactggctgaagactggcaactgcctctatggaaacacatgtagattcgtacatggcccttcacctcgtggtaaaggttatagcagcaattatagaaggtcaccagaaagacctacaggggatcttagagaaagaatgaagaacaagcgccaagacgtggacactgagccccagaaacgaaatacagaggagtcatcctcacctgttaggaaagaatcttcaagagggagacatagggaaaaggaagacataaaaatcactaaggaaagaactccagaaagtgaagaagaaaatgtagaatgggaaactaatagagatgattctgacaatggagatattaattatgattatgttcatgaattgtcattggaaatgaagcgtcagaagatacagagggaattaatgaagctggaacaagaaaacatggagaagagagaagaaattatcattaaaaaggaggtttcaccagaagtggttagatcaaaattgtccccgtcaccttctctaagaaagtctagcaaatctccgaagcgaaaatcaagcccgaagtcgtcttcagctagcaagaaagataggaagacatctgcagtatcttctcccctgttggaccagcagagaaattcaaaaaccaaccaaagtaaaaagaaaggaccacgtactcctagtccaccccctcctataccagaagatatcgctctggggaaaaaatacaaagaaaaatataaagtaaaagacaggatagaagaaaaaacaagagatggaaaggacagaggacgagattttgaacgacaaagagaaaagagagacaagccaaggtctacttccccagcaggacagcatcattctcctatatcttctagacatcactcatcttcctcacaatcaggatcatctattcaaagacattctccttctcctcgtcgaaaaagaactccttcaccatcttatcagcggacactaactccacctttacgacgctctgcctctccttatccttcacattctttgtcgtctccccagagaaagcagagtcctccaagacatcgctctccaatgcgagagaaagggagacatgatcatgaacgaacttcacagtctcatgatcgacgccatgaaaggagggaagatactaggggcaaacgagacagagaaaaggactcaagagaagaacgagaatatgaacaggatcagagctcttctagagaccacagagatgacagagaacctcgagatggtcgggatcggagagatgccagagatactagggaccgaagggaactaagagactccagagacatgcgggactcaagggagatgagagattatagcagagataccaaagagagccgtgatcccagagattctcggtccactcgtgatgcccatgactacagggaccgtgaaggtcgagatactcatcgaaaggaggatacatatccagaagaatcccggagttatggccgaaaccatttgagagaagaaagttctcgtacggaaataaggaatgagtccagaaatgagtctcgaagtgaaattagaaatgaccgaatgggccgaagtagggggagggttcctgagttacctgaaaagggaagtcgaggctcaagaggttctcaaattgatagtcacagtagtaatagcaactatcatgacagctgggaaactcgaagtagctatcctgaaagagatagatatcctgaaagagacaacagagatcaagcaagggattcttcctttgagagaagacatggagagcgagaccgtcgtgacaacagagagagagatcaaagaccaagctcaccaattcgacatcagggaaggaatgacgagcttgagcgtgatgaaagaagagaggaacgaagagtagacagagtggatgataggagagatgaaagggctagagagagagatcgggaacgagaacgagacagggagcgggagagagagagggaacgtgaacgggatcgggaaagagaaaaagagagagaactagaaagagagcgtgctagggaacgggagagagaaagagaaaaagagagagatcgtgaaagggatagagaccgagaccacgatcgagagcgggaaagagagagggaacgagacagggaaaaagaacgggaacgagaaagagaagagagagagagggagagagagcgagaacgggagagagagcgagagcgagaacgggaacgagaaagagcgagagaaagggataaagaacgagaacgccaaagggattgggaagacaaagacaaaggacgagatgaccgcagagaaaagcgagaagagatccgagaagataggaatccaagagatggacatgatgaaagaaaatcaaagaagcgctatagaaatgaagggagtcccagccctagacagtccccgaagcgccggcgtgaacattctccggacagtgatgcctacaacagtggagatgataaaaatgaaaaacacagactcttgagccaagttgtacgacctcaagaatctcgttctcttagtccctcgcacctcacagaagacagacagggtagatggaaagaggaggatcgtaaaccagaaaggaaagagagttcaaggcgctacgaagaacaggaactcaaggagaaagtttcttctgtagataaacagagagaacagacagaaatcctggaaagctcaagaatgcgtgcacaggacattataggacaccaccagtctgaagatcgagagacatctgatcgagctcatgatgaaaacaagaagaaagcaaaaattcaaaagaaaccaattaagaaaaagaaagaggatgatgttggaatagagaggggtaacatagagacaacatctgaagatggtcaagtattttcaccaaaaaaaggacagaaaaagaaaagcattgaaaaaaaacgtaaaaaatccaaaggtgattctgatatttctgatgaagaagcagcccagcaaagtaagaagaaaagaggcccacggactccccctataacaactaaagaggaattggttgaaatgtgcaatggtaagaatggtattctagaggactcccagaaaaaagaagatacagcattcagtgactggtctgatgaggatgtccctgaccgtacagaggtgacagaagcagagcatactgccaccgccacgactcctggtagtaccccttctcctctatcttctcttcttcctcctccaccgcctgtggctactgccactgctacaactgtgcctgcaactcttgctgccactactgctgctgccgccacctctttcagcacatctgccatcactatttccacctctgccacccccaccaataccaccaataatacttttgccaatgaagactcacacagaaaatgccacagaacacgagtagaaaaagtagagacgcctcacgtgactatagaagatgcacagcatcgcaagcctatggatcaaaagaggagcagcagcctcgggagcaatcggagtaaccgtagtcatacgtctggtcgtcttcgctccccatccaatgattcagcccatcgaagtggagatgaccaaagtggtcgaaagagagtactgcacagtggctcaagagatagagaaaaaacaaaaagcctggaaatcacaggagagagaaaatctaggattgatcagttaaagcgtggagaacccagtcgaagtacttcttcagatcgccaggattcaagaagccatagttcaagaagaagttctccagagtcagatcgacaggtccattcaagatctgggtcatttgatagcagagacaggcttcaagaacgagatcgatatgaacacgacagagagcgcgagagagagaggagagatacgaggcagagagaatgggaccgagatgctgataaagattggccacgcaacagggatcgagatagattgcgagaacgagaacgagagagagaacgagacaaaaggagagacttggatagggaaagagagagactaatttctgattctgttgaaagggacagggacagagacagagacagaacttttgagagttctcaaatagagtctgtgaaacgctgtgaagcaaaactggaaggtgaacatgaaagggatctagaaagcacttcccgagactctctagccttggataaagagagaatggataaagatctgggatctgtgcagggatttgaagaaacaaataaatccgagagaactgagagtctggaagcaggagatgacgagtccaagttagatgatgcacattcattaggctctggtgctggagaaggatacgagccaatcagtgatgacgaactagatgaaattctggcaggtgatgcagaaaagagggaggaccaacaggatgaggagaagatgccagatcccttagatgtgatagatgtggattggtctggtcttatgccaaagcatccaaaagaaccacgagagcctggggctgcactcttaaaattcacacctggagctgttatgctaagagttgggatttctaaaaagttggcaggttctgaactctttgccaaagtcaaagaaacatgtcagagacttttagaaaaacccaaaggtagtttcattttactttaactatataatgtctgttaaccatttaagatgccatctgaaggggattctgatctgttcttatgtagcacttaacactgtgtagaaactattttttgagaaatcattttataatcattatttaaccctcatggtcaaagtttctctttaaaatttattttgagaagaagagttatcccacagaaaagttgggaaaagagtacaatgacctttttgtatgaaaattacttattaacaggccaggcgtggtgttgcatgtctgtagtcacagctactcagggaggttgaggcagcaggattgctggagcccaggaaattgaggctgcagtgagccatgattgagccaccacactccaacctaggtgacagagcaagaccctgtctcaaaaaaaaaaaaacaaattaaccaataagttctaatatcaaagtgctcagtggtttgcccttggctaaatgaagcagagccaggaaaaacagactacatatttttcatgtctaaagaaattgggtattttggcagccctttcccctagacatctacccaaatgcaggtgtgtaggttgagtctttaacaaagtgattaagagcttggtctgtaaggccggatgatctggatttcagtaggcacaccacttactggctattacttaatctgtgtgttagtgtcatcatctgtaagtcaggaataatcataccaccaacttcctatggtaattaggagcaaatgagttattacaggcaaaacacttagaacagttcctggcatatagtaatacccaataaatattaactgctactttgaaaatatcctatcacgctgatttttgacctcactgcagcaattttcagttattccagattatctagcttatggattctggtggtaggggttgtttggttttggttttcactgtctctgtctcatctagtacctaccttagtttattttgcaacttactaatactttattaatggggagggacgagtagatggtaaaaagaaggaaaaggaggtaaaaggtgaaaggaacaacattaattaacaattttacgtcatgtccctggacataaaagtttagttagtattaaatttttcactaatacaaaataaaaaaatattgttttatgagttttatgaattcatgcccttcctttactctattagcataagcagtaaatttttttattttaatatagcccaataaacctagagtatacatgtacaaaatacatataattgttaacgtgtattaaccgaaaaatgacccaagacttagttcttgccctactgtatctgccttgtttggttggttctgtgaccttaagcaaataactcctgtgagcctcaattttatttgtaaagtgatggaataaaacccctaaaatcttacccacctctaaagatatttgtttctgtgaccttttgctagtagcatttcaagttaaaatctggtttgattttgctacccatgaaatacagttcggcccttacttattgatgacttaacctaaacagtgaaaatatgcactgtaaagggtggggtgatgtggcttaacaatcagacttcttctatttttgctgctatggtggttgtattagagaactgatgtattatcttgaataaagactttgtcttgtttactgccata

SEQ ID NO: 201289 - DNA, 695 bp, Homo sapiens
  Payload ID: 19729
  Gene Name: zinc finger CCCH-type containing 13
  ENST ID: ENST00000428921
  CDS Start-End: 350-695
ttgccttttcttaatctacaatctcttcgttatttttcttcctgcgacccagtttcgcttgaccctggagaggcggcgggcgggttggttctgcttctcagccatcccgggggctcctcgctagccaagagccggttcccgggagccgcgcgcgcatcgctttctcctcgtcgtcgtcctcctgggtccaggcgcggggacagagtcgcctcccccgctcctcggagcggcggcggcggtggtgcctccggactgcacttgcgaagggagcttggggaggaacagtgataacgatttaggtcctgggaattgagtgctactttatcttcacaagccttagtagtacaaaatgtcaaaaattagaaggaaggtcacagtggaaaataccaagactatatctgatagcacatcccgaagacccagtgtatttgagaggcttggacccagcactggcagtacagcagagacacagtgccgtaactggctgaagactggcaactgcctctatggaaacacatgtagattcgtacatggcccttcacctcgtggtaaaggttatagcagcaattatagaaggtcaccagaaagacctacaggggatcttagagaaagaatgaagaacaagcgccaagacgtggacactgagccccagaaacgaaatacagaggagtcatcctcacctgttagggtaggat

SEQ ID NO: 201290 - DNA, 535 bp, Homo sapiens
  Payload ID: 19729
  Gene Name: zinc finger CCCH-type containing 13
  ENST ID: ENST00000464597
  CDS Start-End: 1-350
gtgaagaagaaaatgtagaatgggaaactaatagagatgattctgacaatggagatattaattatgattatgttcatgaattgtcattggaaatgaagcgtcagaagatacagagggaattaatgaagctggaacaagaaaacatggagaagagagaagaaattatcattaaaaaggaggtttcaccagaagtggttagatcaaaattgtccccgtcaccttctctaagaaagtctagcaaatctccgaagcgaaaatcaagcccgaagtcgtcttcagctagcaagaaagataggaagacatctgcagtatcttctcccctgttggaccagcagaggtcagtagggtgataaatagtatcgagaaaatagctttttctgaagtgatactaaaaagaattagtaggttataaaagggtacttttagtacattttatatttaatgtaagcttttttgttctaaaaagaaatttgaaatgtttcaattaaaaagacaattatagagaacaataaaacaaacatctgtgtaacatcca

SEQ ID NO: 201291 - DNA, 18281 bp, Homo sapiens
  Payload ID: 19730
  Gene Name: zinc finger CCCH-type containing 14
  Uniprot ID: Q6PJT7
  ENST ID: ENST00000251038
  CDS Start-End: 226-2436
tgagcacaggtttcgcgggtagaaggcgtgcgcaggcgcggacacgggcgcatgcgcgttcactccggcgcgcagtgccggccggggcggggatacgccgtgtgcgcggccgggggcggaacggaggaggaggcggtggtgtcccggctgcggggtaggagtccgcggcagcctccgggtaagccaagcgccgcgcagtgctgagttcccgcacgccgcagagccatggagatcggcaccgagatcagccgcaagatccggagtgccattaaggggaaattacaagaattaggagcttatgttgatgaagaacttcctgattacattatggtgatggtggccaacaagaaaagtcaggaccaaatgacagaggatctgtccctgtttctagggaacaacacaattcgattcaccgtatggcttcatggtgtattagataaacttcgctctgttacaactgaaccctctagtctgaagtcttctgataccaacatctttgatagtaacgtgccttcaaacaagagcaatttcagtcggggagatgagaggaggcatgaagctgcagtgccaccacttgccattcctagcgcgagacctgaaaaaagagattccagagtttctacaagttcgcaggagtcaaaaaccacaaatgtcagacagacttacgatgatggagctgcaacccgactaatgtcaacagtgaaacctttgagggagccagcaccctctgaagatgtgattgatattaagccagaaccagatgatctcattgacgaagacctcaactttgtgcaggagaatcccttatctcagaaaaaacctacagtgacacttacatatggttcttctcgcccttctattgaaatttatcgaccacctgcaagtagaaatgcagatagtggtgttcatttaaacaggttgcaatttcaacagcagcagaatagtattcatgctgccaagcagcttgatatgcagagtagttgggtatatgaaacaggacgtttgtgtgaaccagaggtgcttaacagcttagaagaaacgtatagtccgttctttagaaacaactcggagaaaatgagtatggaggatgaaaactttcggaagagaaagttgcctgtggtaagttcagttgttaaagtaaaaaaattcaatcatgatggagaagaggaggaagaagatgatgattacgggtctcgaacaggaagcatctccagcagtgtgtctgtgcctgcaaagcctgaaaggagaccttctcttccaccttctaaacaagctaacaagaatctgattttgaaggctatatctgaagctcaagaatccgtaacaaaaacaactaactactctacagttccacagaaacagacacttccagttgctcccagaactcgaacttctcaagaagaattgctagcagaagtggtccagggacaaagtaggacccccagaataagtccccccattaaagaagaggaaacaaaaggagattctgtagaaaaaaatcaaggaactcaacagaggcaattattatcccgactgcaaatcgacccagtaatggcagaaactctgcagatgagtcaagattactatgacatggaatccatggtccatgcagacacaagatcatttattctgaagaagccaaagctgtctgaggaagtagtagtggcaccaaaccaagagtcggggatgaagactgcagattcccttcgggtactttcaggacaccttatgcagacacgagatcttgtacaaccagataaacctgcaagtcccaagtttatagtgacgctggatggtgtccccagccccccaggatacatgtcagatcaagaggaggacatgtgctttgaaggaatgaaacccgtaaaccaaactgcagcctcaaacaagggactcagaggtctcctccacccacagcagttgcacttgctgagcaggcagcttgaggacccaaatggtagcttttctaacgctgagatgagtgaactgagtgtggcacagaaaccagaaaaacttttggagcgctgcaagtactggcctgcttgtaaaaatggggatgagtgtgcctaccatcaccccatctcaccctgcaaagccttccccaattgtaaatttgctgaaaaatgtttgtttgttcacccaaattgtaaatatgatgcaaagtgtactaaaccagattgtcccttcactcatgtgagtagaagaattccagtactgtctccaaaaccagcagttgcaccaccagcaccaccttccagtagtcagctctgccgttacttccctgcttgtaagaagatggaatgtcccttctatcatccaaaacattgtaggtttaacactcaatgtacaagaccggactgcacattctaccatcccaccattaatgtcccaccacgacatgccttgaaatggattcgacctcaaaccagcgaatagcacccagtcctgcctggcagaagatcatgcagtttggaagttttcatgtactgatgaaagatactctacagaacttgtcaaatctttgaaacttggaatatattgctttcataatatgaagttttattgcctatctatctgaagtgtctaatttttcaagtttgtaagtttattatgtggttttaacattgggtgtttttgttttgtttttactatgaaaagacagcttaaggaagagctaaattctgttaaaatatttggggcatgtttgtgcactgctgttgtgaggatcagcatatgaaattgacatcatggttagtcatggtactgcagcttagggggctacacggttgctgtgtgagtggagagatgcagtgaggcagttgtcattattctaaaaattgtactactttcacttttcccaaagattatataatgttcataatccaccatgaaaacagcattggccaaaggtactgaggctgcttaaaatattcaattctgctttttaatttttaagtgaatttagtttgaaaagcatgattatacaggcctctcaggctgagtgctactttggtaaagttcccagttttcctgccttctgtgacaggatgaatgaggtgggtatggacagtggaggcagctggaatggcaagtgcagaaaataggaacagttctatacagtgctctcatttactaataacataatgccttctaaataatttttttgggaaactacattatcacaaaattatacaaatttttttacaagtatttacatactgtatctgaaaacagactttaaagtcacaagattataaatgtacatatatattctcacattctgaaaaataacattctcagaatccacagaaaatatacttagttactactgaagataatttttgaaatgtaaaaattagatttaaatagtatattttaaatgacagaactataattacagagatcagatcagataggtaaactgcaagatagataggatgaaacttttggcctactgtattacttacagagtttttttgtgtgtggtttttaaaactgttaaggcaagaagtgtcaaatgctttagagttaaataacagatcactgatttcaaagacttggtgtatagtgttaaaaattaaagcttaaaaggtggttagaaaagtggattaatgcaaaaggggtaataaagactgcaacattctcaggaccaaattaaactgctaaaaaaaaaaaaaaagttcattgacttgcttagtcgtatactcaaatgatgataaacctacatgtgcaaaggctcacgtttaagattgtcaagccagcagtctactgttgtgttgccattgcttttccattgggagaagaaagaattaaccagtcattaaaccatttggtaagttgcactttgctgtgctgatcccacaggaaaggcttgaaacacgagaagcagcaaagacagagcacacaagtgcataaggctgttgtcttcggcttgggtgaaatgacagttcctcttcattctaaaggtttactccattgaatttaaggcatttgttcattccagtgttgagatgctttgcatctctgcagaagaaatttattttaaattgtttaaatatctggaaatacttttagctatcatttataaagatagttttgttctcagtttcactataaattatagaacaaatgggaaacaagggtttaatttagttcagccattttacaaggaaataataaaatactaaaatctgattgttttttgctatttaatagccactgcccagacacatatttaagagtttaatctttcagttgctatggcttatgaacaagctaaggttgaccataaaacatttgttggatgacgtggtttaaaatgatcaccacaaaaagggaccacaaaaaaaggaaggaaatgagcatggttggcgattggaagcaagggtaccagagggcacagtgtgctttggcatgcattttatacataaaatgaatggaacaaaaggtgccagaagtcccaggttacacaatcaggagcttagatactgcacacaaaaataattatctgggttaaaaaagtaaacatagggcagattctatatggcctatcatgtttcttcaccttcccctcgttgctggctgatacagcgaggtggtcagctgatgactacttagtcaatatgacctttagtcgtgaaactgacagcagcagtgattaaggctgacttaatcaggttggccactttgaaggacagaaatgcagtggaaacagttttattctatgtagtttacatgcttaaggttacagagtttctacctgcactgtaatggaaatataatttctctgtagccaaaagctggcaaacttgacccagagggaaaatttaaaactgcagcaggctcaaatgtagagtatttttctttttatgggcaggttgttcagggatttttttcctcctttaatttattgactgactgtaaatacatgagtagaaacttaatagtcatgtatttcaaaatttggcttaatttaggagaatccactgatgaacaagtaccaacttacgtttcaagcttcttagccccataatcagtccttcagccacagctatttagagctttaaaactaccaggttcaatcactggttatgctttctgtgatgtaatttagtcatttctatttttagtattaaccaagtattagacacagaaaataggtattaagaatcttcatatatcctgtcagaccaaatgggattccaggaacctaaagcgatctattatgctataaagataattaacacattaaaaactcatagggtcaatacagcatcttaaacctcacacttagaaaaatatatttttaaatagcagtctacataattttcaatcttcaggaaactacagataggctagacagcgaattcctgaatgatgagtagtgatctttggcagcatttaaagtgaaaagaaataaggatctaagaattcagccctaatccactaaaaaaaggaattctaactgacaagtttttacaaatggagttgggctcattcattttggaaataaacctatggagtggcacacatctaaacaaattttcccaatagaaaaaaggctataaaaattttattccaagagtgattaaattgtataatgttgtatatgtgaatttaacacttttgtttacatgttaaacaaatgtgtatatattagactacattaaatatgcaattctttcttccagttaaatactgttgctccctaaaacccttacattgtacaccattgggaatgattgttcatcatactacttttccattagtgaggctacagttatgttttaaatgtgcgattacagagatggcatctgaacataaactgatggctcgaaaatgaaaatggaaatgtagcagccatatactgctaactttggatctgttcctgaattcaaaactactaggagaaaagtgtcctttataaaaaaggaccttattaatgcctaaaaaacatcatattctctaggaaagcttgtgtctgtttccttagggaaaatgtttgccttttaaaaactgtgatcctttaggatgatcatgactttccctttccttatggaaatgcaagaataaaatatttcattaaacaatgaaccttgaaaataaaatataaacattaagaaaccattttgctaaaaagataatgaaaattatccaaattgggtttttgagttcttctgtaaagagtgctctaccctaaattttcccagcaggtctgccgaaatcacacacttcccaatacagggggacttggcctttaccatcaagtattcgatccttccttgaaatggcattatctggcagtgtatggattacggattatacccagtgcatatagcaaatattttgaacagatcagtctttcactattttgatgattctgggcatttctccctgttacagtcttgggttagcaccacttgaccatgcagggttgggttttggtttttcttctctgtaattctggtctcaaagttaatttctgtagtcatctcagcatctctcagtgaggtgtatgtacacatttccagacaaataagctgcaatcagagaagaaaattgcagggagttaattatgtttttagattttcataacagtttaatatttttcagttgtgctttcaggttacatgtgtaatatttttcctctttaactccttttattctgtatttgcataaatatgagattctgaagagccatctggttatactaccttctactaatgttgactagctgatttcataaaccaaagctgtaggagttgttgtattaagtctcttaactagtaacatagtctgctcttcatgggctgagaaagttactaacctgcagtcatcacctccagcactaacaacatgtcgatcaccactggtaaatcgaatatttgtcacatggggcgaatgacccaagaaccttttgtgttttgcctaaaaaacaatgacagacaagctcagggcatttggtgcacacagaagtcaaaggctcttattaggaactataatctctatgacaagagctgtggagagagtagggagttagcaccgcagccagtgattagaatgcttttcagcatgagtagtggatctgcaaaaccaggctgtgtgggcagtcagatgtctccaggtactctgaccatttttctctaaggaaaagcatttgaaatttgataactgattataggtttggtgaaaagctaattacagcttttgtaggatggttccaaagatggtattactcgagggagaggatttgtttctaatagcttttatttcaaagtaaatagatttagaaagtttggggaaaaatttagaaattaggacaaaacattttaaatatatggggaaaagtgctgatgataagacatcaaaattaggagtaaactgataatagtaaacaaaacacaaacttacaaatttttctggacatgggaagtcaaataacttaaccatgccaaagtcatctcctgtaacaagactgattcctgaatgagatacacaggcacagttgacatcagctttctcagcatgtctggaccagattcccaaaacctcatctcctagaatactagagggaaggaacaaaagaaaactcatcatggcaagtgcgggcaggttgactatattcaaaaagtttcttggcaattaatctctaagtaccctatcatgttacttaaaatacaggaagtaaattatggtaagttgtttggagacctgaatttcatcaggatatcaactcctgccttttaaaaatgacattttataatttgaagggtttctagattaatctttttaagattaaagtagtactttatgaaaactgatagaactattttttctttttttttttttgagacggagttttcgctcttgttacccaggctggagtgcaatggcatgatctcggctcaccgcaacctctgcctcctgggttcaagcaattctcctgcctcagcctcccgagtagctgggatcacaggcatgcgctaacatgcccggcttattttgtatttttagtagagacagggtttctccatgttggtcaggctagtctcgaactcccgacctcaggtgatcacccccgctcggcctcccaaagtgctgggattacaggctgagccaccgcgcctgactgaaaactgatagaactatttttcaaattaaaagtgctacttggctgggtccagcagcacataccagtaatcccaacattttgggaggctgaggcaggaggactgcttgaggccaagagtttgagaccagcctgggcaatattgtgagatccctatctctacaaaaataaaaatgacttatgacataggaattaaaaaaatttcagagatggggtcttgctatgttgcccaggctggtatcaaaacttctaggctcaagtgatcctcccacctcggcctgctacatcagagattacaggcatgagccactatatgcctggctgatacaggaatttgatggcatttttcattggccaaaaaaatggatagtcatggttacctgtcatacagccaggaaatttgaacaaatttggaagctttgacttctaatagattcaagatagcattcctttagatagagaattaataacagttgcttaacagcacccaatacctttttgccagtcattaaatttagcattaagaaaaatatcagggtatctttaaagttaaaactttgatttccttaaaaaaaaaacttgataaatcatggaaactgataaaacatggaaatatattcaataaaaaggggtcccaacatgaacataccatttcaaaatatggtaacaaaaacttgaaactcaattactattccttattggaatggctctaacagttcagaaataggattttctaactggccttcaaagtcagttcttgccttgtgaatatataagtatttacctagtccatgtagcccaagtaattctgtcaatagcggcatgatccataagatgttttcctgaaggcacttcatagacatgccgtttatagcagccactagagacctttttcatcagattaaaatgggacaagaattccattaggtgagagacaaaatccacagggggtttacagaatactagcatattgctacttgatttacatgtctaacattattaagtatgcaaaagatcactacaaaaacttaataggagaaaagctctgataagtgggggaggaaaggggagctgtaggtcagaaggtacaaagggaggagttgagaagctggagctctggagctcaggaactttaaatgcattcactaacacgaaatgtaaaagcagaagaacttgccacctgggtatacagtattggtactgtacctggagataactgctatctgcagagaagtccatttgaatgacaaagcttggaatgtctttgcagtagctgattctgttaagagtggggcccagcgttaggtcataaaaatccactgagttctcactagaacctactgccagataccgggaatccggactaaatctgaatcaaaacaaaacgtaaaaagtattagaccacatgaagtattataaatacttaagatcagtgacttttcctttctagttcttaaaagtaacgtgtgataaggcctcaaatagatttacctgtcagacacaactgatcatgtatactgagattgtctgggttacatgaaataaggaagctttatattttacttaaattttaaatatttccccaattgtcatctcccaattcctttaaaaacgtctaatggcttaaaaaaactttcttaggccaggcccagtggctcacacctataatcccagaactttgggaagcggaggcgggcagatcacctgaggtcgagagtttgagaccagcctgaccaacatagagaaaccctgtctctactaaaaatacaaaattagccaggcatggtggtgcacgcctgtaatcccatctactcgggaggctgaagcaggagaatcgcttgaacccaggaggcacaggttgtggtgagctgagattgcaccattgcacttcagcatgggcaacaagagcaaaactccaactcaaaacaaaacaaaacaaaatttaattttttaaatagaggcggggtctcactatggtcccaaactcctggcctcaagcaatccttcccccttggcctcccaaggtactgggattacaggtgtgagccacaacacccagtcagaacatctcagcttttaaaagccattagcattacataattaataagctaacaattcattaagatagttttcttccatctggaaaaaacgttgtcttaatattaagcaaagaacacagcccagcttaactaacctccagttattaaggtgaaatgacacaacttgaatcttggaagaagaattttttttttttgagacgaagtctcgctcttgtctcccaggctggagtgcgatggcgcaacctccgcctcccgggttcaagcgattctcctgtttcagccccctgagtagctgggattacaggcgcctgccaccacgcccggctgatttttgtatttttagttgagatggggtttcactatgttggccaggctggtcgagtactcctgacttcaggtgatctgcctgcctcggcctcccaaagtgctgggattacaggcatgagccaccgcgcccggcctgaagaacttatttaaaagacaaagtgaaatgctatttgcctagcaatctttggagtcatatgggacaattcagtctcttgaaatggcccatgagtcttactgaggtacgatagagacatgtaaaagctaagggaagccactgttactattttatatattgaagttctgaggaaggtttcatttgtaaaaggattttactgatgaaaagtgtacaagcttttgacagacctagattcaataatcttatctactgatcacacggaagtactccgtaaatggtagccactgttgaaaaatgcttaagcactgaaaaacaaaggtttaagaaacatttaaattaatttggattctggaacatttaatcaataggtattgattaaattaatgaactacatattcccaaactgaggttactaagagaagatatgtttgaaatcacaactttagttttccagggtgacaacttttgaagggcagatagctctcttgtattacagtgggagatacctcttggtgggatgaacttaatggacatggctaagtgttaacatgaattcatcaaacattacctactagtacttgctattatagttggtgcccagtgggtttataatttagcaagaagaattaagtagtatacaaacagccatattttagcatacaatttataatacgggaaatgctacaggccctggggacctctttttgaaggcaaggctatggaaaattttacaaatggaagttaaatcaagtatatactagaaactctattccatttgttcactaacctgatatcatggattgcacatctcctgtctctcttctttccccatatttttagagaactcactagtaaaatgataaattctccatttttcattccaatagccaccatgtccccttcagggctgtaacacacagtacgagcagcatgtcccaaattcactttgtttaacatcttctgcatttaaaaaaaaaaaaaaaaagagtcataggaaacattaagtgaagtacttctaaattataccagtttcccctcaaaatgctcaacagaattctggcagttctttaagtactagcaatttagaacttccaacttttctttttagaagttgtaacctcttttaaaaaaattatctgtacttactttatcagcaatatcccaaagtctcactgtcccatcttctgcagcagaaaggaaaaaatccctggaaggatgtgttgctagtccccagattggcccatccacatgaccgttaactaaaatattacaagctgcatttttctctccaacttcgattatttcagcattccttgtcccaacaaggatcttgccctgaaacacaagcaggaccaatacagtgaatgtaatacaacagctgcttttcttcttcataatataaaaatgaccctattgacctgctttcagagaactttttgctttgagctaatctagtagcaaggcagtcattagctcatgcaaatttttctatgactacaggcacacatctatctgtaagcacaatgggctagattacatattagagtccatgctacagaatagaacttttctgtggcagtacacctggattcttcaataatcaaagtttttatttgataatcttaggatttccaaactggggtcagtgcagtgggatataggaaaaaataatagaatttattttttagttaaaaagtaaaagcttaactacaatttaatatgcaggctgaagataatatccgtatgatttataaatacacttaataagtacaaacacgctcaaaaattttcataggagttgtagttttgaatttttattttgaaattgacacataattatacatatctatagggcatagggtaatacgcataaccatcacctcagacatttatcatttctttgtgatggaaactttcaaaatcctctcttgtaaatacctgaaaatacataaatacgtgattcttaactatagtcatcctacagtactacagaatactaaaacatactattcctatctggctgtgtaaacttgtatcctttaaccagtccttccctatccccctccccctcccccttgtccgcctccagtaaccactattctactctccacctctgtgggatcaacttttttagtttctgcacaggagtgagaacatgtatttatctttctgtgcctggcttatttcacttcacatcatgtcctccagtctcatccatgttgccaccaagaatgacagaatttcattattttttatggctgagtagtatttcattgtttgtttactgcacgttttatctagggaatgtgtgtttttttaaaaaatggagacagctgtcctaatatgagtcaactgccaagggctttcaattatgtctactagagttgttaaattggcagattctagaaaatattggaggtttacatacagtatttagacagaatagcttcctagcttatgcaccacactggtgctaactttggcaaagaaagcagcaaagacagagtaatgttggcaagcaaatccatcgttatgcattattaagtattgttcattaggctgcaaagggtgagggaatcacagtaataaccactttctgttttctgctgcactgtatcagctcatggaacatcttactttgcctctgcacacagaacgaacacaatctgtggcttgtcctgtctcaagcctgaaggcacggcaccgcctcagttcctgatcccacagtttaaccgctcctccttcttttgacctaagtaaataaccaagccagagtaagtgttcattattggctactataatttttattataaacaaataccaagttataagcagaatcttttttttttaaaaaggccctgatatttataatttacctctaatattcttgtaaactttctatggcaatttgaggatatactatatctcagtcaaaataaacatccagtttcagtgaattttattttgagaaatactctttttttctgacatgagcataattttatttagcctctacaatacattacaatacattatcctctctcataatacttttttttttttttttaagatgtagtctcgctctgtctcccaggcttgagtgcagtggcatgatctaggcttattgcaacctctgcctcccaggttcaagcgattctcctacctcagcctcccgagtagctagcattacaggtgtgcaccaccacacccagctaatttctgtatttttagtagagatggggtttcaccatgttggccaggctggtctcaaataccttgacctcaggtgatctgcctgcctcggcctcccaaagtgctgggattccaggtatgagccactgtgcctggcctcataatacttcttgattaggaagatgtaaaaaaacaattttattaaaaggataatggaaatgtaaggcaaaataatagaattacaaatgctatgctacagagttgatttatttatttttttgagacagagtgtcgctctgtcacctggcctggagtgcagtggtgtgatctcggctcactgcaacctgtgcctcccaggttcaagcgattcttctccttcagcctcccaagtagctgggattacaggcaccatgcctggctaatttttgtatttttagtagagatggagtttcaccatattggccaggctgatcccaaactcctgacctcgtgatccgcccacctcggcctcccaaagtgttgggattacaggcgtgagccactgcaactggcccagagcttatttttgaaggccaaaacagaagcatatttattccctatcaggtgttaaaatatctcactggaacagtttagcaggcttctagtgagtgggggtgtgcaggagtaaatgacgtgggaaatacaagtgttggaggacgaaatagagcccatttatggattttattcctggaagggctgaaaaatgtattccttccttttctgctagatgaattgcttgtctgaaagcatgcctatgtgcattcttcctttatgtaaaaggcacaaattctgcgcttgtgtttaattaacatatgtgggttctttcaatcctgtattgaaatgtacttcttagtcaactatatgtcacatttttttttgtttttgtttttgttttttaaatggggtctcactctgtcacccaggctggagtgcagtggcaccatcacagctcactaaagccttgacctccccaggctcaagtgatcctcccacctcagcctcctgagtagcagggactacaggcatgtgccaccacacccggctaattgttgttttttatagcgatggggtttcaccatgttgcccaggctggtcttgaactcctgggctcaagcgatccacctgcctcagcctcccaaagtgataagattacaggtgtgagccactgtgcctggcctacatgtcatgtttcaacatgcatatgactatgttggtgacaaatcaaatcataagtatctggttactgttgggagatttgaaaatcactcagaagagacctcttctcaaattttgaggtcttgtataaaacagtttaaatttgcctcaagcaaaaggaaacaaggcagttctctctagttccctcatccttttctaaagcaacaatgtgcattctactccttagaatccattctgaacaaaaagagagcaggcagtcaaaatacaaccctggctccagattcccccatgggcctcctactcagcaaatcatacacaggcatacagacattaagaaaagtaactcaacttgtaggacaactacctatccacacctcagaaaaagtatcaccccaacatgaaaaaaattggaagtgaattaagaccagaaatgagaatcaaatagaaggcacataaaaggtaataaaggagaagcatatgaggaggaaggtcggagaggacactctgtgtagcctagaaacaactagaataattaactgcaaacctcaggtaggtcacaaatgcataaatattctgtgaaaagaaagaggactcacggcctttcctttcccccagtcacgataagtccatctcgcagggtggtgtacatggcaaacacaggcccgttgtgagctctcgccacgattctacacaatatgtgatctttccacacacagacatcaccactgatggtacctgtaaacgtcaagttattctgaaaaggagtgggggagggggagacaaactcatcaaaagttcaaatagagtttaaatagataattttctatgtatgtgtaatgctgtctcacccttgatacaaagagcatgcatcgtgtagtggcagcagcactgaattcacgagtcaggaaacctgaacgggaggcttagctttgtcaggaccttttcctttccaagtctgttgcttattagctagaataaccttagacaattcttcccttccaattctaacatactataattctagggtttattttttatttttttgagacggagtttcgctctttgttgcccaggctggagtgcaatggtgcgatctcagctcaccacaacctctgcttcccaggttcaagtgattctcctgtctcagcctcccaagtagctgggattacaagcgccagccaccacgcccggctaatttttgtatttttagtagagacagagtttcaccttgttagccaggctggtcttgaactcctgacttcaggtgatcttcccgccttggcctccctaagtgctgggattataggtgtgagccactgtgcccggcctgagccacggtgcctggcctggtcttatattaagaatacccaaaatgttcaactgaaatttgacatggcacaaacatttcaatagtctttttctcaaaaatgtaagtgtacttaaatattctaaaattataacttttcctataagtattgcataatcacaaaaacaaaaaatgcacttagtttttcgatgcaccaaaggatttatacagcctagccaatgcaggatattaaaggaaagagatgtggattggaagccacaggtccagatgagatggaataaagtgagaggagagcaggtctcctgaacacccttctgtcagggccaggaattgtgctatttccttctgtctcactacctccttcttccctcgaagtagagacactggcccagagcacttccagctgtatgataagcagtgtgttaaatgataaaaagcaaaggaaatcctaaaccctagtaccaccttaaatcatttgaaaatcatgtttcttgatttacctttctctctgacaaatttttaggactatgaagaactactaggaagacagaaattttaggatatttagggtgacaattagaagattaaggaaggcttttgagtataacagtagtccaaggaatcaaatgttcatcagaatccttattatggtggctcatgcctgtaaacccagcactttgggaggtcaagatgggaggatcacatagcttaggagcttgagaccacctaggcaacatagcgaaaccctgtctctactaaaaatgaaagaaaaattagcctagcatggtggttcctgccctgtagtcccagctactaaggaggctgaggatcacttgaacctgggagatggaggctacagtgagctataatcgcaccattgcaccccagcccaggcgacagagtgagatactgtgtcaaaaaaaaaaaaaaatccttttccccctctcattaacattcttttcactccctaatttctgaaagaactagatttttgaaagatgaaatatatgcttgaccagggcatgtaatgattagcagatcacagtatcatctcaacaacattcatgtggctgatgatctaaggcaagagaatgtaaagtagtcaaagtcacactatgtgcattttaagagacatactgcaccaaatgcaatagcgagcatggtctgcatccgggcatcttccagtgtgctcagtagcccttttttgctaagaagagctcttcctgccagggtccagaacttcacatgttttactcccactgagacaaactgggtatctgaatctggtcggaattctgccacaaaaatacgttgattgtgaccagctctgctggcaattttggcacctgacaagatacaacaaaattatctaggttattacaagaaccaagctaatcaacagcatcaaacaaatatgtaaaatacatagttcaaaaaacaaaggcttagaagagaggccaatggcccctgctctactacctagcaatacatgatttacaattatttgtgtattgagtccttttcacttatcttcgctccattaacttttctttatataacgtaaatgttttgtctaaagtgtggtaggtaatattatcctgctgatctgccattatcattagaaatatacataattttcataagaatctccaaaaccaatcaaatcattaataataaatacatagtttcttgctggaagaaaatagcagtgaatcatttataatgctaataatggtttcattaatttatctgttttgtgaggttacagttccactgggcttttaaagtgaaatatacctacagtaccactgtgtacagtatattgcataggcctccactgaatgattgtttcaaccaccaactttaagacaaatattaaatacagaattcctacta

SEQ ID NO: 201292 - DNA, 2560 bp, Homo sapiens
  Payload ID: 19730
  Gene Name: zinc finger CCCH-type containing 14
  Uniprot ID: Q6PJT7
  ENST ID: ENST00000302216
  CDS Start-End: 165-1904
actccggcgcgcagtgccggccggggcggggatacgccgtgtgcgcggccgggggcggaacggaggaggaggcggtggtgtcccggctgcggggtaggagtccgcggcagcctccgggtaagccaagcgccgcgcagtgctgagttcccgcacgccgcagagccatggagatcggcaccgagatcagccgcaagatccggagtgccattaaggggaaattacaagaattaggagcttatgttgatgaagaacttcctgattacattatggtgatggtggccaacaagaaaagtcaggaccaaatgacagaggatctgtccctgtttctagggaacaacacaattcgattcaccgtatggcttcatggtgtattagataaacttcgctctgttacaactgaaccctctagtctgaagtcttctgataccaacatctttgatagtaacgtgccttcaaacaagagcaatttcagtcggggagatgagaggaggcatgaagctgcagtgccaccacttgccattcctagcgcgagacctgaaaaaagagattccagagtttctacaagttcgcaggagtcaaaaaccacaaatgtcagacagacttacgatgatggagctgcaacccgactaatgtcaacagtgaaacctttgagggagccagcaccctctgaagatgtgattgatattaagccagaaccagatgatctcattgacgaagacctcaactttgtgcaggagaatcccttatctcagaaaaaacctacagtgacacttacatatggttcttctcgcccttctattgaaatttatcgaccacctgcaagtagaaatgcagatagtggtgttcatttaaacaggttgcaatttcaacagcagcagaatagtattcatgctgccaagcagcttgatatgcagagtagttgggtatatgaaacaggacgtttgtgtgaaccagaggtgcttaacagcttagaagaaacgtatagtccgttctttagaaacaactcggagaaaatgagtatggaggatgaaaactttcggaagagaaagttgcctgtggtaagttcagttgttaaagtaaaaaaattcaatcatgatggagaagaggaggaagaagatgatgattacgggtctcgaacaggaagcatctccagcagtgtgtctgtgcctgcaaagcctgaaaggagaccttctcttccaccttctaaacaagctaacaagaatctgattttgaaggctatatctgaagctcaagaatccgtaacaaaaacaactaactactctacagttccacagaaacagacacttccagttgctcccagaactcgaacttctcaagaagaattgctagcagaagtggtccagggacaaagtaggacccccagaataagtccccccattaaagaagaggaaacaaaaggagattctgtagaaaaaaatcaagctgagatgagtgaactgagtgtggcacagaaaccagaaaaacttttggagcgctgcaagtactggcctgcttgtaaaaatggggatgagtgtgcctaccatcaccccatctcaccctgcaaagccttccccaattgtaaatttgctgaaaaatgtttgtttgttcacccaaattgtaaatatgatgcaaagtgtactaaaccagattgtcccttcactcatgtgagtagaagaattccagtactgtctccaaaaccagttgcaccaccagcaccaccttccagtagtcagctctgccgttacttccctgcttgtaagaagatggaatgtcccttctatcatccaaaacattgtaggtttaacactcaatgtacaagaccggactgcacattctaccatcccaccattaatgtcccaccacgacatgccttgaaatggattcgacctcaaaccagcgaatagcacccagtcctgcctggcagaagatcatgcagtttggaagttttcatgtactgatgaaagatactctacagaacttgtcaaatctttgaaacttggaatatattgctttcataatatgaagttttattgcctatctatctgaagtgtctaatttttcaagtttgtaagtttattatgtggttttaacattgggtgtttttgttttgtttttactatgaaaagacagcttaaggaagagctaaattctgttaaaatatttggggcatgtttgtgcactgctgttgtgaggatcagcatatgaaattgacatcatggttagtcatggtactgcagcttagggggctacacggttgctgtgtgagtggagagatgcagtgaggcagttgtcattattctaaaaattgtactactttcacttttcccaaagattatataatgttcataatccaccatgaaaacagcattggccaaaggtactgaggctgcttaaaatattcaattctgctttttaatttttaagtgaatttagtttgaaaagcatgattatacaggcctctcaggctgagtgctactttggtaaagttcccagttttcctgccttctgtgacaggatgaatgaggtgggtatggacagtggaggcagctggaatggcaag

SEQ ID NO: 201293 - DNA, 1384 bp, Homo sapiens
  Payload ID: 19730
  Gene Name: zinc finger CCCH-type containing 14
  Uniprot ID: Q6PJT7
  ENST ID: ENST00000318308
  CDS Start-End: 329-1249
gggtttactggaagaggagctatacagatggtacttagaggatgtagggccctacgtattagggcttcttagttgtagcgaagagcaattggtctggtacgtttagctttttcacatttagttttgaattctgactctagaaatgtacaaccccatcttttgaattacaggttttaagatgttatttgctcttaatacgtcttaaggtaacagccttgatcactgcttttactttcgatgaaataacttaatgagctgtgaagaaaaaattatcagattttaagggagagaattttatgaaaatgtctttgaggttcctgtcacctttatgagaatgtcttcaaagtttccatcaccacctctaccaatttttcttccaccggagccagtggacttaggttccataacaagctcctcttgttcactgaatgagctagacaatatttcccaccttttaaggaaaatatcagctgatatcaatgaaattaaaggaatgaaagcagctattttgacagtggaagcaaatctttttgatctaaatgttagagtgtccaagaatgaagcaaaaatttcatctttggaggttaaaatgaatgaatattcaacaacatatgaatgcaacagacagtttgaagatcaagaagaagatactgaatcacagtcaagaactactgatgtaaaaataatcggcttccttagaaacgttgagaaaggaactcaacagaggcaattattatcccgactgcaaatcgacccagtaatggcagaaactctgcagatgagtcaagctgagatgagtgaactgagtgtggcacagaaaccagaaaaacttttggagcgctgcaagtactggcctgcttgtaaaaatggggatgagtgtgcctaccatcaccccatctcaccctgcaaagccttccccaattgtaaatttgctgaaaaatgtttgtttgttcacccaaattgtaaatatgatgcaaagtgtactaaaccagattgtcccttcactcatgtgagtagaagaattccagtactgtctccaaaaccagttgcaccaccagcaccaccttccagtagtcagctctgccgttacttccctgcttgtaagaagatggaatgtcccttctatcatccaaaacattgtaggtttaacactcaatgtacaagaccggactgcacattctaccatcccaccattaatgtcccaccacgacatgccttgaaatggattcgacctcaaaccagcgaatagcacccagtcctgcctggcagaagatcatgcagtttggaagttttcatgtactgatgaaagatactctacagaacttgtcaaatctttgaaacttggaatatattgctttcataatatgaagttttattgcctatc

SEQ ID NO: 201294 - DNA, 2007 bp, Homo sapiens
  Payload ID: 19730
  Gene Name: zinc finger CCCH-type containing 14
  Uniprot ID: Q6PJT7
  ENST ID: ENST00000336693
  CDS Start-End: 176-1891
cggagcgtggctgcggctgaagtagccgccgggaaatggaaggacaggcgcaggcccggctggagccaccaccgcggcgcacggcgccgctttggatccgctgcgggagagtgccattaaggggaaattacaagaattaggagcttatgttgatgaagaacttcctgattacattatggtgatggtggccaacaagaaaagtcaggaccaaatgacagaggatctgtccctgtttctagggaacaacacaattcgattcaccgtatggcttcatggtgtattagataaacttcgctctgttacaactgaaccctctagtctgaagtcttctgataccaacatctttgatagtaacgtgccttcaaacaagagcaatttcagtcggggagatgagaggaggcatgaagctgcagtgccaccacttgccattcctagcgcgagacctgaaaaaagagattccagagtttctacaagttcgcaggagtcaaaaaccacaaatgtcagacagacttacgatgatggagctgcaacccgactaatgtcaacagtgaaacctttgagggagccagcaccctctgaagatgtgattgatattaagccagaaccagatgatctcattgacgaagacctcaactttgtgcaggagaatcccttatctcagaaaaaacctacagtgacacttacatatggttcttctcgcccttctattgaaatttatcgaccacctgcaagtagaaatgcagatagtggtgttcatttaaacaggttgcaatttcaacagcagcagaatagtattcatgctgccaagcagcttgatatgcagagtagttgggtatatgaaacaggacgtttgtgtgaaccagaggtgcttaacagcttagaagaaacgtatagtccgttctttagaaacaactcggagaaaatgagtatggaggatgaaaactttcggaagagaaagttgcctgtggtaagttcagttgttaaagtaaaaaaattcaatcatgatggagaagaggaggaagaagatgatgattacgggtctcgaacaggaagcatctccagcagtgtgtctgtgcctgcaaagcctgaaaggagaccttctcttccaccttctaaacaagctaacaagaatctgattttgaaggctatatctgaagctcaagaatccgtaacaaaaacaactaactactctacagttccacagaaacagacacttccagttgctcccagaactcgaacttctcaagaagaattgctagcagaagtggtccagggacaaagtaggacccccagaataagtccccccattaaagaagaggaaacaaaaggagattctgtagaaaaaaatcaaggaactcaacagaggcaattattatcccgactgcaaatcgacccagtaatggcagaaactctgcagatgagtcaagctgagatgagtgaactgagtgtggcacagaaaccagaaaaacttttggagcgctgcaagtactggcctgcttgtaaaaatggggatgagtgtgcctaccatcaccccatctcaccctgcaaagccttccccaattgtaaatttgctgaaaaatgtttgtttgttcacccaaattgtaaatatgatgcaaagtgtactaaaccagattgtcccttcactcatgtgagtagaagaattccagtactgtctccaaaaccagcagttgcaccaccagcaccaccttccagtagtcagctctgccgttacttccctgcttgtaagaagatggaatgtcccttctatcatccaaaacattgtaggtttaacactcaatgtacaagaccggactgcacattctaccatcccaccattaatgtcccaccacgacatgccttgaaatggattcgacctcaaaccagcgaatagcacccagtcctgcctggcagaagatcatgcagtttggaagttttcatgtactgatgaaagatactctacagaacttgtcaaatctttgaaacttggaatatattgctttcataata

SEQ ID NO: 201295 - DNA, 2195 bp, Homo sapiens
  Payload ID: 19730
  Gene Name: zinc finger CCCH-type containing 14
  Uniprot ID: Q6PJT7
  ENST ID: ENST00000393514
  CDS Start-End: 1-2136
atggagatcggcaccgagatcagccgcaagatccggagtgccattaaggggaaattacaagaattaggagcttatgttgatgaagaacttcctgattacattatggtgatggtggccaacaagaaaagtcaggaccaaatgacagaggatctgtccctgtttctagggaacaacacaattcgattcaccgtatggcttcatggtgtattagataaacttcgctctgttacaactgaaccctctagtctgaagtcttctgataccaacatctttgatagtaacgtgccttcaaacaagagcaatttcagtcggggagatgagaggaggcatgaagctgcagtgccaccacttgccattcctagcgcgagacctgaaaaaagagattccagagtttctacaagttcgcaggagtcaaaaaccacaaatgtcagacagacttacgatgatggagctgcaacccgactaatgtcaacagtgaaacctttgagggagccagcaccctctgaagatgtgattgatattaagccagaaccagatgatctcattgacgaagacctcaactttgtgcaggagaatcccttatctcagaaaaaacctacagtgacacttacatatggttcttctcgcccttctattgaaatttatcgaccacctgcaagtagaaatgcagatagtggtgttcatttaaacaggttgcaatttcaacagcagcagaatagtattcatgctgccaagcagcttgatatgcagagtagttgggtatatgaaacaggacgtttgtgtgaaccagaggtgcttaacagcttagaagaaacgtatagtccgttctttagaaacaactcggagaaaatgagtatggaggatgaaaactttcggaagagaaagttgcctgtggtaagttcagttgttaaagtaaaaaaattcaatcatgatggagaagaggaggaagaagatgatgattacgggtctcgaacaggaagcatctccagcagtgtgtctgtgcctgcaaagcctgaaaggagaccttctcttccaccttctaaacaagctaacaagaatctgattttgaaggctatatctgaagctcaagaatccgtaacaaaaacaactaactactctacagttccacagaaacagacacttccagttgctcccagaactcgaacttctcaagaagaattgctagcagaagtggtccagggacaaagtaggacccccagaataagtccccccattaaagaagaggaaacaaaaggagattctgtagaaaaaaatcaagattactatgacatggaatccatggtccatgcagacacaagatcatttattctgaagaagccaaagctgtctgaggaagtagtagtggcaccaaaccaagagtcggggatgaagactgcagattcccttcgggtactttcaggacaccttatgcagacacgagatcttgtacaaccagataaacctgcaagtcccaagtttatagtgacgctggatggtgtccccagccccccaggatacatgtcagatcaagaggaggacatgtgctttgaaggaatgaaacccgtaaaccaaactgcagcctcaaacaagggactcagaggtctcctccacccacagcagttgcacttgctgagcaggcagcttgaggacccaaatggtagcttttctaacgctgagatgagtgaactgagtgtggcacagaaaccagaaaaacttttggagcgctgcaagtactggcctgcttgtaaaaatggggatgagtgtgcctaccatcaccccatctcaccctgcaaagccttccccaattgtaaatttgctgaaaaatgtttgtttgttcacccaaattgtaaatatgatgcaaagtgtactaaaccagattgtcccttcactcatgtgagtagaagaattccagtactgtctccaaaaccagcagttgcaccaccagcaccaccttccagtagtcagctctgccgttacttccctgcttgtaagaagatggaatgtcccttctatcatccaaaacattgtaggtttaacactcaatgtacaagaccggactgcacattctaccatcccaccattaatgtcccaccacgacatgccttgaaatggattcgacctcaaaccagcgaatagcacccagtcctgcctggcagaagatcatgcagtttggaagttttcatgtactgatgaaa

SEQ ID NO: 201296 - DNA, 1341 bp, Homo sapiens
  Payload ID: 19730
  Gene Name: zinc finger CCCH-type containing 14
  Uniprot ID: Q6PJT7
  ENST ID: ENST00000406216
  CDS Start-End: 293-1141
agaggatgtagggccctacgtattagggcttcttagttgtagcgaagagcaattggtctggtacgtttagctttttcacatttagttttgaattctgactctagaaatgtacaaccccatcttttgaattacaggttttaagatgttatttgctcttaatacgtcttaaggtaacagccttgatcactgcttttactttcgatgaaataacttaatgagctgtgaagaaaaaattatcagattttaagggagagaattttatgaaaatgtctttgaggttcctgtcacctttatgagaatgtcttcaaagtttccatcaccacctctaccaatttttcttccaccggagccagtggacttaggttccataacaagctcctcttgttcactgaatgagctagacaatatttcccaccttttaaggaaaatatcagctgatatcaatgaaattaaaggaatgaaagcagctattttgacagtggaagcaaatctttttgatctaaatgttagagtgtccaagaatgaagcaaaaatttcatctttggaggttaaaatgaatgaatattcaacaacatatgaatgcaacagacagtttgaagatcaagaagaagatactgaatcacagtcaagaactactgatgtaaaaataatcggcttccttagaaacgttgagaaagctgagatgagtgaactgagtgtggcacagaaaccagaaaaacttttggagcgctgcaagtactggcctgcttgtaaaaatggggatgagtgtgcctaccatcaccccatctcaccctgcaaagccttccccaattgtaaatttgctgaaaaatgtttgtttgttcacccaaattgtaaatatgatgcaaagtgtactaaaccagattgtcccttcactcatgtgagtagaagaattccagtactgtctccaaaaccagcagttgcaccaccagcaccaccttccagtagtcagctctgccgttacttccctgcttgtaagaagatggaatgtcccttctatcatccaaaacattgtaggtttaacactcaatgtacaagaccggactgcacattctaccatcccaccattaatgtcccaccacgacatgccttgaaatggattcgacctcaaaccagcgaatagcacccagtcctgcctggcagaagatcatgcagtttggaagttttcatgtactgatgaaagatactctacagaacttgtcaaatctttgaaacttggaatatattgctttcataatatgaagttttattgcctatctatctgaagtgtctaatttttcaagtttgtaagtttattatgtggttttaacattgggtgttttt

SEQ ID NO: 201297 - DNA, 580 bp, Homo sapiens
  Payload ID: 19730
  Gene Name: zinc finger CCCH-type containing 14
  ENST ID: ENST00000555120
  CDS Start-End: 298-580
ttttcctagagccgcctttctcacatgcacgtttgctctttttctctcagagtgccattaaggggaaattacaagaattaggagcttatgttgtatttgaaatacctgtggaatgaagagaaaaaaattaaagctaagccatcttgtccaatgtaattccagtagagctctgcgactctaaagcttagagctacatctatattttcaagcacatcaactttaagaagaaagttttgaggaaacaaagttttgatctacctttccttttaaatagatgaagaacttcctgattacattatggtgatggtggccaacaagaaaagtcaggaccaaatgacagaggatctgtccctgtttctagggaacaacacaattcgattcaccgtatggcttcatggtgtattagataaacttcgctctgttacaactgaaccctctagtctgaagtcttctgataccaacatctttgatagtaacgtgccttcaaacaagagcaatttcagtcggggagatgagaggaggcatgaagctgcagtgccaccacttgccattcctagcgcgagacctgaaaaaagagatt

SEQ ID NO: 201298 - DNA, 2075 bp, Homo sapiens
  Payload ID: 19730
  Gene Name: zinc finger CCCH-type containing 14
  ENST ID: ENST00000556945
  CDS Start-End: 125-1942
gtgcgcggccgggggcggaacggaggaggaggcggtggtgtcccggctgcggggtaggagtccgcggcagcctccgggtaagccaagcgccgcgcagtgctgagttcccgcacgccgcagagccatggagatcggcaccgagatcagccgcaagatccggagtgccattaaggggaaattacaagaattaggagcttatgttgatgaagaacttcctgattacattatggtgatggtggccaacaagaaaagtcaggaccaaatgacagaggatctgtccctgtttctagggaacaacacaattcgattcaccgtatggcttcatggtgtattagataaacttcgctctgttacaactgaaccctctagtctgaagtcttctgataccaacatctttgatagtaacgtgccttcaaacaagagcaatttcagtcggggagatgagaggaggcatgaagctgcagtgccaccacttgccattcctagcgcgagacctgaaaaaagagattccagagtttctacaagttcgcaggagtcaaaaaccacaaatgtcagacagacttacgatgatggagctgcaacccgactaatgtcaacagtgaaacctttgagggagccagcaccctctgaagatgtgattgatattaagccagaaccagatgatctcattgacgaagacctcaactttgtgcaggagaatcccttatctcagaaaaaacctacagtgacacttacatatggttcttctcgcccttctattgaaatttatcgaccacctgcaagtagaaatgcagatagtggtgttcatttaaacaggttgcaatttcaacagcagcagaatagtattcatgctgccaagcagcttgatatgcagagtagttgggtatatgaaacaggacgtttgtgtgaaccagaggtgcttaacagcttagaagaaacgtatagtccgttctttagaaacaactcggagaaaatgagtatggaggatgaaaactttcggaagagaaagttgcctgtggtaagttcagttgttaaagtaaaaaaattcaatcatgatggagaagaggaggaagaagatgatgattacgggtctcgaacaggaagcatctccagcagtgtgtctgtgcctgcaaagcctgaaaggagaccttctcttccaccttctaaacaagctaacaagaatctgattttgaaggctatatctgaagctcaagaatccgtaacaaaaacaactaactactctacagttccacagaaacagacacttccagttgctcccagaactcgaacttctcaagaagaattgctagcagaagtggtccagggacaaagtaggacccccagaataagtccccccattaaagaagaggaaacaaaaggagattctgtagaaaaaaatcaaggaactcaacagaggcaattattatcccgactgcaaatcgacccagtaatggcagaaactctgcagatgagtcaagctgagatgagtgaactgagtgtggcacagaaaccagaaaaacttttggagcgctgcaagtactggcctgcttgtaaaaatggggatgagtgtgcctaccatcaccccatctcaccctgcaaagccttccccaattgtaaatttgctgaaaaatgtttgtttgttcacccaaattgtaaatatgatgcaaagtgtactaaaccagattgtcccttcactcatgtgagtagaagaattccagtactgtctccaaaaccagcagttgcaccaccagcaccaccttccagtagtcagctctgccgttacttccctgcttgtaagaagatggaatgtcccttctatcatccaaaacattgtaggtttaacactcaatgtacaagaccggactgcacattctaccatcccaccattaatgtcccaccacgacatgccttgaaatggattcgacctcaaaccagcgaatagcacccagtcctgcctggcagaagatcatgcagtttggaagttttcatgtactgatgaaagatactctacagaacttgtcaaatctttgaaacttggaatatattgctttcataatatgaagttttattgccta

SEQ ID NO: 201299 - DNA, 577 bp, Homo sapiens
  Payload ID: 19730
  Gene Name: zinc finger CCCH-type containing 14
  ENST ID: ENST00000555792
  CDS Start-End: 1-456
cttttggagcgctgcaagtactggcctgcttgtaaaaatggggatgagtgtgcctaccatcaccccatctcaccctgcaaagccttccccaattgtaaatttgctgaaaaatgtttgtttgttcacccaaattgtaaatatgatgcaaagtgtactaaaccagattgtcccttcactcatgtgagtagaagaattccagtactgtctccaaaaccagattggagatcagtcctggtttttattttgttagcagttgcaccaccagcaccaccttccagtagtcagctctgccgttacttccctgcttgtaagaagatggaatgtcccttctatcatccaaaacattgtaggtttaacactcaatgtacaagaccggactgcacattctaccatcccaccattaatgtcccaccacgacatgccttgaaatggattcgacctcaaaccagcgaatagcacccagtcctgcctggcagaagatcatgcagtttggaagttttcatgtactgatgaaagatactctacagaacttgtcaaatctttgaaacttggaatatattgctttcataatatgaag

SEQ ID NO: 201300 - DNA, 577 bp, Homo sapiens
  Payload ID: 19730
  Gene Name: zinc finger CCCH-type containing 14
  ENST ID: ENST00000553495
  CDS Start-End: 127-321
gtgtgcgcggccgggggcggaacggaggaggaggcggtggtgtcccggctgcggggtaggagtccgcggcagcctccgggtaagccaagcgccgcgcagtgctgagttcccgcacgccgcagagccatggagatcggcaccgagatcagccgcaagatccggagtgccattaaggggaaattacaagaattaggagcttatgttgatgaagaacttcctgattacattatggtgatggtggccaacaagaaaagtcaggaccaaatgacagaggatctgtccctgtttctagggaacaacacaattcgattcaccgtatgaaccctctagtctgaagtcttctgataccaacatctttgatagtaacgtgccttcaaacaagagcaatttcagtcggggagatgagaggaggcatgaagctgcagtgccaccacttgccattcctagcgcgagacctgaaaaaagagattccagagtttctacaagttcgcaggagtcaaaaaccacaaatgtcagacagacttacgatgatggagctgcaacccgactaatgtcaacagtgaaacctttgagggag

SEQ ID NO: 201301 - DNA, 400 bp, Homo sapiens
  Payload ID: 19730
  Gene Name: zinc finger CCCH-type containing 14
  ENST ID: ENST00000556110
  CDS Start-End: 1-246
gattacgggtctcgaacaggaagcatctccagcagtgtgtctgtgcctgcaaagcctgaaaggagaccttctcttccaccttctaaacaagctaacaagaatctgattttgaaggctatatctgaagctcaagaatccgtaacaaaaacaactaactactctacagaaacagacacttccagttgctcccagaactcgaacttctcaagaagaattgctagcagaagtggtccagggacaaagtaggacccccagaataagtccccccattaaagaagaggaaacaaaaggagattctgtagaaaaaaatcaagattactatgacatggaatccatggtccatgcagacacaagatcatttattctgaagaagccaaagctgtctgaggaagtagtagtg

SEQ ID NO: 201302 - DNA, 2092 bp, Homo sapiens
  Payload ID: 19730
  Gene Name: zinc finger CCCH-type containing 14
  ENST ID: ENST00000556000
  CDS Start-End: 1-1955
cttctgataccaacatctttgatagtaacgtgccttcaaacaagagcaatttcagtcggggagatgagaggaggcatgaagctgcagtgccaccacttgccattcctagcgcgagacctgaaaaaagagattccagagtttctacaagttcgcaggagtcaaaaaccacaaatgtcagacagacttacgatgatggagctgcaacccgactaatgtcaacagtgaaacctttgagggagccagcaccctctgaagatgtgattgatattaagccagaaccagatgatctcattgacgaagacctcaactttgtgcaggagaatcccttatctcagaaaaaacctacagtgacacttacatatggttcttctcgcccttctattgaaatttatcgaccacctgcaagtagaaatgcagatagtggtgttcatttaaacaggttgcaatttcaacagcagcagaatagtattcatgctgccaagcagcttgatatgcagagtagttgggtatatgaaacaggacgtttgtgtgaaccagaggtgcttaacagcttagaagaaacgtatagtccgttctttagaaacaactcggagaaaatgagtatggaggatgaaaactttcggaagagaaagttgcctgtggtaagttcagttgttaaagtaaaaaaattcaatcatgatggagaagaggaggaagaagatgatgattacgggtctcgaacaggaagcatctccagcagtgtgtctgtgcctgcaaagcctgaaaggagaccttctcttccaccttctaaacaagctaacaagaatctgattttgaaggctatatctgaagctcaagaatccgtaacaaaaacaactaactactctacagttccacagaaacagacacttccagttgctcccagaactcgaacttctcaagaagaattgctagcagaagtggtccagggacaaagtaggacccccagaataagtccccccattaaagaagaggaaacaaaaggagattctgtagaaaaaaatcaaggaactcaacagaggcaattattatcccgactgcaaatcgacccagtaatggcagaaactctgcagatgagtcaagattactatgacatggaatccatggtccatgcagacacaagatcatttattctgaagaagccaaagctgtctgaggaagtagtagtggcaccaaaccaagagtcggggatgaagactgcagattcccttcgggtactttcaggacaccttatgcagacacgagatcttgtacaaccagataaacctgcaagtcccaagtttatagtgacgctggatggtgtccccagccccccaggatacatgtcagatcaagaggaggacatgtgctttgaaggaatgaaacccgtaaaccaaactgcagcctcaaacaagggactcagaggtctcctccacccacagcagttgcacttgctgagcaggcagcttgaggacccaaatggtagcttttctaacgctgagatgagtgaactgagtgtggcacagaaaccagaaaaacttttggagcgctgcaagtactggcctgcttgtaaaaatggggatgagtgtgcctaccatcaccccatctcaccctgcaaagccttccccaattgtaaatttgctgaaaaatgtttgtttgttcacccaaattgtaaatatgatgcaaagtgtactaaaccagattgtcccttcactcatgtgagtagaagaattccagtactgtctccaaaaccagttgcaccaccagcaccaccttccagtagtcagctctgccgttacttccctgcttgtaagaagatggaatgtcccttctatcatccaaaacattgtaggtttaacactcaatgtacaagaccggactgcacattctaccatcccaccattaatgtcccaccacgacatgccttgaaatggattcgacctcaaaccagcgaatagcacccagtcctgcctggcagaagatcatgcagtttggaagttttcatgtactgatgaaagatactctacagaacttgtcaaatctttgaaacttggaatatattgctttcataatatgaagttttattgcctatcta

SEQ ID NO: 201303 - DNA, 849 bp, Homo sapiens
  Payload ID: 19730
  Gene Name: zinc finger CCCH-type containing 14
  ENST ID: ENST00000556158
  CDS Start-End: 221-849
gcgcggccgggggcggaacggaggaggaggcggtggtgtcccggctgcggggtaggagtccgcggcagcctccgggtaagccaagcgccgcgcagtgctgagttcccgcacgccgcagagccatggagatcggcaccgagatcagccgcaagatccggagtgccattaaggggaaattacaagaattaggagcttatgttgtatttgaaatacctgtggaatgaagagaaaaaaattaaagctaagccatcttgtccaatatgaagaacttcctgattacattatggtgatggtggccaacaagaaaagtcaggaccaaatgacagaggatctgtccctgtttctagggaacaacacaattcgattcaccgtatggcttcatggtgtattagataaacttcgctctgttacaactgaaccctctagtctgaagtcttctgataccaacatctttgatagtaacgtgccttcaaacaagagcaatttcagtcggggagatgagaggaggcatgaagctgcagtgccaccacttgccattcctagcgcgagacctgaaaaaagagattccagagtttctacaagttcgcaggagtcaaaaaccacaaatgtcagacagacttacgatgatggagctgcaacccgactaatgtcaacagtgaaacctttgagggagccagcaccctctgaagatgtgattgatattaagccagaaccagatgatctcattgacgaagacctcaactttgtgcaggagaatcccttatctcagaaaaaacctacagtgacacttacatatggttcttctcgcccttctattgaaatttatcgaccacctgcaagtagaaatgc

SEQ ID NO: 201304 - DNA, 813 bp, Homo sapiens
  Payload ID: 19730
  Gene Name: zinc finger CCCH-type containing 14
  ENST ID: ENST00000555799
  CDS Start-End: 168-813
ggaacggaggaggaggcggtggtgtcccggctgcggggtaggagtccgcggcagcctccgggtaagccaagcgccgcgcagtgctgagttcccgcacgccgcagagccatggagatcggcaccgagatcagccgcaagatccggatgaagaacttcctgattacattatggtgatggtggccaacaagaaaagtcaggaccaaatgacagaggatctgtccctgtttctagggaacaacacaattcgattcaccgtatggcttcatggtgtattagataaacttcgctctgttacaactgaaccctctagtctgaagtcttctgataccaacatctttgatagtaacgtgccttcaaacaagagcaatttcagtcggggagatgagaggaggcatgaagctgcagtgccaccacttgccattcctagcgcgagacctgaaaaaagagattccagagtttctacaagttcgcaggagtcaaaaaccacaaatgtcagacagacttacgatgatggagctgcaacccgactaatgtcaacagtgaaacctttgagggagccagcaccctctgaagatgtgattgatattaagccagaaccagatgatctcattgacgaagacctcaactttgtgcaggagaatcccttatctcagaaaaaacctacagtgacacttacatatggttcttctcgcccttctattgaaatttatcgaccacctgcaagtagaaatgcagatagtggtgttcatttaaacaggttgcaatttcaacagcagcagaatagtattcatgctgccaagcagcttgatatgc

SEQ ID NO: 201305 - DNA, 1762 bp, Homo sapiens
  Payload ID: 19730
  Gene Name: zinc finger CCCH-type containing 14
  ENST ID: ENST00000555900
  CDS Start-End: 313-1629
gagctatacagatggtacttagaggatgtagggccctacgtattagggcttcttagttgtagcgaagagcaattggtctggtacgtttagctttttcacatttagttttgaattctgactctagaaatgtacaaccccatcttttgaattacaggttttaagatgttatttgctcttaatacgtcttaaggtaacagccttgatcactgcttttactttcgatgaaataacttaatgagctgtgaagaaaaaattatcagattttaagggagagaattttatgaaaatgtctttgaggttcctgtcacctttatgagaatgtcttcaaagtttccatcaccacctctaccaatttttcttccaccggagccagtggacttaggttccataacaagctcctcttgttcactgaatgagctagacaatatttcccaccttttaaggaaaatatcagctgatatcaatgaaattaaaggaatgaaagcagctattttgacagtggaagcaaatctttttgatctaaatgttagagtgtccaagaatgaagcaaaaatttcatctttggaggttaaaatgaatgaatattcaacaacatatgaatgcaacagacagtttgaagatcaagaagaagatactgaatcacagtcaagaactactgatgtaaaaataatcggcttccttagaaacgttgagaaaggaactcaacagaggcaattattatcccgactgcaaatcgacccagtaatggcagaaactctgcagatgagtcaagattactatgacatggaatccatggtccatgcagacacaagatcatttattctgaagaagccaaagctgtctgaggaagtagtagtggcaccaaaccaagagtcggggatgaagactgcagattcccttcgggtactttcaggacaccttatgcagacacgagatcttgtacaaccagataaacctgcaagtcccaagtttatagtgacgctggatggtgtccccagccccccaggatacatgtcagatcaagaggaggacatgtgctttgaaggaatgaaacccgtaaaccaaactgcagcctcaaacaagggactcagaggtctcctccacccacagcagttgcacttgctgagcaggcagcttgaggacccaaatggtagcttttctaacgctgagatgagtgaactgagtgtggcacagaaaccagaaaaacttttggagcgctgcaagtactggcctgcttgtaaaaatggggatgagtgtgcctaccatcaccccatctcaccctgcaaagccttccccaattgtaaatttgctgaaaaatgtttgtttgttcacccaaattgtaaatatgatgcaaagtgtactaaaccagattgtcccttcactcatgtgagtagaagaattccagtactgtctccaaaaccagcagttgcaccaccagcaccaccttccagtagtcagctctgccgttacttccctgcttgtaagaagatggaatgtcccttctatcatccaaaacattgtaggtttaacactcaatgtacaagaccggactgcacattctaccatcccaccattaatgtcccaccacgacatgccttgaaatggattcgacctcaaaccagcgaatagcacccagtcctgcctggcagaagatcatgcagtttggaagttttcatgtactgatgaaagatactctacagaacttgtcaaatctttgaaacttggaatatattgctttcataatatgaagttttattgccta

SEQ ID NO: 201306 - DNA, 652 bp, Homo sapiens
  Payload ID: 19730
  Gene Name: zinc finger CCCH-type containing 14
  ENST ID: ENST00000554602
  CDS Start-End: 436-652
agtgccggccggggcggggatacgccgtgtgcgcggccgggggcggaacggaggaggaggcggtggtgtcccggctgcggggtaggagtccgcggcagcctccgggtaagccaagcgccgcgcagtgctgagttcccgcacgccgcagagccatggagatcggcaccgagatcagccgcaagatccggagtgccattaaggggaaattacaagaattaggagcttatgttgtatttgaaatacctgtggaatgaagagaaaaaaattaaagctaagccatcttgtccaatgtaattccagtagagctctgcgactctaaagcttagagctacatctatattttcaagcacatcaactttaagaagaaagttttgaggaaacaaagttttgatctacctttccttttaaatagatgaagaacttcctgattacattatggtgatggtggccaacaagaaaagtcaggaccaaatgacagaggatctgtccctgtttctagggaacaacacaattcgattcaccgtatggcttcatggtgtattagataaacttcgctctgttacaactgaaccctctagtctgaagtcttctgataccaacatctttgatagtaacgtgccttcaaacaagagcaatttcagtcggggagatg

SEQ ID NO: 201307 - DNA, 908 bp, Homo sapiens
  Payload ID: 19730
  Gene Name: zinc finger CCCH-type containing 14
  ENST ID: ENST00000557737
  CDS Start-End: 291-908
aggatgtagggccctacgtattagggcttcttagttgtagcgaagagcaattggtctggtacgtttagctttttcacatttagttttgaattctgactctagaaatgtacaaccccatcttttgaattacaggttttaagatgttatttgctcttaatacgtcttaaggtaacagccttgatcactgcttttactttcgatgaaataacttaatgagctgtgaagaaaaaattatcagattttaagggagagaattttatgaaaatgtctttgaggttcctgtcacctttatgagaatgtcttcaaagtttccatcaccacctctaccaatttttcttccaccggagccagtggacttaggttccataacaagctcctcttgttcactgaatgagctagacaatatttcccaccttttaaggaaaatatcagctgatatcaatgaaattaaaggaatgaaagcagctattttgacagtggaagcaaatctttttgatctaaatgttagagtgtccaagaatgaagcaaaaatttcatctttggaggttaaaatgaatgaatattcaacaacatatgaatgcaacagacagtttgaagatcaagaagaagatactgaatcacagtcaagaactactgatgtaaaaataatcggcttccttagaaacgttgagaaagattactatgacatggaatccatggtccatgcagacacaagatcatttattctgaagaagccaaagctgtctgaggaagtagtagtggcaccaaaccaagagtcggggatgaagactgcagattcccttcgggtactttcaggacaccttatgcagacacgagatcttgtacaaccagataaacctgcaagtcccaagtttatagtgacgctggatggtgtccccagcccccca

SEQ ID NO: 201308 - DNA, 593 bp, Homo sapiens
  Payload ID: 19730
  Gene Name: zinc finger CCCH-type containing 14
  ENST ID: ENST00000557693
  CDS Start-End: 196-593
ctcctcccagcccccgcccgggggatccgaggtgcgcgcaccagcaaagtggcctcagccgctgcagagtccggtcttgttttcctagagccgcctttctcacatgcacgtttgctctttttctctcagagtgccattaaggggaaattacaagaattaggagcttatgttgatgaagaacttcctgattacattatggtgatggtggccaacaagaaaagtcaggaccaaatgacagaggatctgtccctgtttctagggaacaacacaattcgattcaccgtatggcttcatggtgtattagataaacttcgctctgttacaactgaaccctctagtctgaagtcttctgataccaacatctttgatagtaacgtgccttcaaacaagagcaatttcagtcggggagatgagaggaggcatgaagctgcagtgccaccacttgccattcctagcgcgagacctgaaaaaagagattccagagtttctacaagttcgcaggagtcaaaaaccacaaatgtcagacagacttacgatgatggagctgcaacccgactaatgtcaacagtgaaacctttgagggagccagcacc

SEQ ID NO: 201309 - DNA, 1983 bp, Homo sapiens
  Payload ID: 19730
  Gene Name: zinc finger CCCH-type containing 14
  ENST ID: ENST00000557607
  CDS Start-End: 471-1733
gcggccgggggcggaacggaggaggaggcggtggtgtcccggctgcggggtaggagtccgcggcagcctccgggtaagccaagcgccgcgcagtgctgagttcccgcacgccgcagagccatggagatcggcaccgagatcagccgcaagatccggagtgccattaaggggaaattacaagaattaggagcttatgttggcttcatggtgtattagataaacttcgctctgttacaactgaaccctctagtctgaagtcttctgataccaacatctttgatagtaacgtgccttcaaacaagagcaatttcagtcggggagatgagaggaggcatgaagctgcagtgccaccacttgccattcctagcgcgagacctgaaaaaagagattccagagtttctacaagttcgcaggagtcaaaaaccacaaatgtcagacagacttacgatgatggagctgcaacccgactaatgtcaacagtgaaacctttgagggagccagcaccctctgaagatgtgattgatattaagccagaaccagatgatctcattgacgaagacctcaactttgtgcaggagaatcccttatctcagaaaaaacctacagtgacacttacatatggttcttctcgcccttctattgaaatttatcgaccacctgcaagtagaaatgcagatagtggtgttcatttaaacaggttgcaatttcaacagcagcagaatagtattcatgctgccaagcagcttgatatgcagagtagttgggtatatgaaacaggacgtttgtgtgaaccagaggtgcttaacagcttagaagaaacgtatagtccgttctttagaaacaactcggagaaaatgagtatggaggatgaaaactttcggaagagaaagttgcctgtggtaagttcagttgttaaagtaaaaaaattcaatcatgatggagaagaggaggaagaagatgatgattacgggtctcgaacaggaagcatctccagcagtgtgtctgtgcctgcaaagcctgaaaggagaccttctcttccaccttctaaacaagctaacaagaatctgattttgaaggctatatctgaagctcaagaatccgtaacaaaaacaactaactactctacagttccacagaaacagacacttccagttgctcccagaactcgaacttctcaagaagaattgctagcagaagtggtccagggacaaagtaggacccccagaataagtccccccattaaagaagaggaaacaaaaggagattctgtagaaaaaaatcaagctgagatgagtgaactgagtgtggcacagaaaccagaaaaacttttggagcgctgcaagtactggcctgcttgtaaaaatggggatgagtgtgcctaccatcaccccatctcaccctgcaaagccttccccaattgtaaatttgctgaaaaatgtttgtttgttcacccaaattgtaaatatgatgcaaagtgtactaaaccagattgtcccttcactcatgtgagtagaagaattccagtactgtctccaaaaccagcaccaccttccagtagtcagctctgccgttacttccctgcttgtaagaagatggaatgtcccttctatcatccaaaacattgtaggtttaacactcaatgtacaagaccggactgcacattctaccatcccaccattaatgtcccaccacgacatgccttgaaatggattcgacctcaaaccagcgaatagcacccagtcctgcctggcagaagatcatgcagtttggaagttttcatgtactgatgaaagatactctacagaacttgtcaaatctttgaaacttggaatatattgctttcataatatgaagttttattgcctatctatctgaagtgtctaatttttcaagtttgtaagtttattatgtggttttaacattgggtgtttttgttttgtttttactatgaaaagacagcttaaggaagagctaaattctgtt

SEQ ID NO: 201310 - DNA, 2529 bp, Homo sapiens
  Payload ID: 19730
  Gene Name: zinc finger CCCH-type containing 14
  Uniprot ID: Q6PJT7
  ENST ID: ENST00000555755
  CDS Start-End: 97-2289
gaggcggtggtgtcccggctgcggggtaggagtccgcggcagcctccgggtaagccaagcgccgcgcagtgctgagttcccgcacgccgcagagccatggagatcggcaccgagatcagccgcaagatccggagtgccattaaggggaaattacaagaattaggagcttatgttgatgaagaacttcctgattacattatggtgatggtggccaacaagaaaagtcaggaccaaatgacagaggatctgtccctgtttctagggaacaacacaattcgattcaccgtatggcttcatggtgtattagataaacttcgctctgttacaactgaaccctctagtctgaagtcttctgataccaacatctttgatagtaacgtgccttcaaacaagagcaatttcagtcggggagatgagaggaggcatgaagctgcagtgccaccacttgccattcctagcgcgagacctgaaaaaagagattccagagtttctacaagttcgcaggagtcaaaaaccacaaatgtcagacagacttacgatgatggagctgcaacccgactaatgtcaacagtgaaacctttgagggagccagcaccctctgaagatgtgattgatattaagccagaaccagatgatctcattgacgaagacctcaactttgtgcaggagaatcccttatctcagaaaaaacctacagtgacacttacatatggttcttctcgcccttctattgaaatttatcgaccacctgcaagtagaaatgcagatagtggtgttcatttaaacaggttgcaatttcaacagcagcagaatagtattcatgctgccaagcagcttgatatgcagagtagttgggtatatgaaacaggacgtttgtgtgaaccagaggtgcttaacagcttagaagaaacgtatagtccgttctttagaaacaactcggagaaaatgagtatggaggatgaaaactttcggaagagaaagttgcctgtggtaagttcagttgttaaagtaaaaaaattcaatcatgatggagaagaggaggaagaagatgatgattacgggtctcgaacaggaagcatctccagcagtgtgtctgtgcctgcaaagcctgaaaggagaccttctcttccaccttctaaacaagctaacaagaatctgattttgaaggctatatctgaagctcaagaatccgtaacaaaaacaactaactactctacagttccacagaaacagacacttccagttgctcccagaactcgaacttctcaagaagaattgctagcagaagtggtccagggacaaagtaggacccccagaataagtccccccattaaagaagaggaaacaaaaggagattctgtagaaaaaaatcaaggaactcaacagaggcaattattatcccgactgcaaatcgacccagtaatggcagaaactctgcagatgagtcaagattactatgacatggaatccatggtccatgcagacacaagatcatttattctgaagaagccaaagctgtctgaggaagtagtagtggcaccaaaccaagagtcggggatgaagactgcagattcccttcgggtactttcaggacaccttatgcagacacgagatcttgtacaaccagataaacctgcaagtcccaagtttatagtgacgctggatggtgtccccagccccccaggatacatgtcagatcaagaggaggacatgtgctttgaaggaatgaaacccgtaaaccaaactgcagcctcaaacaagggactcagaggtctcctccacccacagcagttgcacttgctgagcaggcagcttgaggacccaaatgctgagatgagtgaactgagtgtggcacagaaaccagaaaaacttttggagcgctgcaagtactggcctgcttgtaaaaatggggatgagtgtgcctaccatcaccccatctcaccctgcaaagccttccccaattgtaaatttgctgaaaaatgtttgtttgttcacccaaattgtaaatatgatgcaaagtgtactaaaccagattgtcccttcactcatgtgagtagaagaattccagtactgtctccaaaaccagttgcaccaccagcaccaccttccagtagtcagctctgccgttacttccctgcttgtaagaagatggaatgtcccttctatcatccaaaacattgtaggtttaacactcaatgtacaagaccggactgcacattctaccatcccaccattaatgtcccaccacgacatgccttgaaatggattcgacctcaaaccagcgaatagcacccagtcctgcctggcagaagatcatgcagtttggaagttttcatgtactgatgaaagatactctacagaacttgtcaaatctttgaaacttggaatatattgctttcataatatgaagttttattgcctatctatctgaagtgtctaatttttcaagtttgtaagtttattatgtggttttaacattgggtgtttttgttttgtttttactatgaaaagacagcttaaggaagagct

SEQ ID NO: 201311 - DNA, 463 bp, Homo sapiens
  Payload ID: 19730
  Gene Name: zinc finger CCCH-type containing 14
  ENST ID: ENST00000557047
  CDS Start-End: 1-447
atctccagcagtgtgtctgtgcctgcaaagcctgaaaggagaccttctcttccaccttctaaacaagctaacaagaatctgattttgaaggctatatctgaagctcaagaatccgtaacaaaaacaactaactactctacagttccacagaaacagacacttccagttgctcccagaactcgaacttctcaagaagaattgctagcagaagtggtccagggacaaagtaggacccccagaataagtccccccattaaagaagaggaaacaaaaggagattctgtagaaaaaaatcaaggtgatctgtcctttctctctggctgctttcaagatcttctctttgtgtttgatgttctgcagtttcactacgatgtgtctaggcgtggatttccttttatttttcctgtttggtataatgtatggaagcatcccatatatttgaaataaaatgcattatgaaata

SEQ ID NO: 201312 - DNA, 2138 bp, Homo sapiens
  Payload ID: 19731
  Gene Name: zinc finger CCCH-type containing 15
  Uniprot ID: Q8WU90
  ENST ID: ENST00000337859
  CDS Start-End: 228-1508
tgggcgcgcacgcgcagctccgcttccgggagccgctcctcgctacccactatgctctgcgacatcgacctgtcgcaaaggccgcgtttgcggggccaatgagcgactcgctttccgtgcggtgcggcgagtgaggccccggtcttcctcctcgtcctgccgcagggccagaacccctgacggtattcagctgcgcgtaagtctggccggtgccatctgtctccgcaatgccccccaagaaacaggctcaggccgggggcagcaaaaaggcggagcaaaaaaagaaggagaagattatcgaagacaaaactttcggtttgaagaataagaaaggagcaaagcaacagaagtttatcaaggctgtcacacatcaagttaaatttggtcaacaaaatccacgtcaggtagcacagagtgaagctgaaaagaaattgaagaaggatgacaagaagaaagaattgcaggagctaaatgagctgttcaaacctgtagttgctgctcaaaaaataagtaaaggtgcagatcccaagtctgtagtatgtgcattcttcaagcaaggacagtgtactaaaggagataagtgtaagttctcccatgacttgactctggagagaaaatgtgaaaagcgaagtgtttacattgatgcaagagatgaagaacttgaaaaagatactatggataattgggatgagaaaaagctggaagaagtagtgaacaagaagcacggtgaggcggaaaagaaaaaaccaaaaactcaaatagtgtgcaagcatttcctggaagctattgaaaacaacaagtatggctggttttgggtatgccctggagggggtgatatttgcatgtatcgtcatgcacttcctcctggatttgtgttgaaaaaagataaaaagaaagaagagaaagaagatgaaatttcattagaagatctaattgagagagagcgttctgccctaggtccaaatgttaccaaaatcactctagaatcttttcttgcctggaagaaaaggaaaagacaagaaaagattgataaacttgaacaagatatggaaagaaggaaagctgacttcaaagcagggaaagcactagtgatcagtggtcgtgaagtgtttgaatttcgtcctgaactggtcaatgatgatgatgaggaagcagatgatacccgctacacccagggaacaggtggtgatgaggttgatgattcagtgagtgtaaatgacatagatttaagcctgtacatcccaagagatgtagatgaaacaggtattactgtagccagtcttgaaagattcagcacatatacttcagataaagatgaaaacaaattaagtgaagcttctggaggtagggctgaaaatggtgaaagaagtgacttggaagaggacaacgagagggagggaacggaaaatggagccattgatgctgttcctgttgatgaaaatcttttcactggagaggatttggatgaactagaagaagaattaaatacacttgatttagaagaatgacaccaaacacatcgctgaaaaaattaagtcagctcagcacgagttgaaattgactacattaatttctttccacctagaatcaacaggatgtttatttcctatgctgattctggaggagttaacctcctgcaaaaaaggcatcttgtccctacatcttctcttctgactttggctacatctcatagtaagttcagagtagttcatgataaattgaaaatataatggtcattgcagaaaatgattgatgttgtaactgtccacccaagtaagaagtgtatctgcctttccatcttttggttttcatttgggcatgtgctattaccagaaacaacaaacttatatttaaaatacccttcatttgacacagtttttaatgagtgatttaatttcctctgtatttgtatgtttagaagactgcctaaaacatgagcactgtacttcataaaggaaactgcgtatgcagattcagtattgtgtatctttggacaattagatggacatttaaaatggaacttcttttatctgacaggatcagctacaatgccctgtgttaaattgtttaaaagtttcccttttcttttttgccaataaagttgtaaataaagaccatcatacattaaaatccaaata

SEQ ID NO: 201313 - DNA, 556 bp, Homo sapiens
  Payload ID: 19731
  Gene Name: zinc finger CCCH-type containing 15
  ENST ID: ENST00000437396
  CDS Start-End: 121-345
tcgctttccgtgcggtgcggcgagtgaggccccggtcttcctcctcgtcctgccgcagggccagaacccctgacggtattcagctgcgcgtaagtctggccggtgccatctgtctccgcaatgccccccaagaaacaggctcaggccgggggcagcaaaaaggcggagcaaaaaaagaaggagaagattatcgaagacaaaactttcggtttgaagaataagaaaggagcaaagcaacagaagtttatcaaggctgtcacacatcaagttaaatttggtcaacaaaatccacgtcaggacctgacgtataaatgtttggatgaatcctctaatcatattaggtagcacagagtgaagctgaaaagaaattgaagaaggatgacaagaagaaagaattgcaggagctaaatgagctgttcaaacctgtagttgctgctcaaaaaataagtaaaggtgcagatcccaagtctgtagtatgtgcattcttcaagcaaggacagtgtactaaaggagataagtgtaagttctcccatgacttgactctggagagaaaatg

SEQ ID NO: 201314 - DNA, 1101 bp, Homo sapiens
  Payload ID: 19731
  Gene Name: zinc finger CCCH-type containing 15
  ENST ID: ENST00000421536
  CDS Start-End: 131-448
aatgagcgactcgctttccgtgcggtgcggcgagtgaggccccggtcttcctcctcgtcctgccgcagggccagaacccctgacggtattcagctgcgcgtaagtctggccggtgccatctgtctccgcaatgccccccaagaaacaggctcaggccgggggcagcaaaaaggcggagcaaaaaaagaaggagaagattatcgaagacaaaactttcggtttgaagaataagaaaggagcaaagcaacagaagtttatcaaggctgtcacacatcaagttaaatttggtcaacaaaatccacgtcaggtagcacagagtgaagctgaaaagaaattgaagaaggatgacaagaagaaagaattgcaggagctaaatgagctgttcaaacctgtagttgctgctcaaaaaataagtaaaggtgtgcaagcatttcctggaagctattgaaaacaacaagtatggctggttttgggtatgccctggagggggtgatatttgcatgtatcgtcatgcacttcctcctggatttgtgttgaaaaaagataaaaagaaagaagagaaagaagatgaaatttcattagaagatctaattgagagagagcgttctgccctaggtccaaatgttaccaaaatcactctagaatcttttcttgcctggaagaaaaggaaaagacaagaaaagattgataaacttgaacaagatatggaaagaaggaaagctgacttcaaagcagggaaagcactagtgatcagtggtcgtgaagtgtttgaatttcgtcctgaactggtcaatgatgatgatgaggaagcagatgatacccgctacacccagggaacaggtggtgatgaggtaagaggaagctttgtgcctcatctccttatgttaattgaaagaaacaatagaaaataccacaacatggttaagagccaccaacatcagagccacagtgcctgggttcaaatccttactccaaccatgggaaattaatctaggcctccaccctcatctaatatggacataatgattatctctacatcatagtttgtgagaattaatcgagttcatgaattagtagttctttatacagcttaggacagtg

SEQ ID NO: 201315 - DNA, 776 bp, Homo sapiens
  Payload ID: 19731
  Gene Name: zinc finger CCCH-type containing 15
  ENST ID: ENST00000445547
  CDS Start-End: 1-216
gttgatgattcagtgagtgtaaatgacatagatttaagcctgtacatcccaagagatgtagatgaaacaggtattactgtagccagtcttgaaagattcagcacatatacttcagataaagatgagggaagacatggtcatgggaagggctttttaggatatggaaaacctaaatgtatctgtagctcagaggaagaggatctgaaaacaaattaagtgaagcttctggaggtagggctgaaaatggtgaaagaagtgacttggaagaggacaacgagagggagggaacggaaaatggagccattgatgctgttcctgttgatgaaaatcttttcactggagaggatttggatgaactagaagaagaattaaatacacttgatttagaagaatgacaccaaacacatcgctgaaaaaattaagtcagctcagcacgagttgaaattgactacattaatttctttccacctagaatcaacaggatgtttatttcctatgctgattctggaggagttaacctcctgcaaaaaaggcatcttgtccctacatcttctcttctgactttggctacatctcatagtaagttcagagtagttcatgataaattgaaaatataatggtcattgcagaaaatgattgatgttgtaactgtccacccaagtaagaagtgtatctgcctttccatcttttggttttcatttgggcatgtgctattaccagaaacaacaaacttatatttaaaatacccttcatttgacacagtttttaatgagtga

SEQ ID NO: 201316 - DNA, 3729 bp, Homo sapiens
  Payload ID: 19732
  Gene Name: zinc finger CCCH-type containing 18
  Uniprot ID: Q86VM9
  ENST ID: ENST00000301011
  CDS Start-End: 201-3062
aggactaccgtcgcggcctgatgacgtcgcacaatggccggcccccgcgggtagtggagcccgtttgttccgcccgtgtcgagcctggagccagaacctgtgaagagcggaagggccaagggacgtcttctccacgccgctccgactccaggggagccgtggcctcctctccgccctagcgctgagaaccgtgggtaccgatggatgtggccgagagccctgaacgggatcctcactctccagaggatgaagagcagccacagggactctcggacgatgacattctgagggacagcgggtccgatcaggatttggacggggcgggggtgagggcttctgatctggaggatgaggaaagtgcagccagggggccgagccaggaggaggaagataatcactccgacgaggaggaccgggcaagtgagcctaaatcccaagaccaggactcagaggtgaatgagctgagccggggcccgaccagctccccctgcgaggaggagggggacgaaggggaggaagaccggacaagcgaccttagggatgaggcctcctcagtcaccagggagctggatgagcatgagctagactacgatgaggaggttcctgaggagccagctcccgccgtccaggaggacgaggctgagaaagcgggggctgaggatgatgaggagaaaggcgaaggcactcccagggaggaggggaaggctggtgttcagagtgtgggagaaaaggaatccctggaggctgccaaggagaaaaagaaagaggacgatgatggagaaatcgatgatggggaaatagacgatgatgacctggaagaaggtgaagtgaaggaccccagtgacaggaaggtgaggcctcgtcccacctgccggttcttcatgaaagggaactgtacctggggaatgaattgtaggtttatacaccctggagtgaacgacaaggggaactactccctaatcaccaaagccgaccccttcccgcctaatggtgccccgcctctcggacctcacccgctgatgcccgccaacccttggggtgggccggtagttgatgaaattttgcctccaccccctccagagcccccaacagagagtgcctgggaacgaggactccggcatgcaaaggaggttttaaaaaaagcaactattcgaaaagaacaggagcctgattttgaagagaaaaggtttacggtgaccattggcgaagacgaacgggaatttgacaaagaaaatgaagtttttcgagattggaattctcggatcccgagagatgtcagagacacagtactcgagccttacgcagacccttattatgactatgaaattgagcggttttggcgtggcggacagtatgagaatttcagggtgcagtatacagaaacagagccgtatcataattaccgagaaagggagcgggagcgagagagagagaacagacagcgcgagcgcgagcgggagcgggagcgggaccgagagcgggagcgccggcagagggagcgcgagcgagagcgggagcgcgagcgcgacaaggagcggcagcggaggaaggaggagtgggagcgtgagcgagccaagcgggacgagaaggaccggcagcaccgtgaccgcgaccgggagaaggagcgggagaaggagaaggggaagcccaagccccgctccccgcagccgccaagccgccaagctgagccaccaaagaaggaggctgccaccacggggccgcaggtgaagagagcagatgagtggaaggacccttggcgccgatccaagtctcccaagaagaaactcggggtgtcggtctccccgagccgggctcgaaggcgtcggaaaacatcagcctcgtcagcctctgcctctaattcctccaggtcgtcttcgcggtcatcgtcctactctggctccggctcctcccggtcgcgatcccggtcttcatcctacagctcctactccagccgctcttccagacacagctcgttctcaggaagccggtccaggtcccggtccttctcttcgtccccgtccccgtccccaacaccttccccacatagaccttccatcagaaccaagggagagccggccccgccgcccgggaaagcaggagagaagtcagtgaagaagccggccccgcctccagccccaccacaggccaccaaaaccactgctcctgtccccgagcccaccaagccaggagaccctcgggaagccaggaggaaggagcggccagccaggaccccccccaggaggcggacgctaagcggcagcggcagtggcagtggtagcagctatagtggttccagctcccgatccaggtccctgagcgtgagcagcgtctcctcagtgtccagtgctacgtcgagcagcagctctgcacacagcgtggactcggaggacatgtacgcagacctggctagccccgtgtcctcagccagctctcggtccccggccccagcccagaccaggaaggagaaaggaaaatctaagaaagaagacggtgttaaagaggaaaagcggaaaagggattcgtccacacaaccacccaaatctgcaaaacctccagcaggggggaagtcctcccagcagccctcgacaccccagcaggcaccccccgggcagccccagcagggcacatttgtggcccacaaggagatcaagttgacactgttgaataaggcggctgataaaggaagcaggaagcgctatgaaccatcagacaaggacaggcagagccctcctccagccaagcggcccaacacatccccagaccgaggttctcgggaccggaagtcaggtgggagactgggctccccgaagccagagcggcagagaggccagaactccaaagcccctgcagccccggctgacaggaagcgccagctgtcaccccagtccaagagctccagcaaggtcacgagcgtgcccggcaaagcctcggatcccggcgccgccagcaccaaatcagggaaggccagcacgctgtctcggcgggaggagctgctgaaacagctgaaggccgtggaggatgctattgcacgcaagcgggccaagatccccgggaaagcataggccgtgccccgaccggactggacgcatttttatacatagggtaagcgcagccattttggattttgcagttaatgtcttattttggctgtgattctttttaaaaagtaaaaaagaaaaaaaagtttctcagctggaaaagaagccacacaggaaatgacaacgacgctgaatcccagcctccctccccagagcagaagtcccgcaggacagacagacacagacagcgctagtgaccagcacggttctcatgtaaattacaagccccagccgccagccccgccttctcttcctcctcctccgtcttcttccctggccctggtcaggcctgtggagccccagctctgggtccctagcccgggtccaggcagccaggctccctcctgagctgagaaacggaacctcgcgaaccactggtggcacatccttctcctcccccgcccctgatcacccgcccccggatcagaaatatatctatattctcgactaaagtctcatcaggaaatatttcctgtcttttattttaagcatcaaattgttttagttgatttaaaaaggaaaaaatacagaaaagaccaaaaaaaggccaagggtgttgttggggcgtctgtctaatgtggtgggtctttttttgaggggtctcctaaaataaaatattttgataagcagc

SEQ ID NO: 201317 - DNA, 3211 bp, Homo sapiens
  Payload ID: 19732
  Gene Name: zinc finger CCCH-type containing 18
  ENST ID: ENST00000452588
  CDS Start-End: 179-3112
gacgtcgcacaatggccggcccccgcgggtagtggagcccgtttgttccgcccgtgtcgagcctggagccagaacctgtgaagagcggaagggccaagggacgtcttctccacgccgctccgactccaggggagccgtggcctcctctccgccctagcgctgagaaccgtgggtaccgatggatgtggccgagagccctgaacgggatcctcactctccagaggatgaagagcagccacagggactctcggacgatgacattctgagggacagcgggtccgatcaggatttggacggggcgggggtgagggcttctgatctggaggatgaggaaagtgcagccagggggccgagccaggaggaggaagataatcactccgacgaggaggaccgggcaagtgagcctaaatcccaagaccaggactcagaggtgaatgagctgagccggggcccgaccagctccccctgcgaggaggagggggacgaaggggaggaagaccggacaagcgaccttagggatgaggcctcctcagtcaccagggagctggatgagcatgagctagactacgatgaggaggttcctgaggagccagctcccgccgtccaggaggacgaggctgagaaagcgggggctgaggatgatgaggagaaaggcgaaggcactcccagggaggaggggaaggctggtgttcagagtgtgggagaaaaggaatccctggaggctgccaaggagaaaaagaaagaggacgatgatggagaaatcgatgatggggaaatagacgatgatgacctggaagaaggtgaagtgaaggaccccagtgacaggaaggtgaggcctcgtcccacctgccggttcttcatgaaagatgttgtgacaccattatccactcttcttccaccaatatccaattccataccattcagaggccaggttaaagggaactgtacctggggaatgaattgtaggtttatacaccctggagtgaacgacaaggggaactactccctaatcaccaaagccgaccccttcccgcctaatggtgccccgcctctcggacctcacccgctgatgcccgccaacccttggggtgggccggtagttgatgaaattttgcctccaccccctccagagcccccaacagagagtgcctgggaacgaggactccggcatgcaaaggaggttttaaaaaaagcaactattcgaaaagaacaggagcctgattttgaagagaaaaggtttacggtgaccattggcgaagacgaacgggaatttgacaaagaaaatgaagtttttcgagattggaattctcggatcccgagagatgtcagagacacagtactcgagccttacgcagacccttattatgactatgaaattgagcggttttggcgtggcggacagtatgagaatttcagggtgcagtatacagaaacagagccgtatcataattaccgagaaagggagcgggagcgagagagagagaacagacagcgcgagcgcgagcgggagcgggagcgggaccgagagcgggagcgccggcagagggagcgcgagcgagagcgggagcgcgagcgcgacaaggagcggcagcggaggaaggaggagtgggagcgtgagcgagccaagcgggacgagaaggaccggcagcaccgtgaccgcgaccgggagaaggagcgggagaaggagaaggggaagcccaagccccgctccccgcagccgccaagccgccaagctgagccaccaaagaaggaggctgccaccacggggccgcaggtgaagagagcagatgagtggaaggacccttggcgccgatccaagtctcccaagaagaaactcggggtgtcggtctccccgagccgggctcgaaggcgtcggaaaacatcagcctcgtcagcctctgcctctaattcctccaggtcgtcttcgcggtcatcgtcctactctggctccggctcctcccggtcgcgatcccggtcttcatcctacagctcctactccagccgctcttccagacacagctcgttctcaggaagccggtccaggtcccggtccttctcttcgtccccgtccccgtccccaacaccttccccacatagaccttccatcagaaccaagggagagccggccccgccgcccgggaaagcaggagagaagtcagtgaagaagccggccccgcctccagccccaccacaggccaccaaaaccactgctcctgtccccgagcccaccaagccaggagaccctcgggaagccaggaggaaggagcggccagccaggaccccccccaggaggcggacgctaagcggcagcggcagtggcagtggtagcagctatagtggttccagctcccgatccaggtccctgagcgtgagcagcgtctcctcagtgtccagtgctacgtcgagcagcagctctgcacacagcgtggactcggaggacatgtacgcagacctggctagccccgtgtcctcagccagctctcggtccccggccccagcccagaccaggaaggagaaaggaaaatctaagaaagaagacggtgttaaagaggaaaagcggaaaagggattcgtccacacaaccacccaaatctgcaaaacctccagcaggggggaagtcctcccagcagccctcgacaccccagcaggcaccccccgggcagccccagcagggcacatttgtggcccacaaggagatcaagttgacactgttgaataaggcggctgataaaggaagcaggaagcgctatgaaccatcagacaaggacaggcagagccctcctccagccaagcggcccaacacatccccagaccgaggttctcgggaccggaagtcaggtgggagactgggctccccgaagccagagcggcagagaggccagaactccaaagcccctgcagccccggctgacaggaagcgccagctgtcaccccagtccaagagctccagcaaggtcacgagcgtgcccggcaaagcctcggatcccggcgccgccagcaccaaatcagggaaggccagcacgctgtctcggcgggaggagctgctgaaacagctgaaggccgtggaggatgctattgcacgcaagcgggccaagatccccgggaaagcataggccgtgccccgaccggactggacgcatttttatacatagggtaagcgcagccattttggattttgcagttaatgtcttattttggctgtgattcttttt

SEQ ID NO: 201318 - DNA, 712 bp, Homo sapiens
  Payload ID: 19732
  Gene Name: zinc finger CCCH-type containing 18
  ENST ID: ENST00000567085
  CDS Start-End: 1-712
aggtgaagtgaaggaccccagtgacaggaaggtgaggcctcgtcccacctgccggttcttcatgaaagggaactgtacctggggaatgaattgtaggtttatacaccctggagtgaacgacaaggggaactactccctaatcaccaaagccgaccccttcccgcctaatggtgccccgcctctcggacctcacccgctgatgcccgccaacccttggggtgggccggtagttgatgaaattttgcctccaccccctccagagcccccaacagagagtgcctgggaacgaggactccggcatgcaaaggaggttttaaaaaaagcaactattcgaaaagaacaggagcctgattttgaagagaaaaggtttacggtgaccattggcgaagacgaacgggaatttgacaaagaaaatgaagtttttcgagattggaattctcggatcccgagagatgtcagagacacagtccgccaagctgagccaccaaagaaggaggctgccaccacggggccgcaggtgaagagagcagatgagtggaaggacccttggcgccgatccaagtctcccaagaagaaactcggggtgtcggtctccccgagccgggctcgaaggcgtcggaaaacatcagcctcgtcagcctctgcctctaattcctccaggtcgtcttcgcggtcatcgtcctactctggctccggctcctcccggtcgcga

SEQ ID NO: 201319 - DNA, 694 bp, Homo sapiens
  Payload ID: 19732
  Gene Name: zinc finger CCCH-type containing 18
  ENST ID: ENST00000569435
  CDS Start-End: 104-694
ctgtgaagagcggaagggccaagggacgtcttctccacgccgctccgactccaggggagccgtggcctcctctccgccctagcgctgagaaccgtgggtaccgatggatgtggccgagagccctgaacgggatcctcactctccagaggatgaagagcagccacagggactctcggacgatgacattctgagggacagcgggtccgatcaggatttggacggggcgggggtgagggcttctgatctggaggatgaggaaagtgcagccagggggccgagccaggaggaggaagataatcactccgacgaggaggaccgggcaagtgagcctaaatcccaagaccaggactcagaggatgatgacctggaagaaggtgaagtgaaggaccccagtgacaggaaggtgaggcctcgtcccacctgccggttcttcatgaaagggaactgtacctggggaatgaattgtaggtttatacaccctggagtgaacgacaaggggaactactccctaatcaccaaagccgaccccttcccgcctaatggtgccccgcctctcggacctcacccgctgatgcccgccaacccttggggtgggccggtagttgatgaaattttgcctccaccccctccagagcccccaacagagagtgcctgggaacgaggactccggcatgcaaaggaggttttaaaaaaa

SEQ ID NO: 201320 - DNA, 1068 bp, Homo sapiens
  Payload ID: 19732
  Gene Name: zinc finger CCCH-type containing 18
  ENST ID: ENST00000565583
  CDS Start-End: 1-591
aaatctaagaaagaagacggtgttaaagaggaaaagcggaaaagggattcgtccacacaaccacccaaatctgcaaaacctccagcaggggggaagtcctcccagcagccctcgacaccccagcaggcaccccccgggcagccccagcagggcacatttgtggcccacaaggagatcaagttgacactgttgaataaggcggctgataaaggaagcaggaagcgctatgaaccatcagacaaggacaggcagagccctcctccagccaagcggcccaacacatccccagaccgaggttctcgggaccggaagtcaggtgggagactgggctccccgaagccagagcggcagagaggccagaactccaaagcccctgcagccccggctgacaggaagcgccagctgtcaccccagtccaagagctccagcaaggtcacgagcgtgcccggcaaagcctcggatcccggcgccgccagcaccaaatcagggaaggccagcacgctgtctcggcgggaggagctgctgaaacagctgaaggccgtggaggatgctattgcacgcaagcgggccaagatccccgggaaagcataggccgtgccccgaccggactggacgcatttttatacataggaagtcccgcaggacagacagacacagacagcgctagtgaccagcacggttctcatgtaaattacaagccccagccgccagccccgccttctcttcctcctcctccgtcttcttccctggccctggtcaggcctgtggagccccagctctgggtccctagcccgggtccaggcagccaggctccctcctgagctgagaaacggaacctcgcgaaccactggtggcacatccttctcctcccccgcccctgatcacccgcccccggatcagaaatatatctatattctcgactaaagtctcatcaggaaatatttcctgtcttttattttaagcatcaaattgttttagttgatttaaaaaggaaaaaatacagaaaagaccaaaaaaaggccaagggtgttgttggggcgtctgtctaatgtggtgggtctttttttg

SEQ ID NO: 201321 - DNA, 387 bp, Homo sapiens
  Payload ID: 19732
  Gene Name: zinc finger CCCH-type containing 18
  ENST ID: ENST00000564341
  CDS Start-End: 1-228
ccgccgcccgggaaagcaggagagaagtcagtgaagaagccggccccgcctccagccccaccacaggccaccaaaaccactgctcctgtccccgagcccaccaagccaggagaccctcgggaagccaggaggaaggagcggccagccaggaccccccccaggaggcggacgctaagcggcagcggcagtggcagtggtagcagctatagtggctccctcctgagctgagaaacggaacctcgcgaaccactggtggcacatccttctcctcccccgcccctgatcacccgcccccggatcagaaatatatctatattctcgactaaagtctcatcaggaaatatttcctgtcttttattttaagcatcaaattgttttagttgattt

SEQ ID NO: 201322 - DNA, 3280 bp, Homo sapiens
  Payload ID: 19733
  Gene Name: zinc finger CCCH-type containing 3
  Uniprot ID: Q8IXZ2
  ENST ID: ENST00000262577
  CDS Start-End: 33-2879
gggggcctggccggccgtcgcggactcgggagatggaggaaaaggagatattacggcggcagatccgcctactgcagggtctgattgatgactacaaaaccctccacggcaatgccccggcccctggtaccccagcagcttctgggtggcagccacccacttaccacagtggcagagcctttagtgcccgctaccctcgtccaagccggaggggctactcttcccaccatgggccttcgtggcgcaagaaatactccctcgtgaatcggcccccgggaccctcagaccctcctgccgaccatgctgtgcggccgttgcacggggcccgggggggccagcctcctgtcccgcagcagcatgtccttgagagacaggtccagctcagtcagggtcagaacgtggtcatcaaagttaaaccgccatcaaagtctggctctgccagtgcctcaggggcccagcggggctctttggaagaatttgaggaaaccccctggagtgaccaaaggccccgggaaggtgaaggtgagccccctcggggacagctgcagccctcgaggccaacaagagccagggggacctgcagtgtggaagatcctcttctggtctgccagaaggagcctggtaagcccaggatggtgaagtcagtgggcagtgtgggcgacagcccccgggagccccgccggacagtcagtgagagtgtgattgccgtcaaggcgagcttcccatcctccgctctgcccccacgcactggcgtggccctgggccggaagctgggttctcattccgtggccagctgtgctccacagctccttggggacaggagagtagatgctggccacacagatcagccagttccgtctggctcagtggggggccccgccagaccggcctcaggacccaggcaggcccgggaggcctcgctggttgtgacctgtcgaactaacaagttccggaaaaacaactacaaatgggtggctgcctcctcgaagagtccccgggttgctcggagggccctcagtcccagagtggctgcagagaatgtgtgcaaggcctctgctggcatggcaaacaaggtggagaagccgcagctcatagctgacccagagcccaagcccaggaagccagccacgtcctccaagccagggtctgcccccagcaagtacaagtggaaggcctccagcccctctgcctcctcctcttcctccttccgttggcagtcggaggccagcagcaaggaccatgcctcccagctctccccagtcctgtctaggtccccgtcgggggacagaccagcagtaggacacagtggcttgaagcccctctctggggagaccccgctctcggcttacaaagtgaagagccgcaccaagatcatccggagacgcagcagcacaagccttcctggagacaagaaaagcggcacctcacctgccgccaccgccaagagccacctcagcctccggcggagacaggccctcagggggaagagcagccctgtcctgaagaagacccccaacaagggcctggtacaggtcaccacgcaccgactatgtcgcctgccaccgagccgggcccacctccccaccaaggaagcgtccagcctgcatgccgtgcggactgcacccaccagcaaggtgatcaagacccgctaccgcattgtcaagaagacgccggcctcgcctctcagcgccccgcccttccccctgtctctgccctcctggcgggcccggcggctctcactatccaggtccctggtgctgaaccgcctgcgtccagttgccagcgggggtgggaaagcccaaccgggctccccttggtggcggagcaaaggctaccgctgcatcggaggggtcctctacaaagtatctgccaacaagctctccaagacctccggccagcccagtgatgcgggcagcaggcccctcctgcgcacaggccggctggatcctgcaggcagctgtagccgttccctggccagccgggcagtgcagcgcagcctggccatcatccggcaggcgcggcagcgcagggagaagaggaaggagtactgcatgtactacaaccgcttcggcaggtgcaaccgtggcgagcgctgcccctacatccacgatcccgagaaggtggccgtgtgcaccaggtttgtccggggcacctgcaagaaaacggatgggacctgccccttctcccaccatgtgtccaaggagaagatgccggtgtgctcctacttcctgaagggcatctgcagcaacagcaactgtccctatagccacgtgtacgtgtcccgcaaggccgaggtctgcagcgacttcctcaaaggctactgccccctgggtgcaaagtgcaagaagaaacacacgctgctgtgccccgactttgcccgcaggggggcgtgtccccgcggcgcccagtgccagctgctccaccgtacccagaaacgccacagtcggcgggcagccacgtcccccgccccagggcccagcgacgcaaccgccaggagcagggtctcggccagccacgggcccaggaagccttcagcatcccagcgccccaccaggcagacgcccagctcggctgccctcactgcggctgccgtggctgcacctccccactgcccaggggggtcagcctctccctcatcctcgaaggcttcctcctcctcctcctcctcctcatcccctcccgcttccttggaccacgaggcaccatctctccaggaggctgccttagcagcagcgtgctccaacaggctctgcaagctgccttccttcatctccctgcagtcctcgccgagcccaggagcccagcccagggtccgggcccctagggcccccctcaccaaggactcagggaagcctctgcacatcaaaccacgtctgtgaggaccccagggaccggcctgcacctacctcagaccctcatccttggagaggaaagaggctctgtccaccactctaccccacaggagggccgcccgccaccaagcctcacctgggggccacagggacactgctctgcctgcctggccctcaaccttccatgaccagcgtgtgcgcagggcctggtcttcctcccccaagccaggcccctgtccccaccccaccaccttccagggtgccaggcagggctggcctccaggcctgtccccgactgccattggcaacagtggccctgcagcccccagccctccccacccaggttttcggcccagtgaagaggccactggccaggcctcccaggcaggtgttttatgttcagcaataaaggttctatccgtaactgg

SEQ ID NO: 201323 - DNA, 546 bp, Homo sapiens
  Payload ID: 19733
  Gene Name: zinc finger CCCH-type containing 3
  ENST ID: ENST00000528401
  CDS Start-End: 1-240
cgcattgtcaagaagacgccggcctcgcctctcagcgccccgcccttccccctgtctctgccctcctggcgggcccggcggctctcactatccagataccactgtccttgcaagggccgcatgaagtttgctgaggtcaccacgcctttccagggagctgagccggatttgctgtgtggtcttcggaggggctgtcccagggcctgggagtggggggatgtctgctgtgagtctctttagacagcagtgacctgaggggtccttgagggcctaggcaggattcctggccagcctgcccctcagtagctggcacagacagagtgggtcctgggccgatgacccagcccaaagggtggcacaggtgcagagggtcgcgggcccgccaaggacagctgcacctggccgcctggcacctctgccggacgagctgaactcggcactccggggccatgaagtcccactaatacttgtttttttgcagctgacatacaaaacaccaatagcttcagctgaaatggatttttaaaagtgtcattttatggagaa

SEQ ID NO: 201324 - DNA, 1593 bp, Homo sapiens
  Payload ID: 19733
  Gene Name: zinc finger CCCH-type containing 3
  ENST ID: ENST00000632165
  CDS Start-End: 33-1593
gggggcctggccggccgtcgcggactcgggagatggaggaaaaggagatattacggcggcagatccgcctactgcagggtctgattgatgactacaaaaccctccacggcaatgccccggcccctggtaccccagcagcttctgggtggcagccacccacttaccacagtggcagagcctttagtgcccgctaccctcgtccaagccggaggggctactcttcccaccatgggccttcgtggcgcaagaaatactccctcgtgaatcggcccccgggaccctcagaccctcctgccgaccatgctgtgcggccgttgcacggggcccgggggggccagcctcctgtcccgcagcagcatgtccttgagagacaggtccagctcagtcagggtcagaacgtggtcatcaaagttaaaccgccatcaaagtctggctctgccagtgcctcaggggcccagcggggctctttggaagaatttgaggaaaccccctggagtgaccaaaggccccgggaaggtgaaggtgagccccctcggggacagctgcagccctcgaggccaacaagagccagggggacctgcagtgtggaagatcctcttctggtctgccagaaggagcctggtaagcccaggatggtgaagtcagtgggcagtgtgggcgacagcccccgggagccccgccggacagtcagtgagagtgtgattgccgtcaaggcgagcttcccatcctccgctctgcccccacgcactggcgtggccctgggccggaagctgggttctcattccgtggccagctgtgctccacagctccttggggacaggagagtagatgctggccacacagatcagccagttccgtctggctcagtggggggccccgccagaccggcctcaggacccaggcaggcccgggaggcctcgctggttgtgacctgtcgaactaacaagttccggaaaaacaactacaaatgggtggctgcctcctcgaagagtccccgggttgctcggagggccctcagtcccagagtggctgcagagaatgtgtgcaaggcctctgctggcatggcaaacaaggtggagaagccgcagctcatagctgacccagagcccaagcccaggaagccagccacgtcctccaagccagggtctgcccccagcaagtacaagtggaaggcctccagcccctctgcctcctcctcttcctccttccgttggcagtcggaggccagcagcaaggaccatgcctcccagctctccccagtcctgtctaggtccccgtcgggggacagaccagcagtaggacacagtggcttgaagcccctctctggggagaccccgctctcggcttacaaagtgaagagccgcaccaagatcatccggagacgcagcagcacaagccttcctggagacaagaaaagcggcacctcacctgccgccaccgccaagagccacctcagcctccggcggagacaggccctcagggggaagagcagccctgtcctgaagaagacccccaacaagggcctggtacaggtcaccacgcaccgactatgtcgcctgccaccgagccgggcccacctccccaccaaggaag

SEQ ID NO: 201325 - DNA, 6119 bp, Homo sapiens
  Payload ID: 19734
  Gene Name: zinc finger CCCH-type containing 4
  Uniprot ID: Q9UPT8
  ENST ID: ENST00000253048
  CDS Start-End: 39-3950
ctccgactctcggcacctggcctccagctttcggaactatggaggccgcgcccgggacccccccgccgccgccatcagagtcgccgccgccgccatcgccgccgccgccatcaacgccttcgcctcctccgtgttcccccgacgcccgcccggccaccccgcacctcctccaccaccgcctcccgctccctgacgacagggaagatggagagttggaagaaggtgaattggaagatgatggggcagaggagacccaggatacctccggagggcctgagagaagccggaaagaaaagggggagaagcatcacagtgattcggatgaggagaagtcccacaggagactgaagcggaaacggaagaaagagcgggagaaagagaaaaggaggtcgaagaagaggaggaaatccaagcacaaacgccatgcttcttctagcgatgacttctctgacttctcagatgactcggatttcagccccagtgagaaaggtcaccgcaagtacagagagtacagccccccatatgcgccgtcccaccagcagtaccccccatcgcatgccacgcccctgcccaagaaggcatactccaagatggacagcaagagttatggcatgtacgaggactacgagaatgagcagtatggggaatatgagggcgacgaggaggaggacatgggcaaggaggactatgacgacttcaccaaagagctgaaccagtaccggcgtgccaaggagggcagcagccgcggccgaggcagccgaggccggggccggggctacaggggccgaggaagccgtggaggatcgcgaggccgcggcatgggcaggggcagccgaggcaggggcagaggctctatgggaggagaccacccggaggatgaagaggatttctacgaggaagagatggactatggagagagtgaggagccaatgggagacgacgactatgacgagtactccaaggagctgaaccagtaccgccgctccaaggacagccgaggccgagggctaagtcgaggccgtggcaggggctcccgaggtcgagggaaaggaatgggtcggggccgaggccgaggtggcagccgaggagggatgaacaagggcggaatgaacgatgacgaagacttctatgacgaggacatgggcgacggtggtggtggaagctaccggagtcgtgaccatgacaagccccaccagcagtcggacaagaaaggcaaagtcatttgcaagtacttcgtggaagggcgctgcacctggggagaccactgtaattttagccatgacatcgaactcccaaagaagcgagaactgtgcaagttttacatcactggattttgcgccagagctgagaactgcccttatatgcacggtgatttcccgtgtaagctgtaccacaccactgggaactgcatcaatggtgacgactgcatgttttcccacgaccctctgaccgaagagacgagggagctcttggataagatgttggccgatgatgcagaagcaggtgccgaggatgagaaggaggtggaggaactgaagaagcagggcatcaaccccctgcccaaaccgccccctggtgtgggcctcctgcccacccctcctcggccccctggcccgcaggctccaacctctcccaacggcaggcccatgcagggtggccccccgcccccgccccctccccctcccccaccgcccgggccccctcagatgcccatgccggtgcatgagccactgtccccgcagcagctgcagcagcaggacatgtacaacaagaagatcccctccttgtttgagatcgtggtgcggcccacgggacagctggctgagaagctgggtgtgaggttccctggacccggtggacccccagggccaatgggccctgggcccaacatgggacccccagggccaatgggcggtccaatgcatcctgacatgcaccccgacatgcacccggacatgcaccctgacatgcacgcagacatgcacgcagacatgccgatgggccctggcatgaatcctggcccacccatgggccctggcggccctccaatgatgccctacggccctggagactccccacattctggaatgatgccccctatcccgccagcccagaacttctatgaaaacttctaccagcagcaggagggcatggagatggagcccggactcctgggggatgcagaggactacgggcactacgaagagctgccaggggagcctggggagcacctcttccctgagcaccctctggagcccgacagcttctctgagggagggcccccaggccggccgaagccaggcgccggtgtccctgacttcctgccctcagcccagagggccctgtacctgaggatccagcagaagcagcaggaggaggaggagagagcgaggaggctggctgagagcagcaagcaggaccgggagaatgaggaaggtgacaccggaaactggtactcaagtgatgaggatgagggtggaagcagtgtcacctccatcctgaagaccttgaggcagcagacgtccagccgacccccggcttcagttggggagctgagcagcagtgggctgggggacccccgcctccagaagggacaccccacaggaagccggctggctgaccctcgcctcagccgggaccccagactcacccgccatgtggaggcttctggcgggtctggcccaggtgattcgggaccctccgatcctcggctggctcgcgccctgcccacctccaagcccgaaggcagccttcattccagccctgtgggccccagcagttccaaggggtctgggccgcccccaacggaggaggaggaaggggagcgggccctgcgggagaaggccgtgaacattcccctggacccactccccgggcaccctctgcgggacccacggtcacagctgcagcagttcagccacatcaagaaggacgtgaccctgagcaagcccagcttcgcccgcaccgtgctctggaatcccgaggacctgatccccctacccatccccaagcaggacgcagtgccccccgtgcccgcggccctgcaatccatgcccaccctggacccccggctgcaccgcgctgccacggcagggccccccaacgcccggcagcgcccgggcgcctccacggattccagcacacagggcgccaacctccccgactttgaacttctgtctcgcatcctcaagacagtcaatgccaccggctcctcggccgcccccggttccagcgacaaacccagtgacccccgggtgcggaaggcccccaccgaccctcggctgcagaaacccacagactctacggcctcctcccgggctgccaagcccggccctgctgaggcgccctctcccaccgccagcccgagtggggatgcctccccaccagccaccgctccctacgacccccgcgtgctggcggccggtggactgggccagggcggagggggcgggcagagcagtgtgctgagcggtatcagcctctacgacccgaggactcccaacgcggggggcaaagccacagagccggctgctgacacgggtgcccagcccaagggtgctgagggcaatggcaagagctcggcctccaaggctaaggagcccccgttcgtccgcaagtctgccctggaacagccagagacagggaaggccggtgctgatgggggcacccccacggacagatacaacagctacaaccggccccggcccaaggctgctgcagcccccgctgccaccaccgccaccccaccccccgagggtgccccaccccagcccggggtgcacaacctgcccgtgcccaccctcttcgggacggtgaagcagacacccaagacgggctcaggaagcccatttgctgggaacagtccggcccgcgagggtgagcaggatgcggcatccctgaaggatgtttttaaaggcttcgaccccacggcctcccccttttgccagtagtgtccagccagagctgcggctccagccacccttcctagggtggcattcagggcagcacccagggtagggaacttgggggcaaggggaggcaggctgggtgttccttttttcttttctttttcttttgctttccgtctcttttatttttttttaaagtagtactttctttgagatttgtaaattgtatataaccatcttaagttctggtcagtgtggcgggctcaggggctcctgctgagcaaaccgactcatgcccgcaaacctgtgaactttcgccagtgcctggcctcagactctgtgggctctgcgtggccgggccttgctggaggcccagtgggttttctgggcaaagcatggccccttttccccaggacaaagggaacagttggtgtctgggaaggtattgaacgctcctcaccctgtgcccgaagagacccggaaccaagaccatggcagggcctgcgtggaagcaggtccaggcgtttctagaaccctagggtgcaccatcactgtcttttcagtgcaggctgtaacaacccactcaggagacagtgagagtgaaaaggtattaaggaaaaagcccccagcggcactatgggggctccctggcgcatgcctgctcctgtccctggattaccacacgtgccctccctgccaccctccgtctagagcaagcggatgccccccagcctgcagcagaagcctccacagtgagaactggacccaaaggtagtgggggccggtgtggggcagagtcctgaagagccacctctaggaggcagcccctaggagcacgcacgttctgtcagtattaccccacctgtcctatcaggtgggccacaccctgcttgcccacaccagggtctgtcctggtcctcaagccacgcacccgctatgcctgcactgcagcccagccccggacagctccaggatccgtgcagtggctgcgccgccaggccccaacaatggggaccctggggtggctcctggccaagtgttctctgttttcctcgcacctccttacactgtgtgacctgcagggcatgaggtattgatgtgttcgggtttcctttcccaagccagcagatgcaggtgttccaaggtgtgttgctctgtgggatttgtggacacttaagaaacggactgagtgggaaccctgcagccaggggatggggagcctctgctccccccatgctcccaccctggctgagggccagcctcatctgcagagccctggaggaggcccacctatggacacagcccgagagatgggcgcaaggggtgctgggggaggcctgctatcctgcctctgggccacttgaggggcctcaggaagtgtgtgcttgtggctgcatctgcccgtctccctggcccaccatgtggctgcaggccaagctcttcattgctgaccatgaagagacctagttacctgccaagggattccccttccctcctcctcagggtggggtgaacaaggctcctatcccaccccaccccaaaaagagaaaaatgaaaaactcatagtttggagccaggaggcagggtgtcctacagggctgcacagccctgaggggtcagtgctgggatctggttggttggtttgtctttttgtctttttttttttttttttttttacacaatcattaatgagatttgtcttcagccaccagtgttggccttgaagcagagggcacagcccttggtgtttgtaaaataagtatgaatacacagtgtggcagtgttgtggtttttgttgttgtttttcctctccttttgagaattttcttttgtaaaagaaaaatattttttaaaccgaaatctgtggatgaaatagaagctggagccctcctcttggaatattcagcctaagaacctcataggactatgaattcacccgaaattctcatttgccatcaggccgagcttttaaagaaaaattgttctctaaccaggattgtaacaaaagtgtaaatactgtttcagagttgagagttggtggtgcaaatatgtatataatgaactgtatttttacaatgatcgccgcatgactatttcacaccctttttatactccatatctgtcttccagaaacgtcacctgcctttctcctgtggtctcttaatccagtaattgtattactgccattaaaggatgcagttattttaaaaa

SEQ ID NO: 201326 - DNA, 4895 bp, Homo sapiens
  Payload ID: 19734
  Gene Name: zinc finger CCCH-type containing 4
  ENST ID: ENST00000601973
  CDS Start-End: 1-2731
gaaccagtaccgccgctccaaggacagccgaggccgagggctaagtcgaggccgtggcaggggctcccgaggtcgagggaaaggaatgggtcggggccgaggccgaggtggcagccgaggagggatgaacaagggcggaatgaacgatgacgaagacttctatgacgaggacatgggcgacggtggtggtggaagctaccggagtcgtgaccatgacaagccccaccagcagtcggacaagaaaggcaaagtcatttgcaagtacttcgtggaagggcgctgcacctggggagaccactgtaattttagccatgacatcgaactcccaaagaagcgagaactgtgcaagttttacatcactggattttgcgccagagctgagaactgcccttatatgcacggtgatttcccgtgtaagctgtaccacaccactgggaactgcatcaatggtgacgactgcatgttttcccacgaccctctgaccgaagagacgagggagctcttggataagatgttggccgatgatgcagaagcaggtgccgaggatgagaaggaggtggaggaactgaagaagcagggcatcaaccccctgcccaaaccgccccctggtgtgggcctcctgcccacccctcctcggccccctggcccgcaggctccaacctctcccaacggcaggcccatgcagggtggccccccgcccccgccccctccccctcccccaccgcccgggccccctcagatgcccatgccggtgcatgagccactgtccccgcagcagctgcagcagcaggacatgtacaacaagaagatcccctccttgtttgagatcgtggtgcggcccacgggacagctggctgagaagctgggtgtgaggttccctggacccggtggacccccagggccaatgggccctgggcccaacatgggacccccagggccaatgggcggtccaatgcatcctgacatgcaccccgacatgcacccggacatgcaccctgacatgcacgcagacatgcacgcagacatgccgatgggccctggcatgaatcctggcccacccatgggccctggcggccctccaatgatgccctacggccctggagactccccacattctggaatgatgccccctatcccgccagcccagaacttctatgaaaacttctaccagcagcaggagggcatggagatggagcccggactcctgggggatgcaggtgacaccggaaactggtactcaagtgatgaggatgagggtggaagcagtgtcacctccatcctgaagaccttgaggcagcagacgtccagccgacccccggcttcagttggggagctgagcagcagtgggctgggggacccccgcctccagaagggacaccccacaggaagccggctggctgaccctcgcctcagccgggaccccagactcacccgccatgtggaggcttctggcgggtctggcccaggtgattcgggaccctccgatcctcggctggctcgcgccctgcccacctccaagcccgaaggcagccttcattccagccctgtgggccccagcagttccaaggggtctgggccgcccccaacggaggaggaggaaggggagcgggccctgcgggagaaggccgtgaacattcccctggacccactccccgggcaccctctgcgggacccacggtcacagctgcagcagttcagccacatcaagaaggacgtgaccctgagcaagcccagcttcgcccgcaccgtgctctggaatcccgaggacctgatccccctacccatccccaagcaggacgcagtgccccccgtgcccgcggccctgcaatccatgcccaccctggacccccggctgcaccgcgctgccacggcagggccccccaacgcccggcagcgcccgggcgcctccacggattccagcacacagggcgccaacctccccgactttgaacttctgtctcgcatcctcaagacagtcaatgccaccggctcctcggccgcccccggttccagcgacaaacccagtgacccccgggtgcggaaggcccccaccgaccctcggctgcagaaacccacagactctacggcctcctcccgggctgccaagcccggccctgctgaggcgccctctcccaccgccagcccgagtggggatgcctccccaccagccaccgctccctacgacccccgcgtgctggcggccggtggactgggccagggcggagggggcgggcagagcagtgtgctgagcggtatcagcctctacgacccgaggactcccaacgcggggggcaaagccacagagccggctgctgacacgggtgcccagcccaagggtgctgagggcaatggcaagagctcggcctccaaggctaaggagcccccgttcgtccgcaagtctgccctggaacagccagagacagggaaggccggtgctgatgggggcacccccacggacagatacaacagctacaaccggccccggcccaaggctgctgcagcccccgctgccaccaccgccaccccaccccccgagggtgccccaccccagcccggggtgcacaacctgcccgtgcccaccctcttcgggacggtgaagcagacacccaagacgggctcaggaagcccatttgctgggaacagtccggcccgcgagggtgagcaggatgcggcatccctgaaggatgtttttaaaggcttcgaccccacggcctcccccttttgccagtagtgtccagccagagctgcggctccagccacccttcctagggtggcattcagggcagcacccagggtagggaacttgggggcaaggggaggcaggctgggtgttccttttttcttttctttttcttttgctttccgtctcttttatttttttttaaagtagtactttctttgagatttgtaaattgtatataaccatcttaagttctggtcagtgtggcgggctcaggggctcctgctgagcaaaccgactcatgcccgcaaacctgtgaactttcgccagtgcctggcctcagactctgtgggctctgcgtggccgggccttgctggaggcccagtgggttttctgggcaaagcatggccccttttccccaggacaaagggaacagttggtgtctgggaaggtattgaacgctcctcaccctgtgcccgaagagacccggaaccaagaccatggcagggcctgcgtggaagcaggtccaggcgtttctagaaccctagggtgcaccatcactgtcttttcagtgcaggctgtaacaacccactcaggagacagtgagagtgaaaaggtattaaggaaaaagcccccagcggcactatgggggctccctggcgcatgcctgctcctgtccctggattaccacacgtgccctccctgccaccctccgtctagagcaagcggatgccccccagcctgcagcagaagcctccacagtgagaactggacccaaaggtagtgggggccggtgtggggcagagtcctgaagagccacctctaggaggcagcccctaggagcacgcacgttctgtcagtattaccccacctgtcctatcaggtgggccacaccctgcttgcccacaccagggtctgtcctggtcctcaagccacgcacccgctatgcctgcactgcagcccagccccggacagctccaggatccgtgcagtggctgcgccgccaggccccaacaatggggaccctggggtggctcctggccaagtgttctctgttttcctcgcacctccttacactgtgtgacctgcagggcatgaggtattgatgtgttcgggtttcctttcccaagccagcagatgcaggtgttccaaggtgtgttgctctgtgggatttgtggacacttaagaaacggactgagtgggaaccctgcagccaggggatggggagcctctgctccccccatgctcccaccctggctgagggccagcctcatctgcagagccctggaggaggcccacctatggacacagcccgagagatgggcgcaaggggtgctgggggaggcctgctatcctgcctctgggccacttgaggggcctcaggaagtgtgtgcttgtggctgcatctgcccgtctccctggcccaccatgtggctgcaggccaagctcttcattgctgaccatgaagagacctagttacctgccaagggattccccttccctcctcctcagggtggggtgaacaaggctcctatcccaccccaccccaaaaagagaaaaatgaaaaactcatagtttggagccaggaggcagggtgtcctacagggctgcacagccctgaggggtcagtgctgggatctggttggttggtttgtctttttgtctttttttttttttttttttttacacaatcattaatgagatttgtcttcagccaccagtgttggccttgaagcagagggcacagcccttggtgtttgtaaaataagtatgaatacacagtgtggcagtgttgtggtttttgttgttgtttttcctctccttttgagaattttcttttgtaaaagaaaaatattttttaaaccgaaatctgtggatgaaatagaagctggagccctcctcttggaatattcagcctaagaacctcataggactatgaattcacccgaaattctcatttgccatcaggccgagcttttaaagaaaaattgttctctaaccaggattgtaacaaaagtgtaaatactgtttcagagttgagagttggtggtgcaaatatgtatataatgaactgtatttttacaatgatcgccgcatgactatttcacaccctttttatactccatatctgtcttccagaaacgtcacctgcctttctcctgtggtctcttaatccagtaattgtattactgccattaaaggatgcagttatttt

SEQ ID NO: 201327 - DNA, 11539 bp, Homo sapiens
  Payload ID: 19735
  Gene Name: zinc finger CCCH-type containing 6
  Uniprot ID: P61129
  ENST ID: ENST00000343936
  CDS Start-End: 395-3964
ttttctcgagccgcctgtttcgggtgccgccatgttggtgaggagaaatcaccgttacggccactgtccaaatccccgcgtcgctgcacgccgcccgcccgctcccacgccacagccaccggcggcgaatagagactagagcggcagcgccggcagcgcggggccgttgcccagtgtttgcagttagagccccatctctctggcgtggttgttaatagactggaaagtctgtgtctgtgtcgctcactagtaaccgtgagtttttaccacttcgtcacctgtcggcggcggccgggagcaggttcccgcaggcggcgcggggggtcttccccgcgccccgccgccgccggcctcgcagacctgccctccagccccgccccgttcttgaccaaacatgacagactctgaacatgcagggcacgacagagaagatggcgaattagaagatggtgaaatagacgatgcaggatttgaagaaatacaagaaaaagaagcaaaagagaatgaaaagcagaaaagtgagaaagcctacagaaaatcaagaaaaaaacataagaaagagagagagaagaaaaaatccaaaaggagaaaacgtgagaaacataagcataattccccatctagtgatgatagttcggactacagccttgattcagatgttgaacatacagaaagttcccataaaaaaagaactggtttctacagggattatgacattccatttactcagcgtggacatatatcaggaagctacataacatcaaagaagggtcaacataacaaaaaatttaaaagtaaagaatatgatgagtacagcacctacagtgatgacaacttcggtaactacagtgatgacaactttggtaactacggtcaggaaacagaggaagattttgccaatcagctgaaacaatacaggcaagctaaagaaacctcaaatattgctttagggtcatcattttctaaagaatcaggaaaaaaacagagaatgaaaggagttcagcaaggtattgaacagagagttaaaagttttaatgttggtcgtggacgtggcttgccgaagaaaatcaaacgaaaagaacgtgggggaagaaccaataaagggcctaatgtgttttcagtatcggatgactttcaagagtataataaaccagggaaaaaatggaaggttatgactcaggaatttattaatcagcacacagtggaacacaaaggaaaacaaatctgtaaatacttcctggaagggaggtgtattaagggagatcagtgtaaatttgatcatgatgcagagttggagaaaagaaaagagatctgcaaattttatttacaaggatattgtaccaaaggagagaactgcatttatatgcataatgaatttccatgcaagttctatcatagtggagcaaaatgttaccagggagacaactgtaaattttcccatgatgatctaactaaagaaacaaagaaacttttggacaaagtgttgaatactgatgaagaactcataaatgaagatgaaagagaattagaggaacttagaaagcgtggcataactcctcttcccaaaccacctccaggggttgggcttctgccaacccctccagagcattttcccttttctgatcctgaagacgattttcagacagatttctctgatgattttaggaaaattccatctctttttgaaatagttgtaaaacctactgtggatttagcgcataaaattgggaggaagccaccagcattttataccagtgcctcaccaccaggaccacaatttcagggaagcagtccacaccctcaacatatctatagttctgggtcaagtccaggtcctggacctaacatgtctcagggacacagtagtcctgtgatgcacccaggctcccctggacatcacccatgtgcaggacctcctggtctaccagtgccacagagcccacctttaccacctggtccacctgaaattgtaggtcctcaaaatcaagctggagtgcttgttcaaccagacacatctttgacaccaccaagtatgggtggggcttaccactccccaggctttccaggacatgtgatgaaagtacccagagagaatcactgttctccaggttcatcataccagcaaagtcctggtgaaatgcagctcaacaccaattatgagtccctgcaaaacccagctgagttttacgataattactatgcacagcattctatacataattttcagccacccaataactctggtgatgggatgtggcatggtgaatttgcccagcagcagcctcctgttgttcaagactcacctaaccatgggagtgggtctgatggcagcagcactaggacaggccatggccctctgcctgtaccaggcctcctccctgcagtgcaaagagctctttttgtaagacttactcagagataccaagaagatgaagaacaaaccagcacccaacctcatagggcaccaagcaaggaagaagatgatacagttaactggtattccagtagtgaagaggaagaaggaagcagtgtcaaatcaatactgaaaacattacagaaacaaacagaaactttaaggaatcagcaacaaccttccacagaactcagcactcctactgatccaagacttgctaaagagaaaagtaaaggaaaccaagtggttgaccctaggcttaggactatcccaaggcaagacattagaaagccttctgagtctgccccactggatcttagacttgcgtgggatcccaggaaattgagagggaatggaagtggtcacataggctcttctgttggtggagcaaagtttgatttgcatcatgcaaatgctggcactaatgtcaaacacaaaagaggcgatgatgatgatgaagatacagaaagagaactgagagaaaaagctttcttaatacctttggatgcctcacctggcataatgctccaggatccaaggtcacaattgagacagttcagtcacattaaaatggacattactctaaccaaacccaactttgcaaaacacatcgtgtgggctcccgaagacttacttccagtacctttacctaaacctgatccagtgtcttcaatcaatttacctctgcccccacttatagctgaccagaggctaaatagattatggaatacaaaaagtgatcttcatcaaaatacagtgtccattgatccaaaattagcagccaaagccaaaattaacacaacaaacagagaaggctacctagaacaatttggagactcacacggttcaggagctaaattaggagatcctagactacaaaaaaattttgatcctaggcttcacagactgcccaatacagagtctcatcaagtggttatgaaggattcacatgcatcaaagggtgcccctcacttacccagatcaaaccctggttcatcacagccctcaggggcaggaactagcaattctggttccggggctctgcctccatatgcccctaaactctcttcctcagctggccttccactgggaacttccacttcagttcttagtggtattagtttgtatgaccctagggatcacggttcatcatccacatcagagctagcaacagcttcttcaggagaaaactcaaagaaccagaaaaaaagtggtggcttaaaaagtagtgacaaaactgaaccttctcctggagaagccatccttccacaaaaacccagtccaaacgtgggagtcactcttgaggggccagctgacccacaggcggacgttcccaggagttctggtaaggttcaggtcccagcagtgcacagccttcctgttcaggcattaacaggcttaattaggccacagtacagtgatccaaggcaggcaaggcagccaggacaggggagcccgaccccagataatgatcccggtagagaaacagatgacaaatctctgaaagaggtttttaaaacttttgatccaactgcttcaccattttgttagctattgtgtaactgagcaattcttttcactcttgtgactatctcagtcctctgctgttttgtaactggtttacctctatagtttatttatttttaaattataaacacttttcagctgctagtatcagaaccacatgaagttatagcctctaaagcctgtggtattttatataatatttttataactttaagagactgtagtaattgacctaaaaacttatgttagcttcagtaaaagtacttttattgtaaataaacaatcatgaactcaacactctgcctgaatatatgccagttgtctttcataatcaatgtttagataaatgattgccactttttatatggttgtttagtttcaagcaatatgatgtacattacttttgagaaacagtattttgactaggacctctcttatttgtcagcacagaactgattaatatgtaatgctacctgctaattaaaatgtaaaatcaagtaaagaaaacattttaaaattacaattagcagagcagttcatgtttaagggcatcacttttattagtattggcaatattatttgtgtaaatgaagcatttgaatgtcatatctttttaaagtattttattgtatactgtatcatagaagttggaggtatataaatagaacattttgctaaagtgaaaaatttccaagttctctagcataactttttacatttaatttttcatatgaaatagcaattagttactgctgtgttacattgtgatgtttatgtatgtcaatgtttttgtctttaacagcataatttatattgctttttcaaatgatgtagctgcattaattgtgttcatcatgactttggcgatttttaacaaaatttttaaagacccagtgagagtctgtagtgattattacacggataatgttttaaatgtctaggttctgtatttttttcttaaatagcaagaaaatacagattgctagtatagtcaacagtatttggctatcaataaagaatctctttaagatctcacccggctggcattctgtaacagaggggattacctggtgttttaagtatttaatgtcctcatagtgtggaaatcccctaaattgattagaaattgtattttatgaaaaataacttgtattcattcttgtgtatttattacaatatataaataatggcaactctttgttttatacatatataatttataactgaatctaagtattagactgctactcatattttgaactgcaggtgtaggacagtgtttgctggtaacaactccaatgtgtattaataacttgaaaaggagcatttcactataaaagataatgaagtaggtaatgaaatcagtccttgaatgaaagcagtgcccttgagaagggatttttttttaaatatacagtaaaatatttcgtgggaacctaacactcacatagcatatggtttattaataatgcatatcctttctaatcacttcttcaattctttttgctgcagttctgtgctaaaatggggttgtggttaagtgaacgagaactctgcctacctaagaagttcattgtgttctaagtggaaggagagttactgaagggaatgtgaatttttaccgtttgtacttaagatacatttgttgtctaaaatggctctggataacatttttgggttaaaaaatgtaatttaaagccaccatagaaagtattttctgatttactgtccaaatgaattttgttgttaattgagaagtcaataaaatggattaaactgacagaaaaaaaacatatatatatatcccaaggtgtaatttactcttttgtcaggataaaatcagaaaaatggctgattttagtaaatgaaatttttagcaaatctttcattcatgtagtttataattattgtgtcaagcagtgctgtttacattttaagcatcatacaaaaaagataatttggcttgctaaacatcaaaatagaatccaaactcttaaccgaatatcttttttacaactaaaagagatattccaagatttattaaagagtcaggtttaaaagttattaatgcaaattatgtaatgttcatttattcagtattcttgagtccctgttacctcaattggtgttctagaggctattttacaagaaagtttgaacttagtttcaaatttgacaatatattttatatgaaaatgtttatgtttaaaataacttatttattatgcagcatttttattgtgataacgttagtttatgggatattctgtcatatcctgtaaacatagtttatttttcttcttttttcccattttctcatacaaattgaataagtagccattttcccccaatgaatacctcttcttttaggtcaattggtgtttttagaatccatgtaatttgatttgcactgttagattgaaaagtaagttacgttcctgttcttagaagccacacatttagagataacagaaataacttgagtcttaagagtatggataggctcatccaatgagatgtaacttagctattcatactgtttgtgatggaaattctatacctgtttactgtgatgatgaatacagtggatatagcagggggttgaaatggaacacacagaagatcatgacaattgagattcagcaactgctgtctcatatcttggttaagacctcattgtgaaccttgaacacaaatcagatgttggagtgatttcaaactctatttcaacaattgggtctgtttctatatggaccctctatttcccagctgaatgtttcaaacccccaaattaggctgcaaccgaaagagcctaattgtgaaatgatgtgcgcttatgtttctgtttatcctttagccatggaactttaaagagtagtgttcctcctacttactttaagctggaagaagagttgagtagtaaatcctgtgtgaacttttagctcagctactctgctgaattaattagaggtaggaaggacttacaagggctggaagtttaaagagaataaattcatattttttgttctgaattgatttctgtgtaatttatatcagtatctagttgcttatctgtgaaattgggttaatttttattgatcacatttgatgtaaagaatgaattatttttgtaaagtatttgtaaatataaaattgctttataacttgaatgaacataatcattatgctcccattagggtgcattaagttgtacaaattccaaaataacatggtatggtttgtatggtttagcaattttacgaagcttcagatgacatgcactggtgacacaacagtagaatttcctgagaggttgagtgaatattaacccatcaagttagcaatttccttaactacatgagtatcaggaagacaggacttccctgccttagagctatatagacttgggcctcttcaagatctgacttctctgcacattctatacaggttggatattgatggagggttaaaaatgctatgacagttcatggtgcatggtgtgtttgtttaaatcatagcatgtttaggcaaagtggccagctcattcaatataagagccaccagctcttagaaacaacagatatattcacacccagtctgtaatatgtatttcttcaggcatgtcacactgcggtcttcctgaaagactacttacttcataaaggtattatgtttctttaattaatggccactagaagttaggaagctcctagggaccaggatatgagatcttaaagaggctgtcagaatctcttcatttgcatgacatagaatctgtggtggagatgttttccctgatgtttttggagggttggactgtgttgaaggctgtaccttggtgggggtggtctgcagtcatgcagtccactgatagggtcccccaccccgcaagcttcaataattgagctttctgttaatttcttgaattatcttttcaaaaatggtttggcagcacttgatgacattatgttcaaaattaagtccagtaaaatatataagcatttgtaaactataattatagtttaaataagacttagtttaggaaatccaagttttgacatatataaccaaacggcctaagagttcaaagctattttcttaggtgttacaccttagcatttacataatgccttctccccaagcagtttcatgtggtttgcagaaagttttggcagctaccagtcactatattgctggagttttgtgtttgagtatgtcatttatgtcatttatcagcagtatctgccagttgtgacaaagccctccctattatcctgcctttcctggaaaggatacagacccaagaaaagttaacatctacatagtacttagaatttctaattttaaaataagaaacaaaaagcacatttaaaataatattttatgcttttggagacaggacccacatgtatctccttatttttatacttgccatagaaacaagcctagttgtaggcctacagtgggtgctttgttaactgcttgttgatggcttcctgacatccatccaaatgtcacttttacagatgctgtcacccgttaaacaggtgtggcagaagtattccatgactgcattaggaagaatgcaccttatgggttatatctcttttggtagacagcccacctgctcttttttgtccccaccctcagcccaagcaatgtgaagacagattatggcaacttaggagctccatgtttccataataattcataactttaagagtcctccagacttacaagattacttcatggtgaaagtttggattgatcaataatttattcctataaaggtctgcaggattttttctgtaaccagaaaagtaactgcatagccattctttttttttttttttaatttgttgttgtttttgtttgagacagagtcttcattcttgttgcccaggctggagtgtaatggtgcaatctcggatcactgcaacctctgcctcccaggttcaagtgattctcctgcctcagactcccaagtagctgggcttacaggcacgtgccaccacacccagctaatttattgtatttactagagacggggtttcaccatgttgatcaggctgatcttgaactcctgaccccaggtgatccacccgcctcaacctccaaaagtgttggggttacaggcgtgagccaccgtgctcagcctgttttttatttatttttttgagacagtctcactttgtcgctcaggctgaagtgcagtggcgctatcagctcacagcagcctccgcctcccaggttcaagcaattctcccaccttagcttcctgagtagctggaactacaggtgtgtgccaccacacccagctaatttttgtatttttttggtagagacagggtttgaccatgttggccaagctgatcttgaactcctggcctcaagtgatccaccagtcttggcctctcaaagtgctgggatcacaggcatgagccaccacgcctggcccagtctttttttttaattattatttatttttatttatttattttttgagacggagtcttgctctgttgcccaggctggagtgtagtggcatgatcttggctcactgcaacctctgcctctgggttcaagcaattctcctgcctcagccttctgagtagctgggattataggcatgcgccaccacaaccagctaattttttatatttttggtagagacacagtttcatcatgttggcccggctggtctcaaactccttacctcaagtgatctgcccgcctcagcctcccaaagtgctgggattacaggcgtgagccactgtgcctggccagtcttttattttaaaataaatacttagtcctaacctagtgaattatcaatagcatttaaaattccttctatcctgataccatgaacagtaattttcccttttaagttatgatttgactctaattttgggtcttgtatctggtctttaaacacctttcgttaccctttggaatagaacaatcatgctactgttagcaaaattattgtaggcataaggaagagctgtgagttcaaagaagattgtgagttcttggaatagtattttacagcgttgtttattcttgaccttcttgttttttaagcttagagtttataagaaaaaagtgaatatatagctaattatagcattttagaaaaaattagctctgcagatagtcaggccccatacttcttggctcattactgattttaataccttcatgagagtattaaggttgaaaggaatggtgaaatttgcattatcagaggtctgatatgtaatttattgtaaagaaattaaatatatagaggctcaattaaaaaataaccatattctcaaacctccattaccactaatatcttggggttgtcaatgatagactatatatatatgtatgtatatgtgtgtatatatatatatatatatatatatatatatatatatatatatatatatatatatataattttttttttttgagacggagtcttgctctgtcacccaggctggagtacagctcacagcaacctctgcctcccaggttcaagcaattctgcctcagcctcccgagtagctggaattacagacgcctgccaccacacccagctaatttttcgtattttttagtagagatggggtttcaccatgttggccaggctgatttcgaactcctgacctcaaatgatccaccgacctgagcctcccaaagtgctggccttacaggcatgagccaccacacctggcctagactataccttttatacactttttaaatagagaaagtgaaaaatgataaactaaccattataaaatagaggtttgagtccacctgtattttacagaaatttgccctcaaatgtttgagagggaagtcacatatgatagaaaaatatcttttcaagggtagaatgatatttccttataaaagtgacaatcaaaaaagactcatttgtatacttgccaaagtttaaaagttttttacattccttaccctaaacccactgccccatccacccagaattcagaaagggtttggcatagatccagggctccagggcccaggtcattttgttattagtctagggcttttgtcctccacagtctaggcagggcatctttgtatgtgtgttgctggttggggccagggacgggggcaggcgggagttgtccaggtttaagattgtttgttttccatcagatccacaagcaatatctgtgggctgaaatccaggttatacctattcactatgactttttttttttttaactttctactgtaattatttcagttccccgaagttgtatctcaaatgttggggaaatgctgccttgactattttactttggaaggttttactagatatcagtttagtagattaatgacgttgttaatctgtctgctcaaaagacaccagcaagggggtatactttgctgaactgataaattattctattaaggactaacccagtacttggcaaaattaggaataacttttcccctccttctttactaataaattttccaagttgcatactgttgttgcaagtttctgtaatttttttctgtatacctttctattgtctgaatttaaataaaaatgtttctaataatatc

SEQ ID NO: 201328 - DNA, 11542 bp, Homo sapiens
  Payload ID: 19735
  Gene Name: zinc finger CCCH-type containing 6
  Uniprot ID: P61129
  ENST ID: ENST00000409871
  CDS Start-End: 402-3971
ggcgccattttctcgagccgcctgtttcgggtgccgccatgttggtgaggagaaatcaccgttacggccactgtccaaatccccgcgtcgctgcacgccgcccgcccgctcccacgccacagccaccggcggcgaatagagactagagcggcagcgccggcagcgcggggccgttgcccagtgtttgcagttagagccccatctctctggcgtggttgttaatagactggaaagtctgtgtctgtgtcgctcactagtaaccgtgagtttttaccacttcgtcacctgtcggcggcggccgggagcaggttcccgcaggcggcgcggggggtcttccccgcgccccgccgccgccggcctcgcagacctgccctccagccccgccccgttcttgaccaaacatgacagactctgaacatgcagggcacgacagagaagatggcgaattagaagatggtgaaatagacgatgcaggatttgaagaaatacaagaaaaagaagcaaaagagaatgaaaagcagaaaagtgagaaagcctacagaaaatcaagaaaaaaacataagaaagagagagagaagaaaaaatccaaaaggagaaaacgtgagaaacataagcataattccccatctagtgatgatagttcggactacagccttgattcagatgttgaacatacagaaagttcccataaaaaaagaactggtttctacagggattatgacattccatttactcagcgtggacatatatcaggaagctacataacatcaaagaagggtcaacataacaaaaaatttaaaagtaaagaatatgatgagtacagcacctacagtgatgacaacttcggtaactacagtgatgacaactttggtaactacggtcaggaaacagaggaagattttgccaatcagctgaaacaatacaggcaagctaaagaaacctcaaatattgctttagggtcatcattttctaaagaatcaggaaaaaaacagagaatgaaaggagttcagcaaggtattgaacagagagttaaaagttttaatgttggtcgtggacgtggcttgccgaagaaaatcaaacgaaaagaacgtgggggaagaaccaataaagggcctaatgtgttttcagtatcggatgactttcaagagtataataaaccagggaaaaaatggaaggttatgactcaggaatttattaatcagcacacagtggaacacaaaggaaaacaaatctgtaaatacttcctggaagggaggtgtattaagggagatcagtgtaaatttgatcatgatgcagagttggagaaaagaaaagagatctgcaaattttatttacaaggatattgtaccaaaggagagaactgcatttatatgcataatgaatttccatgcaagttctatcatagtggagcaaaatgttaccagggagacaactgtaaattttcccatgatgatctaactaaagaaacaaagaaacttttggacaaagtgttgaatactgatgaagaactcataaatgaagatgaaagagaattagaggaacttagaaagcgtggcataactcctcttcccaaaccacctccaggggttgggcttctgccaacccctccagagcattttcccttttctgatcctgaagacgattttcagacagatttctctgatgattttaggaaaattccatctctttttgaaatagttgtaaaacctactgtggatttagcgcataaaattgggaggaagccaccagcattttataccagtgcctcaccaccaggaccacaatttcagggaagcagtccacaccctcaacatatctatagttctgggtcaagtccaggtcctggacctaacatgtctcagggacacagtagtcctgtgatgcacccaggctcccctggacatcacccatgtgcaggacctcctggtctaccagtgccacagagcccacctttaccacctggtccacctgaaattgtaggtcctcaaaatcaagctggagtgcttgttcaaccagacacatctttgacaccaccaagtatgggtggggcttaccactccccaggctttccaggacatgtgatgaaagtacccagagagaatcactgttctccaggttcatcataccagcaaagtcctggtgaaatgcagctcaacaccaattatgagtccctgcaaaacccagctgagttttacgataattactatgcacagcattctatacataattttcagccacccaataactctggtgatgggatgtggcatggtgaatttgcccagcagcagcctcctgttgttcaagactcacctaaccatgggagtgggtctgatggcagcagcactaggacaggccatggccctctgcctgtaccaggcctcctccctgcagtgcaaagagctctttttgtaagacttactcagagataccaagaagatgaagaacaaaccagcacccaacctcatagggcaccaagcaaggaagaagatgatacagttaactggtattccagtagtgaagaggaagaaggaagcagtgtcaaatcaatactgaaaacattacagaaacaaacagaaactttaaggaatcagcaacaaccttccacagaactcagcactcctactgatccaagacttgctaaagagaaaagtaaaggaaaccaagtggttgaccctaggcttaggactatcccaaggcaagacattagaaagccttctgagtctgccccactggatcttagacttgcgtgggatcccaggaaattgagagggaatggaagtggtcacataggctcttctgttggtggagcaaagtttgatttgcatcatgcaaatgctggcactaatgtcaaacacaaaagaggcgatgatgatgatgaagatacagaaagagaactgagagaaaaagctttcttaatacctttggatgcctcacctggcataatgctccaggatccaaggtcacaattgagacagttcagtcacattaaaatggacattactctaaccaaacccaactttgcaaaacacatcgtgtgggctcccgaagacttacttccagtacctttacctaaacctgatccagtgtcttcaatcaatttacctctgcccccacttatagctgaccagaggctaaatagattatggaatacaaaaagtgatcttcatcaaaatacagtgtccattgatccaaaattagcagccaaagccaaaattaacacaacaaacagagaaggctacctagaacaatttggagactcacacggttcaggagctaaattaggagatcctagactacaaaaaaattttgatcctaggcttcacagactgcccaatacagagtctcatcaagtggttatgaaggattcacatgcatcaaagggtgcccctcacttacccagatcaaaccctggttcatcacagccctcaggggcaggaactagcaattctggttccggggctctgcctccatatgcccctaaactctcttcctcagctggccttccactgggaacttccacttcagttcttagtggtattagtttgtatgaccctagggatcacggttcatcatccacatcagagctagcaacagcttcttcaggagaaaactcaaagaaccagaaaaaaagtggtggcttaaaaagtagtgacaaaactgaaccttctcctggagaagccatccttccacaaaaacccagtccaaacgtgggagtcactcttgaggggccagctgacccacaggcggacgttcccaggagttctggtaaggttcaggtcccagcagtgcacagccttcctgttcaggcattaacaggcttaattaggccacagtacagtgatccaaggcaggcaaggcagccaggacaggggagcccgaccccagataatgatcccggtagagaaacagatgacaaatctctgaaagaggtttttaaaacttttgatccaactgcttcaccattttgttagctattgtgtaactgagcaattcttttcactcttgtgactatctcagtcctctgctgttttgtaactggtttacctctatagtttatttatttttaaattataaacacttttcagctgctagtatcagaaccacatgaagttatagcctctaaagcctgtggtattttatataatatttttataactttaagagactgtagtaattgacctaaaaacttatgttagcttcagtaaaagtacttttattgtaaataaacaatcatgaactcaacactctgcctgaatatatgccagttgtctttcataatcaatgtttagataaatgattgccactttttatatggttgtttagtttcaagcaatatgatgtacattacttttgagaaacagtattttgactaggacctctcttatttgtcagcacagaactgattaatatgtaatgctacctgctaattaaaatgtaaaatcaagtaaagaaaacattttaaaattacaattagcagagcagttcatgtttaagggcatcacttttattagtattggcaatattatttgtgtaaatgaagcatttgaatgtcatatctttttaaagtattttattgtatactgtatcatagaagttggaggtatataaatagaacattttgctaaagtgaaaaatttccaagttctctagcataactttttacatttaatttttcatatgaaatagcaattagttactgctgtgttacattgtgatgtttatgtatgtcaatgtttttgtctttaacagcataatttatattgctttttcaaatgatgtagctgcattaattgtgttcatcatgactttggcgatttttaacaaaatttttaaagacccagtgagagtctgtagtgattattacacggataatgttttaaatgtctaggttctgtatttttttcttaaatagcaagaaaatacagattgctagtatagtcaacagtatttggctatcaataaagaatctctttaagatctcacccggctggcattctgtaacagaggggattacctggtgttttaagtatttaatgtcctcatagtgtggaaatcccctaaattgattagaaattgtattttatgaaaaataacttgtattcattcttgtgtatttattacaatatataaataatggcaactctttgttttatacatatataatttataactgaatctaagtattagactgctactcatattttgaactgcaggtgtaggacagtgtttgctggtaacaactccaatgtgtattaataacttgaaaaggagcatttcactataaaagataatgaagtaggtaatgaaatcagtccttgaatgaaagcagtgcccttgagaagggatttttttttaaatatacagtaaaatatttcgtgggaacctaacactcacatagcatatggtttattaataatgcatatcctttctaatcacttcttcaattctttttgctgcagttctgtgctaaaatggggttgtggttaagtgaacgagaactctgcctacctaagaagttcattgtgttctaagtggaaggagagttactgaagggaatgtgaatttttaccgtttgtacttaagatacatttgttgtctaaaatggctctggataacatttttgggttaaaaaatgtaatttaaagccaccatagaaagtattttctgatttactgtccaaatgaattttgttgttaattgagaagtcaataaaatggattaaactgacagaaaaaaaacatatatatatatcccaaggtgtaatttactcttttgtcaggataaaatcagaaaaatggctgattttagtaaatgaaatttttagcaaatctttcattcatgtagtttataattattgtgtcaagcagtgctgtttacattttaagcatcatacaaaaaagataatttggcttgctaaacatcaaaatagaatccaaactcttaaccgaatatcttttttacaactaaaagagatattccaagatttattaaagagtcaggtttaaaagttattaatgcaaattatgtaatgttcatttattcagtattcttgagtccctgttacctcaattggtgttctagaggctattttacaagaaagtttgaacttagtttcaaatttgacaatatattttatatgaaaatgtttatgtttaaaataacttatttattatgcagcatttttattgtgataacgttagtttatgggatattctgtcatatcctgtaaacatagtttatttttcttcttttttcccattttctcatacaaattgaataagtagccattttcccccaatgaatacctcttcttttaggtcaattggtgtttttagaatccatgtaatttgatttgcactgttagattgaaaagtaagttacgttcctgttcttagaagccacacatttagagataacagaaataacttgagtcttaagagtatggataggctcatccaatgagatgtaacttagctattcatactgtttgtgatggaaattctatacctgtttactgtgatgatgaatacagtggatatagcagggggttgaaatggaacacacagaagatcatgacaattgagattcagcaactgctgtctcatatcttggttaagacctcattgtgaaccttgaacacaaatcagatgttggagtgatttcaaactctatttcaacaattgggtctgtttctatatggaccctctatttcccagctgaatgtttcaaacccccaaattaggctgcaaccgaaagagcctaattgtgaaatgatgtgcgcttatgtttctgtttatcctttagccatggaactttaaagagtagtgttcctcctacttactttaagctggaagaagagttgagtagtaaatcctgtgtgaacttttagctcagctactctgctgaattaattagaggtaggaaggacttacaagggctggaagtttaaagagaataaattcatattttttgttctgaattgatttctgtgtaatttatatcagtatctagttgcttatctgtgaaattgggttaatttttattgatcacatttgatgtaaagaatgaattatttttgtaaagtatttgtaaatataaaattgctttataacttgaatgaacataatcattatgctcccattagggtgcattaagttgtacaaattccaaaataacatggtatggtttgtatggtttagcaattttacgaagcttcagatgacatgcactggtgacacaacagtagaatttcctgagaggttgagtgaatattaacccatcaagttagcaatttccttaactacatgagtatcaggaagacaggacttccctgccttagagctatatagacttgggcctcttcaagatctgacttctctgcacattctatacaggttggatattgatggagggttaaaaatgctatgacagttcatggtgcatggtgtgtttgtttaaatcatagcatgtttaggcaaagtggccagctcattcaatataagagccaccagctcttagaaacaacagatatattcacacccagtctgtaatatgtatttcttcaggcatgtcacactgcggtcttcctgaaagactacttacttcataaaggtattatgtttctttaattaatggccactagaagttaggaagctcctagggaccaggatatgagatcttaaagaggctgtcagaatctcttcatttgcatgacatagaatctgtggtggagatgttttccctgatgtttttggagggttggactgtgttgaaggctgtaccttggtgggggtggtctgcagtcatgcagtccactgatagggtcccccaccccgcaagcttcaataattgagctttctgttaatttcttgaattatcttttcaaaaatggtttggcagcacttgatgacattatgttcaaaattaagtccagtaaaatatataagcatttgtaaactataattatagtttaaataagacttagtttaggaaatccaagttttgacatatataaccaaacggcctaagagttcaaagctattttcttaggtgttacaccttagcatttacataatgccttctccccaagcagtttcatgtggtttgcagaaagttttggcagctaccagtcactatattgctggagttttgtgtttgagtatgtcatttatgtcatttatcagcagtatctgccagttgtgacaaagccctccctattatcctgcctttcctggaaaggatacagacccaagaaaagttaacatctacatagtacttagaatttctaattttaaaataagaaacaaaaagcacatttaaaataatattttatgcttttggagacaggacccacatgtatctccttatttttatacttgccatagaaacaagcctagttgtaggcctacagtgggtgctttgttaactgcttgttgatggcttcctgacatccatccaaatgtcacttttacagatgctgtcacccgttaaacaggtgtggcagaagtattccatgactgcattaggaagaatgcaccttatgggttatatctcttttggtagacagcccacctgctcttttttgtccccaccctcagcccaagcaatgtgaagacagattatggcaacttaggagctccatgtttccataataattcataactttaagagtcctccagacttacaagattacttcatggtgaaagtttggattgatcaataatttattcctataaaggtctgcaggattttttctgtaaccagaaaagtaactgcatagccattctttttttttttttttaatttgttgttgtttttgtttgagacagagtcttcattcttgttgcccaggctggagtgtaatggtgcaatctcggatcactgcaacctctgcctcccaggttcaagtgattctcctgcctcagactcccaagtagctgggcttacaggcacgtgccaccacacccagctaatttattgtatttactagagacggggtttcaccatgttgatcaggctgatcttgaactcctgaccccaggtgatccacccgcctcaacctccaaaagtgttggggttacaggcgtgagccaccgtgctcagcctgttttttatttatttttttgagacagtctcactttgtcgctcaggctgaagtgcagtggcgctatcagctcacagcagcctccgcctcccaggttcaagcaattctcccaccttagcttcctgagtagctggaactacaggtgtgtgccaccacacccagctaatttttgtatttttttggtagagacagggtttgaccatgttggccaagctgatcttgaactcctggcctcaagtgatccaccagtcttggcctctcaaagtgctgggatcacaggcatgagccaccacgcctggcccagtctttttttttaattattatttatttttatttatttattttttgagacggagtcttgctctgttgcccaggctggagtgtagtggcatgatcttggctcactgcaacctctgcctctgggttcaagcaattctcctgcctcagccttctgagtagctgggattataggcatgcgccaccacaaccagctaattttttatatttttggtagagacacagtttcatcatgttggcccggctggtctcaaactccttacctcaagtgatctgcccgcctcagcctcccaaagtgctgggattacaggcgtgagccactgtgcctggccagtcttttattttaaaataaatacttagtcctaacctagtgaattatcaatagcatttaaaattccttctatcctgataccatgaacagtaattttcccttttaagttatgatttgactctaattttgggtcttgtatctggtctttaaacacctttcgttaccctttggaatagaacaatcatgctactgttagcaaaattattgtaggcataaggaagagctgtgagttcaaagaagattgtgagttcttggaatagtattttacagcgttgtttattcttgaccttcttgttttttaagcttagagtttataagaaaaaagtgaatatatagctaattatagcattttagaaaaaattagctctgcagatagtcaggccccatacttcttggctcattactgattttaataccttcatgagagtattaaggttgaaaggaatggtgaaatttgcattatcagaggtctgatatgtaatttattgtaaagaaattaaatatatagaggctcaattaaaaaataaccatattctcaaacctccattaccactaatatcttggggttgtcaatgatagactatatatatatgtatgtatatgtgtgtatatatatatatatatatatatatatatatatatatatatatatatatatatatataattttttttttttgagacggagtcttgctctgtcacccaggctggagtacagctcacagcaacctctgcctcccaggttcaagcaattctgcctcagcctcccgagtagctggaattacagacgcctgccaccacacccagctaatttttcgtattttttagtagagatggggtttcaccatgttggccaggctgatttcgaactcctgacctcaaatgatccaccgacctgagcctcccaaagtgctggccttacaggcatgagccaccacacctggcctagactataccttttatacactttttaaatagagaaagtgaaaaatgataaactaaccattataaaatagaggtttgagtccacctgtattttacagaaatttgccctcaaatgtttgagagggaagtcacatatgatagaaaaatatcttttcaagggtagaatgatatttccttataaaagtgacaatcaaaaaagactcatttgtatacttgccaaagtttaaaagttttttacattccttaccctaaacccactgccccatccacccagaattcagaaagggtttggcatagatccagggctccagggcccaggtcattttgttattagtctagggcttttgtcctccacagtctaggcagggcatctttgtatgtgtgttgctggttggggccagggacgggggcaggcgggagttgtccaggtttaagattgtttgttttccatcagatccacaagcaatatctgtgggctgaaatccaggttatacctattcactatgactttttttttttttaactttctactgtaattatttcagttccccgaagttgtatctcaaatgttggggaaatgctgccttgactattttactttggaaggttttactagatatcagtttagtagattaatgacgttgttaatctgtctgctcaaaagacaccagcaagggggtatactttgctgaactgataaattattctattaaggactaacccagtacttggcaaaattaggaataacttttcccctccttctttactaataaattttccaagttgcatactgttgttgcaagtttctgtaatttttttctgtatacctttctattgtctgaatttaaataaaaatgtttctaataa

SEQ ID NO: 201329 - DNA, 3825 bp, Homo sapiens
  Payload ID: 19736
  Gene Name: zinc finger CCCH-type containing 7A
  Uniprot ID: Q8IWR0
  ENST ID: ENST00000355758
  CDS Start-End: 179-3094
aaccgagccgctgccgccgccgctaaccgagggagagctgcgagcgagcacccaggccccgccgccgccgccgccaccgctgcccgcctgccgccgcccgcctccgcctgccttctgccgccggccggcgcgtcgtccccacagattgctcatttagaaagtggatgtgtgggataacatgtccaatgtgtccgaggagagaagaaaaaggcagcagaacattaaggaaggactgcagtttatacagtcaccgctgtcatatccaggaacacaggagcaatatgcggtatatttgcgtgctctcgtgagaaatctttttaatgaaggaaatgacgtttatcgggaacatgattggaacaactcgataagccagtacacggaagccttgaatatagctgattatgcaaaatctgaagaaattttaatccccaaagaaataattgaaaaactatatataaatcgtattgcctgctattctaatatgggtttccatgataaagttttggaggactgcaatatagtcctcagtttaaatgccagtaactgcaaagctctgtatcggaaatctaaggctttaagtgatttaggaagatacaaaaaggcttacgatgctgtagcaaagtgctccttagcagtgcctcaggatgagcatgtaataaaactaactcaagaactagctcagaaattgggatttaaaataagaaaagcgtatgtcagagctgagctctcattaaaatcagttcctggggatggggctaccaaggctttgaaccattctgtggaagatattgagccagatttattaactccaaggcaagaagcagttcctgttgtctctttaccggcacccagtttttctcatgaagttggaagtgagctggcctcagttcctgttatgcccttaacttctattttgccactacaagtggaagagagcgctctgccatctgcagtgctggcaaatggaggaaagatgcccttcactatgccagaagcttttctagatgatggagatatggtccttggagatgaactagatgacctgcttgattctgcacctgaaactaatgaaactgttatgccgtcagctttagtcagaggaccccttcagacagccagtgtctctcctagcatgcccttttcggcatcgctgttaggaaccttacccattggtgcgaggtatgctcctccaccctccttctcagaattttatccacctttgacttcatccttagaagatttttgttcttctttaaattcattttcaatgagtgaatccaaacgagatctgtccacctcaacttctagagagggaacaccgcttaacaacagtaattcttcccttttacttatgaatggaccaggtagtttgtttgcttcagagaatttcctgggaatttcaagtcagcctagaaatgactttggaaacttttttggaagtgcagttaccaaaccatcttcatcagtgactccaagacatcccctcgaaggaacccatgaattgagacaagcttgccagatctgttttgtaaaatcaggccctaagttaatggatttcacttaccatgctaacatagatcataagtgtaagaaagatattttaatcggtaggataaagaatgttgaagataaatcatggaaaaaaatacgtccaagaccaacaaaaacaaattatgaaggaccatattatatatgtaaagatgttgctgctgaggaggaatgtagatattcaggccactgcacgtttgcttattgccaagaggagatagatgtgtggacactggagcggaaaggagcattcagccgggaggctttctttggcggcaatggaaagattaaccttactgtgttcaaacttctccaggagcatcttggggaatttatattcctttgtgagaaatgttttgatcataagcctagaatgataagtaaaagaaataaagataattctactgcttgttctcacccggttacaaagcatgagtttgaagacaataagtgccttgtccacattttgcgagagacaacagtaaaatactccaaaatacgttcttttcatggtcagtgtcagcttgatttatgtcgacatgaagttcggtatggctgtttaagggaagatgagtgcttttatgcccatagtcttgtggaactgaaagtctggataatgcaaaatgaaacaggtatctcacatgatgctattgctcaagagtctaaacgatattggcagaatttggaagcaaatgtacctggagcgcaggtacttggtaatcaaataatgcctggatttcttaatatgaagataaagtttgtgtgcgcccagtgtctgagaaacggtcaagtcattgaaccagacaaaaacagaaaatattgtagtgcaaaagcaaggcattcgtggaccaaagaccggcgtgcgatgagagtgatgtctattgaacgtaagaagtggatgaacatccgtcctctccccacaaagaaacaaatgcctttacagtttgatctgtgcaaccatattgcttctgggaaaaaatgtcaatatgttggaaactgttcctttgctcatagtcctgaggaaagagaagtttggacttacatgaaggagaatgggatacaagatatggagcaattttacgaactatggctcaagagtcaaaaaaatgaaaaaagtgaagacatagccagtcagtcaaacaaggaaaatggaaaacaaattcacatgccaacagattatgctgaagttacagtggactttcactgctggatgtgtgggaaaaactgcaacagtgagaagcagtggcagggccacatctcctccgagaagcacaaagagaaggttttccacaccgaggacgaccagtactgctggcagcaccgcttcccaacaggctatttcagtatttgtgataggtatatgaatggcacctgcccagaaggaaacagctgtaaatttgcacatggaaatgccgaacttcatgaatgggaagaaagaagagatgccctaaagatgaagctcaacaaagcacgaaaagatcacttaattggcccaaatgataatgactttggaaaatatagttttttgtttaaagatttaaactaatatgctggcttttatgtatgatacctaatcagagcattgaccagaaaaattgaaagtgttctgaggcacatagcagaggagctgcagatttcctgcttgtattggcgtatatcgttcctcctgagcagcaacccacagtaggtaggaaaatgggctgtttcacaggcctggccacgctctcacggaaccactggcatcagatggtgaagtgactgctacccggttgccatctgttgaacagacttttggatgaagtgtgttggggaagaggataaggttatatctaggacaactctttgagttggtccttcatataagaatcgtgacggtaagagaataaacacttgtactgggatcagaatacatgatggatgaaattctttacatgttttagcagaatgaatttgtttaatataataaagtttgctacttatctgtatgtaggttgctaaaaaggattttcttaactcagattttaagccaaataaccatttaacactagtatttgttaaatggggtatttttctgtatttgtatgtttcactataataagggaattaaggataatgtgcattgagaatattttgaaaaataattgactcaaattttatttcttggtcttttgctgtttaaatgatgattttgaaagattaaacctgtactgttggtattgtgttagtgtatggaccaatactgcctgtaataaagattttatatatagatgcctttca

SEQ ID NO: 201330 - DNA, 3845 bp, Homo sapiens
  Payload ID: 19736
  Gene Name: zinc finger CCCH-type containing 7A
  Uniprot ID: Q8IWR0
  ENST ID: ENST00000396516
  CDS Start-End: 199-3114
aaagatgactcctgtacggtccctgccgtccaggaccctggagtcaagtcagaaatggatgtgtccacagctgattgtgtgacaaggtctggatttgtgggtgttttcattggagtccagggaccctggtaccttatgtgcttttttgccttgtttctttccagattgctcatttagaaagtggatgtgtgggataacatgtccaatgtgtccgaggagagaagaaaaaggcagcagaacattaaggaaggactgcagtttatacagtcaccgctgtcatatccaggaacacaggagcaatatgcggtatatttgcgtgctctcgtgagaaatctttttaatgaaggaaatgacgtttatcgggaacatgattggaacaactcgataagccagtacacggaagccttgaatatagctgattatgcaaaatctgaagaaattttaatccccaaagaaataattgaaaaactatatataaatcgtattgcctgctattctaatatgggtttccatgataaagttttggaggactgcaatatagtcctcagtttaaatgccagtaactgcaaagctctgtatcggaaatctaaggctttaagtgatttaggaagatacaaaaaggcttacgatgctgtagcaaagtgctccttagcagtgcctcaggatgagcatgtaataaaactaactcaagaactagctcagaaattgggatttaaaataagaaaagcgtatgtcagagctgagctctcattaaaatcagttcctggggatggggctaccaaggctttgaaccattctgtggaagatattgagccagatttattaactccaaggcaagaagcagttcctgttgtctctttaccggcacccagtttttctcatgaagttggaagtgagctggcctcagttcctgttatgcccttaacttctattttgccactacaagtggaagagagcgctctgccatctgcagtgctggcaaatggaggaaagatgcccttcactatgccagaagcttttctagatgatggagatatggtccttggagatgaactagatgacctgcttgattctgcacctgaaactaatgaaactgttatgccgtcagctttagtcagaggaccccttcagacagccagtgtctctcctagcatgcccttttcggcatcgctgttaggaaccttacccattggtgcgaggtatgctcctccaccctccttctcagaattttatccacctttgacttcatccttagaagatttttgttcttctttaaattcattttcaatgagtgaatccaaacgagatctgtccacctcaacttctagagagggaacaccgcttaacaacagtaattcttcccttttacttatgaatggaccaggtagtttgtttgcttcagagaatttcctgggaatttcaagtcagcctagaaatgactttggaaacttttttggaagtgcagttaccaaaccatcttcatcagtgactccaagacatcccctcgaaggaacccatgaattgagacaagcttgccagatctgttttgtaaaatcaggccctaagttaatggatttcacttaccatgctaacatagatcataagtgtaagaaagatattttaatcggtaggataaagaatgttgaagataaatcatggaaaaaaatacgtccaagaccaacaaaaacaaattatgaaggaccatattatatatgtaaagatgttgctgctgaggaggaatgtagatattcaggccactgcacgtttgcttattgccaagaggagatagatgtgtggacactggagcggaaaggagcattcagccgggaggctttctttggcggcaatggaaagattaaccttactgtgttcaaacttctccaggagcatcttggggaatttatattcctttgtgagaaatgttttgatcataagcctagaatgataagtaaaagaaataaagataattctactgcttgttctcacccggttacaaagcatgagtttgaagacaataagtgccttgtccacattttgcgagagacaacagtaaaatactccaaaatacgttcttttcatggtcagtgtcagcttgatttatgtcgacatgaagttcggtatggctgtttaagggaagatgagtgcttttatgcccatagtcttgtggaactgaaagtctggataatgcaaaatgaaacaggtatctcacatgatgctattgctcaagagtctaaacgatattggcagaatttggaagcaaatgtacctggagcgcaggtacttggtaatcaaataatgcctggatttcttaatatgaagataaagtttgtgtgcgcccagtgtctgagaaacggtcaagtcattgaaccagacaaaaacagaaaatattgtagtgcaaaagcaaggcattcgtggaccaaagaccggcgtgcgatgagagtgatgtctattgaacgtaagaagtggatgaacatccgtcctctccccacaaagaaacaaatgcctttacagtttgatctgtgcaaccatattgcttctgggaaaaaatgtcaatatgttggaaactgttcctttgctcatagtcctgaggaaagagaagtttggacttacatgaaggagaatgggatacaagatatggagcaattttacgaactatggctcaagagtcaaaaaaatgaaaaaagtgaagacatagccagtcagtcaaacaaggaaaatggaaaacaaattcacatgccaacagattatgctgaagttacagtggactttcactgctggatgtgtgggaaaaactgcaacagtgagaagcagtggcagggccacatctcctccgagaagcacaaagagaaggttttccacaccgaggacgaccagtactgctggcagcaccgcttcccaacaggctatttcagtatttgtgataggtatatgaatggcacctgcccagaaggaaacagctgtaaatttgcacatggaaatgccgaacttcatgaatgggaagaaagaagagatgccctaaagatgaagctcaacaaagcacgaaaagatcacttaattggcccaaatgataatgactttggaaaatatagttttttgtttaaagatttaaactaatatgctggcttttatgtatgatacctaatcagagcattgaccagaaaaattgaaagtgttctgaggcacatagcagaggagctgcagatttcctgcttgtattggcgtatatcgttcctcctgagcagcaacccacagtaggtaggaaaatgggctgtttcacaggcctggccacgctctcacggaaccactggcatcagatggtgaagtgactgctacccggttgccatctgttgaacagacttttggatgaagtgtgttggggaagaggataaggttatatctaggacaactctttgagttggtccttcatataagaatcgtgacggtaagagaataaacacttgtactgggatcagaatacatgatggatgaaattctttacatgttttagcagaatgaatttgtttaatataataaagtttgctacttatctgtatgtaggttgctaaaaaggattttcttaactcagattttaagccaaataaccatttaacactagtatttgttaaatggggtatttttctgtatttgtatgtttcactataataagggaattaaggataatgtgcattgagaatattttgaaaaataattgactcaaattttatttcttggtcttttgctgtttaaatgatgattttgaaagattaaacctgtactgttggtattgtgttagtgtatggaccaatactgcctgtaataaagattttatatatagatgcctttca

SEQ ID NO: 201331 - DNA, 575 bp, Homo sapiens
  Payload ID: 19736
  Gene Name: zinc finger CCCH-type containing 7A
  ENST ID: ENST00000576018
  CDS Start-End: 344-575
agcaaaggggtggggccgcctgaggcccggccggggcctccgaggtcgagcctgagtcgggactgggtggatttgccaggagttgggtattttcctgtccccacctgtctagggatgaaaaggagttgcccgtgttcggtattgaaccacgaaggaccttgccatgcccagtacggtggccactgaccccccgccgtttgggacgatggagcccacgaaatggggccagtttcagttgcggtcccagctgtgaaacgtacatctgattttaaaaacttcggatgagaaagaaagtaaaagatgtcattgattgctcatttagaaagtggatgtgtgggataacatgtccaatgtgtccgaggagagaagaaaaaggcagcagaacattaaggaaggactgcagtttatacagtcaccgctgtcatatccaggaacacaggagcaatatgcggtatatttgcgtgctctcgtgagaaatctttttaatgaaggaaatgacgtttatcgggaacatgattggaacaactcgataagccagtacacggaagccttgaatatagctgattatgcaaaat

SEQ ID NO: 201332 - DNA, 780 bp, Homo sapiens
  Payload ID: 19736
  Gene Name: zinc finger CCCH-type containing 7A
  ENST ID: ENST00000575041
  CDS Start-End: 1-279
ggagatgaactagatgacctgcttgattctgcacctgaaactaatgaaactgttatgccgtcagctttagtcagaggaccccttcagacagccagtgtctctcctagcatgcccttttcggcatcgctgttaggaaccttacccattggtgcgaggtatgctcctccaccctccttctcagaattttatccacctttgacttcatccttagaagatttttgttcttctttaaattcattttcaatgagtgaatccaaacgagatgaatggaccaggtagtttgtttgcttcagagaatttcctgggaatttcaagtcagcctagaaatgactttggaaacttttttggaagtgcagttaccaaaccatcttcatcagtgactccaagacatcccctcgaaggaacccatgaattgagacaagcttgccagatctgttttgtaaaatcaggccctaagttaatggatttcacttaccatgctaacatagatcataagtgtaagaaagatattttaatcggtaggataaagaatgttgaagataaatcatggaaaaaaatacgtccaagaccaacaaaaacaaattatgaaggaccatattatatatgtaaagatgttgctgctgaggaggaatgtagatattcaggccactgcacgtttgcttattgccaagaggagatagatgtgtggacactggagcggaaaggagcattcagccgggaggctttctttggcggcaatggaaagattaaccttactgtgttcaaacttctccaggagca

SEQ ID NO: 201333 - DNA, 2632 bp, Homo sapiens
  Payload ID: 19736
  Gene Name: zinc finger CCCH-type containing 7A
  Uniprot ID: Q8IWR0
  ENST ID: ENST00000575984
  CDS Start-End: 1405-1908
gtgagccaccgtgcccggcccgggaccttttttcttaaagaagaaattatactgtatgtgtgtatgtgtgtagagagtgtggtgaggcttaaagacaatgggcttcaaagtctgccagaagggccccagtcaagttattcagcctcagtttgctcacctgtaattgggaataattatgtgtgatggtgttatgtaaacacctggcacagtgcctggccttctcctttacctgcttttcttcctgctccttatcattgagctttgaaagactatggtaaatgtttccctagtaatatgactaagtacttactggggtttgacgggggaaagaatatgactattttatccagtactgactttatgcagaagattttaagggtggggtcactgacattggtccaagggaggaaatgtacagtgttaagggggctgagcgagttttagccaaaactctgaaaaacgtgacagatgctaagcatttaatgccacgtaagctaaataatgtagggccagctgccgttgaagcacaaactaagataagctaataattagttgtactaggatttatacctcatacagacaagtaggttgatggtattcaagaatgcattctccgtgatggaggttttcttggttcctggctcataattcttagggaagtctgcgttctgctgatcacgatcactttattttcctaccagtatcactgtatttactttgttaaataaaaatacaaataacctgaagaggtattatttgaaagctgtgtaactccatggtatggctagtgtgataattgtcttctgataatgcatatgtagtgaattatggccgaggttagtttccagtactggttataagtaagttaaatttctgaaatgttttgggcactgttcagtaccctttggagtagcctgcagtttctttactgctttcaagtgctgatgtggaggaatcattagtgttgggcagggaaacaggagctgtcagactgagagggccagggatgttcattgtggagattaaatgttctgagtaagtgagtttgtagacattttcttgtaagaaaatgttccatgctttactctgttttggacattttcttttgaaaaattttgagatagaaaccttaatatcatttcatatatttagagcatatagttaatttgagtagagtcaaattaatcttactttagaatttgattactaagtattagcatggataataatgcttcttttgcttaaatgtaaaaattaggccgttttactaggtgtactttgtcttaatcatattcctatttttttatacagctgtgcaaccatattgcttctgggaaaaaatgtcaatatgttggaaactgttcctttgctcatagtcctgaggaaagagaagtttggacttacatgaaggagaatgggatacaagatatggagcaattttacgaactatggctcaagagtcaaaaaaatgaaaaaagtgaagacatagccagtcagtcaaacaaggaaaatggaaaacaaattcacatgccaacagattatgctgaagttacagtggactttcactgctggatgtgtgggaaaaactgcaacagtgagaagcagtggcagggccacatctcctccgagaagcacaaagagaaggttttccacaccgaggacgaccagtactgctggcagcaccgcttcccaacaggctatttcagtatttgtgataggtatatgaatggcacctgcccagaaggaaacagctgtaaatttgcacatggaaatgccgaacttcatgaatgggaagaaagaagagatgccctaaagatgaagctcaacaaagcacgaaaagatcacttaattggcccaaatgataatgactttggaaaatatagttttttgtttaaagatttaaactaatatgctggcttttatgtatgatacctaatcagagcattgaccagaaaaattgaaagtgttctgaggcacatagcagaggagctgcagatttcctgcttgtattggcgtatatcgttcctcctgagcagcaacccacagtaggtaggaaaatgggctgtttcacaggcctggccacgctctcacggaaccactggcatcagatggtgaagtgactgctacccggttgccatctgttgaacagacttttggatgaagtgtgttggggaagaggataaggttatatctaggacaactctttgagttggtccttcatataagaatcgtgacggtaagagaataaacacttgtactgggatcagaatacatgatggatgaaattctttacatgttttagcagaatgaatttgtttaatataataaagtttgctacttatctgtatgtaggttgctaaaaaggattttcttaactcagattttaagccaaataaccatttaacactagtatttgttaaatggggtatttttctgtatttgtatgtttcactataataagggaattaaggataatgtgcattgagaatattttgaaaaataattgactcaaattttatttcttggtcttttgctgtttaaatgatgattttgaaagattaaacctgtactgttggtattgtgttagtgtatggaccaatactgcctgtaataaagattttatatatagatg

SEQ ID NO: 201334 - DNA, 2343 bp, Homo sapiens
  Payload ID: 19736
  Gene Name: zinc finger CCCH-type containing 7A
  ENST ID: ENST00000571198
  CDS Start-End: 144-2343
agctgcgagcgagcacccaggccccgccgccgccgccgccaccgctgcccgcctgccgccgcccgcctccgcctgccttctgccgccggccggcgcgtcgtccccacagattgctcatttagaaagtggatgtgtgggataacatgtccaatgtgtccgaggagagaagaaaaaggcagcagaacattaaggaaggactgcagtttatacagtcaccgctgtcatatccaggaacacaggagcaatatgcggtatatttgcgtgctctcgtgagaaatctttttaatgaaggaaatgacgtttatcgggaacatgattggaacaactcgataagccagtacacggaagccttgaatatagctgattatgcaaaatctgaagaaattttaatccccaaagaaataattgaaaaactatatataaatcgtattgcctgctattctaatatgggtttccatgataaagttttggaggactgcaatatagtcctcagtttaaatgccagtaactgcaaagctctgtatcggaaatctaaggctttaagtgatttaggaagatacaaaaaggcttacgatgctgtagcaaagtgctccttagcagtgcctcaggatgagcatgtaataaaactaactcaagaactagctcagaaattgggatttaaaataagaaaagcgtatgtcagagctgagctctcattaaaatcagttcctggggatggggctaccaaggctttgaaccattctgtggaagatattgagccagatttattaactccaaggcaagaagcagttcctgttgtctctttaccggcacccagtttttctcatgaagttggaagtgagctggcctcagttcctgttatgcccttaacttctattttgccactacaagtggaagagagcgctctgccatctgcagtgctggcaaatggaggaaagatgcccttcactatgccagaagcttttctagatgatggagatatggtccttggagatgaactagatgacctgcttgattctgcacctgaaactaatgaaactgttatgatgaatggaccaggtagtttgtttgcttcagagaatttcctgggaatttcaagtcagcctagaaatgactttggaaacttttttggaagtgcagttaccaaaccatcttcatcagtgactccaagacatcccctcgaaggaacccatgaattgagacaagcttgccagatctgttttgtaaaatcaggccctaagttaatggatttcacttaccatgctaacatagatcataagtgtaagaaagatattttaatcggtaggataaagaatgttgaagataaatcatggaaaaaaatacgtccaagaccaacaaaaacaaattatgaaggaccatattatatatgtaaagatgttgctgctgaggaggaatgtagatattcaggccactgcacgtttgcttattgccaagaggagatagatgtgtggacactggagcggaaaggagcattcagccgggaggctttctttggcggcaatggaaagattaaccttactgtgttcaaacttctccaggagcatcttggggaatttatattcctttgtgagaaatgttttgatcataagcctagaatgataagtaaaagaaataaagataattctactgcttgttctcacccggttacaaagcatgagtttgaagacaataagtgccttgtccacattttgcgagagacaacagtaaaatactccaaaatacgttcttttcatggtcagtgtcagcttgatttatgtcgacatgaagttcggtatggctgtttaagggaagatgagtgcttttatgcccatagtcttgtggaactgaaagtctggataatgcaaaatgaaacaggtatctcacatgatgctattgctcaagagtctaaacgatattggcagaatttggaagcaaatgtacctggagcgcaggtacttggtaatcaaataatgcctggatttcttaatatgaagataaagtttgtgtgcgcccagtgtctgagaaacggtcaagtcattgaaccagacaaaaacagaaaatattgtagtgcaaaagcaaggcattcgtggaccaaagaccggcgtgcgatgagagtgatgtctattgaacgtaagaagtggatgaacatccgtcctctccccacaaagaaacaaatgcctttacagtttgatctgtgcaaccatattgcttctgggaaaaaatgtcaatatgttggaaactgttcctttgctcatagtcctgaggaaagagaagtttggacttacatgaaggagaatgggatacaagatatggagcaattttacgaactatggctcaagagtc

SEQ ID NO: 201335 - DNA, 1930 bp, Homo sapiens
  Payload ID: 19736
  Gene Name: zinc finger CCCH-type containing 7A
  ENST ID: ENST00000571405
  CDS Start-End: 1-676
caatggaaagattaaccttactgtgttcaaacttctccaggagcatcttggggaatttatattcctttgtgagaaatgttttgatcataagcctagaatgataagtaaaagaaataaagataattctactgcttgttctcacccggttacaaagcatgagtttgaagacaataagtgccttgtccacattttgcgagagacaacagtaaaatactccaaaatacgttcttttcatggtcagtgtcagcttgatttatgtcgacatgaagttcggtatggctgtttaagggaagatgagtgcttttatgcccatagtcttgtggaactgaaagtctggataatgcaaaatgaaacaggtatctcacatgatgctattgctcaagagtctaaacgatattggcagaatttggaagcaaatgtacctggagcgcaggtacttggtaatcaaataatgcctggatttcttaatatgaagataaagtttgtgtgcgcccagtgtctgagaaacggtcaagtcattgaaccagacaaaaacagaaaatattgtagtgcaaaagcaaggcattcgtggaccaaagaccggcgtgcgatgagagtgatgtctattgaacctgtgcaaccatattgcttctgggaaaaaatgtcaatatgttggaaactgttcctttgctcatagtcctgaggaaagagaagtttggacttacatgaaggagaatgggatacaagatatggagcaattttacgaactatggctcaagagtcaaaaaaatgaaaaaagtgaagacatagccagtcagtcaaacaaggaaaatggaaaacaaattcacatgccaacagattatgctgaagttacagtggactttcactgctggatgtgtgggaaaaactgcaacagtgagaagcagtggcagggccacatctcctccgagaagcacaaagagaaggttttccacaccgaggacgaccagtactgctggcagcaccgcttcccaacaggctatttcagtatttgtgataggtatatgaatggcacctgcccagaaggaaacagctgtaaatttgcacatggaaatgccgaacttcatgaatgggaagaaagaagagatgccctaaagatgaagctcaacaaagcacgaaaagatcacttaattggcccaaatgataatgactttggaaaatatagttttttgtttaaagatttaaactaatatgctggcttttatgtatgatacctaatcagagcattgaccagaaaaattgaaagtgttctgaggcacatagcagaggagctgcagatttcctgcttgtattggcgtatatcgttcctcctgagcagcaacccacagtaggtaggaaaatgggctgtttcacaggcctggccacgctctcacggaaccactggcatcagatggtgaagtgactgctacccggttgccatctgttgaacagacttttggatgaagtgtgttggggaagaggataaggttatatctaggacaactctttgagttggtccttcatataagaatcgtgacggtaagagaataaacacttgtactgggatcagaatacatgatggatgaaattctttacatgttttagcagaatgaatttgtttaatataataaagtttgctacttatctgtatgtaggttgctaaaaaggattttcttaactcagattttaagccaaataaccatttaacactagtatttgttaaatggggtatttttctgtatttgtatgtttcactataataagggaattaaggataatgtgcattgagaatattttgaaaaataattgactcaaattttatttcttggtcttttgctgtttaaatgatgattttgaaagattaaacctgtactgttggtattgtgttagtgtatggaccaatactgcctgtaataaagattttatatataga

SEQ ID NO: 201336 - DNA, 986 bp, Homo sapiens
  Payload ID: 19736
  Gene Name: zinc finger CCCH-type containing 7A
  ENST ID: ENST00000576009
  CDS Start-End: 1-986
ataaaactaactcaagaactagctcagaaattgggatttaaaataagaaaagcgtatgtcagagctgaggctttgaaccattctgtggaagatattgagccagatttattaactccaaggcaagaagcagttcctgttgtctctttaccggcacccagtttttctcatgaagttggaagtgagctggcctcagttcctgttatgcccttaacttctattttgccactacaagtggaagagagcgctctgccatctgcagtgctggcaaatggaggaaagatgcccttcactatgccagaagcttttctagatgatggagatatggtccttggagatgaactagatgacctgcttgattctgcacctgaaactaatgaaactgttatgccgtcagctttagtcagaggaccccttcagacagccagtgtctctcctagcatgcccttttcggcatcgctgttaggaaccttacccattggtgcgaggtatgctcctccaccctccttctcagaattttatccacctttgacttcatccttagaagatttttgttcttctttaaattcattttcaatgagtgaatccaaacgagatctgtccacctcaacttctagagagggaacaccgcttaacaacagtaattcttcccttttacttatgaatggaccaggtagtttgtttgcttcagagaatttcctgggaatttcaagtcagcctagaaatgactttggaaacttttttggaagtgcagttaccaaaccatcttcatcagtgactccaagacatcccctcgaaggaacccatgaattgagacaagcttgccagatctgttttgtaaaatcaggccctaagttaatggatttcacttaccatgctaacatagatcataagtgtaagaaagatattttaatcggtaggataaagaatgttgaagataaatcatggaaaaaaatacgtccaagaccaacaaaaacaaattatgaagg

SEQ ID NO: 201337 - DNA, 663 bp, Homo sapiens
  Payload ID: 19736
  Gene Name: zinc finger CCCH-type containing 7A
  ENST ID: ENST00000572870
  CDS Start-End: 206-663
aaaacctgaagccaaaggagggaagaggaaaggaaggggagacatgactttttcctggagactgctcaggaggggtatacaaagtctgcatagccattcagccttaaagaatgtgaaaactggccaggcgctgtggctcacacctataatcccacactttgggaggccgagattgctcatttagaaagtggatgtgtgggataacatgtccaatgtgtccgaggagagaagaaaaaggcagcagaacattaaggaaggactgcagtttatacagtcaccgctgtcatatccaggaacacaggagcaatatgcggtatatttgcgtgctctcgtgagaaatctttttaatgaaggaaatgacgtttatcgggaacatgattggaacaactcgataagccagtacacggaagccttgaatatagctgattatgcaaaatctgaagaaattttaatccccaaagaaataattgaaaaactatatataaatcgtattgcctgctattctaatatgggtttccatgataaagttttggaggactgcaatatagtcctcagtttaaatgccagtaactgcaaagctctgtatcggaaatctaaggctttaagtgatttaggaagatacaaaaaggcttacgatgctgtagcaaagtgctccttagcagt

SEQ ID NO: 201338 - DNA, 564 bp, Homo sapiens
  Payload ID: 19736
  Gene Name: zinc finger CCCH-type containing 7A
  ENST ID: ENST00000572781
  CDS Start-End: 355-564
gctaaccgagggagagctgcgagcgagcacccaggccccgccgccgccgccgccaccgctgcccgcctgccgccgcccgcctccgcctgccttctgccgccggccggcgcgtcgtccccacagggatgaaaaggagttgcccgtgttcggtattgaaccacgaaggaccttgccatgcccagtacggtggccactgaccccccgccgtttgggacgatggagcccacgaaatggggccagtttcagttgcggtcccagctgtgaaacgtacatctgattttaaaaacttcggatgagaaagaaagtaaaagatgtcattgattgctcatttagaaagtggatgtgtgggataacatgtccaatgtgtccgaggagagaagaaaaaggcagcagaacattaaggaaggactgcagtttatacagtcaccgctgtcatatccaggaacacaggagcaatatgcggtatatttgcgtgctctcgtgagaaatctttttaatgaaggaaatgacgtttatcgggaacatgattggaacaactcgataagccagtacacggaagccttg

SEQ ID NO: 201339 - DNA, 532 bp, Homo sapiens
  Payload ID: 19736
  Gene Name: zinc finger CCCH-type containing 7A
  ENST ID: ENST00000574995
  CDS Start-End: 351-532
gagccgggccggggcctgtgcgcgcggagggacgggtgggcgcgccgtccccttcccccaccgagaataacgtgacccacttctgcctgccattccctcggcaaaatgtctcctttttgggatgaaaaggagttgcccgtgttcggtattgaaccacgaaggaccttgccatgcccagtacggtggccactgaccccccgccgtttgggacgatggagcccacgaaatggggccagtttcagttgcggtcccagctgtgaaacgtacatctgattttaaaaacttcggatgagaaagaaagtaaaagatgtcattgattgctcatttagaaagtggatgtgtgggataacatgtccaatgtgtccgaggagagaagaaaaaggcagcagaacattaaggaaggactgcagtttatacagtcaccgctgtcatatccaggaacacaggagcaatatgcggtatatttgcgtgctctcgtgagaaatctttttaatgaaggaaatgacgtttatcgggaacatgattggaacaa

SEQ ID NO: 201340 - DNA, 5909 bp, Homo sapiens
  Payload ID: 19737
  Gene Name: zinc finger CCCH-type containing 7B
  Uniprot ID: Q9UGR2
  ENST ID: ENST00000352645
  CDS Start-End: 258-3191
agggagacagtgcctccagcgggtgctgccgcgagcggccagccgaggggctggaaatgaaagtaaagcgctccagagccacatggacggagctgccggggcggcggcgccgggagcaggatgcggccgcccgtaattaaatagcatttactcttattattactaataataataacgtaatcatacctctagtcatagcataccatttatcgggctcggcgcaggcccgcggggagcgcagcccggcggagagactgatggagaggcagaaacggaaggcggacatcgagaaagggctgcagttcattcagtcgacactacccctaaagcaagaagaatatgaggcctttctgctcaagctggtgcagaatctgtttgctgagggcaatgatctgttccgggagaaggactataagcaggctctggtgcagtacatggaagggctgaacgtggccgactacgctgcctctgaccaggtggccctgccccgggagctgctgtgcaagctgcatgtcaatagggccgcctgctacttcaccatgggcctgtatgagaaggcgctggaggacagcgagaaggcgctgggcctggacagtgagagtatccgggcgttgttccgcaaggcacgcgctctcaatgaactgggacgccacaaggaggcctacgagtgcagcagccggtgttccctcgccctgccccacgatgaaagcgtgactcagcttggtcaggagctggcccagaaactggggctgcgagttcgcaaggcgtataagaggccccaggaattggaaaccttttctctgctcagtaacggcactgcggctggcgtggcagatcagggaacttctaatggattggggtccatagatgacatcgaaacagactgctacgtggaccctcgaggctccccagcccttctcccctccacgcccacgatgcccctgttccctcacgttctggacctgctggcccccctggacagcagcaggaccctccccagcaccgacagcctggatgacttctcagacggggatgtctttggcccagagctggacaccctcctggactcgctgtctctggtccagggtggcctgtctggcagcggcgtgcctagtgagttgccccagctgatacccgtgttccccggcgggaccccactgctaccacctgtggtgggtggctccatccctgtctccagcccactgccccccgcctccttcggcttggtcatggacccctccaagaagctggccgcctctgtgctggatgccctcgatcccccgggccccacgctggaccccctggacctgctgccgtactcggagacccggctggatgcactcgacagctttgggtcgacacgaggctccctggacaaacctgactccttcatggaggagaccaactcacaggaccaccgtccccctagcggtgctcagaaaccagccccctcgccagagccctgcatgcccaacactgccttgctcatcaagaaccccttggctgccacccacgagttcaagcaggcctgccagctctgctaccccaagacaggcccccgggctggcgactacacctaccgtgagggccttgagcacaagtgcaagcgggacatcctgctcggccggctccggagctcggaggaccagacctggaagcggatccggccccggcccactaagaccagcttcgtgggctcctactacctgtgcaaagacatgattaacaagcaggactgtaagtacggggataactgcaccttcgcctaccatcaggaggagatcgacgtgtggaccgaggagcggaagggcaccctcaaccgcgacctgctcttcgacccgctggggggtgttaagcgcggcagcctcaccatcgccaagctcctgaaggagcaccagggcatcttcaccttcctctgcgagatctgctttgacagtaaaccccggatcatcagcaaaggcaccaaggactctccgtctgtctgctccaacctggctgccaagcacagcttctacaacaacaagtgcctggtgcacatcgtccgctccacctccctcaagtactccaagatccgccagttccaggagcacttccagttcgacgtgtgccgccatgaggtgcgctacggctgcctgcgggaggacagctgccacttcgcccacagcttcatcgagctcaaggtctggctgctgcagcagtactcaggcatgacccacgaagacatcgttcaggagtctaagaagtactggcagcagatggaggcgcatgcggggaaggccagcagcagcatgggtgctccgaggacacatgggcccagcacctttgacctgcagatgaagtttgtatgtggccagtgctggagaaacgggcaggtggtggagcctgacaaggacctcaagtactgtagtgccaaggcccggcactgctggaccaaggagcggcgggtccttctggtgatgtccaaggccaagaggaaatgggtgtcagtgaggccactgccatccattcgtaacttcccacagcaatacgatctctgcatccatgcacagaacggccgcaagtgccaatatgtggggaactgctccttcgcacacagcccggaggagagggacatgtggaccttcatgaaggagaacaagatcctggacatgcagcagacctatgacatgtggctgaaaaaacacaacccaggaaagcctggagaagggacccccatcagttctcgggaaggggagaagcagatccagatgcccacggactacgcggacatcatgatgggctaccactgctggctctgcggcaagaacagcaacagcaagaagcagtggcagcagcacatccagtccgagaagcacaaggagaaggtcttcacgtccgacagtgacgccagcggctgggccttccgcttccccatgggcgagttccggctctgcgacaggctccagaagggcaaagcctgcccagatggggacaagtgccgctgcgcccatggacaggaggagctcaacgagtggctggaccggcgcgaggtgctgaagcagaagttggccaaggctcgcaaggacatgctgctgtgcccacgggacgacgactttggcaaatacaacttcctgctgcaagaggacggggaccttgccggtgccaccccagaagcccctgctgctgctgccaccgccaccactggggagtagggccaggtgttggccgtgggtgaagtcctggggtcagggggtggggtggggccagaaggcctgatagaagggtcagggcaggccaggggggtggggggccgccctcatcaggcagcccccagccccctgaggccctgtccatcttctccccaccaccgccccggtgtgcgtacccaggcgcacgtgctgcagcccccggaggccccgctgaaacctgggctgcccttcccccacccccacggctctcctggttgaggagggaggggcctggctgacccctccagcttcagcctccagctttaacttctgtctgctcctaatgggggcccaaagctcagggctggggagcctggggtccccacttgaatctccagcaggagggtccttctctccctggcccgtcctcctcccaccccctccccctgggggcaaatcaggacacaacagagggcagaggccccattagctttaaaatgtagccccaggttggagctgggaacactgtactggccacttaccctctggggcctcagctttccctccggaaggctgggaggaggtgggctagatgatctttggagcttaaggagtcccagccctttctctgatgccaccacctgaaccctgctccctcgtgggccagtgaaaatagactgtaggtcctcagagccttcagagatgatccagcccaaaccccattttgcagagaggaaaactgaggcctagaagggaggagtggtccacccacggtcccagcacaaggcagagctgggatgaaaacagggctgaaaagactcagggccaattattggctgagcccacggtcccctcagcagggatgcgatggtctctgaatcagtgtgcagctggggtcccaggcagcgctgcctgggggctggggaggggaggcccagaggagggctggccatgtgagcaccccatgaagggaccgccccctcccaaggatggtccctttgggtgcagcagcagaggtcacctcctgacatgcgctctgggaaaggtggcagagggcaggacaccatgagctcaggatctgtgtgaggtgtgggaggtgggaagggtgagggtctgggggaatgcggagaaaagggaggcttgaccccgggcaccatgggccactccaggatgggacacggcccctctttcttggggacccagtatgtcctctcctctagacccagacatacagttataaccgtctgtcctagcccctccctaatccctggccctcccagctgtctgggacttcagtggacccccagcccctgcccccactcaccaaggcctcgctcgtccctctcgtctgacatgtctgtgtgcacccccctcctctccaccctaccttccatcaaccagggcagatccaccgtgccctggttccccagacattccagaatgccccacatcattggcacaggagtggggcagccccggaaggaaccagggattaggctgtaggggggtgagaaggagagaagggaccaccccattcttctcaagcaaggattgccagcgcgcgctgacacagtgatgggctgcccagggctggaggggacgctgttcctcccgccgccactgcccaacctttcctgataatcgtggcatgcgccctttcctcttccctgccccaccccctggccgcagcaggccagcactgcagagtttgggtgctggtggtgtggctgtaggggaggggagaccacacccaaggtgggggctgtggccatgtgtggccgtgatgtcgatgatactcgttttccctgatccgtggtgttgcagtccgttgtcaccagccttgtttctagtgtgtatatatgtcgcccccgtgatgcatatatacacaggtattaaatatatcgctctatataatattatatatgtgtgtggtatccaaggaatcacttttatgagggctaaagataaagaatttggccagaaaatgcagccatccttgtgtgattaggagggtttcaggggccactggactatttgcaaggtgacagggactggagccatggctcagaggtgattcgggcagccagggacaggagccaccctccccaggcccaactctgctagcttcccagaccacccccatcgagtgcggagagagtgggagtgctcagggaaagaaggtgatttgtatttgtctccccgctgaaaagaacaggattcaagtccagagttttcatcttcagcctgtgatctgtccagggacccttgggatctggggcttcctggcctggccagagctggagcccccacagggtaaggaagagagagtgggaggcagagtgtgatggggaggagggacaggaagacccttttaatgatgagggtaactatttcagttgtgagccttctagggccccaggctgggaggctcagaggactgaatctgggacctgtgttccccccggcaggcagggacaagatggcatggcaagcatgggggcggggtgggtggggagggatgctgcatttctcagctgggcagtaatcaatttaatggtcctttaaaatgtctgtgtattaaaaatttaagaataccacactttaatattaaatattcataaggtctagtatcttgataataatgtagatgttttaataacaatttttgtccttcttaaaataaaatgaaagaaacttgcttcccttagcctttgttctagaaaataaacttgtgcactttga

SEQ ID NO: 201341 - DNA, 1601 bp, Homo sapiens
  Payload ID: 19738
  Gene Name: zinc finger CCCH-type containing 8
  Uniprot ID: Q8N5P1
  ENST ID: ENST00000272570
  CDS Start-End: 107-982
ggccctggcgcggctctgggtccgtctcgtcgcgtccgggttgtcactctctcgggttgttactctgtagcttcccggctcgcgaaagggaggacctgtctgggtcatggattttgagaatcttttctcaaaaccccccaacccggccctcggcaaaacggccacggactctgacgaaagaatcgatgatgaaatagatacagaagttgaagaaacacaagaagagaaaattaaactggagtgcgagcaaattcccaaaaaatttagacactctgcaatatcaccaaaaagttcgctgcatagaaaatcaagaagtaaggactatgatgtatatagtgataatgatatctgcagtcaggaatcagaagataattttgccaaagagcttcaacagtacatacaagccagagaaatggcaaatgctgctcaacctgaagaatctacaaagaaagaaggagtaaaagataccccacaggctgctaaacaaaaaaataaaaatcttaaagctggtcacaagaatggcaaacagaagaaaatgaagcgaaaatggcctggccctggaaacaaaggatcaaatgctttgctgaggaacagcggctcacaggaagaggatggtaaacctaaagagaagcagcagcatttgagtcaggcattcatcaaccaacatacagtggaacgcaagggaaaacaaatttgtaaatattttcttgaaaggaaatgtattaagggagaccagtgtaaatttgatcatgatgcagagatagaaaagaaaaaggaaatgtgtaagttttatgtacaaggatattgtaccagaggtgaaaactgtctgtatttgcataatgaatatccttgtaagttttaccatacaggaacaaaatgttatcagggagaatactgcaagttttctcatgctccactgactcctgaaacacaagaattgttggctaaagttttggatactgaaaagaagtcatgtaaataaaatagacataaaaaggtagcaatgtacagataaagagtactttaacgcccatgcgtgttcaagactgttcaagactggtgatttggagtagtttacaagattcctcattcagagtgccctcttgtgtgactggggtgatgtgcagcttccataatggatgggacagagagctgggatctaatgtacaagtgaagggcttggtcttccctgagacattccagccattggaataggagaggagcatatatggcagaggtgatggctggtgggtaaatgtgatagtaaattgtagaaacctcttctgattgattggatttccttaataaaatcggaagcaaggttaggctgagtgagggtgagtaaagaggtagaggaggtttgaggagagagaactgctcggaagacattggtagatggaccataaaaacagagttagttctctttatgacattaaatagttttacaacatatttttaatggttcacaatttcattttagggcttaaaataaattatggttctatgatttttttaaaccagtttcctattgttagacatttgtttccagtttcttactattataaataaagtgaaacaatatctcttactataccatttct

SEQ ID NO: 201342 - DNA, 5965 bp, Homo sapiens
  Payload ID: 19738
  Gene Name: zinc finger CCCH-type containing 8
  Uniprot ID: Q8N5P1
  ENST ID: ENST00000409573
  CDS Start-End: 131-1006
gaggctgcgcggggcggagcctgtggccctggcgcggctctgggtccgtctcgtcgcgtccgggttgtcactctctcgggttgttactctgtagcttcccggctcgcgaaagggaggacctgtctgggtcatggattttgagaatcttttctcaaaaccccccaacccggccctcggcaaaacggccacggactctgacgaaagaatcgatgatgaaatagatacagaagttgaagaaacacaagaagagaaaattaaactggagtgcgagcaaattcccaaaaaatttagacactctgcaatatcaccaaaaagttcgctgcatagaaaatcaagaagtaaggactatgatgtatatagtgataatgatatctgcagtcaggaatcagaagataattttgccaaagagcttcaacagtacatacaagccagagaaatggcaaatgctgctcaacctgaagaatctacaaagaaagaaggagtaaaagataccccacaggctgctaaacaaaaaaataaaaatcttaaagctggtcacaagaatggcaaacagaagaaaatgaagcgaaaatggcctggccctggaaacaaaggatcaaatgctttgctgaggaacagcggctcacaggaagaggatggtaaacctaaagagaagcagcagcatttgagtcaggcattcatcaaccaacatacagtggaacgcaagggaaaacaaatttgtaaatattttcttgaaaggaaatgtattaagggagaccagtgtaaatttgatcatgatgcagagatagaaaagaaaaaggaaatgtgtaagttttatgtacaaggatattgtaccagaggtgaaaactgtctgtatttgcataatgaatatccttgtaagttttaccatacaggaacaaaatgttatcagggagaatactgcaagttttctcatgctccactgactcctgaaacacaagaattgttggctaaagttttggatactgaaaagaagtcatgtaaataaaatagacataaaaaggtagcaatgtacagataaagagtactttaacgcccatgcgtgttcaagactgttcaagactggtgatttggagtagtttacaagattcctcattcagagtgccctcttgtgtgactggggtgatgtgcagcttccataatggatgggacagagagctgggatctaatgtacaagtgaagggcttggtcttccctgagacattccagccattggaataggagaggagcatatatggcagaggtgatggctggtgggtaaatgtgatagtaaattgtagaaacctcttctgattgattggatttccttaataaaatcggaagcaaggttaggctgagtgagggtgagtaaagaggtagaggaggtttgaggagagagaactgctcggaagacattggtagatggaccataaaaacagagttagttctctttatgacattaaatagttttacaacatatttttaatggttcacaatttcattttagggcttaaaataaattatggttctatgatttttttaaaccagtttcctattgttagacatttgtttccagtttcttactattataaataaagtgaaacaatatctcttactataccatttctaaatttagagttcgtaacttttctgttgttaaaatataagaatatttatctttctcattggtttataaactgtagtcagattatacacttgtgtgagttacaaactttaggagtgtgatggtatcattaacacaagattcaaatactaatgttccaagtacaaataataatgagattctaaatatgcagttttatatagtaatattgattattggttattattagacaaataccatgaaatggaaactcgtcattatattgttttattgttgggaaaagtaatagtattaccaacttgctggacatacagagtacaccaaagctagtgatacttcttagcaaagtcctatttgaaaataggaatcaaagttattttcattgttatctaatcctgctaaagcaagaaagggaattgcatatactccaagcaaaggtttatcagacaagacgaaagaaagcaggaaacaagggtaaatcctaggcccttagaagcaggaaactgaggaatggagagcaagtcatctctcagtgcccttttgctgtctgcccaggttgattggttcgcttctcagctgtggctcgggaggtgggcaaggcacttcttatttaagtctcataacaaccttatacagtggataatgcaattcattgcatagaaagggaataaataggaatgcttaattttttaattttcatgagccttgtcaatacttgtagttaatcttatactacagtctagcagtttacttcctaatattacctcatgtataatagtttgatacttataaagtatagattttatatataaagtttatatataaggaaaaaaataattgttatatttctgaggcagtacccatctcacttgtaaacttaaaagacaccgcagagatttgagggactcagaagtcaaatagagtaggttaaaaacctcttatttttcaaattaattgttttaagaaacaagcatacctgtgtaagtgaaatatcttaatttgtgttgaatcaagttaggagacagagattctcatgaatgtgtcctgtgttctcaaagcagctgctagcctgtgggtctctcctacctgggttatggcagcacctcacagccaatcactggcctccattctcccctttcctctgtacagtttgctctggttcctcagagcagatttccgagtatactgcttcagccacgcccccactgtgccgttccctgaaccaagagccattcgtctcaagagccattcgtccaaagtactctatcacctagccattgtagccataccaagccgggcttcctacttccctctgctccccttggtttcctcctgtgaagtaaatctcactgacccttgatgcagctccaagcatatataatatatatataataaaaccatagtctaaaaaattcaaaccaggagaaataaagccagaaagttgtatgggaaaaatctgcacagatttatttggccagcatggttatcatggctctattgaatttatccttgaccgtctttaaagccaaagcaaacgggataaagtgatcaactacttacctctcaataccagaaaggaagcaggaggcaaaatctctcaataatttcataaaaacaattcttagctgggcgcggtggctcacacctgtaatcccagcactttgggaggccgaggtgggcggatcatgaggtcaggagatcgagaccatcctggctaacatggtgaaaccccatctctactaaaattacaaaaaattagctgggcgaggtggcgggcacctgtagtcccagctactcgggaggctgaggcaagagaatggtgtgaaccccagggggcggagcctgcagtgagctgagatcgcaccactgcactccagcctgggcgacagtgagactccgtctcaaaaaaaaaaaaaaaaaaattcttaagtgggtcttcattatggaaatcacagaatagaatggacagaattctcatttctaaaattctgtgtgacaggtttcatatgggtctttttatggtcagttactaaaagccacataatagtagaactaaattttttttttttttttttttttttttttttttttttgagacggagtctcgctctgtcgcccaggctggagtgcagtggtgcgatcttggctcactgcaagctctgcctcccgggttcaagtgattctcctgcctcagcctcccaagtagctgggactacaggtgcatgccaccacaccctgctaattttttgtatttttagtagagactgggtttcactgtattagccaagatggtctcgatctcctgacctcgtgatccacccacctcggcctcccaaagtgctgggattacaggtgtgggccaccgcacccggccagaactcaatttttatctgttggtgagataatataggtcaagtatatagccttttggtgttttaacttgatccaattgtagaactttaggaattcagaccccgagatgttaaatgactgtcccctgttttaataggtttcctgagtttcagcataattgtcttagttcactgactagtttcttataagcataaccactggggggttacgtgcaaggatttcttcaggccgggtgcagtggctcacaccttgaatctcggcactttgggaggccaaggcaggaggatcacttgagttcaggagtttgagaccagccttggcaacatagcaagatctcatctttacaaaaaatttttaaattagccaggcatggaggtgcatacctggagtcccagctacttgagagtctgaggcaagaggatcactggagcccatgaattcgaggttgcagtgagtcctgattgtgccactgcactccagcctgggcaacagagccttgtctcttataaaaaaaaaaaaaaaaaaaaaaagcatttcttctgagttgtgcttgctgaactcaaaatactaggtgatttggtaatgcgcctaaagagcatggggctcctcctgccaattataagcaaagacatcacatttggagtttggcaagatcagaatatctcaggttgagcacctgctgaatgctaggattgtgtctatgcattttaaatctatttttaatctttattacagtcttataatagggattatgacaccagaacagagacagctgtcttaagatttcaaggggtgctagctgaagaaaacagagaggaaagttgggaagaagctggatccttgataacagctgagccatggacttaaccagtcttagatgagcgatacctcaccttcagatttcatgtcataccacctgaaataatatattttcattattgttgaagccattttgatttgggttgtctactatgctacctgcagccaaagggaaactaataaatgtgaactaagaagcaaacctacattcttcttcccaaagtccatgtttctccccctcgccatcctcttcaccaaaaactacattcattgtattcagctcctgcaaagagcacacattaagaaacaggtttaaggaagtgttagacactgaatgtattcgacccccaaaattcatgtgttgaaatcctgactcctaggactaactgttaggaggtagggcctttgggagatgattgggttttgagggtggagcccctcatgaatgggattagtgcccttataaaagaggccctggggagctgtctcccttttccaccatgtgaggacacggcaagaaaatggctgtctacaaagcaggaagcaggccctcaccacacactaatataccagcaccttgaccttgacctccccccatctccagaactgtgaggagtaagtgttgtttaagccacctagtctgtggtatttttgttataatagcccaaatggactaagaaatgaagagaaattaagatggggagggctattttcataataaggagcagaaaactaggaagagtagatatatttagaagggttaagaggagaggggagaatgtatatgtttggatagggagggacaagatgcccaactcatcttaaaagtgctgttgattcctgtgaaatttgtaacactcatttacattatttaaaaataaactaaattcgaacttgtcttggaggcatgaaagaaaaaaaaagacatgtttttagttattgtatgttactctgagctacacattatttaacatctctgaaactggaatatattttacaattgatagactcattttaattagcaggttattgttttcttagcagtacataagaaatggtgaatcttattgattcagtggcatttagattctattaaatataatttttaactgaagttgtacatagttaaataaaagtttactatgaaataaa

SEQ ID NO: 201343 - DNA, 1527 bp, Homo sapiens
  Payload ID: 19738
  Gene Name: zinc finger CCCH-type containing 8
  ENST ID: ENST00000615791
  CDS Start-End: 45-938
ctctgtagcttcccggctcgcgaaagggaggacctgtctgggtcatggattttgagaatcttttctcaaaaccccccaacccggccctcggcaaaacggccacggactctgacgaaagaatcgatgatgaaatagatacagaagttgaagaaacacaagaagagaaaattaaactggagtgcgagcaaattcccaaaaaatttagacactctgcaatatcaccaaaaagttcgctgcatagaaaatcaagaagtaaggactatgatgtatatagtgataatgatatctgcagtcaggaatcagaagataattttgccaaagagcttcaacagtacatacaagccagagaaatggcaaatgctgctcaacctgaagaatctacaaagaaagaaggagtaaaagataccccacaggctgctaaacaaaaaaataaaaatcttaaagctggtcacaagaatggcaaacagaagaaaatgaagcgaaaatggcctggccctggaaacaaaggatcaaatgctttgctgaggaacagcggctcacaggaagaggatggtaaacctaaagagaagcagcagcatttgagtcaggcattcatcaaccaacatacagtggaacgcaagggaaaacaaatttgtaaatattttcttgaaaggaaatgtattaagggagaccagtgtaaatttgatcatgatgcagagatagaaaagaaaaaggaaatgtgtaagttttatgtacaaggatattgtaccagaggtgaaaactgtctgtatttgcataatgaatatccttgtaagttttaccatacaggaacaaaatgttatcagggagaatactgcaagttttctcatgctccactgactcctgaaacacaagaattgttggctaaagttttggatactgaaaagaagtcatgtaataaaatagacataaaaaggtagcaatgtacagataaagagtactttaacgcccatgcgtgttcaagactgttcaagactggtgatttggagtagtttacaagattcctcattcagagtgccctcttgtgtgactggggtgatgtgcagcttccataatggatgggacagagagctgggatctaatgtacaagtgaagggcttggtcttccctgagacattccagccattggaataggagaggagcatatatggcagaggtgatggctggtgggtaaatgtgatagtaaattgtagaaacctcttctgattgattggatttccttaataaaatcggaagcaaggttaggctgagtgagggtgagtaaagaggtagaggaggtttgaggagagagaactgctcggaagacattggtagatggaccataaaaacagagttagttctctttatgacattaaatagttttacaacatatttttaatggttcacaatttcattttagggcttaaaataaattatggttctatgatttttttaaaccagtttcctattgttagacatttgtttccagtttcttactattataaataaagtgaaacaatatctcttact

SEQ ID NO: 201344 - DNA, 7100 bp, Homo sapiens
  Payload ID: 19739
  Gene Name: zinc finger CCCH-type, antiviral 1
  Uniprot ID: Q7Z2W4
  ENST ID: ENST00000242351
  CDS Start-End: 318-3026
gaaccgagagggggccaccccaggcggtcaccagcagatttgcccgcgcgttctctttctttccacccagttgcccttgcggccggctgtaaacctgccactaggacccggtcggtgagatctagcctcttgacctgagagccgagagtggatcgctgggctgggctaacggcgacggagagcgcgccctcgctgactccgggcgcgcccagcagtagcaccgcccgcgcccgcccctggacacttgtaagtttcgatttccgatttccgcggaaccgagtcccgcgccgcggcagagccagcacagccagcgcgccatggcggacccggaggtgtgctgcttcatcaccaaaatcctgtgcgcccacgggggccgcatggccctggacgcgctgctccaggagatcgcgctgtctgagccgcagctctgtgaggtgctgcaggtggccgggcccgaccgctttgtggtgttggagaccggcggcgaggccgggatcacccgatcggtggtggccaccactcgagcccgggtctgccgtcgcaagtactgccagagaccctgcgataacctgcatctctgcaaactcaacttgctgggccggtgcaactattcgcagtccgagcggaatttatgcaaatattctcatgaggttctctcagaagagaacttcaaagtcctgaaaaatcacgaactctctggactgaacaaagaggaattagcagtgctcctcctccaaagtgatcctttttttatgcccgagatatgcaaaagttataagggagagggtcggcagcagatttgtaaccagcagccaccgtgttcaagactccacatctgtgaccacttcacccgagggaactgtcgttttcccaactgcctccggtcccataacctgatggacagaaaggtgctggccatcatgagggagcacgggctgaaccccgacgtggtccagaacatccaggacatctgcaacagcaagcacatgcagaagaatcccccagggcccagagctccttcttcacatcgtagaaacatggcatatagggctagaagcaagagtagagatcggttctttcagggcagccaagaatttcttgcgtctgcttcagcgtctgctgagaggtcctgcacacctagtccagatcagatcagccacagggcttccctggaggacgcgcctgtggacgatctcacccgcaagttcacgtatctggggagtcaggatcgcgctcggcctccctcaggctcgtccaaggctactgatcttggaggaacaagtcaggccgggacaagccagaggtttttagagaacggcagtcaagaggacctcttgcatggaaatccaggcagcacttaccttgcttccaattcaacatcagcccccaactggaagagcctcacatcctggacgaatgaccaaggcgccaggagaaagactgtgttttctcccacgctacctgccgcccgctcttctcttggctctctgcaaacacctgaagctgtgaccaccagaaagggcacaggcttgctttcctcagactacaggatcatcaatggcaaaagtggaactcaggacatccagcctggccctctttttaataataatgctgatggagtggccacagatataacttctaccagatccttaaattacaaaagcactagcagcggtcacagagaaatatcatcacctaggattcaggatgctggacctgcttcccgagatgtccaggccactggcagaatcgcagatgatgctgacccaagagtagcacttgttaacgattctttatctgatgtcacaagtaccacatcttctagggtggatgatcatgactcagaggaaatttgtcttgaccatctgtgtaagggttgtccgcttaatggtagctgcagcaaagtccacttccatctgccttaccggtggcagatgcttattggtaaaacctggacggactttgagcacatggagacgatcgagaaaggctactgtaaccccggaatccacctctgttctgtaggaagttatacaatcaattttcgggtaatgagttgtgattcctttcccatccgacgcctctccactccttcttctgtcaccaagccagccaattctgtcttcaccaccaaatggatttggtattggaagaatgaatctggcacatggattcagtatggagaagagaaagacaaacggaaaaattcaaacgtcgactcttcatacctggagtctctctatcaatcctgtccgaggggagttgtgccatttcaggcgggctcacggaactatgagctgagtttccaagggatgattcagacaaacatagcttccaaaactcaaaaggatgtcatcagaagaccaacatttgtgcctcagtggtatgtgcagcagatgaagagagggccagaccatcagccagcaaagacctcgtcagtgtctttaactgcgacctttcgtcctcaggaggacttttgcttcctatcctcaaagaaatataagttgtcagagatccatcacctacatccagaatatgtcagagtaagtgagcattttaaagcttccatgaaaaatttcaagattgaaaagataaagaagatcgagaactcagagctcctggataaatttacatggaagaaatcgcagatgaaggaagaaggaaaactcctattttatgcgacaagccgtgcctatgtggaatctatctgttcgaataattttgacagtttcctacatgaaactcatgaaaacaaatacggaaaaggaatttactttgcaaaagatgccatctattcccacaaaaattgcccgtatgatgccaaaaacgtcgttatgtttgtagcccaagttctggttggaaagtttactgaaggaaatataacgtacacgagccctcctccacagttcgacagctgtgtggataccagatcgaatccctccgtttttgtcatctttcagaaagatcaggtttacccacaatatgtgattgaatatactgaagacaaagcctgcgtgattagttagaaccgatgaatacagcgtcagaaggatgccataaccattctgttcctttacagaactaaattgccgcagacaggagttaaagttttatattttcctgctcagttatctaatgtcttagatcagtggtccccaaattttgctacatattagaatcatctgggaggttttaaacaaattctgatgcccaggttgcaccccatgccaatgaaatcatttctgggcgtcagcgccaggcagttgtatttttttttttttttttttttttgagactgaatctcactccatcgtccaggctggagtgcagtggcgcgatctcggctcactgcaacctctgcctcccgggttcaagcaattctcctgcctcagcctcccgagtagctggaactacaggcacacactgccgcgcccagctaattttttgtattttttagtagagacagggtttcactgtgttgcccaggctggtctcaaactcctgagctcaggcaatctgcccgccttggcctcccaaagtgctaggattacaggtatgagccaccatgcccggctggcagttgtattttttaaagcccttctgatgattccaatgtgttggaaagtttaccttgtctcagatgtaactggtaaaggctgatttctaaattttctgtaattgcagcaacctttctctcctgtctacccttttagtttactgtatgccatggttttgttttggttacattgaaagaaagttaatttggaaaatttgggagaaatctaatcatgcctattaaggatgtaagacattacagccttagaagaaagattgtgaaaagctggggagaaaatgcttaaggacatgctaggggaaaaaaaagtaaaattgaagtgctattgcagacatggctgcagtactgtaccttatcattctgatgaaactgatttggagcacccttttctttatcgctacatttatttaggggacaaactccatccaggttgactctctctggaatgcggtaataagagctggcaagtaaggctcagagagaagcaaccaactggagttaattgcccatttgggctctttgtataattatggcaaagtagacatttatgttctaattaatatgattacagagaaggctttttctcaggtcaggcttttcatgaaagtattttgagaacaatgaattgcaataaccagcttcacacaagcataactgataaacgcgagtgctattgtagtcttggcaagtgagccaagaacctaggagcagggccattcctactgaaggacgggccccctacggagatgaaatttgtttcctggtgagcacagaatcagaacaaagaacaatatcccaaagaggccctgtgtctaccaggagcttctttttccaaatgtaatggattatgtggaattgtagtgccatcggtttttacttagagcccttgacgtgcttggaccaatatttccttccttcttatgaaccaggtttttccttctgattttcccttttcaacattccttaccagtcaccaaagtttcctgttataatttcttttagcagacaagttataagtcagatttaattagcatcagagttgattttatattagtcagattttggatcatcacagagatctccacaactccttggcttaaacagctccaccggtaaaaaaaaaaaaaaaaaaaaaaaaaaaaaatagtttttttagagtagagttattttctgggagagttactacaaatgcttattctcattgacttatttctttcatggtaactttcgttttggagtgttcattttctgaacttgaccctcacattgtaggggtgcagtttgtccaactctttccaacagcccattagacaccactagctggatatttcacaggcatctttgattcaatatgtccaaagtggaactctccatctacctccctcacatgaacctgttcctctctcaggatctgtatgtaagtgaaaagcatcaccatctacccattggctcaagcagaaatctggaagtcatctttgactccttcctctccctcctgataaacatctaagcagtttctaagtctagttttacctcttaaatatctctgttcccttctaagttgtttgctgtgttttcttcagagcaagaaggttatattttttaaaatttacttagtaatgcacattcaaaacacacatcaagtcttcaggataaagttcaaaaccgctgtcatggccccatgtgatctctccctcccctacccctctatcatttagtttcttctgcgcaagccactctggcttcctttcagttttgtggttcccatttttagctagttcagtggttttcaatgggcatttctgcctttttttttctaaacgacaaatagaaatacatcttctttattatcctccaaatccaattcagaggtaatatgctccacctacacacaattttagaaataaattaaaaattaaataaaactaatatgaacataaagaggaaataaaaggtacctaacttgggcacagctgtaactgaagacctaatgaagtagtcagatgcttacaactatttataatgcatcaatttgaacttagaaggtaggagatcagatcatatgtgggaaaatgtaaaagcagggatatcagtgggcattagaataaaaactagggatacaataacttctttgcatatgacaatacttatttgtatataagagaaagaacgaaataacctttattgaaataaagatactatgcaagaaaatgtacagttgtcgaagtggagaaaatgaggatatattcttgcagacgagctataggtcatacatgaatgtctagtgagacattcaaaattcgtatagggtgcagagtaatttcttattgtgaggaactgtccaatgtattgcaagatgttctgcatacttggctctcacatactaaatgctagtagcgcccccacccccacgcccagtcacggtgacaaccacaaaccctatcagatctattcacctttttcagagcagatattttgtaacattctctttgctgacctgaaatgactcatagataatacaatctacttacacacatgaatttcttaaaaaaatcaatttaatgccctaactctcttattaaggagaaatagaaaagaagaaatttataatgaaaagaagatgaatttcattatgtaaacgctcaggcatgactacgctgtttgaaacagacagatgtttactcttccttgtaatgagtaggtttggatttaagagccgattagaggctacttcctgtaaacaagtacaggaaaatgaaactagacgggtgggggacactagaatgaaaaccagtgttagggtaaagacaaaacagactatgtacataatctgtatatgggaaaagaaagagcgaaattaccttacttaaggataataggacaagacaaattacagattgtctcagagaaaacaaatgagttactctctcggacaagctgtaggtcctacctaaatgtccagcaggacattagacagtcgtacagggtacagaataattcttcgttgtgtggcactaacccacacactgcaggacatcgttctccctggctgcatccactcagtgctgggagtagtccccagttattatgaaaccaccaataacccactgaccacagtgagaaccactgattttttccactgacctactgaatatctagcatccttagattggctcaactgttactttcctaaggagtccttctacagaataggtcagatcttggcctcccaaaccccttatttttaaaatactttgcgccttgctttgataatttgtattatgtatccaaactgaaattatctgctttctgcattagaatgtaagccccctgagggttgagtcagtctgtcttgtttgctgtgccacgcctgatgcccagcccagcagcatgctttgtacactgatatattgggtaaattttgttgaataaattaagctcaactatttgtatttcaatagttgagttgtattgcttcctgttcttcaagcttaatttgaactgtctaataaaaagaagtaattaa

SEQ ID NO: 201345 - DNA, 4776 bp, Homo sapiens
  Payload ID: 19739
  Gene Name: zinc finger CCCH-type, antiviral 1
  ENST ID: ENST00000464606
  CDS Start-End: 24-3098
agagccagcacagccagcgcgccatggcggacccggaggtgtgctgcttcatcaccaaaatcctgtgcgcccacgggggccgcatggccctggacgcgctgctccaggagatcgcgctgtctgagccgcagctctgtgaggtgctgcaggtggccgggcccgaccgctttgtggtgttggagaccggcggcgaggccgggatcacccgatcggtggtggccaccactcgagcccgggtctgccgtcgcaagtactgccagagaccctgcgataacctgcatctctgcaaactcaacttgctgggccggtgcaactattcgcagtccgagcggaatttatgcaaatattctcatgaggttctctcagaagagaacttcaaagtcctgaaaaatcacgaactctctggactgaacaaagaggaattagcagtgctcctcctccaaagtgatcctttttttatgcccgagatatgcaaaagttataagggagagggtcggcagcagatttgtaaccagcagccaccgtgttcaagactccacatctgtgaccacttcacccgagggaactgtcgttttcccaactgcctccggtcccataacctgatggacagaaaggtgctggccatcatgagggagcacgggctgaaccccgacgtggtccagaacatccaggacatctgcaacagcaagcacatgcagaagaatcccccagggcccagagctccttcttcacatcgtagaaacatggcatatagggctagaagcaagagtagagatcggttctttcagggcagccaagaatttcttgcgtctgcttcagcgtctgctgagaggtcctgcacacctagtccagatcagatcagccacagggcttccctggaggacgcgcctgtggacgatctcacccgcaagttcacgtatctggggagtcaggatcgcgctcggcctccctcaggctcgtccaaggctactgatcttggaggaacaagtcaggccgggacaagccagaggtttttagagaacggcagtcaagaggacctcttgcatggaaatccaggcagcacttaccttgcttccaattcaacatcagcccccaactggaagagcctcacatcctggacgaatgaccaaggcgccaggagaaagactgtgttttctcccacgctacctgccgcccgctcttctcttggctctctgcaaacacctgaagctgtgaccaccagaaagggcacaggcttgctttcctcagactacaggatcatcaatggcaaaagtggaactcaggacatccagcctggccctctttttaataataatgctgatggagtggccacagatataacttctaccagatccttaaattacaaaagcactagcagcggtcacagagaaatatcatcacctaggattcaggatgctggacctgcttcccgagatgtccaggccactggcagaatcgcagatgatgctgacccaagagtagcacttgttaacggtaaatacaaagggaagacactttgggctagtacatttgttcatgatataccaaatggctctagtcaagtagtggataaaactactgatgtagaaaaaactggtgccactggttttggcttaacaatggcagtcaaggcagaaaaagatatgttacgtactggaagtcagagtctgaggaacctggtccccaccacacctggggaatccactgcccctgcacaagtcagcactctgcctcagtcacctgctgccctttcctcaagcaacagagctgcagtctggggggcccaagggcagaactgcacccaggttcctgtttcctctgccagcgagctcacaaggaagacaacaggctctgctcagtattctttatctgatgtcacaagtaccacatcttctagggtggatgatcatgactcagaggaaatttgtcttgaccatctgtgtaagggttgtccgcttaatggtagctgcagcaaagtccacttccatctgccttaccggtggcagatgcttattggtaaaacctggacggactttgagcacatggagacgatcgagaaaggctactgtaaccccggaatccacctctgttctgtaggaagttatacaatcaattttcgggtaatgagttgtgattcctttcccatccgacgcctctccactccttcttctgtcaccaagccagccaattctgtcttcaccaccaaatggatttggtattggaagaatgaatctggcacatggattcagtatggagaagagaaagacaaacggaaaaattcaaacgtcgactcttcatacctggagtctctctatcaatcctgtccgaggggagttgtgccatttcaggcgggctcacggaactatgagctgagtttccaagggatgattcagacaaacatagcttccaaaactcaaaaggatgtcatcagaagaccaacatttgtgcctcagtggtatgtgcagcagatgaagagagggccagaccatcagccagcaaagacctcgtcagtgtctttaactgcgacctttcgtcctcaggaggacttttgcttcctatcctcaaagaaatataagttgtcagagatccatcacctacatccagaatatgtcagagtaagtgagcattttaaagcttccatgaaaaatttcaagattgaaaagataaagaagatcgagaactcagagctcctggataaatttacatggaagaaatcgcagatgaaggaagaaggaaaactcctattttatgcgacaagccgtgcctatgtggaatctatctgttcgaataattttgacagtttcctacatgaaactcatgaaaacaaatacggaaaaggaatttactttgcaaaagatgccatctattcccacaaaaattgcccgtatgatgccaaaaacgtcgttatgtttgtagcccaagttctggttggaaagtttactgaaggaaatataacgtacacgagccctcctccacagttcgacagctgtgtggataccagatcgaatccctccgtttttgtcatctttcagaaagatcaggtttacccacaatatgtgattgaatatactgaagacaaagcctgcgtgattagttagaaccgatgaatacagcgtcagaaggatgccataaccattctgttcctttacagaactaaattgccgcagacaggagttaaagttttatattttcctgctcagttatctaatgtcttagatcagtggtccccaaattttgctacatattagaatcatctgggaggttttaaacaaattctgatgcccaggttgcaccccatgccaatgaaatcatttctgggcgtcagcgccaggcagttgtatttttttttttttttttttttttgagactgaatctcactccatcgtccaggctggagtgcagtggcgcgatctcggctcactgcaacctctgcctcccgggttcaagcaattctcctgcctcagcctcccgagtagctggaactacaggcacacactgccgcgcccagctaattttttgtattttttagtagagacagggtttcactgtgttgcccaggctggtctcaaactcctgagctcaggcaatctgcccgccttggcctcccaaagtgctaggattacaggtatgagccaccatgcccggctggcagttgtattttttaaagcccttctgatgattccaatgtgttggaaagtttaccttgtctcagatgtaactggtaaaggctgatttctaaattttctgtaattgcagcaacctttctctcctgtctacccttttagtttactgtatgccatggttttgttttggttacattgaaagaaagttaatttggaaaatttgggagaaatctaatcatgcctattaaggatgtaagacattacagccttagaagaaagattgtgaaaagctggggagaaaatgcttaaggacatgctaggggaaaaaaaagtaaaattgaagtgctattgcagacatggctgcagtactgtaccttatcattctgatgaaactgatttggagcacccttttctttatcgctacatttatttaggggacaaactccatccaggttgactctctctggaatgcggtaataagagctggcaagtaaggctcagagagaagcaaccaactggagttaattgcccatttgggctctttgtataattatggcaaagtagacatttatgttctaattaatatgattacagagaaggctttttctcaggtcaggcttttcatgaaagtattttgagaacaatgaattgcaataaccagcttcacacaagcataactgataaacgcgagtgctattgtagtcttggcaagtgagccaagaacctaggagcagggccattcctactgaaggacgggccccctacggagatgaaatttgtttcctggtgagcacagaatcagaacaaagaacaatatcccaaagaggccctgtgtctaccaggagcttctttttccaaatgtaatggattatgtggaattgtagtgccatcggtttttacttagagcccttgacgtgcttggaccaatatttccttccttcttatgaaccaggtttttccttctgattttcccttttcaacattccttaccagtcaccaaagtttcctgttataatttcttttagcagacaagttataagtcagatttaattagcatcagagttgattttatattagtcagattttggatcatcacagagatctccacaactccttggcttaaacagctccaccggtaaaaaaaaaaaaaaaa

SEQ ID NO: 201346 - DNA, 3182 bp, Homo sapiens
  Payload ID: 19739
  Gene Name: zinc finger CCCH-type, antiviral 1
  Uniprot ID: Q7Z2W4
  ENST ID: ENST00000471652
  CDS Start-End: 389-2488
cttttagtttctcttctttctaaagaaggctcgcggagcccggctggagaacctcaccctcgccgagcctagaaccgagagggggccaccccaggcggtcaccagcagatttgcccgcgcgttctctttctttccacccagttgcccttgcggccggctgtaaacctgccactaggacccggtcggtgagatctagcctcttgacctgagagccgagagtggatcgctgggctgggctaacggcgacggagagcgcgccctcgctgactccgggcgcgcccagcagtagcaccgcccgcgcccgcccctggacacttgtaagtttcgatttccgatttccgcggaaccgagtcccgcgccgcggcagagccagcacagccagcgcgccatggcggacccggaggtgtgctgcttcatcaccaaaatcctgtgcgcccacgggggccgcatggccctggacgcgctgctccaggagatcgcgctgtctgagccgcagctctgtgaggtgctgcaggtggccgggcccgaccgctttgtggtgttggagaccggcggcgaggccgggatcacccgatcggtggtggccaccactcgagcccgggtctgccgtcgcaagtactgccagagaccctgcgataacctgcatctctgcaaactcaacttgctgggccggtgcaactattcgcagtccgagcggaatttatgcaaatattctcatgaggttctctcagaagagaacttcaaagtcctgaaaaatcacgaactctctggactgaacaaagaggaattagcagtgctcctcctccaaagtgatcctttttttatgcccgagatatgcaaaagttataagggagagggtcggcagcagatttgtaaccagcagccaccgtgttcaagactccacatctgtgaccacttcacccgagggaactgtcgttttcccaactgcctccggtcccataacctgatggacagaaaggtgctggccatcatgagggagcacgggctgaaccccgacgtggtccagaacatccaggacatctgcaacagcaagcacatgcagaagaatcccccagggcccagagctccttcttcacatcgtagaaacatggcatatagggctagaagcaagagtagagatcggttctttcagggcagccaagaatttcttgcgtctgcttcagcgtctgctgagaggtcctgcacacctagtccagatcagatcagccacagggcttccctggaggacgcgcctgtggacgatctcacccgcaagttcacgtatctggggagtcaggatcgcgctcggcctccctcaggctcgtccaaggctactgatcttggaggaacaagtcaggccgggacaagccagaggtttttagagaacggcagtcaagaggacctcttgcatggaaatccaggcagcacttaccttgcttccaattcaacatcagcccccaactggaagagcctcacatcctggacgaatgaccaaggcgccaggagaaagactgtgttttctcccacgctacctgccgcccgctcttctcttggctctctgcaaacacctgaagctgtgaccaccagaaagggcacaggcttgctttcctcagactacaggatcatcaatggcaaaagtggaactcaggacatccagcctggccctctttttaataataatgctgatggagtggccacagatataacttctaccagatccttaaattacaaaagcactagcagcggtcacagagaaatatcatcacctaggattcaggatgctggacctgcttcccgagatgtccaggccactggcagaatcgcagatgatgctgacccaagagtagcacttgttaacgattctttatctgatgtcacaagtaccacatcttctagggtggatgatcatgactcagaggaaatttgtcttgaccatctgtgtaagggttgtccgcttaatggtagctgcagcaaagtccacttccatctgccttaccggtggcagatgcttattggtaaaacctggacggactttgagcacatggagacgatcgagaaaggctactgtaaccccggaatccacctctgttctgtaggaagttatacaatcaattttcgggtaatgagttgtgattcctttcccatccgacgcctctccactccttcttctgtcaccaagccagccaattctgtcttcaccaccaaatggatttggtattggaagaatgaatctggcacatggattcagtatggagaagagaaagacaaacggaaaaattcaaacgtcgactcttcatacctggagtctctctatcaatcctgtccgaggggagttgtgccatttcaggcgggctcacggaactatgagctgagtttccaagggatgattcagacaaacatagcttccaaaactcaaaaggatgtcatcagaagaccaacatttgtgcctcagtggtatgtgcagcagatgaagagagggccagagtaagtgttctgaagcagctgtttgctgacagatgcttgagatgttcatgccctgggctcatcaagtcactcgtgaatctggagcctgttttcctgaaaagttcctgtttgcattactctgcagtttccatttgcattatcgatgagtaagatgcttgttaagcagcatggtgtgactgaaaggatactagatcggaaaatgaattttctttctgaaagggaagtctgagcgagtctcctaaatactctgggctttagcttctccagctgtgaagagctggattgatgcagtacacctaaggaataatcatatatactgggtttttgttttgctgtggattcttttttttttttttttttttagagggggtctcactttgttgcccaggctggtcttgaactcctgagctcaagtgatcctcctacctcagtctcccaaagtgctgggattacaggcatgagccaccgtgcctggctttgctgtggattcttttgggtgtcttttgttttcctacacgatttatagaggatgaggggcggagaaagagatagaaaaaagggatgagctagctgttagagcaagggttttggtgagagataatattgattgaagggattttaaaggaaatgttgctgtgggggattcattgtaactctccttgtgaactgctcagtaaactctacattgttcatgaaca

SEQ ID NO: 201347 - DNA, 1487 bp, Homo sapiens
  Payload ID: 19739
  Gene Name: zinc finger CCCH-type, antiviral 1
  ENST ID: ENST00000460845
  CDS Start-End: 1-793
ggaatccactgcccctgcacaagtcagcactctgcctcagtcacctgctgccctttcctcaagcaacagagctgcagtctggggggcccaagggcagaactgcacccaggttcctgtttcctctgccagcgagctcacaaggaagacaacaggctctgctcagtattctttatctgatgtcacaagtaccacatcttctagggtggatgatcatgactcagaggaaatttgtcttgaccatctgtgtaagggttgtccgcttaatggtagctgcagcaaagtccacttccatctgccttaccggtggcagatgcttattggtaaaacctggacggactttgagcacatggagacgatcgagaaaggctactgtaaccccggaatccacctctgttctgtaggaagttatacaatcaattttcgggtaatgagttgtgattcctttcccatccgacgcctctccactccttcttctgtcaccaagccagccaattctgtcttcaccaccaaatggatttggtattggaagaatgaatctggcacatggattcagtatggagaagagaaagacaaacggaaaaattcaaacgtcgactcttcatacctggagtctctctatcaatcctgtccgaggggagttgtgccatttcaggcgggctcacggaactatgagctgagtttccaagggatgattcagacaaacatagcttccaaaactcaaaaggatgtcatcagaagaccaacatttgtgcctcagtggtatgtgcagcagatgaagagagggccagagtaagtgttctgaagcagctgtttgctgacagatgcttgagatgttcatgccctgggctcatcaagtcactcgtgaatctggagcctgttttcctgaaaagttcctgtttgcattactctgcagtttccatttgcattatcgatgagtaagatgcttgttaagcagcatggtgtgactgaaaggatactagatcggaaaatgaattttctttctgaaagggaagtctgagcgagtctcctaaatactctgggctttagcttctccagctgtgaagagctggattgatgcagtacacctaaggaataatcatatatactgggtttttgttttgctgtggattcttttttttttttttttttttagagggggtctcactttgttgcccaggctggtcttgaactcctgagctcaagtgatcctcctacctcagtctcccaaagtgctgggattacaggcatgagccaccgtgcctggctttgctgtggattcttttgggtgtcttttgttttcctacacgatttatagaggatgaggggcggagaaagagatagaaaaaagggatgagctagctgttagagcaagggttttggtgagagataatattgattgaagggattttaaaggaaatgttgctgtgggggattcattgtaactctccttgtgaactgctcagtaaactctacattgttcatgaaca

SEQ ID NO: 201348 - DNA, 1753 bp, Homo sapiens
  Payload ID: 19740
  Gene Name: zinc finger CCCH-type, antiviral 1-like
  Uniprot ID: Q96H79
  ENST ID: ENST00000275766
  CDS Start-End: 13-915
gcgccagcgaccatggcggagcccacagtgtgctccttcctcaccaaggtgctgtgcgcccacggcggccgcatgttcctgaaggacctgcgcggccacgtggagctgtcggaggccaggctccgggacgtgctgcagcgcgccgggcccgagcgtttcctgctgcaggaggtggagacgcaggagggcctcggggacgcggaggccgaggcggcggccggcgcggtgggcggtggcggcacctccgcctggagggtggtggccgtgtcctctgtgcgcctctgcgcccgctaccagcgcggcgagtgccaggcctgcgaccagctgcacttctgccgccggcacatgctgggcaagtgccccaaccgggactgctggtctacctgtaccctttcccatgatatccacacacctgtcaacatgcaggtcctgaaaagccatggactttttggtctcaatgaaaaccagcttcggatcctgcttttgcagaatgacccctgtcttttaccagaggtctgtttgctctacaacaaaggggaagccctgtatggctactgcaacctcaaggataaatgcaacaagtttcatgtgtgcaaatcctttgtgaaaggagaatgcaaacttcagacctgcaaacggtcccatcagcttatccatgctgcatctttgaagctgctacaggaccaaggactgaatattccaagtgttgttaattttcagataatctccacctacaagcatatgaagctgcacaagatgcttgaaaatacagataattcatcaccttcgactgagcattcacaaggccttgagaagcaaggagtgcacgcagctggagctgcagaagctggtcctctggcttctgtccctgctcagtcggccaagaagccctgcccagtgtcttgcgagaagtaaagaagatggaaaaggagaaaatgtccttttggaagaatacatttgggcatgggtggttggggatggggtgggacattgaacaggcaaagagaggctaaaattgagtgcagatggggctagtccagggcaagtgctgaagatggcagctgctatctgcagctcctaggtgctttcctcaggctgggtagatggagctctgctgacttctgtggtccaccattgtttttctatcaatttatattgtggcaatcctagagtactttgcactcatttttttttttcacttaatattgtctcataagcatctttctatatttgttcacatcgtacataatcatgtttttgcacagatacattaatattatcatagtttgtttaactacttggctttttctaacagtttttttttttgagatggtcttgctctgttgcccaggctggagtgcagtgacgtgatctcggctcactgcagccttgacttcctgggctcaagtgatcatcccacctcagcctcctgagtagctgggactacaggtatgcaccacgaccagctaattttttgtattttttttttgtagagagggtattttgccatgttgcccaggctagtcttgaactcctgggctcaagcgatctgcctgcttcagcctcccagagtgctaggattacaggcatgagccactgcacccagcctcttaacaaattttgaatataactcctgtcttaaaatctgcagaatattgaatttttccagctattttttacttttgcttagcttatagatgctaaaggatactgtcatttgcatttttaaaaatatatgtatgagtgaatagtt

SEQ ID NO: 201349 - DNA, 1827 bp, Homo sapiens
  Payload ID: 19741
  Gene Name: zinc finger CCHC-type and RNA binding motif 1
  Uniprot ID: Q8TBF4
  ENST ID: ENST00000266529
  CDS Start-End: 185-838
gcccggatctcaaacagtcgggaagaagcaccgtggctgctattatctgctctccgcgcctgacccctcccaggactcgtgatgccaaggccgctgcgagcggctacgaagagtcggggttgagccccagctgagccgagggctcgcactcttctggtctcccaggcccaacccacctgaagaaatgagtggtggattggctccaagtaagagcacagtgtatgtatccaacttgcctttttccctgacaaacaatgacttgtaccggatattttccaagtatggcaaagttgtaaaggttaccatcatgaaagataaagataccaggaagagtaaaggggttgcatttattttatttttggataaagactctgcacaaaactgtaccagggcaataaacaacaaacagttatttggtagagtgataaaagcaagcattgctattgacaatggaagagcagctgagttcatccgaaggcgaaactactttgataaatctaagtgttatgaatgtggggaaagtggacacttaagttatgcctgtccgaaaaatatgctcggagaacgtgagcctccaaagaagaaagaaaaaaagaaaaaaaagaaagctcctgaaccagaagaagaaattgaggaagtagaagaaagtgaagatgaaggggaggatcctgctcttgacagcctcagtcaggccatagcattccagcaagccaaaattgaagaagaacaaaaaaaatggaaacccagttcaggagtcccctcaacatcagatgattcaagacgcccaaggataaagaaaagcacatatttcagtgatgaggaagaacttagtgattaaaatcttgccccagcacagtaataaaaatcaagatttgttagtaacaatcttgaagagctaattttaataaaaataagaaaaattaatactatcatgttaatactattattgtcatcccaagaaaaaagatattttaaaaatttatttgaaaagttcattataagggctttattcatgcctgatttgtttacatgaggacttctgaaattaatccttaaaacaaacttcctgaagaccgaaaagttgaatgatttattgttacttatattaataaacttttcaagagaattttgtctttaaatatgggtgttttgtcatcatatttcttgtagctttatcccaatctggataaattgtaaatacctataaaataaattataaatacctataaaatataaagtaacatagctctaaaaggcttaaaatcaaacacaggtgttatttgtctgccctacccatagcaccaaattccattccctagaagaaactacttacatgtgcacacatgtagctaaataaagtacatatatttcagtcacttaataaaagaataaaggagaattattcaatctcttatacttctcctaccttcctcaatattcccaatgtggctgtattaaaaatttgggggaatccatatatatcttttttaataaccaagtaaatacttttcatttctgagccaaggaatatgctatgattacgttttttcctagagttaataattgtctattttttttccatgtattgtctttgtatttatgactaaatcttcccattctgtctgcaggtgggtatatggtaatgggattagagagcctttaattttctgctttgtatatttctatattgtttaactttgtaagaatgcccattacttttttaactagtaaaagcaatagaaataagttaatactatcatagtaatattattattgtcatcccaagaaaaaatatattaaaaagatatttgaaatttcattataaaa

SEQ ID NO: 201350 - DNA, 907 bp, Homo sapiens
  Payload ID: 19741
  Gene Name: zinc finger CCHC-type and RNA binding motif 1
  ENST ID: ENST00000552673
  CDS Start-End: 241-771
cgggaagaagcaccgtggctgctattatctgctctccgcgcctgacccctcccaggactcgtgatgccaaggccgctgcgagcggctacgaagagtcggggttgagccccagctgagccgagggctcgcactcttctggtctcccaggcccaacccacctgaagaaatgagtggtggattggctccaagtaagagcacagtatattttccaagtatggcaaagttgtaaaggttaccatcatgaaagataaagataccaggaagagtaaaggggttgcatttattttatttttggataaagactctgcacaaaactgtaccagggcaataaacaacaaacagttatttggtagagtgataaaagcaagcattgctattgacaatggaagagcagctgagttcatccgaaggcgaaactactttgataaatctaagtgttatgaatgtggggaaagtggacacttaagttatgcctgtccgaaaaatatgctcggagaacgtgagcctccaaagaagaaagaaaaaaagaaaaaaaagaaagctcctgaaccagaagaagaaattgaggaagtagaagaaagtgaagatgaaggggaggatcctgctcttgacagcctcagtcaggccatagcattccagcaagccaaaattgaagaagaacaaaaaaaatggaaacccagttcaggagtcccctcaacatcagatgattcaagacgcccaaggataaagaaaagcacatatttcagtgatgaggaagaacttagtgattaaaatcttgccccagcacagtaataaaaatcaagatttgttagtaacaatcttgaagagctaattttaataaaaataagaaaaattaatactatcatgttaatactattattgtcatcccaagaaaaaagatatttta

SEQ ID NO: 201351 - DNA, 633 bp, Homo sapiens
  Payload ID: 19741
  Gene Name: zinc finger CCHC-type and RNA binding motif 1
  ENST ID: ENST00000552235
  CDS Start-End: 235-633
gcccgccttcggggcccggatctcaaacagtcgggaagaagcaccgtggctgctattatctgctctccgcgcctgacccctcccaggactcgtgatgccaaggccgctgcgagcggctacgaagagtcggggttgagccccagctgagccgagggctcgcactcttctggtctcccaggcccaacccacctgaagatattttccaagtatggcaaagttgtaaaggttaccatcatgaaagataaagataccaggaagagtaaaggggttgcatttattttatttttggataaagactctgcacaaaactgtaccagggcaataaacaacaaacagttatttggtagagtgataaaagcaagcattgctattgacaatggaagagcagctgagttcatccgaaggcgaaactactttgataaatctaagtgttatgaatgtggggaaagtggacacttaagttatgcctgtccgaaaaatatgctcggagaacgtgagcctccaaagaagaaagaaaaaaagaaaaaaaagaaagctcctgaaccagaagaagaaattgaggaagtagaagaaagtgaagatgaaggggaggatcctgctcttgacagcctcagtcaggccatagcattccag

SEQ ID NO: 201352 - DNA, 5423 bp, Homo sapiens
  Payload ID: 19742
  Gene Name: zinc finger E-box binding homeobox 1
  Uniprot ID: P37275
  ENST ID: ENST00000320985
  CDS Start-End: 111-3485
gtaaaccaggtgcggtggggaggggggaggggtggaggcggaggggtgggggggaagggggagggagggggaggaggtgactcgagcatttagacacaagcgagaggatcatggcggatggccccaggtgtaagcgcagaaagcaggcgaacccgcggcgcaataacgttacaaattataatactgtggtagaaacaaattcagattcagatgatgaagacaaactgcatattgtggaagaagaaagtgttacagatgcagctgactgtgaaggtgtaccagaggatgacctgccaacagaccagacagtgttaccagggaggagcagtgaaagagaagggaatgctaagaactgctgggaggatgacagaaaggaagggcaagaaatcctggggcctgaagctcaggcagatgaagcaggatgtacagtaaaagatgatgaatgcgagtcagatgcagaaaatgagcaaaaccatgatcctaatgttgaagagtttctacaacaacaagacactgctgtcatttttcctgaggcacctgaagaggaccagaggcagggcacaccagaagccagtggtcatgatgaaaatggaacaccagatgcattttcacaattactcacctgtccatattgtgatagaggctataaacgctttacctctctgaaagaacacattaaatatcgtcatgaaaagaatgaagataactttagttgctccctgtgcagttacacctttgcatacagaacccaacttgaacgtcacatgacatcacataaatcaggaagagatcaaagacatgtgacgcagtctgggtgtaatcgtaaattcaaatgcactgagtgtggaaaagctttcaaatacaaacatcacctaaaagagcacttaagaattcacagtggagagaagccatatgaatgcccaaactgcaagaaacgcttttcccattctggctcctatagctcacacataagcagtaagaaatgtatcagcttgatacctgtgaatgggcgaccaagaacaggactcaagacatctcagtgttcttcaccgtctctttcagcatcaccaggcagtcccacacgaccacagatacggcaaaagatagagaataaaccccttcaagaacaactttctgttaaccaaattaaaactgaacctgtggattatgaattcaaacccatagtggttgcttcaggaatcaactgttcaacccctttacaaaatggggttttcactggtggtggcccattacaggcaaccagttctcctcagggcatggtgcaagctgttgttctgccaacagttggtttggtgtctcccataagtatcaatttaagtgatattcagaatgtacttaaagtggcggtagatggtaatgtaataaggcaagtgttggagaataatcaagccaatcttgcatccaaagaacaagaaacaatcaatgcttcacccatacaacaaggtggccattctgttatttcagccatcagtcttcctttggttgatcaagatggaacaaccaaaattatcatcaactacagtcttgagcagcctagccaacttcaagttgttcctcaaaatttaaaaaaagaaaatccagtcgctacaaacagttgtaaaagtgaaaagttaccagaagatcttactgttaagtctgagaaggacaaaagctttgaagggggggtgaatgatagcacttgtcttctgtgtgatgattgtccaggagatattaatgcacttccagaattaaagcactatgacctaaagcagcctactcagcctcctccactccctgcagcagaagctgagaagcctgagtcctctgtttcatcagctactggagatggcaatttgtctcctagtcagccacctttaaagaacctcttgtctctcctaaaagcatattatgctttgaatgcacaaccaagtgcagaagagctctcaaaaattgctgattcagtaaacctaccactggatgtagtaaaaaagtggtttgaaaagatgcaagctggacagatttcagtgcagtcttctgaaccatcttctcctgaaccaggcaaagtaaatatccctgccaagaacaatgatcagcctcaatctgcaaatgcaaatgaaccccaggacagcacagtaaatctacaaagtcctttgaagatgactaactccccagttttaccagtgggatcaaccaccaatggttccagaagtagtacaccatccccatcacctctaaacctttcctcatccagaaatacacagggttacttgtacacagctgagggtgcacaagaagagccacaagtagaacctcttgatctttcactaccaaagcaacagggagaattattagaaaggtcaactatcactagtgtttaccagaacagtgtttattctgtccaggaagaacccttgaacttgtcttgcgcaaaaaaggagccacaaaaggacagttgtgttacagactcagaaccagttgtaaatgtaatcccaccaagtgccaaccccataaatatcgctatacctacagtcactgcccagttacccacaatcgtggccattgctgaccagaacagtgttccatgcttaagagcgctagctgccaataagcaaacgattctgattccccaggtggcatacacctactcaactacggtcagccctgcagtccaagaaccacccttgaaagtgatccagccaaatggaaatcaggatgaaagacaagatactagctcagaaggagtatcaaatgtagaggatcagaatgactctgattctacaccgcccaaaaagaaaatgcggaagacagaaaatggaatgtatgcttgtgatttgtgtgacaagatattccaaaagagtagttcattattgagacataaatatgaacacacaggtaaaagacctcatgagtgtggaatctgtaaaaaggcatttaaacacaaacatcatttgattgaacacatgcgattacattctggagaaaagccctatcaatgtgacaaatgtggaaagcgcttctcacactctgggtcttattctcaacacatgaatcatcgctactcctactgtaagagagaagcggaagaacgtgacagcacagagcaggaagaggcagggcctgaaatcctctcgaatgagcacgtgggtgccagggcgtctccctcacagggcgactcggacgagagagagagtttgacaagggaagaggatgaagacagtgaaaaagaggaagaggaggaggataaagagatggaagaattgcaggaagaaaaagaatgtgaaaaaccacaaggggatgaggaagaggaggaggaggaggaagaagtggaagaagaagaggtagaagaggcagagaatgagggagaagaagcaaaaactgaaggtctgatgaaggatgacagggctgaaagtcaagcaagcagcttaggacaaaaagtaggcgagagtagtgagcaagtgtctgaagaaaagacaaatgaagcctaatcgtttttctagaaggaaaataaattctaattgataatgaatttcgttcaatattatccttgcttttcatggaaacacagtaacctgtatgctgtgattcctgttcactactgtgtaaagtaaaaactaaaaaaatacaaaatacaaaacacacacacacacacacacacacacacacacacacacacaaaataaatccgggtgtgcctgaacctcagacctagtaatttttcatgcagttttcaaagttaggaacaagtttgtaacatgcagcagattagaaaaccttaatgactcagagagcaacaatacaagaggttaaaggaagctgattaattagatatgcatctggcattgttttatcttatcagtattatcactcttatgttggtttattcttaagctgtacaattgggagaaattttataattttttattggtaaacatatgctaaatccgcttcagtattttattatgttttttaaaatgtgagaacttctgcactacaaaattcccttcacagagaagtataatgtagttccaacccgtgctaactaccttttataaattcagtctagaaggtagtaatttctaatatttagatgtcttagtagagcgtattatcatttaaagtgtattgttagccttaagaaagcagctgatagaagaactgaagtttcttactcacgtggtttaaaatggagttcaaaagattgccattgagttctgattgcagggactaacaatgttaatctgataaggacagcaaaatcatcagaatcagtgtttgtgattgtgtttgaatatgtggtaacatatgaaggatatgacatgaagctttgtatctcctttggccttaagcaagacctgtgtgctgtaagtgccatttctcagtattttcaaggctctaacccgccttcatccaatgtgtggcctacaataactagcatttgttgatttgtctcttgtatcaaaattcccaaataaaacttaaaaccactgactctgtcagagaaactgaaacactgggacatttcatccttcaattcctcggtattgattttatgttgattgattttcagaatttctctacagaaacgaaagggaaattttctaatctgctttatccatgtacttgcatttcagacatggacatgctattgttatttggctcataactgtttccaaatgttagttattatggacccaatttattaacaacattagctgatttttacctatcagtattattttatttcttttagtttatagatctgtgcaacatttttgtactgtatgtcttcaaacctggcagtattaatacccttcttactgacatatgtacttttagttttagaaaacttttatatttatgtgtcttatttttatatttctttatttattacacagtgtagtgtataatactgtagtttgtattaatacaataatatattttagtatgaaaatttggaaagttgataagatttaaagtagagatgcaattggttctcctgcattgagatttgatttaacagtgttatgttaacatttatacttgccttggactgtagaacagaacttaaatgggaatgtattagttttacaactacaatcaagtcattttacctttacccagtttttaatataaaacttaaattttgaaattcactgtgtgactaatagcatgatgctctgcagttttattaagaaatcagcctaaccatacaactctcatttccttagtaagccaaattaggattaacttctataaacagtgttgggaacaatgtttaacattttgtgccaatttgttcctgtattcatgtatgtaagttacagatctgactcttcatttttaagttccttgttacatcatggtcattttctagttttttaccagactcccatctcacaataaaatgcatcaacaagcctgaa

SEQ ID NO: 201353 - DNA, 5990 bp, Homo sapiens
  Payload ID: 19742
  Gene Name: zinc finger E-box binding homeobox 1
  Uniprot ID: P37275
  ENST ID: ENST00000361642
  CDS Start-End: 64-3441
gggggggaagggggagggagggggaggaggtgactcgagcatttagacacaagcgagaggatcatggcggatggccccaggtgtaagcgcagaaagcaggcgaacccgcggcgcaataacgttacaaattataatactgtggtagaaacaaattcagattcagatgatgaagacaaactgcatattgtggaagaagaaagtgttacagatgcagctgactgtgaaggtgtaccagaggatgacctgccaacagaccagacagtgttaccagggaggagcagtgaaagagaagggaatgctaagaactgctgggaggatgacacaggaaaggaagggcaagaaatcctggggcctgaagctcaggcagatgaagcaggatgtacagtaaaagatgatgaatgcgagtcagatgcagaaaatgagcaaaaccatgatcctaatgttgaagagtttctacaacaacaagacactgctgtcatttttcctgaggcacctgaagaggaccagaggcagggcacaccagaagccagtggtcatgatgaaaatggaacaccagatgcattttcacaattactcacctgtccatattgtgatagaggctataaacgctttacctctctgaaagaacacattaaatatcgtcatgaaaagaatgaagataactttagttgctccctgtgcagttacacctttgcatacagaacccaacttgaacgtcacatgacatcacataaatcaggaagagatcaaagacatgtgacgcagtctgggtgtaatcgtaaattcaaatgcactgagtgtggaaaagctttcaaatacaaacatcacctaaaagagcacttaagaattcacagtggagagaagccatatgaatgcccaaactgcaagaaacgcttttcccattctggctcctatagctcacacataagcagtaagaaatgtatcagcttgatacctgtgaatgggcgaccaagaacaggactcaagacatctcagtgttcttcaccgtctctttcagcatcaccaggcagtcccacacgaccacagatacggcaaaagatagagaataaaccccttcaagaacaactttctgttaaccaaattaaaactgaacctgtggattatgaattcaaacccatagtggttgcttcaggaatcaactgttcaacccctttacaaaatggggttttcactggtggtggcccattacaggcaaccagttctcctcagggcatggtgcaagctgttgttctgccaacagttggtttggtgtctcccataagtatcaatttaagtgatattcagaatgtacttaaagtggcggtagatggtaatgtaataaggcaagtgttggagaataatcaagccaatcttgcatccaaagaacaagaaacaatcaatgcttcacccatacaacaaggtggccattctgttatttcagccatcagtcttcctttggttgatcaagatggaacaaccaaaattatcatcaactacagtcttgagcagcctagccaacttcaagttgttcctcaaaatttaaaaaaagaaaatccagtcgctacaaacagttgtaaaagtgaaaagttaccagaagatcttactgttaagtctgagaaggacaaaagctttgaagggggggtgaatgatagcacttgtcttctgtgtgatgattgtccaggagatattaatgcacttccagaattaaagcactatgacctaaagcagcctactcagcctcctccactccctgcagcagaagctgagaagcctgagtcctctgtttcatcagctactggagatggcaatttgtctcctagtcagccacctttaaagaacctcttgtctctcctaaaagcatattatgctttgaatgcacaaccaagtgcagaagagctctcaaaaattgctgattcagtaaacctaccactggatgtagtaaaaaagtggtttgaaaagatgcaagctggacagatttcagtgcagtcttctgaaccatcttctcctgaaccaggcaaagtaaatatccctgccaagaacaatgatcagcctcaatctgcaaatgcaaatgaaccccaggacagcacagtaaatctacaaagtcctttgaagatgactaactccccagttttaccagtgggatcaaccaccaatggttccagaagtagtacaccatccccatcacctctaaacctttcctcatccagaaatacacagggttacttgtacacagctgagggtgcacaagaagagccacaagtagaacctcttgatctttcactaccaaagcaacagggagaattattagaaaggtcaactatcactagtgtttaccagaacagtgtttattctgtccaggaagaacccttgaacttgtcttgcgcaaaaaaggagccacaaaaggacagttgtgttacagactcagaaccagttgtaaatgtaatcccaccaagtgccaaccccataaatatcgctatacctacagtcactgcccagttacccacaatcgtggccattgctgaccagaacagtgttccatgcttaagagcgctagctgccaataagcaaacgattctgattccccaggtggcatacacctactcaactacggtcagccctgcagtccaagaaccacccttgaaagtgatccagccaaatggaaatcaggatgaaagacaagatactagctcagaaggagtatcaaatgtagaggatcagaatgactctgattctacaccgcccaaaaagaaaatgcggaagacagaaaatggaatgtatgcttgtgatttgtgtgacaagatattccaaaagagtagttcattattgagacataaatatgaacacacaggtaaaagacctcatgagtgtggaatctgtaaaaaggcatttaaacacaaacatcatttgattgaacacatgcgattacattctggagaaaagccctatcaatgtgacaaatgtggaaagcgcttctcacactctgggtcttattctcaacacatgaatcatcgctactcctactgtaagagagaagcggaagaacgtgacagcacagagcaggaagaggcagggcctgaaatcctctcgaatgagcacgtgggtgccagggcgtctccctcacagggcgactcggacgagagagagagtttgacaagggaagaggatgaagacagtgaaaaagaggaagaggaggaggataaagagatggaagaattgcaggaagaaaaagaatgtgaaaaaccacaaggggatgaggaagaggaggaggaggaggaagaagtggaagaagaagaggtagaagaggcagagaatgagggagaagaagcaaaaactgaaggtctgatgaaggatgacagggctgaaagtcaagcaagcagcttaggacaaaaagtaggcgagagtagtgagcaagtgtctgaagaaaagacaaatgaagcctaatcgtttttctagaaggaaaataaattctaattgataatgaatttcgttcaatattatccttgcttttcatggaaacacagtaacctgtatgctgtgattcctgttcactactgtgtaaagtaaaaactaaaaaaatacaaaatacaaaacacacacacacacacacacacacacacacacacacacacaaaataaatccgggtgtgcctgaacctcagacctagtaatttttcatgcagttttcaaagttaggaacaagtttgtaacatgcagcagattagaaaaccttaatgactcagagagcaacaatacaagaggttaaaggaagctgattaattagatatgcatctggcattgttttatcttatcagtattatcactcttatgttggtttattcttaagctgtacaattgggagaaattttataattttttattggtaaacatatgctaaatccgcttcagtattttattatgttttttaaaatgtgagaacttctgcactacaaaattcccttcacagagaagtataatgtagttccaacccgtgctaactaccttttataaattcagtctagaaggtagtaatttctaatatttagatgtcttagtagagcgtattatcatttaaagtgtattgttagccttaagaaagcagctgatagaagaactgaagtttcttactcacgtggtttaaaatggagttcaaaagattgccattgagttctgattgcagggactaacaatgttaatctgataaggacagcaaaatcatcagaatcagtgtttgtgattgtgtttgaatatgtggtaacatatgaaggatatgacatgaagctttgtatctcctttggccttaagcaagacctgtgtgctgtaagtgccatttctcagtattttcaaggctctaacccgccttcatccaatgtgtggcctacaataactagcatttgttgatttgtctcttgtatcaaaattcccaaataaaacttaaaaccactgactctgtcagagaaactgaaacactgggacatttcatccttcaattcctcggtattgattttatgttgattgattttcagaatttctctacagaaacgaaagggaaattttctaatctgctttatccatgtacttgcatttcagacatggacatgctattgttatttggctcataactgtttccaaatgttagttattatggacccaatttattaacaacattagctgatttttacctatcagtattattttatttcttttagtttatagatctgtgcaacatttttgtactgtatgtcttcaaacctggcagtattaatacccttcttactgacatatgtacttttagttttagaaaacttttatatttatgtgtcttatttttatatttctttatttattacacagtgtagtgtataatactgtagtttgtattaatacaataatatattttagtatgaaaatttggaaagttgataagatttaaagtagagatgcaattggttctcctgcattgagatttgatttaacagtgttatgttaacatttatacttgccttggactgtagaacagaacttaaatgggaatgtattagttttacaactacaatcaagtcattttacctttacccagtttttaatataaaacttaaattttgaaattcactgtgtgactaatagcatgatgctctgcagttttattaagaaatcagcctaaccatacaactctcatttccttagtaagccaaattaggattaacttctataaacagtgttgggaacaatgtttaacattttgtgccaatttgttcctgtattcatgtatgtaagttacagatctgactcttcatttttaagttccttgttacatcatggtcattttctagttttttaccagactcccatctcacaataaaatgcatcaacaagcctgaactgctgtcattcttttcatcattatcagtattttctttggaaaactgtgaaatggggtacattgtcatcctgcatttgattcatcttgagctgaatttgggtaacactaaatgttttagacattctccactaaattatggattttcttgtggctaaatgtttctggagaggtcagagttgacaaaacctcttcacaggttgctccttcttcctgaaatccttaatcctccgcatttcatgcttcaggtcatttcagggaagcctgggtttagatgcctttctgactctcagctcctgcacttctgtcatcatacctctgatactattatttatattccttccccactaggaacaggaaccacatttgtcatagtcactctcacattcctcactgcctaacagggtgcctggcataagttgggacaacagatatttgttgaataaaaatataatttgcatgtttatggagctcagctatgttctcactttttttgcttctaattccagaatatatgttaaatgatctaataatttgattattttcttataagtcttattaaacactagtcataatagacacaataaattatgccttctttttctattgcctt

SEQ ID NO: 201354 - DNA, 6267 bp, Homo sapiens
  Payload ID: 19742
  Gene Name: zinc finger E-box binding homeobox 1
  Uniprot ID: P37275
  ENST ID: ENST00000446923
  CDS Start-End: 392-3718
tttctccctcccctctgggatgcgaaacgcgaggttttgtaacctttcctggcaattttagattttgtgtgggatttcctgtctagaagcagatacgaagatttttaagctgtttcaagatgtttccttccaatccataattatatttttaatatattcgagccatcattaaaatcactgctttcgtgattttaattattcaaataaacacttgcattttaaagacgtctgttgattataaacgaaaggtattttggtattctcattgtggagagatgacttgttatagcaaggagtggagcataggctattgcaattttaatttcctgttttagcgtcaaatagtgtgtgttccatattgagctgttgccgctgttgctgatgtggctttatgaaagttacaaattataatactgtggtagaaacaaattcagattcagatgatgaagacaaactgcatattgtggaagaagaaagtgttacagatgcagctgactgtgaaggtgtaccagaggatgacctgccaacagaccagacagtgttaccagggaggagcagtgaaagagaagggaatgctaagaactgctgggaggatgacacaggaaaggaagggcaagaaatcctggggcctgaagctcaggcagatgaagcaggatgtacagtaaaagatgatgaatgcgagtcagatgcagaaaatgagcaaaaccatgatcctaatgttgaagagtttctacaacaacaagacactgctgtcatttttcctgaggcacctgaagaggaccagaggcagggcacaccagaagccagtggtcatgatgaaaatggaacaccagatgcattttcacaattactcacctgtccatattgtgatagaggctataaacgctttacctctctgaaagaacacattaaatatcgtcatgaaaagaatgaagataactttagttgctccctgtgcagttacacctttgcatacagaacccaacttgaacgtcacatgacatcacataaatcaggaagagatcaaagacatgtgacgcagtctgggtgtaatcgtaaattcaaatgcactgagtgtggaaaagctttcaaatacaaacatcacctaaaagagcacttaagaattcacagtggagagaagccatatgaatgcccaaactgcaagaaacgcttttcccattctggctcctatagctcacacataagcagtaagaaatgtatcagcttgatacctgtgaatgggcgaccaagaacaggactcaagacatctcagtgttcttcaccgtctctttcagcatcaccaggcagtcccacacgaccacagatacggcaaaagatagagaataaaccccttcaagaacaactttctgttaaccaaattaaaactgaacctgtggattatgaattcaaacccatagtggttgcttcaggaatcaactgttcaacccctttacaaaatggggttttcactggtggtggcccattacaggcaaccagttctcctcagggcatggtgcaagctgttgttctgccaacagttggtttggtgtctcccataagtatcaatttaagtgatattcagaatgtacttaaagtggcggtagatggtaatgtaataaggcaagtgttggagaataatcaagccaatcttgcatccaaagaacaagaaacaatcaatgcttcacccatacaacaaggtggccattctgttatttcagccatcagtcttcctttggttgatcaagatggaacaaccaaaattatcatcaactacagtcttgagcagcctagccaacttcaagttgttcctcaaaatttaaaaaaagaaaatccagtcgctacaaacagttgtaaaagtgaaaagttaccagaagatcttactgttaagtctgagaaggacaaaagctttgaagggggggtgaatgatagcacttgtcttctgtgtgatgattgtccaggagatattaatgcacttccagaattaaagcactatgacctaaagcagcctactcagcctcctccactccctgcagcagaagctgagaagcctgagtcctctgtttcatcagctactggagatggcaatttgtctcctagtcagccacctttaaagaacctcttgtctctcctaaaagcatattatgctttgaatgcacaaccaagtgcagaagagctctcaaaaattgctgattcagtaaacctaccactggatgtagtaaaaaagtggtttgaaaagatgcaagctggacagatttcagtgcagtcttctgaaccatcttctcctgaaccaggcaaagtaaatatccctgccaagaacaatgatcagcctcaatctgcaaatgcaaatgaaccccaggacagcacagtaaatctacaaagtcctttgaagatgactaactccccagttttaccagtgggatcaaccaccaatggttccagaagtagtacaccatccccatcacctctaaacctttcctcatccagaaatacacagggttacttgtacacagctgagggtgcacaagaagagccacaagtagaacctcttgatctttcactaccaaagcaacagggagaattattagaaaggtcaactatcactagtgtttaccagaacagtgtttattctgtccaggaagaacccttgaacttgtcttgcgcaaaaaaggagccacaaaaggacagttgtgttacagactcagaaccagttgtaaatgtaatcccaccaagtgccaaccccataaatatcgctatacctacagtcactgcccagttacccacaatcgtggccattgctgaccagaacagtgttccatgcttaagagcgctagctgccaataagcaaacgattctgattccccaggtggcatacacctactcaactacggtcagccctgcagtccaagaaccacccttgaaagtgatccagccaaatggaaatcaggatgaaagacaagatactagctcagaaggagtatcaaatgtagaggatcagaatgactctgattctacaccgcccaaaaagaaaatgcggaagacagaaaatggaatgtatgcttgtgatttgtgtgacaagatattccaaaagagtagttcattattgagacataaatatgaacacacaggtaaaagacctcatgagtgtggaatctgtaaaaaggcatttaaacacaaacatcatttgattgaacacatgcgattacattctggagaaaagccctatcaatgtgacaaatgtggaaagcgcttctcacactctgggtcttattctcaacacatgaatcatcgctactcctactgtaagagagaagcggaagaacgtgacagcacagagcaggaagaggcagggcctgaaatcctctcgaatgagcacgtgggtgccagggcgtctccctcacagggcgactcggacgagagagagagtttgacaagggaagaggatgaagacagtgaaaaagaggaagaggaggaggataaagagatggaagaattgcaggaagaaaaagaatgtgaaaaaccacaaggggatgaggaagaggaggaggaggaggaagaagtggaagaagaagaggtagaagaggcagagaatgagggagaagaagcaaaaactgaaggtctgatgaaggatgacagggctgaaagtcaagcaagcagcttaggacaaaaagtaggcgagagtagtgagcaagtgtctgaagaaaagacaaatgaagcctaatcgtttttctagaaggaaaataaattctaattgataatgaatttcgttcaatattatccttgcttttcatggaaacacagtaacctgtatgctgtgattcctgttcactactgtgtaaagtaaaaactaaaaaaatacaaaatacaaaacacacacacacacacacacacacacacacacacacacacaaaataaatccgggtgtgcctgaacctcagacctagtaatttttcatgcagttttcaaagttaggaacaagtttgtaacatgcagcagattagaaaaccttaatgactcagagagcaacaatacaagaggttaaaggaagctgattaattagatatgcatctggcattgttttatcttatcagtattatcactcttatgttggtttattcttaagctgtacaattgggagaaattttataattttttattggtaaacatatgctaaatccgcttcagtattttattatgttttttaaaatgtgagaacttctgcactacaaaattcccttcacagagaagtataatgtagttccaacccgtgctaactaccttttataaattcagtctagaaggtagtaatttctaatatttagatgtcttagtagagcgtattatcatttaaagtgtattgttagccttaagaaagcagctgatagaagaactgaagtttcttactcacgtggtttaaaatggagttcaaaagattgccattgagttctgattgcagggactaacaatgttaatctgataaggacagcaaaatcatcagaatcagtgtttgtgattgtgtttgaatatgtggtaacatatgaaggatatgacatgaagctttgtatctcctttggccttaagcaagacctgtgtgctgtaagtgccatttctcagtattttcaaggctctaacccgccttcatccaatgtgtggcctacaataactagcatttgttgatttgtctcttgtatcaaaattcccaaataaaacttaaaaccactgactctgtcagagaaactgaaacactgggacatttcatccttcaattcctcggtattgattttatgttgattgattttcagaatttctctacagaaacgaaagggaaattttctaatctgctttatccatgtacttgcatttcagacatggacatgctattgttatttggctcataactgtttccaaatgttagttattatggacccaatttattaacaacattagctgatttttacctatcagtattattttatttcttttagtttatagatctgtgcaacatttttgtactgtatgtcttcaaacctggcagtattaatacccttcttactgacatatgtacttttagttttagaaaacttttatatttatgtgtcttatttttatatttctttatttattacacagtgtagtgtataatactgtagtttgtattaatacaataatatattttagtatgaaaatttggaaagttgataagatttaaagtagagatgcaattggttctcctgcattgagatttgatttaacagtgttatgttaacatttatacttgccttggactgtagaacagaacttaaatgggaatgtattagttttacaactacaatcaagtcattttacctttacccagtttttaatataaaacttaaattttgaaattcactgtgtgactaatagcatgatgctctgcagttttattaagaaatcagcctaaccatacaactctcatttccttagtaagccaaattaggattaacttctataaacagtgttgggaacaatgtttaacattttgtgccaatttgttcctgtattcatgtatgtaagttacagatctgactcttcatttttaagttccttgttacatcatggtcattttctagttttttaccagactcccatctcacaataaaatgcatcaacaagcctgaactgctgtcattcttttcatcattatcagtattttctttggaaaactgtgaaatggggtacattgtcatcctgcatttgattcatcttgagctgaatttgggtaacactaaatgttttagacattctccactaaattatggattttcttgtggctaaatgtttctggagaggtcagagttgacaaaacctcttcacaggttgctccttcttcctgaaatccttaatcctccgcatttcatgcttcaggtcatttcagggaagcctgggtttagatgcctttctgactctcagctcctgcacttctgtcatcatacctctgatactattatttatattccttccccactaggaacaggaaccacatttgtcatagtcactctcacattcctcactgcctaacagggtgcctggcataagttgggacaacagatatttgttgaataaaaatataatttgcatgtttatggagctcagctatgttctcactttttttgcttctaattccagaatatatgttaaatgatctaataatttgattattttcttataagtcttattaaacactagtcataatagacacaataaattatgccttctttttctattgcctt

SEQ ID NO: 201355 - DNA, 6246 bp, Homo sapiens
  Payload ID: 19742
  Gene Name: zinc finger E-box binding homeobox 1
  ENST ID: ENST00000437844
  CDS Start-End: 20-181
agacacaagcgagaggatcatggcggatggccccaggtgtaagcgcagaaagcaggcgaacccgcggcgcaataacgttttcagtttaaattctcaactggcaattggccgaaaactcccatctgaagacatgatcatccaaatgtcattttgtgatttggctactgtctgcttgacataggaaagcactatcaagaaagactaatggagtgactatcaaaaggaagtcaatggacaaccttaaacttccaccacaagaggaatataaagaggtccctcctgcaccaagaaagatctgcagatctttttcagtgttcttggaggtgtggggtgtgagaacttgatcagtttgtgtcagccaccttgttctctaaagttacaaattataatactgtggtagaaacaaattcagattcagatgatgaagacaaactgcatattgtggaagaagaaagtgttacagatgcagctgactgtgaaggtgtaccagaggatgacctgccaacagaccagacagtgttaccagggaggagcagtgaaagagaagggaatgctaagaactgctgggaggatgacacaggaaaggaagggcaagaaatcctggggcctgaagctcaggcagatgaagcaggatgtacagtaaaagatgatgaatgcgagtcagatgcagaaaatgagcaaaaccatgatcctaatgttgaagagtttctacaacaacaagacactgctgtcatttttcctgaggcacctgaagaggaccagaggcagggcacaccagaagccagtggtcatgatgaaaatggaacaccagatgcattttcacaattactcacctgtccatattgtgatagaggctataaacgctttacctctctgaaagaacacattaaatatcgtcatgaaaagaatgaagataactttagttgctccctgtgcagttacacctttgcatacagaacccaacttgaacgtcacatgacatcacataaatcaggaagagatcaaagacatgtgacgcagtctgggtgtaatcgtaaattcaaatgcactgagtgtggaaaagctttcaaatacaaacatcacctaaaagagcacttaagaattcacagtggagagaagccatatgaatgcccaaactgcaagaaacgcttttcccattctggctcctatagctcacacataagcagtaagaaatgtatcagcttgatacctgtgaatgggcgaccaagaacaggactcaagacatctcagtgttcttcaccgtctctttcagcatcaccaggcagtcccacacgaccacagatacggcaaaagatagagaataaaccccttcaagaacaactttctgttaaccaaattaaaactgaacctgtggattatgaattcaaacccatagtggttgcttcaggaatcaactgttcaacccctttacaaaatggggttttcactggtggtggcccattacaggcaaccagttctcctcagggcatggtgcaagctgttgttctgccaacagttggtttggtgtctcccataagtatcaatttaagtgatattcagaatgtacttaaagtggcggtagatggtaatgtaataaggcaagtgttggagaataatcaagccaatcttgcatccaaagaacaagaaacaatcaatgcttcacccatacaacaaggtggccattctgttatttcagccatcagtcttcctttggttgatcaagatggaacaaccaaaattatcatcaactacagtcttgagcagcctagccaacttcaagttgttcctcaaaatttaaaaaaagaaaatccagtcgctacaaacagttgtaaaagtgaaaagttaccagaagatcttactgttaagtctgagaaggacaaaagctttgaagggggggtgaatgatagcacttgtcttctgtgtgatgattgtccaggagatattaatgcacttccagaattaaagcactatgacctaaagcagcctactcagcctcctccactccctgcagcagaagctgagaagcctgagtcctctgtttcatcagctactggagatggcaatttgtctcctagtcagccacctttaaagaacctcttgtctctcctaaaagcatattatgctttgaatgcacaaccaagtgcagaagagctctcaaaaattgctgattcagtaaacctaccactggatgtagtaaaaaagtggtttgaaaagatgcaagctggacagatttcagtgcagtcttctgaaccatcttctcctgaaccaggcaaagtaaatatccctgccaagaacaatgatcagcctcaatctgcaaatgcaaatgaaccccaggacagcacagtaaatctacaaagtcctttgaagatgactaactccccagttttaccagtgggatcaaccaccaatggttccagaagtagtacaccatccccatcacctctaaacctttcctcatccagaaatacacagggttacttgtacacagctgagggtgcacaagaagagccacaagtagaacctcttgatctttcactaccaaagcaacagggagaattattagaaaggtcaactatcactagtgtttaccagaacagtgtttattctgtccaggaagaacccttgaacttgtcttgcgcaaaaaaggagccacaaaaggacagttgtgttacagactcagaaccagttgtaaatgtaatcccaccaagtgccaaccccataaatatcgctatacctacagtcactgcccagttacccacaatcgtggccattgctgaccagaacagtgttccatgcttaagagcgctagctgccaataagcaaacgattctgattccccaggtggcatacacctactcaactacggtcagccctgcagtccaagaaccacccttgaaagtgatccagccaaatggaaatcaggatgaaagacaagatactagctcagaaggagtatcaaatgtagaggatcagaatgactctgattctacaccgcccaaaaagaaaatgcggaagacagaaaatggaatgtatgcttgtgatttgtgtgacaagatattccaaaagagtagttcattattgagacataaatatgaacacacaggtaaaagacctcatgagtgtggaatctgtaaaaaggcatttaaacacaaacatcatttgattgaacacatgcgattacattctggagaaaagccctatcaatgtgacaaatgtggaaagcgcttctcacactctgggtcttattctcaacacatgaatcatcgctactcctactgtaagagagaagcggaagaacgtgacagcacagagcaggaagaggcagggcctgaaatcctctcgaatgagcacgtgggtgccagggcgtctccctcacagggcgactcggacgagagagagagtttgacaagggaagaggatgaagacagtgaaaaagaggaagaggaggaggataaagagatggaagaattgcaggaagaaaaagaatgtgaaaaaccacaaggggatgaggaagaggaggaggaggaggaagaagtggaagaagaagaggtagaagaggcagagaatgagggagaagaagcaaaaactgaaggtctgatgaaggatgacagggctgaaagtcaagcaagcagcttaggacaaaaagtaggcgagagtagtgagcaagtgtctgaagaaaagacaaatgaagcctaatcgtttttctagaaggaaaataaattctaattgataatgaatttcgttcaatattatccttgcttttcatggaaacacagtaacctgtatgctgtgattcctgttcactactgtgtaaagtaaaaactaaaaaaatacaaaatacaaaacacacacacacacacacacacacacacacacacacacacaaaataaatccgggtgtgcctgaacctcagacctagtaatttttcatgcagttttcaaagttaggaacaagtttgtaacatgcagcagattagaaaaccttaatgactcagagagcaacaatacaagaggttaaaggaagctgattaattagatatgcatctggcattgttttatcttatcagtattatcactcttatgttggtttattcttaagctgtacaattgggagaaattttataattttttattggtaaacatatgctaaatccgcttcagtattttattatgttttttaaaatgtgagaacttctgcactacaaaattcccttcacagagaagtataatgtagttccaacccgtgctaactaccttttataaattcagtctagaaggtagtaatttctaatatttagatgtcttagtagagcgtattatcatttaaagtgtattgttagccttaagaaagcagctgatagaagaactgaagtttcttactcacgtggtttaaaatggagttcaaaagattgccattgagttctgattgcagggactaacaatgttaatctgataaggacagcaaaatcatcagaatcagtgtttgtgattgtgtttgaatatgtggtaacatatgaaggatatgacatgaagctttgtatctcctttggccttaagcaagacctgtgtgctgtaagtgccatttctcagtattttcaaggctctaacccgccttcatccaatgtgtggcctacaataactagcatttgttgatttgtctcttgtatcaaaattcccaaataaaacttaaaaccactgactctgtcagagaaactgaaacactgggacatttcatccttcaattcctcggtattgattttatgttgattgattttcagaatttctctacagaaacgaaagggaaattttctaatctgctttatccatgtacttgcatttcagacatggacatgctattgttatttggctcataactgtttccaaatgttagttattatggacccaatttattaacaacattagctgatttttacctatcagtattattttatttcttttagtttatagatctgtgcaacatttttgtactgtatgtcttcaaacctggcagtattaatacccttcttactgacatatgtacttttagttttagaaaacttttatatttatgtgtcttatttttatatttctttatttattacacagtgtagtgtataatactgtagtttgtattaatacaataatatattttagtatgaaaatttggaaagttgataagatttaaagtagagatgcaattggttctcctgcattgagatttgatttaacagtgttatgttaacatttatacttgccttggactgtagaacagaacttaaatgggaatgtattagttttacaactacaatcaagtcattttacctttacccagtttttaatataaaacttaaattttgaaattcactgtgtgactaatagcatgatgctctgcagttttattaagaaatcagcctaaccatacaactctcatttccttagtaagccaaattaggattaacttctataaacagtgttgggaacaatgtttaacattttgtgccaatttgttcctgtattcatgtatgtaagttacagatctgactcttcatttttaagttccttgttacatcatggtcattttctagttttttaccagactcccatctcacaataaaatgcatcaacaagcctgaactgctgtcattcttttcatcattatcagtattttctttggaaaactgtgaaatggggtacattgtcatcctgcatttgattcatcttgagctgaatttgggtaacactaaatgttttagacattctccactaaattatggattttcttgtggctaaatgtttctggagaggtcagagttgacaaaacctcttcacaggttgctccttcttcctgaaatccttaatcctccgcatttcatgcttcaggtcatttcagggaagcctgggtttagatgcctttctgactctcagctcctgcacttctgtcatcatacctctgatactattatttatattccttccccactaggaacaggaaccacatttgtcatagtcactctcacattcctcactgcctaacagggtgcctggcataagttgggacaacagatatttgttgaataaaaatataatttgcatgtttatggagctcagctatgttctcactttttttgcttctaattccagaatatatgttaaatgatctaataatttgattattttcttataagtcttattaaacactagtcataatagacacaataaattatgccttctttttctattgcctta

SEQ ID NO: 201356 - DNA, 887 bp, Homo sapiens
  Payload ID: 19742
  Gene Name: zinc finger E-box binding homeobox 1
  ENST ID: ENST00000424869
  CDS Start-End: 20-887
agacacaagcgagaggatcatggcggatggccccaggtgtaagcgcagaaagcaggcgaacccgcggcgcaataacgttacaaattataatactgtggtagaaacaaattcagattcagatgatgaagacaaactgcatattgtggaagaagaaagtgttacagatgcagctgactgtgaaggtgtaccagaggatgacctgccaacagaccagacagtgttaccagggaggagcagtgaaagagaagggaatgctaagaactgctgggaggatgacacaggaaaggaagggcaagaaatcctggggcctgaagctcaggcagatgaagcaggatgtacagtaaaagatgatgaatgcgagtcagatgcagaaaatgagcaaaaccatgatcctaatgttgaagagtttctacaacaacaagacactgctgtcatttttcctgaggcacctgaagaggaccagaggcagggcacaccagaagccagtggtcatgatgaaaatggaacaccagatgcattttcacaattactcacctgtccatattgtgatagaggctataaacgctttacctctctgaaagaacacattaaatatcgtcatgaaaagaatgaagataactttagttgctccctgtgcagttacacctttgcatacagaacccaacttgaacgtcacatgacatcacataaatcaggaagagatcaaagacatgtgacgcagtctgggtgtaatcgtaaattcaaatgcactgagtgtggaaaagctttcaaatacaaacatcacctaaaagagcacttaagaattcacagtggagagaagccatatgaatgcccaaactgcaagaaacgcttttcccattctggctcctatagctcacacataagca

SEQ ID NO: 201357 - DNA, 3217 bp, Homo sapiens
  Payload ID: 19742
  Gene Name: zinc finger E-box binding homeobox 1
  Uniprot ID: P37275
  ENST ID: ENST00000542815
  CDS Start-End: 14-3187
aagcgagaggatcatggcggatggccccaggtgtaagcgcagaaagcaggcgaacccgcggcgcaataacggaaaggaagggcaagaaatcctggggcctgaagctcaggcagatgaagcaggatgtacagtaaaagatgatgaatgcgagtcagatgcagaaaatgagcaaaaccatgatcctaatgttgaagagtttctacaacaacaagacactgctgtcatttttcctgaggcacctgaagaggaccagaggcagggcacaccagaagccagtggtcatgatgaaaatggaacaccagatgcattttcacaattactcacctgtccatattgtgatagaggctataaacgctttacctctctgaaagaacacattaaatatcgtcatgaaaagaatgaagataactttagttgctccctgtgcagttacacctttgcatacagaacccaacttgaacgtcacatgacatcacataaatcaggaagagatcaaagacatgtgacgcagtctgggtgtaatcgtaaattcaaatgcactgagtgtggaaaagctttcaaatacaaacatcacctaaaagagcacttaagaattcacagtggagagaagccatatgaatgcccaaactgcaagaaacgcttttcccattctggctcctatagctcacacataagcagtaagaaatgtatcagcttgatacctgtgaatgggcgaccaagaacaggactcaagacatctcagtgttcttcaccgtctctttcagcatcaccaggcagtcccacacgaccacagatacggcaaaagatagagaataaaccccttcaagaacaactttctgttaaccaaattaaaactgaacctgtggattatgaattcaaacccatagtggttgcttcaggaatcaactgttcaacccctttacaaaatggggttttcactggtggtggcccattacaggcaaccagttctcctcagggcatggtgcaagctgttgttctgccaacagttggtttggtgtctcccataagtatcaatttaagtgatattcagaatgtacttaaagtggcggtagatggtaatgtaataaggcaagtgttggagaataatcaagccaatcttgcatccaaagaacaagaaacaatcaatgcttcacccatacaacaaggtggccattctgttatttcagccatcagtcttcctttggttgatcaagatggaacaaccaaaattatcatcaactacagtcttgagcagcctagccaacttcaagttgttcctcaaaatttaaaaaaagaaaatccagtcgctacaaacagttgtaaaagtgaaaagttaccagaagatcttactgttaagtctgagaaggacaaaagctttgaagggggggtgaatgatagcacttgtcttctgtgtgatgattgtccaggagatattaatgcacttccagaattaaagcactatgacctaaagcagcctactcagcctcctccactccctgcagcagaagctgagaagcctgagtcctctgtttcatcagctactggagatggcaatttgtctcctagtcagccacctttaaagaacctcttgtctctcctaaaagcatattatgctttgaatgcacaaccaagtgcagaagagctctcaaaaattgctgattcagtaaacctaccactggatgtagtaaaaaagtggtttgaaaagatgcaagctggacagatttcagtgcagtcttctgaaccatcttctcctgaaccaggcaaagtaaatatccctgccaagaacaatgatcagcctcaatctgcaaatgcaaatgaaccccaggacagcacagtaaatctacaaagtcctttgaagatgactaactccccagttttaccagtgggatcaaccaccaatggttccagaagtagtacaccatccccatcacctctaaacctttcctcatccagaaatacacagggttacttgtacacagctgagggtgcacaagaagagccacaagtagaacctcttgatctttcactaccaaagcaacagggagaattattagaaaggtcaactatcactagtgtttaccagaacagtgtttattctgtccaggaagaacccttgaacttgtcttgcgcaaaaaaggagccacaaaaggacagttgtgttacagactcagaaccagttgtaaatgtaatcccaccaagtgccaaccccataaatatcgctatacctacagtcactgcccagttacccacaatcgtggccattgctgaccagaacagtgttccatgcttaagagcgctagctgccaataagcaaacgattctgattccccaggtggcatacacctactcaactacggtcagccctgcagtccaagaaccacccttgaaagtgatccagccaaatggaaatcaggatgaaagacaagatactagctcagaaggagtatcaaatgtagaggatcagaatgactctgattctacaccgcccaaaaagaaaatgcggaagacagaaaatggaatgtatgcttgtgatttgtgtgacaagatattccaaaagagtagttcattattgagacataaatatgaacacacaggtaaaagacctcatgagtgtggaatctgtaaaaaggcatttaaacacaaacatcatttgattgaacacatgcgattacattctggagaaaagccctatcaatgtgacaaatgtggaaagcgcttctcacactctgggtcttattctcaacacatgaatcatcgctactcctactgtaagagagaagcggaagaacgtgacagcacagagcaggaagaggcagggcctgaaatcctctcgaatgagcacgtgggtgccagggcgtctccctcacagggcgactcggacgagagagagagtttgacaagggaagaggatgaagacagtgaaaaagaggaagaggaggaggataaagagatggaagaattgcaggaagaaaaagaatgtgaaaaaccacaaggggatgaggaagaggaggaggaggaggaagaagtggaagaagaagaggtagaagaggcagagaatgagggagaagaagcaaaaactgaaggtctgatgaaggatgacagggctgaaagtcaagcaagcagcttaggacaaaaagtaggcgagagtagtgagcaagtgtctgaagaaaagacaaatgaagcctaatcgtttttctagaaggaaaataaattctaa

SEQ ID NO: 201358 - DNA, 3368 bp, Homo sapiens
  Payload ID: 19742
  Gene Name: zinc finger E-box binding homeobox 1
  Uniprot ID: P37275
  ENST ID: ENST00000560721
  CDS Start-End: 24-3338
atttagacacaagcgagaggatcatggcggatggccccaggtgtaagcgcagaaagcaggcgaacccgcggcgcaataacgttacaaattataatactgtggtagaaacaaattcagattcagatgatgaagacaaactgcatattgtggaagaagaaagtgttacagatgcagctgactgtgaaggtgtaccagaggatgacctgccaacagaccagacagtgttaccagggaggagcagtgaaagagaagggaatgctaagaactgctgggaggatgacataaaagatgatgaatgcgagtcagatgcagaaaatgagcaaaaccatgatcctaatgttgaagagtttctacaacaacaagacactgctgtcatttttcctgaggcacctgaagaggaccagaggcagggcacaccagaagccagtggtcatgatgaaaatggaacaccagatgcattttcacaattactcacctgtccatattgtgatagaggctataaacgctttacctctctgaaagaacacattaaatatcgtcatgaaaagaatgaagataactttagttgctccctgtgcagttacacctttgcatacagaacccaacttgaacgtcacatgacatcacataaatcaggaagagatcaaagacatgtgacgcagtctgggtgtaatcgtaaattcaaatgcactgagtgtggaaaagctttcaaatacaaacatcacctaaaagagcacttaagaattcacagtggagagaagccatatgaatgcccaaactgcaagaaacgcttttcccattctggctcctatagctcacacataagcagtaagaaatgtatcagcttgatacctgtgaatgggcgaccaagaacaggactcaagacatctcagtgttcttcaccgtctctttcagcatcaccaggcagtcccacacgaccacagatacggcaaaagatagagaataaaccccttcaagaacaactttctgttaaccaaattaaaactgaacctgtggattatgaattcaaacccatagtggttgcttcaggaatcaactgttcaacccctttacaaaatggggttttcactggtggtggcccattacaggcaaccagttctcctcagggcatggtgcaagctgttgttctgccaacagttggtttggtgtctcccataagtatcaatttaagtgatattcagaatgtacttaaagtggcggtagatggtaatgtaataaggcaagtgttggagaataatcaagccaatcttgcatccaaagaacaagaaacaatcaatgcttcacccatacaacaaggtggccattctgttatttcagccatcagtcttcctttggttgatcaagatggaacaaccaaaattatcatcaactacagtcttgagcagcctagccaacttcaagttgttcctcaaaatttaaaaaaagaaaatccagtcgctacaaacagttgtaaaagtgaaaagttaccagaagatcttactgttaagtctgagaaggacaaaagctttgaagggggggtgaatgatagcacttgtcttctgtgtgatgattgtccaggagatattaatgcacttccagaattaaagcactatgacctaaagcagcctactcagcctcctccactccctgcagcagaagctgagaagcctgagtcctctgtttcatcagctactggagatggcaatttgtctcctagtcagccacctttaaagaacctcttgtctctcctaaaagcatattatgctttgaatgcacaaccaagtgcagaagagctctcaaaaattgctgattcagtaaacctaccactggatgtagtaaaaaagtggtttgaaaagatgcaagctggacagatttcagtgcagtcttctgaaccatcttctcctgaaccaggcaaagtaaatatccctgccaagaacaatgatcagcctcaatctgcaaatgcaaatgaaccccaggacagcacagtaaatctacaaagtcctttgaagatgactaactccccagttttaccagtgggatcaaccaccaatggttccagaagtagtacaccatccccatcacctctaaacctttcctcatccagaaatacacagggttacttgtacacagctgagggtgcacaagaagagccacaagtagaacctcttgatctttcactaccaaagcaacagggagaattattagaaaggtcaactatcactagtgtttaccagaacagtgtttattctgtccaggaagaacccttgaacttgtcttgcgcaaaaaaggagccacaaaaggacagttgtgttacagactcagaaccagttgtaaatgtaatcccaccaagtgccaaccccataaatatcgctatacctacagtcactgcccagttacccacaatcgtggccattgctgaccagaacagtgttccatgcttaagagcgctagctgccaataagcaaacgattctgattccccaggtggcatacacctactcaactacggtcagccctgcagtccaagaaccacccttgaaagtgatccagccaaatggaaatcaggatgaaagacaagatactagctcagaaggagtatcaaatgtagaggatcagaatgactctgattctacaccgcccaaaaagaaaatgcggaagacagaaaatggaatgtatgcttgtgatttgtgtgacaagatattccaaaagagtagttcattattgagacataaatatgaacacacaggtaaaagacctcatgagtgtggaatctgtaaaaaggcatttaaacacaaacatcatttgattgaacacatgcgattacattctggagaaaagccctatcaatgtgacaaatgtggaaagcgcttctcacactctgggtcttattctcaacacatgaatcatcgctactcctactgtaagagagaagcggaagaacgtgacagcacagagcaggaagaggcagggcctgaaatcctctcgaatgagcacgtgggtgccagggcgtctccctcacagggcgactcggacgagagagagagtttgacaagggaagaggatgaagacagtgaaaaagaggaagaggaggaggataaagagatggaagaattgcaggaagaaaaagaatgtgaaaaaccacaaggggatgaggaagaggaggaggaggaggaagaagtggaagaagaagaggtagaagaggcagagaatgagggagaagaagcaaaaactgaaggtctgatgaaggatgacagggctgaaagtcaagcaagcagcttaggacaaaaagtaggcgagagtagtgagcaagtgtctgaagaaaagacaaatgaagcctaatcgtttttctagaaggaaaataaattctaa

SEQ ID NO: 201359 - DNA, 1500 bp, Homo sapiens
  Payload ID: 19742
  Gene Name: zinc finger E-box binding homeobox 1
  ENST ID: ENST00000561212
  CDS Start-End: 679-1500
ggggactccgcggcgagccccgcgagtggggtccacgtttggcggggcgcggcggggcggcgcggggaacaaggcaggaaagttacaaattataatactgtggtagaaacaaattcagattcagatgatgaagacaaactgcatattgtggaagaagaaagtgttacagatgcagctgactgtgaaggtgtaccagaggatgacctgccaacagaccagacagtgttaccagggaggagcagtgaaagagaagggaatgctaagaactgctgggaggatgacagaaaggaagggcaagaaatcctggggcctgaagctcaggcagatgaagcaggatgtacagtaaaagatgatgaatgcgagtcagatgcagaaaatgagcaaaaccatgatcctaatgttgaagagtttctacaacaacaagacactgctgtcatttttcctgaggcacctgaagaggaccagaggcagggcacaccagaagccagtggtcatgatgaaaatggaacaccagatgcattttcacaattactcacctgtccatattgtgatagaggctataaacgctttacctctctgaaagaacacattaaatatcgtcatgaaaagaatgaagataactttagttgctccctgtgcagttacacctttgcatacagaacccaacttgaacgtcacatgacatcacataaatcaggaagagatcaaagacatgtgacgcagtctgggtgtaatcgtaaattcaaatgcactgagtgtggaaaagctttcaaatacaaacatcacctaaaagagcacttaagaattcacagtggagagaagccatatgaatgcccaaactgcaagaaacgcttttcccattctggctcctatagctcacacataagcagtaagaaatgtatcagcttgatacctgtgaatgggcgaccaagaacaggactcaagacatctcagtgttcttcaccgtctctttcagcatcaccaggcagtcccacacgaccacagatacggcaaaagatagagaataaaccccttcaagaacaactttctgttaaccaaattaaaactgaacctgtggattatgaattcaaacccatagtggttgcttcaggaatcaactgttcaacccctttacaaaatggggttttcactggtggtggcccattacaggcaaccagttctcctcagggcatggtgcaagctgttgttctgccaacagttggtttggtgtctcccataagtatcaatttaagtgatattcagaatgtacttaaagtggcggtagatggtaatgtaataaggcaagtgttggagaataatcaagccaatcttgcatccaaagaacaagaaacaatcaatgcttcacccatacaacaaggtggccattctgttatttcagccatcagtcttcctttggttgatcaagatggaacaaccaaaattatcatcaactacagtcttgagcagcctagccaacttcaagttgttcctcaaaattta

SEQ ID NO: 201360 - DNA, 1205 bp, Homo sapiens
  Payload ID: 19742
  Gene Name: zinc finger E-box binding homeobox 1
  ENST ID: ENST00000559476
  CDS Start-End: 375-1205
ggatgcgaaacgcgaggttttgtaacctttcctggcaattttagattttgtgtgggatttcctgtctagaagcagatacgaagatttttaagctgtttcaagatgtttccttccaatccataattatatttttaatatattcgagccatcattaaaatcactgctttcgtgattttaattattcaaataaacacttgcattttaaagacgtctgttgattataaacgaaaggtattttggtattctcattgtggagagatgacttgttatagcaaggagtggagcataggctattgcaattttaatttcctgttttagcgtcaaatagtgtgtgttccatattgagctgttgccgctgttgctgatgtggctttatgaaagttacaaattataatactgtggtagaaacaaattcagattcagatgatgaagacaaactgcatattgtggaagaagaaagtgttacagatgcagctgactgtgaaggtgtaccagaggatgacctgccaacagaccagacagtgttaccagggaggagcagtgaaagagaagggaatgctaagaactgctgggaggatgacacaggaaaggaagggcaagaaatcctggggcctgaagctcaggcagatgaagcaggatgtacagtaaaagatgatgaatgcgagtcagatgcagaaaatgagcaaaaccatgatcctaatgttgaagagtttctacaacaacaagacactgctgtcatttttcctgaggcacctgaagaggaccagaggcagggcacaccagaagccagtggtcatgatgaaaatggaacaccagatgcattttcacaattactcacctgtccatattgtgatagaggctataaacgctttacctctctgaaagaacacattaaatatcgtcatgaaaagaatgaagataactttagttgctccctgtgcagttacacctttgcatacagaacccaacttgaacgtcacatgacatcacataaatcaggaagagatcaaagacatgtgacgcagtctgggtgtaatcgtaaattcaaatgcactgagtgtggaaaagctttcaaatacaaacatcacctaaaagagcacttaagaattcacagtggagagaagccatatgaatgcccaaactgcaagaaacgcttttcccattctggctcctatagctcacacataagcagtaagaaatgtatc

SEQ ID NO: 201361 - DNA, 886 bp, Homo sapiens
  Payload ID: 19742
  Gene Name: zinc finger E-box binding homeobox 1
  ENST ID: ENST00000558440
  CDS Start-End: 23-886
tttagacacaagcgagaggatcatggcggatggccccaggtgtaagcgcagaaagcaggcgaacccgcggcgcaataacgttacaaattataatactgtggtagaaacaaattcagattcagatgatgaagacaaactgcatattgtggaagaagaaagtgttacagatgcagctgactgtgaaggtgtaccagaggatgacctgccaacagaccagacagtgttaccagggaggagcagtgaaagagaagggaatgctaagaactgctgggaggatgacagaacaccagatgcattttcacaattactcacctgtccatattgtgatagaggctataaacgctttacctctctgaaagaacacattaaatatcgtcatgaaaagaatgaagataactttagttgctccctgtgcagttacacctttgcatacagaacccaacttgaacgtcacatgacatcacataaatcaggaagagatcaaagacatgtgacgcagtctgggtgtaatcgtaaattcaaatgcactgagtgtggaaaagctttcaaatacaaacatcacctaaaagagcacttaagaattcacagtggagagaagccatatgaatgcccaaactgcaagaaacgcttttcccattctggctcctatagctcacacataagcagtaagaaatgtatcagcttgatacctgtgaatgggcgaccaagaacaggactcaagacatctcagtgttcttcaccgtctctttcagcatcaccaggcagtcccacacgaccacagatacggcaaaagatagagaataaaccccttcaagaacaactttctgttaaccaaattaaaactgaacctgtggattatgaattcaaacccatagtggttgcttca

SEQ ID NO: 201362 - DNA, 3913 bp, Homo sapiens
  Payload ID: 19743
  Gene Name: zinc finger E-box binding homeobox 2
  ENST ID: ENST00000303660
  CDS Start-End: 138-3779
acttcgcggcttcttcatgctttttcttctcaccatttctggccaaaactacaaacaagacttcgcagatcgagcctgcgtgctgccgaagcagggcgccgagtccatgcgaactgccatctgatccgctcttatcaatgaagcagccgatcatggcggatggcccccggtgcaagaggcgcaaacaagccaatcccaggaggaaaaacgtggtgaactatgacaatgtagtggacacaggttctgaaacagatgaggaagacaagcttcatattgctgaggatgacggtattgccaaccctctggaccaggagacgagtccagctagtgtgcccaaccatgagtcctccccacacgtgagccaagctctgttgccaagagaggaagaggaagatgaaataagggagggtggagtggaacacccctggcacaacaacgagattctacaagcctctgtagatggtccagaaatgaaggaagactatgacactatggggccagaagccacgatccagaccgcaattaacaatggtacagtgaagaatgcaaattgcacatcagattttgaggaatactttgccaaaagaaaactggaggaacgcgatggtcatgcagtcagcatcgaggagtaccttcagcgcagtgacacagccattatttacccagaagcccctgaggagctgtctcgccttggcacgccagaggccaatgggcaagaagaaaatgacctgccacctggaactccagatgcttttgcccaactgctgacctgcccctactgcgaccggggctacaagcgcttgacatcactgaaggagcacatcaagtaccgccacgagaagaatgaagagaacttttcctgccctctctgtagctacacgtttgcctaccgcacccagctcgagcggcatatggtgacacacaagccagggacagatcagcaccaaatgctaacccaaggagcaggtaatcgcaagttcaaatgcacagagtgtggcaaggccttcaaatataaacaccatctgaaagaacacctgcgaattcacagtggtgaaaaaccttacgagtgcccaaactgcaagaaacgtttctcccattctggttcctacagttcgcacatcagcagcaagaaatgtattggtttaatctctgtaaatggccgaatgagaaacaatatcaagacgggttcttcccctaattctgtttcttcttctcctactaattcagccattacccagttaagaaacaagttggagaatggaaaaccacttagtatgtctgaacagacaggcttacttaaaattaaaacagaaccactagacttcaatgactataaagttcttatggctacacacgggtttagtggcactagtccctttatgaatggtgggcttggagccaccagccctttaggagttcatccatctgctcagagtccaatgcagcacttaggtgtagggatggaagcccctttacttgggtttcccaccatgaatagtaatttaagtgaggtacaaaaggttctacagattgtggacaatactgtttccaggcaaaaaatggactgcaaggctgaagaaatttcaaagttgaaaggttatcacatgaaggatccatgctctcaacctgaggaacaaggagttacttctcctaatattccgcctgtcggtcttccggtagtgagtcataatggtgccactaaaagtattattgactatacgttggaaaaagtcaatgaagccaaagcttgcctccagagcttgactactgactcaaggagacagatcagtaatataaagaaagagaagctacgtactttaatagatttggtcactgatgacaaaatgattgagaaccacaacatatccactccattttcatgccagttctgtaaagaaagttttcctggccccatccctttgcatcagcatgaacgttacctttgtaagatgaatgaagagatcaaggcggtcctgcagcctcatgaaaacatagtccccaacaaagccggagtttttgttgataataaagccctcctcttgtcatctgtactttctgagaaaggaatgacaagccccatcaacccatacaaggaccacatgtctgtactcaaagcatactatgctatgaacatggagcccaactccgatgaactgctgaaaatttccattgctgtgggccttcctcaggaatttgtgaaggaatggtttgaacaacgaaaagtctaccagtactcaaattccaggtccccatccctggaaagaagctccaagccgttagctcccaacagtaaccctcccacaaaagactctttattacccaggtctcctgtaaaacctatggactccataacatcaccatctatagcagaactccacaacagtgttacgaattgtgatcctcctctcaggctaacaaaaccttcccattttaccaatattaaaccagttgaaaaattggaccactccaggagtaatactccttctcccttaaatctttcctccacatcttctaaaaactcccacagtagttcatacactccaaacagcttctcttctgaggagctccaggctgagcctttagacttgtcattaccaaaacaaatgaaagaacccaaaagtattatagccacaaagaacaaaacaaaagctagtagcatcagtttagatcataacagtgtttcttcctcatctgaaaactcagatgagcctctgaacttgacttttatcaagaaggaattttcaaattcaaataatctggacaacaaaagcactaacccagtgttcagcatgaacccatttagtgccaaacctttatacacagctcttccacctcaaagcgcatttccccctgctactttcatgccaccagtccagaccagtattcctgggctacgaccatacccaggactggatcagatgagcttcctaccacatatggcctacacctacccaactggagcagctacttttgctgatatgcagcaaaggagaaagtaccagcggaaacaaggatttcagggagaattgcttgatggagcacaagactacatgtcaggcctagatgatatgacagactccgactcctgtctgtctcgcaaaaagatcaagaagacagagagtggcatgtatgcatgtgacttatgtgacaagacattccagaaaagcagttcccttctgcgacataaatacgaacacacaggaaaaagaccacatcagtgtcagatttgtaagaaagcgtttaaacacaagcaccaccttatcgagcactcaaggcttcactcgggcgagaagccctatcagtgtgataaatgtggcaagcgcttctcacactcgggctcgtactcgcagcacatgaatcacaggtattcctactgcaagcgggaggcggaggagcgggaagcggcggagcgcgaggcgcgcgagaaagggcacttggaacccaccgagctgctgatgaaccgggcttacttgcagagcattacccctcaggggtactctgactcggaggagagggagagtatgccgagggatggcgagagcgagaaggagcacgagaaagaaggcgaggatggctacgggaagctgggcagacaggatggcgacgaggagttcgaggaggaagaggaagaaagtgaaaataaaagtatggatacggatcccgaaacgatacgagatgaagaagagactggagatcactccatggacgatagttcggaggatgggaaaatggaaaccaaatcagaccacgaggaagacaatatggaagatggcatgtaataaactactgcattttaagcttcctatttttttttccagtagtattgttacctgcttgaaaacactgctgtgttaagctgttcatgcacgtgcctgacgcttccaggaagctgtagagagggacagaaggggcg

SEQ ID NO: 201363 - DNA, 1514 bp, Homo sapiens
  Payload ID: 19743
  Gene Name: zinc finger E-box binding homeobox 2
  ENST ID: ENST00000392861
  CDS Start-End: 114-1514
atcatttagtagagcttaaaagtattgccgtagtggttggactttctctttcctttcttaagggaaaaaaaaaattctactggaactatttaagggaaccagtgtgggggagcatgtgtgtgagtgagatcgagcctgcgtgctgccgaagcagggcgccgagtccatgcgaactgccatctgatccgctcttatcaatgaagcagccgatcatggcggatggcccccggtgcaagaggcgcaaacaagccaatcccaggaggaaaaacgtggtgaactatgacaatgtagtggacacaggttctgaaacagatgaggaagacaagcttcatattgctgaggatgacggtattgccaaccctctggaccaggagacgagtccagctagtgtgcccaaccatgagtcctccccacacgtgagccaagctctgttgccaagagaggaagaggaagatgaaataagggagggtggagtggaacacccctggcacaacaacgagattctacaagcctctgtagatggtccagaagaaatgaaggaagactatgacactatggggccagaagccacgatccagaccgcaattaacaatggtacagtgaagaatgcaaattgcacatcagattttgaggaatactttgccaaaagaaaactggaggaacgcgatggtcatgcagtcagcatcgaggagtaccttcagcgcagtgacacagccattatttacccagaagcccctgaggagctgtctcgccttggcacgccagaggccaatgggcaagaagaaaatgacctgccacctggaactccagatgcttttgcccaactgctgacctgcccctactgcgaccggggctacaagcgcttgacatcactgaaggagcacatcaagtaccgccacgagaagaatgaagagaacttttcctgccctctctgtagctacacgtttgcctaccgcacccagctcgagcggcatatggtgacacacaagccagggacagatcagcaccaaatgctaacccaaggagcaggtaatcgcaagttcaaatgcacagagtgtggcaaggccttcaaatataaacaccatctgaaagaacacctgcgaattcacagtggtgaaaaaccttacgagtgcccaaactgcaagaaacgtttctcccattctggttcctacagttcgcacatcagcagcaagaaatgtattggtttaatctctgtaaatggccgaatgagaaacaatatcaagacgggttcttcccctaattctgtttcttcttctcctactaattcagccattacccagttaagaaacaagttggagaatggaaaaccacttagtatgtctgaacagacaggcttacttaaaattaaaacagaaccactagacttcaatgactataaagttcttatggctacacacgggtttagtggcactagtccctttatgaatggtgggcttggagccaccagccctttaggagttcatccatctgctcagagtccaatgcagcactta

SEQ ID NO: 201364 - DNA, 5361 bp, Homo sapiens
  Payload ID: 19743
  Gene Name: zinc finger E-box binding homeobox 2
  Uniprot ID: O60315
  ENST ID: ENST00000409487
  CDS Start-End: 284-3928
agaaaagatgagaacgaaaagaaaacctcgcctcaccccaagttcccgagccgggggctgaggacttttcgaaggaaagggtccgcctagccctgagtcaagcggtcttactgtaccgccgtgtgcattccctcatacggtcaggagttatgactcattttgaagatgtaattcttgtctctctgatcccctcgcgggtgcaacacaccaaacaatcgagcctgcgtgctgccgaagcagggcgccgagtccatgcgaactgccatctgatccgctcttatcaatgaagcagccgatcatggcggatggcccccggtgcaagaggcgcaaacaagccaatcccaggaggaaaaacgtggtgaactatgacaatgtagtggacacaggttctgaaacagatgaggaagacaagcttcatattgctgaggatgacggtattgccaaccctctggaccaggagacgagtccagctagtgtgcccaaccatgagtcctccccacacgtgagccaagctctgttgccaagagaggaagaggaagatgaaataagggagggtggagtggaacacccctggcacaacaacgagattctacaagcctctgtagatggtccagaagaaatgaaggaagactatgacactatggggccagaagccacgatccagaccgcaattaacaatggtacagtgaagaatgcaaattgcacatcagattttgaggaatactttgccaaaagaaaactggaggaacgcgatggtcatgcagtcagcatcgaggagtaccttcagcgcagtgacacagccattatttacccagaagcccctgaggagctgtctcgccttggcacgccagaggccaatgggcaagaagaaaatgacctgccacctggaactccagatgcttttgcccaactgctgacctgcccctactgcgaccggggctacaagcgcttgacatcactgaaggagcacatcaagtaccgccacgagaagaatgaagagaacttttcctgccctctctgtagctacacgtttgcctaccgcacccagctcgagcggcatatggtgacacacaagccagggacagatcagcaccaaatgctaacccaaggagcaggtaatcgcaagttcaaatgcacagagtgtggcaaggccttcaaatataaacaccatctgaaagaacacctgcgaattcacagtggtgaaaaaccttacgagtgcccaaactgcaagaaacgtttctcccattctggttcctacagttcgcacatcagcagcaagaaatgtattggtttaatctctgtaaatggccgaatgagaaacaatatcaagacgggttcttcccctaattctgtttcttcttctcctactaattcagccattacccagttaagaaacaagttggagaatggaaaaccacttagtatgtctgaacagacaggcttacttaaaattaaaacagaaccactagacttcaatgactataaagttcttatggctacacacgggtttagtggcactagtccctttatgaatggtgggcttggagccaccagccctttaggagttcatccatctgctcagagtccaatgcagcacttaggtgtagggatggaagcccctttacttgggtttcccaccatgaatagtaatttaagtgaggtacaaaaggttctacagattgtggacaatactgtttccaggcaaaaaatggactgcaaggctgaagaaatttcaaagttgaaaggttatcacatgaaggatccatgctctcaacctgaggaacaaggagttacttctcctaatattccgcctgtcggtcttccggtagtgagtcataatggtgccactaaaagtattattgactatacgttggaaaaagtcaatgaagccaaagcttgcctccagagcttgactactgactcaaggagacagatcagtaatataaagaaagagaagctacgtactttaatagatttggtcactgatgacaaaatgattgagaaccacaacatatccactccattttcatgccagttctgtaaagaaagttttcctggccccatccctttgcatcagcatgaacgttacctttgtaagatgaatgaagagatcaaggcggtcctgcagcctcatgaaaacatagtccccaacaaagccggagtttttgttgataataaagccctcctcttgtcatctgtactttctgagaaaggaatgacaagccccatcaacccatacaaggaccacatgtctgtactcaaagcatactatgctatgaacatggagcccaactccgatgaactgctgaaaatttccattgctgtgggccttcctcaggaatttgtgaaggaatggtttgaacaacgaaaagtctaccagtactcaaattccaggtccccatccctggaaagaagctccaagccgttagctcccaacagtaaccctcccacaaaagactctttattacccaggtctcctgtaaaacctatggactccataacatcaccatctatagcagaactccacaacagtgttacgaattgtgatcctcctctcaggctaacaaaaccttcccattttaccaatattaaaccagttgaaaaattggaccactccaggagtaatactccttctcccttaaatctttcctccacatcttctaaaaactcccacagtagttcatacactccaaacagcttctcttctgaggagctccaggctgagcctttagacttgtcattaccaaaacaaatgaaagaacccaaaagtattatagccacaaagaacaaaacaaaagctagtagcatcagtttagatcataacagtgtttcttcctcatctgaaaactcagatgagcctctgaacttgacttttatcaagaaggaattttcaaattcaaataatctggacaacaaaagcactaacccagtgttcagcatgaacccatttagtgccaaacctttatacacagctcttccacctcaaagcgcatttccccctgctactttcatgccaccagtccagaccagtattcctgggctacgaccatacccaggactggatcagatgagcttcctaccacatatggcctacacctacccaactggagcagctacttttgctgatatgcagcaaaggagaaagtaccagcggaaacaaggatttcagggagaattgcttgatggagcacaagactacatgtcaggcctagatgatatgacagactccgactcctgtctgtctcgcaaaaagatcaagaagacagagagtggcatgtatgcatgtgacttatgtgacaagacattccagaaaagcagttcccttctgcgacataaatacgaacacacaggaaaaagaccacatcagtgtcagatttgtaagaaagcgtttaaacacaagcaccaccttatcgagcactcaaggcttcactcgggcgagaagccctatcagtgtgataaatgtggcaagcgcttctcacactcgggctcgtactcgcagcacatgaatcacaggtattcctactgcaagcgggaggcggaggagcgggaagcggcggagcgcgaggcgcgcgagaaagggcacttggaacccaccgagctgctgatgaaccgggcttacttgcagagcattacccctcaggggtactctgactcggaggagagggagagtatgccgagggatggcgagagcgagaaggagcacgagaaagaaggcgaggatggctacgggaagctgggcagacaggatggcgacgaggagttcgaggaggaagaggaagaaagtgaaaataaaagtatggatacggatcccgaaacgatacgagatgaagaagagactggagatcactccatggacgatagttcggaggatgggaaaatggaaaccaaatcagaccacgaggaagacaatatggaagatggcatgtaataaactactgcattttaagcttcctatttttttttccagtagtattgttacctgcttgaaaacactgctgtgttaagctgttcatgcacgtgcctgacgcttccaggaagctgtagagagggacagaaggggcggttcagccaagacagatgtagacggagttggagctgggtattgttaaaaactgcattatgcaaaaattttgtacagtgttaaggcctaaaaactgtgtggttcagagactaattcctgtgtttaatagcatttatactttaagcacaactagaaaattgtaagaattgcactctacttatgtatcactacaaactttaaaaaactatgtctaatttatattaatacattttaaaaaggtgcccgcactaccatacatcagtatttttattattattattgttattcctttttaatttaatgtgctcgcactacaatgcatcagtattatgattcctctgtactttcctttcgctattcatcaatttcccattttttttttcagcttaagtaaccacacaattttaggcctcaatttttttttttttctgtgaaggaacttgaagtgatgcatgtgtgaatttaagataccgaagtcttaaagtgacctggacgtgaaggaaaaagtaagatgagaaataaagaaagcctttgtaaggtggttttaaaagccttatatgcaaaccttttaatctgtgtttctgcaagtgccatccttgtacagtgttaagagggtaacatgggttacctttgcaccagcttcagtgttaagctcaccctgttctttgaagcacccatgtcagtattagaagaataggcagcagttccttagtttacatatgtttgtgcaattattttctgtacttttttgttcattaattttgtcagtattacaccaaactgtttttgcaacaaaaaaattttttttgcattcatttaattttaggtcaaataacattttatttatgtggctcattttatatttcctaattttatttatttcatactgtagtgtacagtattatagttcttcaatatatagatatattttagtaaaaaaggaacatgacgttgatcatttgggcaaattttacgtaaagagaagagcatttattgtgttttggaacattaattgtgagatgggatttttcaattttattattttatttttgtttttttccaattactggaaattccaaatttgggaacttttgatacgatcttgtgaaaacactgtattttcgactgaaaattccactttcttcatcttgttttttagctaaaaagagggactgttaaatacaatgtatgataccatgacaaaaatctttcctgaattgtctttgtaaaagtattattgaattttcaatttgtaatttcttttgaaaatgaccatgctcgaataaaaatgtagccaaact

SEQ ID NO: 201365 - DNA, 587 bp, Homo sapiens
  Payload ID: 19743
  Gene Name: zinc finger E-box binding homeobox 2
  ENST ID: ENST00000409211
  CDS Start-End: 228-587
atagccccctgtttaaactaatcctcgaggcacagcatcttcccaacctccaccgagttttcaggattctcctcctctcctgcctgcctccgaggtcccccttctccaagttttgacagtttcaactgaaaaaatgcagcgcctctctcgatttttagatcgagcctgcgtgctgccgaagcagggcgccgagtccatgcgaactgccatctgatccgctcttatcaatgaagcagccgatcatggcggatggcccccggtgcaagaggcgcaaacaagccaatcccaggaggaaaaacgtggtgaactatgacaatgtagtggacacaggttctgaaacagatgaggaagacaagcttcatattgctgaggatgacggtattgccaaccctctggaccaggagacgagtccagctagtgtgcccaaccatgagtcctccccacacgtgagccaagctctgttgccaagagaggaagaggaagatgaaataagggagggtggagtggaacacccctggcacaacaacgagattctacaagcctctgtagatggtccagtgaagaatgcaaattgcacatcagatttt

SEQ ID NO: 201366 - DNA, 1755 bp, Homo sapiens
  Payload ID: 19743
  Gene Name: zinc finger E-box binding homeobox 2
  ENST ID: ENST00000419938
  CDS Start-End: 234-896
caggaataacggtcctgcctcccgacactcttggcgaggtttttgtacagtttgctccgggagctgtttcttcgcttccacctttttctcccccacacttcgcggcttcttcatgctttttcttctcaccatttctggccaaaactacaaacaagacttcgcagatcgagcctgcgtgctgccgaagcagggcgccgagtccatgcgaactgccatctgatccgctcttatcaatgaagcagccgatcatggcggatggcccccggtgcaagaggcgcaaacaagccaatcccaggaggaaaaacgtggtgaactatgacaatgtagtggacacaggttctgaaacagatgaggaagacaagcttcatattgctgaggatgacggtattgccaaccctctggaccaggagacgagtccagctagtgtgcccaaccatgagtcctccccacacgtgagccaagctctgttgccaagagaggaagaggaagatgaaataagggagggtggagtggaacacccctggcacaacaacgagattctacaagcctctgtagatggtccagacctgccacctggaactccagatgcttttgcccaactgctgacctgcccctactgcgaccggggctacaagcgcttgacatcactgaaggagcacatcaagtaccgccacgagaagaatgaagagaacttttcctgccctctctgtagctacacgtttgcctaccgcacccagctcgagcggcatatggtgacacacaagccagggacagatcagcaccaaatgctaacccaaggagcaggtaatcgcaagttcaaatgcacagagtgtggcaaggccttcaaatataaacaccatctgaaagaacacctgcgaattcacagtggaacttgaagtgatgcatgtgtgaatttaagataccgaagtcttaaagtgacctggacgtgaaggaaaaagtaagatgagaaataaagaaagcctttgtaaggtggttttaaaagccttatatgcaaaccttttaatctgtgtttctgcaagtgccatccttgtacagtgttaagagggtaacatgggttacctttgcaccagcttcagtgttaagctcaccctgttctttgaagcacccatgtcagtattagaagaataggcagcagttccttagtttacatatgtttgtgcaattattttctgtacttttttgttcattaattttgtcagtattacaccaaactgtttttgcaacaaaaaaattttttttgcattcatttaattttaggtcaaataacattttatttatgtggctcattttatatttcctaattttatttatttcatactgtagtgtacagtattatagttcttcaatatatagatatattttagtaaaaaaggaacatgacgttgatcatttgggcaaattttacgtaaagagaagagcatttattgtgttttggaacattaattgtgagatgggatttttcaattttattattttatttttgtttttttccaattactggaaattccaaatttgggaacttttgatacgatcttgtgaaaacactgtattttcgactgaaaattccactttcttcatcttgttttttagctaaaaagagggactgttaaatacaatgtatgataccatgacaaaaatctttcctgaattgtctttgtaaaagtattattgaattttcaatttgtaatttcttttgaaaatgaccatgctcgaataaaaatgtagccaaactaa

SEQ ID NO: 201367 - DNA, 2236 bp, Homo sapiens
  Payload ID: 19743
  Gene Name: zinc finger E-box binding homeobox 2
  ENST ID: ENST00000427902
  CDS Start-End: 43-2236
ttactgtaccgccgtgtgcattccctcatacggtcaggagttatgactcattttgaagatatcgagcctgcgtgctgccgaagcagggcgccgagtccatgcgaactgccatctgatccgctcttatcaatgaagcagccgatcatggcggatggcccccggtgcaagaggcgcaaacaagccaatcccaggaggaaaaacgtggtgaactatgacaatgtagtggacacaggttctgaaacagatgaggaagacaagcttcatattgctgaggatgacggtattgccaaccctctggaccaggagacgagtccagctagtgtgcccaaccatgagtcctccccacacgtgagccaagctctgttgccaagagaggaagaggaagatgaaataagggagggtggagtggaacacccctggcacaacaacgagattctacaagcctctgtagatggtccagaagaaatgaaggaagactatgacactatggggccagaagccacgatccagaccgcaattaacaatggtacagtgaagaatgcaaattgcacatcagattttgaggaatactttgccaaaagaaaactggaggaacgcgatggtcatgcagtcagcatcgaggagtaccttcagcgcagtgacacagccattatttacccagaagcccctgaggagctgtctcgccttggcacgccagaggccaatgggcaagaagaaaatgacctgccacctggaactccagatgcttttgcccaactgctgacctgcccctactgcgaccggggctacaagcgcttgacatcactgaaggagcacatcaagtaccgccacgagaagaatgaagagaacttttcctgccctctctgtagctacacgtttgcctaccgcacccagctcgagcggcatatggtgacacacaagccagggacagatcagcaccaaatgctaacccaaggagcaggtaatcgcaagttcaaatgcacagagtgtggcaaggccttcaaatataaacaccatctgaaagaacacctgcgaattcacagtggtgaaaaaccttacgagtgcccaaactgcaagaaacgtttctcccattctggttcctacagttcgcacatcagcagcaagaaatgtattggtttaatctctgtaaatggccgaatgagaaacaatatcaagacgggttcttcccctaattctgtttcttcttctcctactaattcagccattacccagttaagaaacaagttggagaatggaaaaccacttagtatgtctgaacagacaggcttacttaaaattaaaacagaaccactagacttcaatgactataaagttcttatggctacacacgggtttagtggcactagtccctttatgaatggtgggcttggagccaccagccctttaggagttcatccatctgctcagagtccaatgcagcacttaggtgtagggatggaagcccctttacttgggtttcccaccatgaatagtaatttaagtgaggtacaaaaggttctacagattgtggacaatactgtttccaggcaaaaaatggactgcaaggctgaagaaatttcaaagttgaaaggttatcacatgaaggatccatgctctcaacctgaggaacaaggagttacttctcctaatattccgcctgtcggtcttccggtagtgagtcataatggtgccactaaaagtattattgactatacgttggaaaaagtcaatgaagccaaagcttgcctccagagcttgactactgactcaaggagacagatcagtaatataaagaaagagaagctacgtactttaatagatttggtcactgatgacaaaatgattgagaaccacaacatatccactccattttcatgccagttctgtaaagaaagttttcctggccccatccctttgcatcagcatgaacgttacctttgtaagatgaatgaagagatcaaggcggtcctgcagcctcatgaaaacatagtccccaacaaagccggagtttttgttgataataaagccctcctcttgtcatctgtactttctgagaaaggaatgacaagccccatcaacccatacaaggaccacatgtctgtactcaaagcatactatgctatgaacatggagcccaactccgatgaactgctgaaaatttccattgctgtgggccttcctcaggaatttgtgaaggaatggtttgaacaacgaaaagtctaccagtactcaaatt

SEQ ID NO: 201368 - DNA, 577 bp, Homo sapiens
  Payload ID: 19743
  Gene Name: zinc finger E-box binding homeobox 2
  ENST ID: ENST00000444559
  CDS Start-End: 389-577
ggaggtggaatttcatttcttccactaaagcgtttgcggagacttcaagaaaagaaaaagaaaaaaatgtcattagaagaggcgtaacacgtcagtccgtccccaggtttgtgtttcctggagtggccgaaagagatcagttctaacctgctctgcaggaataacggtcctgcctcccgacactcttggcgaggtttttgtacagtttgctccgggagctgtttcttcgcttccacctttttctcccccacacttcgcggcttcttcatgctttttcttctcaccatttctggccaaaactacaaacaagacttcgcagatcgagcctgcgtgctgccgaagcagggcgccgagtccatgcgaactgccatctgatccgctcttatcaatgaagcagccgatcatggcggatggcccccggtgcaagaggcgcaaacaagccaatcccaggaggaaaaacgtggtgaactatgacaatgtagtggacacaggttctgaaacagatgaggaagacaagcttcatattgctgaggatgacggtattgccaaccctctggaccaggagacgagtccagct

SEQ ID NO: 201369 - DNA, 554 bp, Homo sapiens
  Payload ID: 19743
  Gene Name: zinc finger E-box binding homeobox 2
  ENST ID: ENST00000435831
  CDS Start-End: 281-554
gtgcttcatccaggggctgtttcgcgttgtttgtttgtttgtttcctctgggaattggggggtggggggatgagaaaagatgagaacgaaaagaaaacctcgcctcaccccaagttcccgagccgggggctgaggacttttcgaaggaaagggtccgcctagccctgagtcaagcggtcttactgtaccgccgtgtgcattccctcatacgatcgagcctgcgtgctgccgaagcagggcgccgagtccatgcgaactgccatctgatccgctcttatcaatgaagcagccgatcatggcggatggcccccggtgcaagaggcgcaaacaagccaatcccaggaggaaaaacgtggtgaactatgacaatgtagtggacacaggttctgaaacagatgaggaagacaagcttcatattgctgaggatgacggtattgccaaccctctggaccaggagacgagtccagctagtgtgcccaaccatgagtcctccccacacgtgagccaagctctgttgccaagagaggaagaggaagatgaaataagggagggtg

SEQ ID NO: 201370 - DNA, 4061 bp, Homo sapiens
  Payload ID: 19743
  Gene Name: zinc finger E-box binding homeobox 2
  Uniprot ID: O60315
  ENST ID: ENST00000539609
  CDS Start-End: 251-3823
agttctaacctgctctgcaggaataacggtcctgcctcccgacactcttggcgaggtttttgtacagtttgctccgggagctgtttcttcgcttccacctttttctcccccacacttcgcggcttcttcatgctttttcttctcaccatttctggccaaaactacaaacaagacttcgcagatcgagcctgcgtgctgccgaagcagggcgccgagtccatgcgaactgccatctgatccgctcttatcaatgaagcagccgatcatggcggatggcccccggtgcaagaggcgcaaacaagccaatcccaggaggaaaaacgtggtgaactatgacaatgtagtggacacaggttctgaaacagatgaggaagacaagcttcatattgctgaggatgacggtattgccaaccctctggaccaggagacgagtccagctagtgtgcccaaccatgagtcctccccacacgtgagccaagctctgttgccaagagaggaagaggaagatgaaataagggagggtggagtggaacacccctggcacaacaacgagattctacaagcctctgtagatggtccagtgaagaatgcaaattgcacatcagattttgaggaatactttgccaaaagaaaactggaggaacgcgatggtcatgcagtcagcatcgaggagtaccttcagcgcagtgacacagccattatttacccagaagcccctgaggagctgtctcgccttggcacgccagaggccaatgggcaagaagaaaatgacctgccacctggaactccagatgcttttgcccaactgctgacctgcccctactgcgaccggggctacaagcgcttgacatcactgaaggagcacatcaagtaccgccacgagaagaatgaagagaacttttcctgccctctctgtagctacacgtttgcctaccgcacccagctcgagcggcatatggtgacacacaagccagggacagatcagcaccaaatgctaacccaaggagcaggtaatcgcaagttcaaatgcacagagtgtggcaaggccttcaaatataaacaccatctgaaagaacacctgcgaattcacagtggtgaaaaaccttacgagtgcccaaactgcaagaaacgtttctcccattctggttcctacagttcgcacatcagcagcaagaaatgtattggtttaatctctgtaaatggccgaatgagaaacaatatcaagacgggttcttcccctaattctgtttcttcttctcctactaattcagccattacccagttaagaaacaagttggagaatggaaaaccacttagtatgtctgaacagacaggcttacttaaaattaaaacagaaccactagacttcaatgactataaagttcttatggctacacacgggtttagtggcactagtccctttatgaatggtgggcttggagccaccagccctttaggagttcatccatctgctcagagtccaatgcagcacttaggtgtagggatggaagcccctttacttgggtttcccaccatgaatagtaatttaagtgaggtacaaaaggttctacagattgtggacaatactgtttccaggcaaaaaatggactgcaaggctgaagaaatttcaaagttgaaaggttatcacatgaaggatccatgctctcaacctgaggaacaaggagttacttctcctaatattccgcctgtcggtcttccggtagtgagtcataatggtgccactaaaagtattattgactatacgttggaaaaagtcaatgaagccaaagcttgcctccagagcttgactactgactcaaggagacagatcagtaatataaagaaagagaagctacgtactttaatagatttggtcactgatgacaaaatgattgagaaccacaacatatccactccattttcatgccagttctgtaaagaaagttttcctggccccatccctttgcatcagcatgaacgttacctttgtaagatgaatgaagagatcaaggcggtcctgcagcctcatgaaaacatagtccccaacaaagccggagtttttgttgataataaagccctcctcttgtcatctgtactttctgagaaaggaatgacaagccccatcaacccatacaaggaccacatgtctgtactcaaagcatactatgctatgaacatggagcccaactccgatgaactgctgaaaatttccattgctgtgggccttcctcaggaatttgtgaaggaatggtttgaacaacgaaaagtctaccagtactcaaattccaggtccccatccctggaaagaagctccaagccgttagctcccaacagtaaccctcccacaaaagactctttattacccaggtctcctgtaaaacctatggactccataacatcaccatctatagcagaactccacaacagtgttacgaattgtgatcctcctctcaggctaacaaaaccttcccattttaccaatattaaaccagttgaaaaattggaccactccaggagtaatactccttctcccttaaatctttcctccacatcttctaaaaactcccacagtagttcatacactccaaacagcttctcttctgaggagctccaggctgagcctttagacttgtcattaccaaaacaaatgaaagaacccaaaagtattatagccacaaagaacaaaacaaaagctagtagcatcagtttagatcataacagtgtttcttcctcatctgaaaactcagatgagcctctgaacttgacttttatcaagaaggaattttcaaattcaaataatctggacaacaaaagcactaacccagtgttcagcatgaacccatttagtgccaaacctttatacacagctcttccacctcaaagcgcatttccccctgctactttcatgccaccagtccagaccagtattcctgggctacgaccatacccaggactggatcagatgagcttcctaccacatatggcctacacctacccaactggagcagctacttttgctgatatgcagcaaaggagaaagtaccagcggaaacaaggatttcagggagaattgcttgatggagcacaagactacatgtcaggcctagatgatatgacagactccgactcctgtctgtctcgcaaaaagatcaagaagacagagagtggcatgtatgcatgtgacttatgtgacaagacattccagaaaagcagttcccttctgcgacataaatacgaacacacaggaaaaagaccacatcagtgtcagatttgtaagaaagcgtttaaacacaagcaccaccttatcgagcactcaaggcttcactcgggcgagaagccctatcagtgtgataaatgtggcaagcgcttctcacactcgggctcgtactcgcagcacatgaatcacaggtattcctactgcaagcgggaggcggaggagcgggaagcggcggagcgcgaggcgcgcgagaaagggcacttggaacccaccgagctgctgatgaaccgggcttacttgcagagcattacccctcaggggtactctgactcggaggagagggagagtatgccgagggatggcgagagcgagaaggagcacgagaaagaaggcgaggatggctacgggaagctgggcagacaggatggcgacgaggagttcgaggaggaagaggaagaaagtgaaaataaaagtatggatacggatcccgaaacgatacgagatgaagaagagactggagatcactccatggacgatagttcggaggatgggaaaatggaaaccaaatcagaccacgaggaagacaatatggaagatggcatgtaataaactactgcattttaagcttcctatttttttttccagtagtattgttacctgcttgaaaacactgctgtgttaagctgttcatgcacgtgcctgacgcttccaggaagctgtagagagggacagaaggggcggttcagccaagacagatgtagacggagttggagctgggtattgttaaaaactgcattatgcaaaaattttgtacagtgttaaggcctaaaaactgtgtggttca

SEQ ID NO: 201371 - DNA, 4012 bp, Homo sapiens
  Payload ID: 19743
  Gene Name: zinc finger E-box binding homeobox 2
  Uniprot ID: O60315
  ENST ID: ENST00000558170
  CDS Start-End: 202-3846
cgaagtttcgctttggcgttggggggcgcggatgggtgctcgccggggccctggcccggctcccctgggcggcccgcgcgcgtttcaatgggcgcgggcgatgcccacattgtcgctgtgtttggttgctagatcgagcctgcgtgctgccgaagcagggcgccgagtccatgcgaactgccatctgatccgctcttatcaatgaagcagccgatcatggcggatggcccccggtgcaagaggcgcaaacaagccaatcccaggaggaaaaacgtggtgaactatgacaatgtagtggacacaggttctgaaacagatgaggaagacaagcttcatattgctgaggatgacggtattgccaaccctctggaccaggagacgagtccagctagtgtgcccaaccatgagtcctccccacacgtgagccaagctctgttgccaagagaggaagaggaagatgaaataagggagggtggagtggaacacccctggcacaacaacgagattctacaagcctctgtagatggtccagaagaaatgaaggaagactatgacactatggggccagaagccacgatccagaccgcaattaacaatggtacagtgaagaatgcaaattgcacatcagattttgaggaatactttgccaaaagaaaactggaggaacgcgatggtcatgcagtcagcatcgaggagtaccttcagcgcagtgacacagccattatttacccagaagcccctgaggagctgtctcgccttggcacgccagaggccaatgggcaagaagaaaatgacctgccacctggaactccagatgcttttgcccaactgctgacctgcccctactgcgaccggggctacaagcgcttgacatcactgaaggagcacatcaagtaccgccacgagaagaatgaagagaacttttcctgccctctctgtagctacacgtttgcctaccgcacccagctcgagcggcatatggtgacacacaagccagggacagatcagcaccaaatgctaacccaaggagcaggtaatcgcaagttcaaatgcacagagtgtggcaaggccttcaaatataaacaccatctgaaagaacacctgcgaattcacagtggtgaaaaaccttacgagtgcccaaactgcaagaaacgtttctcccattctggttcctacagttcgcacatcagcagcaagaaatgtattggtttaatctctgtaaatggccgaatgagaaacaatatcaagacgggttcttcccctaattctgtttcttcttctcctactaattcagccattacccagttaagaaacaagttggagaatggaaaaccacttagtatgtctgaacagacaggcttacttaaaattaaaacagaaccactagacttcaatgactataaagttcttatggctacacacgggtttagtggcactagtccctttatgaatggtgggcttggagccaccagccctttaggagttcatccatctgctcagagtccaatgcagcacttaggtgtagggatggaagcccctttacttgggtttcccaccatgaatagtaatttaagtgaggtacaaaaggttctacagattgtggacaatactgtttccaggcaaaaaatggactgcaaggctgaagaaatttcaaagttgaaaggttatcacatgaaggatccatgctctcaacctgaggaacaaggagttacttctcctaatattccgcctgtcggtcttccggtagtgagtcataatggtgccactaaaagtattattgactatacgttggaaaaagtcaatgaagccaaagcttgcctccagagcttgactactgactcaaggagacagatcagtaatataaagaaagagaagctacgtactttaatagatttggtcactgatgacaaaatgattgagaaccacaacatatccactccattttcatgccagttctgtaaagaaagttttcctggccccatccctttgcatcagcatgaacgttacctttgtaagatgaatgaagagatcaaggcggtcctgcagcctcatgaaaacatagtccccaacaaagccggagtttttgttgataataaagccctcctcttgtcatctgtactttctgagaaaggaatgacaagccccatcaacccatacaaggaccacatgtctgtactcaaagcatactatgctatgaacatggagcccaactccgatgaactgctgaaaatttccattgctgtgggccttcctcaggaatttgtgaaggaatggtttgaacaacgaaaagtctaccagtactcaaattccaggtccccatccctggaaagaagctccaagccgttagctcccaacagtaaccctcccacaaaagactctttattacccaggtctcctgtaaaacctatggactccataacatcaccatctatagcagaactccacaacagtgttacgaattgtgatcctcctctcaggctaacaaaaccttcccattttaccaatattaaaccagttgaaaaattggaccactccaggagtaatactccttctcccttaaatctttcctccacatcttctaaaaactcccacagtagttcatacactccaaacagcttctcttctgaggagctccaggctgagcctttagacttgtcattaccaaaacaaatgaaagaacccaaaagtattatagccacaaagaacaaaacaaaagctagtagcatcagtttagatcataacagtgtttcttcctcatctgaaaactcagatgagcctctgaacttgacttttatcaagaaggaattttcaaattcaaataatctggacaacaaaagcactaacccagtgttcagcatgaacccatttagtgccaaacctttatacacagctcttccacctcaaagcgcatttccccctgctactttcatgccaccagtccagaccagtattcctgggctacgaccatacccaggactggatcagatgagcttcctaccacatatggcctacacctacccaactggagcagctacttttgctgatatgcagcaaaggagaaagtaccagcggaaacaaggatttcagggagaattgcttgatggagcacaagactacatgtcaggcctagatgatatgacagactccgactcctgtctgtctcgcaaaaagatcaagaagacagagagtggcatgtatgcatgtgacttatgtgacaagacattccagaaaagcagttcccttctgcgacataaatacgaacacacaggaaaaagaccacatcagtgtcagatttgtaagaaagcgtttaaacacaagcaccaccttatcgagcactcaaggcttcactcgggcgagaagccctatcagtgtgataaatgtggcaagcgcttctcacactcgggctcgtactcgcagcacatgaatcacaggtattcctactgcaagcgggaggcggaggagcgggaagcggcggagcgcgaggcgcgcgagaaagggcacttggaacccaccgagctgctgatgaaccgggcttacttgcagagcattacccctcaggggtactctgactcggaggagagggagagtatgccgagggatggcgagagcgagaaggagcacgagaaagaaggcgaggatggctacgggaagctgggcagacaggatggcgacgaggagttcgaggaggaagaggaagaaagtgaaaataaaagtatggatacggatcccgaaacgatacgagatgaagaagagactggagatcactccatggacgatagttcggaggatgggaaaatggaaaccaaatcagaccacgaggaagacaatatggaagatggcatgtaataaactactgcattttaagcttcctatttttttttccagtagtattgttacctgcttgaaaacactgctgtgttaagctgttcatgcacgtgcctgacgcttccaggaagctgtagagagggacagaaggggcggttcagccaagacagatgtagacggagttgga

SEQ ID NO: 201372 - DNA, 709 bp, Homo sapiens
  Payload ID: 19743
  Gene Name: zinc finger E-box binding homeobox 2
  ENST ID: ENST00000431672
  CDS Start-End: 157-709
gggccctggcccggctcccctgggcggcccgcgcgcgtttcaatgggcgcgggcgatgcccacattgtcgctgtgtttggttgctagatcgagcctgcgtgctgccgaagcagggcgccgagtccatgcgaactgccatctgatccgctcttatcaatgaagcagccgatcatggcggatggcccccggtgcaagaggcgcaaacaagccaatcccaggaggaaaaacgtggtgaactatgacaatgtagtggacacaggttctgaaacagatgaggaagacaagcttcatattgctgaggatgacggtattgccaaccctctggaccaggagacgagtccagctagtgtgcccaaccatgagtcctccccacacgtgagccaagctctgttgccaagagaggaagaggaagatgaaataagggagggtggagtggaacacccctggcacaacaacgagattctacaagcctctgtagatggtccagtgaagaatgcaaattgcacatcagattttgaggaatactttgccaaaagaaaactggaggaacgcgatggtcatgcagtcagcatcgaggagtaccttcagcgcagtgacacagccattatttacccagaagcccctgaggagctgtctcgccttggcacgccagaggccaatgggcaagaagaaaatgacctgccacctggaactccagatgcttttgccc

SEQ ID NO: 201373 - DNA, 2648 bp, Homo sapiens
  Payload ID: 19743
  Gene Name: zinc finger E-box binding homeobox 2
  ENST ID: ENST00000470879
  CDS Start-End: 80-343
gaaggaaagggtccgcctagccctgagtcaagcggtcttactgtaccgccgtgtgcattccctcatacggtcaggagttatgactcattttgaagatatcgagcctgcgtgctgccgaagcagggcgccgagtccatgcgaactgccatctgatccgctcttatcaatgaagcagccgatcatggcggatggcccccggtgcaagaggcgcaaacaagccaatcccaggaggaaaaacgccttggagtcagaaatgagcactcggagcgggagatgccctgctgctgcttgccaccggtgcggcccgtttgtaacttgcaaagtttgttgcttttgcccctgattcgggcagcgggtcctgggatgctcctgcttccctcctgcctcccacggagcccgggaagagggtctgcctccccatcccgccaccttccagcatcagcctctgaaaaatctcacagagacatgcacgttgtagcaaaaatcaaatccggaaactgcttgtttcagagaaagaaatgaagttgtcttttaaagaaaaactgaattaggaggagagaaaagggaaataggagaagaaaggaaaagttaaatttgatttttctccagagtttccactaaagggttggggacagtgtgaaggagaaggggagctttttacaaatgcctttggtctctgaacttcagtggcaaagaacagggatcaagttgaatgttctcagggctttggatcctagaggagaaacaatcagaagagcagaaatggttatccctgtttaaaataagccctcactctttaccacttccttaaaggagtggaggtgctggtagtgatggttagaggcaatgagggacggagaagttgctcccgtttcagagatgcttaaatgaaaaggaaagaaaatgcagtcaaccccttctccaggaggtgcctcctagctctcctccctgagaggtgaagttgggatggggcaacgagagtcatacacacttagacaaggaagtttccttcggatcactgtcagtccagacttggttatctttgcaaagtgtggaaatctttggcaagtagctttcttcgtaaagttgatgagcttctagggagcctgttttgctgactttcaaagcactggggcaggttgtgtggcaggtaccagttctgagggcgctccaaagatatccatctccatccttttttctctgtggagatcttctgcaagttttgtcacgctgcacacacacaaggctgggggctatgtatctaggctgatctatttgttttattttggtctggaaaaactaagccaattggggtagaaacatgctttccttcgtagcagagccagtaggctgctggtgtccatagagtgacagtccaccaggactaagggtgggctgaggattttaaactttacattgtttctctgttaccagatacaaataaattcacgtcttccaccatttgttttcaaatagggtaaaaccaagattaaagttccctgctcaactgctatgtcataggtttcagtgtttcccttccttcttaatttgcttaaagaaaattccaagaggttattaaagaccttgatgccatattaagaatatttcctgggaaaaatgtatgtctaccctgaaggtaggaaaggagggcgttgctagcctctagcagtgccgcgtttattctaagatgtgggagattcttttccttgcaacagtttttgtcatctgcattcttccaaggcttttaaggtgcattttcttctgtgtgaaaggaaattctttgtccttttcctctcagcaccgtggcttcccaaggtagacactattttgtgcctgtcacagagagagggagtgcaggtttgcaatgctcacagacaattgattgtctgccctaatgtgtttcatttacatgtttataacgtcaatggtgctggggtgtccactgtaccattcattcccgcattcccacaagggggcaattgtctgaatggccaagtcagacacctttttgattgctctttggttgtcttttcagagcaaagagataaaggaggaaaatctgtgatgcagaaacactagttgaaaatatacagaattaaatgtcaccacaaaagcagatgttaacataagcccaaatatgctttttagccaagatgtgaaggttgaaaaaaataattcagagcagagggaaggatgatttaaaccaataaatatagccctattccccctctttacttcttttctgtctttagcaatcagaagatgaaatgtaattttccttttcatttttaagccttgaaacatccaggcacctcctcattatttgtatgtttgctgtgatttgtgaattttgtatatatttacatagctctgtttatgccaacagcatcagcttaccacttggaaaatctattgaatgactatttgggctgtggggagggtaaacttttaaaaagtaagatccaagtatttcttcatcaagcagtttttaaaaggaaaacgataataatcagtaggctccatggaagcctttgccttaatagctatgtgccaaatacttttatcttgtgtgacagtcatgtcagagtgaaatctctcaggaaaagtgtaactagtagttacaaagtaaataaaggatttcattttaa

SEQ ID NO: 201374 - DNA, 656 bp, Homo sapiens
  Payload ID: 19743
  Gene Name: zinc finger E-box binding homeobox 2
  ENST ID: ENST00000462355
  CDS Start-End: 209-385
aaagggtccgcctagccctgagtcaagcggtcttactgtaccgccgtgtgcattccctcatacggtcaggagttatgactcattttgaagatgtaattcttgtctctctgatcccctcgcgggtgcaacacaccaaacaatcgagcctgcgtgctgccgaagcagggcgccgagtccatgcgaactgccatctgatccgctcttatcaatgaagcagccgatcatggcggatggcccccggtgcaagaggcgcaaacaagccaatcccaggaggaaaaacgccttggagtcagaaatgagcactcggagcgggagatgccctgctgctgcttgccaccggtgcggcccgtttgtaacttgcaaagtttgttgcttttgcccctgattcgggcagcgggtcctgggatgctcctgcttccctcctgcctcccacggagcccgggaagagggtctgcctccccatcccgccaccttccagcatcagcctctgaaaaatctcacagagacatgcacgttgtagcaaaaatcaaatccggaaactgcttgtttcagagaaagaaatgaagttgtcttttaaagaaaaactgaattaggaggagagaaaagggaaataggagaagaaaggaaaagttaaatttgatttttctccagagttt

SEQ ID NO: 201375 - DNA, 2949 bp, Homo sapiens
  Payload ID: 19743
  Gene Name: zinc finger E-box binding homeobox 2
  ENST ID: ENST00000465070
  CDS Start-End: 464-640
ctttcccagagagaaacttggcgatcacgttttcacatgatgctcacgctcagggcgcttcaattatccctccccacaaagataggtggcgcgtgtttcagggtctctcgtctctctcctacagaaaagaaaaagaaaaaaatgtcattagaagaggcgtaacacgtcagtccgtccccaggtttgtgtttcctggagtggccgaaagagatcagttctaacctgctctgcaggaataacggtcctgcctcccgacactcttggcgaggtttttgtacagtttgctccgggagctgtttcttcgcttccacctttttctcccccacacttcgcggcttcttcatgctttttcttctcaccatttctggccaaaactacaaacaagacttcgcagatcgagcctgcgtgctgccgaagcagggcgccgagtccatgcgaactgccatctgatccgctcttatcaatgaagcagccgatcatggcggatggcccccggtgcaagaggcgcaaacaagccaatcccaggaggaaaaacgccttggagtcagaaatgagcactcggagcgggagatgccctgctgctgcttgccaccggtgcggcccgtttgtaacttgcaaagtttgttgcttttgcccctgattcgggcagcgggtcctgggatgctcctgcttccctcctgcctcccacggagcccgggaagagggtctgcctccccatcccgccaccttccagcatcagcctctgaaaaatctcacagagacatgcacgttgtagcaaaaatcaaatccggaaactgcttgtttcagagaaagaaatgaagttgtcttttaaagaaaaactgaattaggaggagagaaaagggaaataggagaagaaaggaaaagttaaatttgatttttctccagagtttccactaaagggttggggacagtgtgaaggagaaggggagctttttacaaatgcctttggtctctgaacttcagtggcaaagaacagggatcaagttgaatgttctcagggctttggatcctagaggagaaacaatcagaagagcagaaatggttatccctgtttaaaataagccctcactctttaccacttccttaaaggagtggaggtgctggtagtgatggttagaggcaatgagggacggagaagttgctcccgtttcagagatgcttaaatgaaaaggaaagaaaatgcagtcaaccccttctccaggaggtgcctcctagctctcctccctgagaggtgaagttgggatggggcaacgagagtcatacacacttagacaaggaagtttccttcggatcactgtcagtccagacttggttatctttgcaaagtgtggaaatctttggcaagtagctttcttcgtaaagttgatgagcttctagggagcctgttttgctgactttcaaagcactggggcaggttgtgtggcaggtaccagttctgagggcgctccaaagatatccatctccatccttttttctctgtggagatcttctgcaagttttgtcacgctgcacacacacaaggctgggggctatgtatctaggctgatctatttgttttattttggtctggaaaaactaagccaattggggtagaaacatgctttccttcgtagcagagccagtaggctgctggtgtccatagagtgacagtccaccaggactaagggtgggctgaggattttaaactttacattgtttctctgttaccagatacaaataaattcacgtcttccaccatttgttttcaaatagggtaaaaccaagattaaagttccctgctcaactgctatgtcataggtttcagtgtttcccttccttcttaatttgcttaaagaaaattccaagaggttattaaagaccttgatgccatattaagaatatttcctgggaaaaatgtatgtctaccctgaaggtaggaaaggagggcgttgctagcctctagcagtgccgcgtttattctaagatgtgggagattcttttccttgcaacagtttttgtcatctgcattcttccaaggcttttaaggtgcattttcttctgtgtgaaaggaaattctttgtccttttcctctcagcaccgtggcttcccaaggtagacactattttgtgcctgtcacagagagagggagtgcaggtttgcaatgctcacagacaattgattgtctgccctaatgtgtttcatttacatgtttataacgtcaatggtgctggggtgtccactgtaccattcattcccgcattcccacaagggggcaattgtctgaatggccaagtcagacacctttttgattgctctttggttgtcttttcagagcaaagagataaaggaggaaaatctgtgatgcagaaacactagttgaaaatatacagaattaaatgtcaccacaaaagcagatgttaacataagcccaaatatgctttttagccaagatgtgaaggttgaaaaaaataattcagagcagagggaaggatgatttaaaccaataaatatagccctattccccctctttacttcttttctgtctttagcaatcagaagatgaaatgtaattttccttttcatttttaagccttgaaacatccaggcacctcctcattatttgtatgtttgctgtgatttgtgaattttgtatatatttacatagctctgtttatgccaacagcatcagcttaccacttggaaaatctattgaatgactatttgggctgtggggagggtaaacttttaaaaagtaagatccaagtatttcttcatcaagcagtttttaaaaggaaaacgataataatcagtaggctccatggaagcctttgccttaatagctatgtgccaaatacttttatcttgtgtgacagtcatgtcagagtgaaatctctcaggaaaagtgtaactagtagttacaaagtaaataaaggatttcattttaaggtg
